(19) United States
(12) Patent Application Publication
(10) Pub. No.: US 2026/0117211 A1
(43) Pub. Date: Apr. 30, 2026

(54) REPROGRAMMABLE ISCB NUCLEASES AND USES THEREOF

(71) Applicants: THE BROAD INSTITUTE, INC., Cambridge, MA (US); MASSACHUSETTS INSTITUTE OF TECHNOLOGY, Cambridge, MA (US)

(72) Inventors: Feng Zhang, Cambridge, MA (US); Han Altae-Tran, Cambridge, MA (US); Soumya Kannan, Cambridge, MA (US)

(21) Appl. No.: 18/712,779

(22) PCT Filed: Nov. 22, 2022
(86) PCT No.: PCT/US2022/080350

§ 371 Date: May 23, 2024

Related U.S. Application Data
(60) Provisional application No. 63/282,533, filed on Nov. 23, 2021.

(51) Int. Cl. C12N 9/22; C12N 5/10; C12N 15/113; C12N 15/63

(52) U.S. Cl. CPC C12N 9/22; C12N 5/10; C12N 15/113; C12N 15/63; C12Y 301/21; C12N 2510/00

(57) ABSTRACT

Systems, methods and compositions for targeting polynucleotides are detailed herein. In particular, engineered DNA-targeting systems comprising IscB polypeptides, novel IscB nucleases and reprogrammable targeting nucleic acid components and methods and application of use are rovided.

### RELATED APPLICATIONS AND INCORPORATION BY REFERENCE

[0001] This application claims the benefit of U.S. Provisional Application No. 63/282,533, filed Nov. 23, 2021. The entire contents of the above-identified applications are hereby fully incorporated herein by reference.

### STATEMENT AS TO FEDERALLY SPONSORED RESEARCH

[0002] This invention was made with government support under Grant Nos. HL141201 and HG009761 awarded by The National Institutes of Health. The government has certain rights in the invention.

### CROSS-REFERENCE TO RELATED APPLICATIONS

[0003] Reference is made to International Patent Application PCT/US2021/056361, filed Oct. 22, 2021, entitled “Reprogrammable IscB Polypeptide Nucleases and Use Thereof”; U.S. Provisional Application No. 63/105,191, filed Oct. 23, 2020, entitled “Reprogrammable IscB Polypeptide Nucleases and Use Thereof”, U.S. Provisional No. 63/105,177, filed Oct. 23, 2020, entitled “Nucleic Acid-Guided Nucleases and Use Thereof,” U.S. Provisional Application No. 63/156,857, filed Mar. 4, 2021, entitled “Reprogrammable IscB Polypeptide Nucleases and Use Thereof”, U.S. Provisional Application No. 63/195,659, filed Jun. 1, 2021, entitled “Reprogrammable IscB Polypeptide Nucleases and Use Thereof”, and U.S. Provisional Application No. 63/235,583, filed Aug. 20, 2021, entitled “Reprogrammable IscB Polypeptide Nucleases and Use Thereof”, the contents of which are incorporated by reference in their entireties herein.

### REFERENCE TO AN ELECTRONIC SEQUENCE LISTING

[0004] The contents of the electronic sequence listing (“BROD-5490WP_ST26.xml”; Size is 40,118,330 bytes and it was created on Nov. 22, 2022) is herein incorporated by reference in its entirety.

### TECHNICAL FIELD

[0005] The subject matter disclosed herein is generally directed to systems, methods and compositions used for targeted gene modification and nucleic acid editing utilizing systems comprising Isc polypeptides. In particular, the present disclosure provides DNA or RNA-targeting compositions comprising novel DNA or RNA-targeting nucleases and at least one targeting nucleic acid component.

### BACKGROUND

[0006] While there are genome-editing techniques available for producing targeted genome perturbations, there remains a pressing need for new and alternative genome engineering technologies that employ robust novel strategies and molecular mechanisms and are affordable, easy to set up, scalable, and amenable to targeting multiple positions within the genome. The CRISPR-Cas systems of bacterial and archaeal adaptive immunity are some such systems that show extreme diversity of protein composition and genomic loci architecture. These additional desirable tools in genome engineering and biotechnology would further advance the art.

[0007] Citation or identification of any document in this application is not an admission that such a document is available as prior art to the present invention.

### SUMMARY

[0008] In certain example embodiments, non-naturally occurring, engineered compositions comprising an IscB polypeptide comprising a split Ruv-C nuclease domain comprising Ruv-C I, Ruv-CII, and Ruv-CIII subdomains, an HNH domain or both and b) an ωRNA molecule comprising a scaffold and a reprogrammable spacer sequence, the ωRNA molecule capable of forming a complex with the IscB polypeptide and directing the IscB polypeptide to a target polynucleotide.

[0009] The IscB polypeptides may further comprise a N-terminal PLMP domain and/or a conserved C-terminal domain.

[0010] In one embodiment, the IscB polypeptides comprise both a HNH and a split RuvC domain. The HNH domain is located between the Ruv-C II and RuvC-III subdomains. In other embodiments, the IscB polypeptide comprises a split RuvC domain but no HNH domain. In yet other embodiments, the IscB polypeptide comprises a split RuvC domain and no HNH domain.

[0011] In embodiments, the IscB polypeptide comprises about 170 to about 600 amino acids. The composition may comprise a reprogrammable spacer sequence of 10 nucleotides to 150 nucleotides in length, more preferably about 15 to 45 nucleotides in length. In embodiments, the TAM sequence is 3′ of the target polynucleotide.

[0012] In embodiments, the target polynucleotide is DNA. In an aspect, the ωRNA further comprises an aptamer. In an embodiment, the ωRNA molecule further comprises an extension to add an RNA template.

[0013] In embodiments, the composition of may comprising a functional domain associated with the IscB protein. In an aspect, the functional domain has transposase activity, methylase activity, demethylase activity, translation activation activity, translation repression activity, transcription activation activity, transcription repression activity, transcription release factor activity, chromatin modifying or remodeling activity, histone modification activity, nuclease activity, single-strand RNA cleavage activity, double-strand RNA cleavage activity, single-strand DNA cleavage activity, double-strand DNA cleavage activity, nucleic acid binding activity, detectable activity, or any combination thereof.

[0014] In an embodiment, the composition may further comprise a homologous recombination donor template comprising a donor sequence for insertion into a target polynucleotide.

[0015] A vector system is also provided and may comprise one or more vectors encoding the Isc polypeptide and the ωRNA compositions as detailed herein.

[0016] In embodiments, an engineered cell comprising the composition as detailed herein is provided.

[0017] Methods of modifying a target polynucleotide sequence in a cell, comprising introducing to the cell any one of the compositions as described herein are provided. In an aspect, the polypeptide and/or nucleic acid components are provided via one or more polynucleotides encoding the polypeptides and/or nucleic acid component(s), and wherein the one or more polynucleotides are operably configured to express the IscB polypeptide and/or the ωRNA molecule. In an embodiment, the method introduces one or more mutations include substitutions, deletions, and insertions.

[0018] In an aspect, the composition provides site-specific modification that may comprise cleaving a DNA polynucleotide. In an aspect, the cleaving results in a 5′ overhang on a DNA molecule.

[0019] In one aspect, the present disclosure provides an engineered, non-naturally occurring composition comprising a IscB protein, wherein the IscB protein comprises an N-terminal X domain, a RuvC domain, a Bridge Helix domain, and a C-terminal Y domain.

[0020] In an embodiment, the X domain has an amino acid sequence that share at least 50%, at least 55%, at least 60%, at least 65%, at least 70%, at least 75%, at least 80%, at least 85%, at least 90%, at least 95%, at least 99%, or 100% sequence identity with X domains in Table 1A. In one embodiment, the Y domain has an amino acid sequence that share at least 50%, at least 55%, at least 60%, at least 65%, at least 70%, at least 75%, at least 80%, at least 85%, at least 90%, at least 95%, at least 99%, or 100% sequence identity with Y domains in Table 2. In one embodiment, the IscB protein shares at least 80%, at least 85%, at least 90%, at least 95%, at least 99%, or 100% sequence identity with an IscB protein selected from Tables 2 and 3.

[0021] In an embodiment, the N-terminal X domain is no more than 50 amino acids in length. In an embodiment, the composition further comprises an HNH domain. In one embodiment, the RuvC domain comprises a RuvC I subdomain, a Ruv II subdomain and a Ruv III subdomain, and the HNH is located between the Ruv C II and RuvC III subdomains of the RuvC domain. In one embodiment, the IscB protein is no more than 500, no more than 600 amino acids in length.

[0022] In one embodiment, the composition further comprises a first and second nucleic acid molecules, the first and second nucleic acid molecules capable of forming a duplex, the duplex capable of forming a complex with the IscB protein, wherein the second nucleic acid molecule is a recombinant molecule comprising a heterologous guide sequence capable of directing site-specific binding of the complex to a target sequence of a target polynucleotide. In one embodiment, the composition comprises a single guide molecule capable of forming a complex with the IscB protein and directing site-specific binding of the complex to a target sequence of a target polynucleotide.

[0023] In one embodiment, the IscB protein targets DNA. In one embodiment, the nuclease domains of the IscB protein are catalytically inactive. In one embodiment, the catalytically inactive IscB is selected from Table 1E. In one embodiment, the nuclease domain has nickase activity or is engineered to have nickase activity. In one embodiment, the catalytically inactive IscB is selected from Table 1C and comprises a catalytically inactive RuvC domain. In one embodiment, the catalytically inactive IscB is selected from Table 1D and comprises a catalytically inactive HNH domain. In one embodiment, the composition comprises a functional domain associated with the IscB protein.

[0024] In one embodiment, the functional domain has transposase activity, methylase activity, demethylase activity, translation activation activity, translation repression activity, transcription activation activity, transcription repression activity, transcription release factor activity, chromatin modifying or remodeling activity, histone modification activity, nuclease activity, single-strand RNA cleavage activity, double-strand RNA cleavage activity, single-strand DNA cleavage activity, double-strand DNA cleavage activity, nucleic acid binding activity, detectable activity, or any combination thereof. In one embodiment, the composition comprises a homologous recombination donor template comprising a donor sequence for insertion into a target polynucleotide. In one embodiment, the target sequence comprises a PAM of NGG or NAC, where N is A, C, G, or T.

[0025] In another aspect, the present disclosure provides one or more polynucleotides encoding one or more components of the composition herein. In another aspect, the present disclosure provides one or more vectors comprising the one or more polynucleotides herein. In another aspect, the present disclosure provides a cell or progeny thereof genetically engineered to express one or more components of the compositions herein. In another aspect, the present disclosure provides a method of targeting a polynucleotide, comprising contacting a sample that comprises a target polynucleotide with the composition herein, or the one or more polynucleotides or one or more vectors of herein.

[0026] In one embodiment, contacting results in modification of a gene product or modification of the amount or expression of a gene product. In one embodiment, the target sequence of the polynucleotide is a disease-associated target sequence.

[0027] In another aspect, the present disclosure provides an engineered, non-naturally occurring composition comprising: the IscB protein herein, wherein the IscB protein is catalytically inactive, a nucleotide deaminase associated with or otherwise capable of forming a complex with the IscB protein, and a single guide molecule capable of forming a complex with the IscB protein and directing site-specific binding at a target sequence. In one embodiment, the nucleotide deaminase is an adenosine deaminase or a cytidine deaminase.

[0028] In another aspect, the present disclosure provides one or more polynucleotides encoding one or more components of the composition herein. In another aspect, the present disclosure provides one or more vectors encoding the one or more polynucleotides herein. In another aspect, the present disclosure provides a cell or progeny thereof genetically engineered to express one or more components of the composition herein.

[0029] In another aspect, the present disclosure provides a method of editing nucleic acids in target polynucleotides comprising delivering the composition herein, the one or more polynucleotides herein, or one or more vectors herein to a cell or population of cells comprising the target polynucleotides. In one embodiment, the target polynucleotides are target sequences within genomic DNA. In one embodiment, the target polynucleotide is edited at one or more bases to introduce a G→A or C→T mutation.

[0030] In another aspect, the present disclosure provides an isolated cell or progeny thereof comprising one or more base edits made using the method herein. In another aspect, the present disclosure provides an engineered, non-naturally occurring composition comprising: the IscB protein herein, wherein the IscB is catalytically inactive, a reverse transcriptase associated with or otherwise capable of forming a complex with the IscB protein, and a guide molecule capable of forming a complex with the IscB protein and directing site-specific binding of the complex to a target sequence of a target polynucleotide, the guide molecule further comprising a donor sequence for insertion into the target polynucleotide.

[0031] In another aspect, the present disclosure provides one or more polynucleotides encoding one or more components of the composition herein. In another aspect, the present disclosure provides one or more vectors encoding the one or more polynucleotides herein. In another aspect, the present disclosure provides a method of modifying target polynucleotides comprising: delivering the composition herein, the one or more polynucleotides herein, or one or more vectors herein to a cell or population of cells comprising the target polynucleotides, wherein the complex directs the reverse transcriptase to the target sequence and the reverse transcriptase facilitates insertion of the donor sequence from the guide molecule into the target polynucleotide.

[0032] In one embodiment, insertion of the donor sequence introduces one or more base edits; corrects or introduces a premature stop codon; disrupts a splice site; inserts or restores a splice site; inserts a gene or gene fragment at one or both alleles of the target polynucleotide; or a combination thereof.

[0033] In another aspect, the present disclosure provides an isolated cell or progeny thereof comprising the modifications made using the method herein. In another aspect, the present disclosure provides an engineered, non-naturally occurring composition comprising: the IscB protein herein, a non-LTR retrotransposon protein associated with or otherwise capable of forming a complex with the IscB protein; a single guide molecule capable of forming a complex with the IscB protein and directing site-specific binding to a target sequence of a target polynucleotide; and a donor construct comprising a donor polynucleotide for insertion to the target polynucleotide and located between two binding elements capable of forming a complex with the non-LTR retrotransposon protein.

[0034] In one embodiment, the IscB protein is fused to the N-terminus of the non-LTR retrotransposon protein. In one embodiment, the IscB protein is engineered to have nickase activity. In one embodiment, the guides direct the fusion protein to a target sequence 5′ of the targeted insertion site, and wherein the IscB protein generates a double-strand break at the targeted insertion site. In one embodiment, the guides direct the fusion protein to a target sequence 3′ of the targeted insertion site, and wherein the IscB protein generates a double-strand break at the targeted insertion site. In one embodiment, the donor polynucleotide further comprises a polymerase processing element to facilitate 3′ end processing of the donor polynucleotide sequence. In one embodiment, the donor polynucleotide further comprises a homology region to the target sequence on the 5′ end of the donor construct, the 3′ end of the donor construct, or both. In one embodiment, the homology region is from 8 to 25 base pairs.

[0035] In another aspect, the present disclosure provides one or more polynucleotides encoding one or more components of the composition herein. In another aspect, the present disclosure provides one or more vectors comprising the one or more polynucleotides herein. In another aspect, the present disclosure provides a method of modifying target polynucleotides comprising: delivering the composition herein, the one or more polynucleotides herein, or one or more vectors herei to a cell or population of cells comprising the target polynucleotides, wherein the complex directs the non-LTR retrotransposon protein to the target sequence and the non-LTR retrotransposon protein facilitates insertion of the donor polynucleotide sequence from the donor construct into the target polynucleotide.

[0036] In one embodiment, insertion of the donor sequence: introduces one or more base edits; corrects or introduces a premature stop codon; disrupts a splice site; inserts or restores a splice site; inserts a gene or gene fragment at one or both alleles of the target polynucleotide; or a combination thereof.

[0037] In another aspect, the present disclosure provides an isolated cell or progeny thereof comprising the modifications made using the method herein.

[0038] These and other aspects, objects, features, and advantages of the example embodiments will become apparent to those having ordinary skill in the art upon consideration of the following detailed description of illustrated example embodiments.

### BRIEF DESCRIPTION OF THE DRAWINGS

[0039] An understanding of the features and advantages of the present invention will be obtained by reference to the following detailed description that sets forth illustrative embodiments, in which the principles of the invention may be utilized, and the accompanying drawings of which:

[0040] FIG. 1—IscB is reprogrammable and cleaves dsDNA in a target and target adjacent motif (TAM)-specific manner. Left panel shows cleaving of endogenous spacer, right panel, cleavage of engineered spacer.

[0041] FIG. 2—TAM weblogo shows 3′ TAM base preference of K racemifer IscB system.

[0042] FIG. 3—IscB sequence logo of the N-terminal domain from sequence alignment of polypeptides in Table 1A, with conserved motifs boxed and annotated (SEQ ID NO: 25194).

[0043] FIGS. 4-1-4-46—include a sequence alignment of representative IscB loci from clusters of IscB at 60% identity and 70% coverage (SEQ ID NO: 2255-2329).

[0044] FIG. 5—Consensus sequence from representative IscB loci of Table 1A (SEQ ID NO: 2208).

[0045] FIG. 6A-6C—(6A) TAM weblogo of exemplary IscB from OGEU010000025.1 (6B) Indel frequency compared to negative control condition at VEGFA site 2 using exemplary IscB system in HEK293 cells (6C) Representative indels at VEGFA site 2 from IscB mediated editing, a 20 nt guide is identified (SEQ ID NO: 2209-2223).

[0046] FIG. 7A-7B—(7A) HNH domain amino acid sequence of IscB identified in this study (OGEU01000025.1, 494 aa) (SEQ ID NO: 2063). (7B) ωRNA scaffold nucleotide sequence of IscB identified in this study (OGEU01000025.1_ωRNA) (SEQ ID NO: 2064).

[0047] FIG. 8A-8B—(8A) Design of guide RNA expression plasmid, pHS0812_Isc_large_27, in backbone of pHS0728 pcDNA3.1 (+) CM. (8B) Design of IscB expression plasmid, pHS0810_Isc_large_27, in backbone of pHS0728 pcDNA3.1 (+) CM.

[0048] FIG. 9A-9G—IscBs are associated with ncRNAs of unknown function. (9A) Comparison of IscB and Cas9 domains and previously described ncRNAs. (9B) Phylogenetic analysis of the RuvC, bridge helix, and HNH domains of Cas9 and IscB clusters. Genomic association shows 15/603 IscB clusters have strong association to CRISPR, occurring independently in multiple clades. (9C) Small RNA-seq of a heterologously expressed locus (top) and additionally after an RNP pulldown (bottom). (9D) Weblogo of 3′ PAMs depleted more than 5 standard deviations relative to a non-targeting control. (9E) In vitro cleavage by IscB-single guide RNA RNP complex. (9F) (Top) Conservation analysis of regions upstream of N=563 non-redundant IscB loci. (Bottom) Small RNA-seq of an IscB locus in K. racemifer. (9G) Secondary structure predictions of CRISPR-associated IscB ncRNA andIscB ωRNA. Guiding function of ωRNAs was inferred by comparison of the two structures. TE: transposon end.

[0049] FIG. 10—PLMP Domain. Weblogo of PLMP domain found in IscB and IsrB proteins immediately upstream of the RuvC-I domain.

[0050] FIG. 11—Non-coding region IscB RNA examples. Associated IscB non-coding region examples folded as RNA via ViennaRNA at 55° C. Black arrows indicate GU pairs characteristic of RNA structure.

[0051] FIG. 12—Small RNA-seq of IscB loci in K. racemifer. Small RNA-seq reads greater than 200 bp mapped to the 49 IscB loci present in K. racemifer. 38 of 49 loci contains an expressed ncRNA transcript corresponding to a guide and ωRNA scaffold upstream of the IscB ORF. Loci with low or undetectable levels of ωRNA are annotated based on computational prediction of the ωRNA scaffold but the guide is not annotated.

[0052] FIG. 13A-13C-Characterization of KraIscB-1 reprogramming and cleavage. (13A) Small RNA-seq of recombinantly purified KraIscB-1 in the presence of its endogenous locus. The predicted ωRNA scaffold along with an upstream region co-purified with KraIscB-1 protein, indicating physical interaction of the ωRNA with KraIscB-1. (13B) KraIscB-1 is a reprogrammable dsDNA nuclease. IVTT reactions with KraIscB-1 and ωRNAs with endogenous or reprogrammed guide sequences incubated with cognate or incorrect targets demonstrates TAM and target-dependent cleavage. Reactions were run on native PAGE gels and imaged in IR800 and IR700 channels to capture target strand (TS) and non-target strand (NTS) cleavage products, respectively. (13C) Substrate cleavage by wild-type and nuclease domain mutants of KraIscB-1 demonstrates strand-specific cleavage by each nuclease domain.

[0053] FIG. 14A-14B—CRISPR-associated IscB ncRNA pseudoknot plays a necessary role in target cleavage. (14A) CRISPR-associated IscB ncRNA variants tested. The leftmost sequence is the endogenous sequence. Middle sequence (ncRNA 1) is mutated (blue) on the nexus-adjacent region to abolish predicted base-pairing interactions in the pseudoknot. The rightmost sequence (ncRNA 2) contains mutations in both strands of the pseudoknot (blue) such that predicted base pairing is retained. (14B) IVTT cleavage assays with CRISPR-associated IscB and ncRNA variants shows that mutations which abolish the predicted base-pairing (ncRNA 1) also abolish activity, whereas compensatory mutations that retain the predicted base-pairing interaction (ncRNA 2) allow for target cleavage, implying that the pseudoknot structure plays a necessary functional role in CRISPR-associated IscB-mediated target cleavage.

[0054] FIG. 15A-15G—IscB is an RNA-guided DNA endonuclease. (15A) Design of an IVTT-based TAM screen. (15B) KraIscB-1 endogenous target and reprogrammed target sequences used in IVTT TAM screens (SEQ ID NO: 2224-2229). (15C) KraIscB-1 cleaves DNA in an ωRNA-dependent manner with an ATAAA 3′ TAM. (15D) AwaIscB cleaves DNA with an ATGA 3′ TAM. (15E) In vitro-reconstituted AwaIscB-ωRNA RNP cleavage of dsDNA substrates in the presence or absence of a target and/or TAM. (15F) In vitro cleavage of AwaIscB with selectively inactivated nuclease domains. (15G) Sequencing of cleavage products generated by AwaIscB (SEQ ID NO: 2230-2231).

[0055] FIG. 16A-16D—Guide-encoding mechanisms of IscB. (16A) Example loci for each major mechanism of encoding multiple guides. top to bottom: 1) ωRNAs duplicate or insert into CRISPRs, 2) entire ωRNAs arrays associate with IscB, 3) transposition expansion results in multiple nearly identical loci in each expressing different guides, 4) standalone trans-acting ωRNAs form independently of adjacent IscBs. (16B) K. racemifer encodes 48 IscB loci with cis ωRNAs and 10 standalone trans-acting ωRNAs. (16C) Expression of standalone ωRNAs in K. racemifer. (16D) KraIscB-1, in complex with cis or trans ωRNAs with the same guide sequence, mediate cleavage of dsDNA in a TAM and target-dependent manner. Reactions were performed in IVTT using 5′ strand-specific labeled linear targets.

[0056] FIG. 17A-17G—Biochemical properties of AwaIscB. (17A) Target cleavage by AwaIscB at various temperatures. Reactions were performed at the indicated temperature for 1 hour, run on native PAGE gels and stained with SYBR Gold for imaging. Optimal cleavage activity is observed between 35-40° C. (17B) Kinetics of AwaIscB target cleavage. Reactions were performed at 37° C. and stopped by addition of EDTA at the indicated times, run on a native PAGE gel and stained with SYBR Gold for imaging. Cleavage activity is saturated after 60 min. (17C) Target cleavage by AwaIscB in the presence of various divalent metal ions. AwaIscB requires Mg²⁺ for optimal activity, but can mediate target cleavage in the presence of Ca²⁺. (17D) Guide length optimization for AwaIscB. Cleavage activity is supported with 11-12 nt guides, but at least 17-18 nt guides are required for robust activity. In C and D, all reactions were performed at 37° C. for 1 hour, run on native PAGE gels and stained with SYBR Gold for imaging. (17E) Cy5.5-labeled ssDNA cleavage by AwaIscB wild type and nuclease domain catalytic mutants. Reactions were performed at 37° C. for 1 hour, run on denaturing PAGE gels and imaged in the IR700 channel. AwaIscB exhibits weak TAM-independent but target-dependent activity, with specific cleavage products generated by each nuclease domain. Cleavage activity of the HNH domain is enhanced in RuvC-inactivated AwaIscB in a TAM-dependent manner. Cleavage activity is abolished upon mutation of both nuclease domains. (17F) Cy5-labeled ssRNA cleavage by AwaIscB wild type and nuclease domain catalytic mutants. Reactions were performed at 37° C. for 1 hour, run on denaturing PAGE gels and imaged in the Cy5 channel. No cleavage activity is observed on ssRNA substrates by AwaIscB. (17G) Collateral activity of AwaIscB. Wild-type or RuvC-inactivated AwaIscB were incubated with unlabeled dsDNA or ssDNA targets and a Cy5.5-labeled collateral ssDNA substrate for 3 hours at 37° C. Reactions were run on denaturing PAGE gel and imaged in the IR700 channel to capture cleavage of the collateral substrate. No collateral activity is observed.

[0057] FIG. 18A-18B—Target cleavage site mapping of awaiscb nickase mutants. Sequencing of cleavage products from (18A) (SEQ ID NO: 2232-2233) Awaiscb RuvC-II (e157a) and (18B) (SEQ ID NO: 2234-2235) hnh (h212a) catalytic mutants demonstrates strand-specific nicking of targeted strand by the hnh domain 3 nt downstream of the tam and non-targeted strand by the ruvc domain 8-16 nt upstream of the TAM.

[0058] FIG. 19A-19E—Exonuclease III footprinting of dAwaIscB ternary complex. (19A) Schematic of Exonuclease III (ExoIII) footprinting experiment. Catalytically inactivated AwaIscB (dAwaIscB)-RNA complex bound to a target dsDNA substrate is digested with Exo III. ExoIII is sterically hindered when the dAwaIscB RNP complex is reached. Quenched reactions are subjected to ligation of adapters for next-generation sequencing, and position of adapter ligation allows for inference of the position of ExoIII hindrance, indicating protection by the dAwaIscB RNP complex. (19B-C) (19B—SEQ ID NO: 2236-2238) (19C—SEQ ID NO: 2239-2240) 3′ adapter ligation position after ExoIII treatment of dAwaIscB with and without ωRNA, respectively. Specific protection of the target strand 19 nt upstream of the TAM and the non-target strand 6 nt downstream of the target sequence is observed in the ωRNA condition, in contrast to a low level of non-specific adapter ligation when the ωRNA is not present. (19D-E) (19D—SEQ ID NO: 2241-2243) (19E—SEQ ID NO: 2244-2245) dSpCas9 with or without a corresponding sgRNA, respectively, was assayed as a positive control. Results shown in (19D) replicate previously reported results using a gel-based readout.

[0059] FIG. 20—Distribution of loci counts.

[0060] FIG. 21—Small RNA-seq of standalone ωRNAs in K. racemifer. Small RNA-seq reads greater than 200 bp mapped to standalone ωRNA loci in K. racemifer. 9 of the 10 loci contain an expressed ncRNA transcript corresponding to a guide and ωRNA scaffold. The ωRNA scaffold that is not expressed belongs to a group associated primarily with IsrB (G1c group—see FIG. 40).

[0061] FIG. 22A-22B—Likelihood mapping of main alignments. (22A) Likelihood mapping analysis for the main alignments used in this study performed using IQ Tree 2. The PLMP aa alignment displays high star-like behavior due to the presence of many divergent sequences. (22B) Results for statistical analysis assessing whether or not phylogenetic assumptions hold for the main alignments used in this study. 3 types of tests were performed using IQ Tree 2: symmetry (sym), marginal symmetry (mar), and internal symmetry (sym). P-values indicating severe violations (p<0.01) are shown in bold. The RuvC/BH/HNH aa alignment containing IscBs and Cas9s had a significant p-value for the marginal symmetry test, indicating it likely violates the stationarity assumption of typical phylogenetic analysis. Similarly, the hi-res full CDS DNA alignment of early Cas9s violates the stationarity assumption. No alignments had significant p-values for the internal symmetry test, suggesting that they might not violate the homogeneity assumption.

[0062] FIG. 23—Complete RuvC/BH phylogenetic analysis with IQ Tree 2. Maximum likelihood phylogenetic analysis of all IsrB, IscB and Cas9 RuvC/BH domains using IQ Tree 2. The LG substitution model with Gamma rates with 4 categories was used with 5000 ultra fast bootstraps (with hill-climbing nearest neighbor change for each bootstrap tree). The tree was rooted on the IsrB family. Associations are calculated for each cluster based on non-redundant loci (at 90% sequence identity of the main locus ORF). Ga-Gi refer to the IscB/IsrB main ωRNA profiles in FIG. 40. HNH domain associations are shown with 3 colors, with cyan indicating the HNH domain has the H, N, and H catalytic residues, magenta indicating the HNH domain has the H, N, and N catalytic residues, and grey indicating that the HNH domain has an H, N, and not H/N catalytic residues. Sizes of REC-like insertion in the representative protein sequence for each cluster are shown as determined by the number of amino acids between the BH and the RuvC-II in the alignment. Total size of the representative protein sequence for each cluster is shown on the outer ring.

[0063] FIG. 24—Complete RuvC/BH/HNH phylogenetic (IQ Tree 2)×5000 UFbs tree with associations. Maximum likelihood phylogenetic analysis of all IscB and Cas9 RuvC/BH/HNH domains using IQ Tree 2. The LG substitution model with Gamma rates with 4 categories was used with 5000 ultra fast bootstraps (with hill-climbing nearest neighbor change for each bootstrap tree). Tree is rooted using cluster 34777, which include some of the most ancestral IscBs as determined by the RuvC/BH phylogenetic analyses. Associations are calculated for each cluster based on non-redundant loci (at 90% sequence identity of the main locus ORF). Ga-Gi refer to the IscB/IsrB main ωRNA profiles in FIG. 38A. HNH domain associations are shown with 3 colors, with cyan indicating the HNH domain has the H, N, and H catalytic residues, magenta indicating the HNH domain has the H, N, and N catalytic residues, and grey indicating that the HNH domain has an H, N, and not H/N catalytic residues. Sizes of REC-like insertion in the representative protein sequence for each cluster are shown as determined by the number of amino acids between the BH and the RuvC-II in the alignment. Total size of the representative protein sequence

[0064] FIG. 25—Complete RuvC/BH/HNH phylogenetic (RAxML)×2000 bs. Maximum likelihood phylogenetic analysis of all IscB and Cas9 RuvC/BH/HNH domains using RAxML. The PROTGAMMALG model was used with 2000 rapid bootstraps. Tree is rooted using cluster 34777, which include some of the most ancestral IscBs as determined by the RuvC/BH phylogenetic analyses. Associations are calculated for each cluster based on non-redundant loci (at 90% sequence identity of the main locus ORF). Ga-Gi refer to the IscB/IsrB main ωRNA profiles in FIG. 40. HNH domain associations are shown with 3 colors, with cyan indicating the HNH domain has the H, N, and H catalytic residues, magenta indicating the HNH domain has the H, N, and N catalytic residues, and grey indicating that the HNH domain has an H, N, and not H/N catalytic residues. Sizes of REC-like insertion in the representative protein sequence for each cluster are shown as determined by the number of amino acids between the BH and the RuvC-II in the alignment. Total size of the representative protein sequence for each cluster is shown on the outer ring.

[0065] FIG. 26—Complete RuvC/BH/HNH phylogenetic (mrbayes)×10M iterations. Bayesian phylogenetic analysis of IscB and early Cas9 RuvC/BH/HNH domains using MrBayes with random starting trees. The LG substitution model was used with Gamma rates with 4 categories. 4 independent runs were run with 16 chains per with a delta temperature of 0.025 per chain for a total of 10M generations. 1000 swaps were attempted each generation, and tree samples were collected every 50 generations. The average standard deviation of split frequencies was 0.057890 at the final generation. Associations are calculated for each cluster based on non-redundant loci (at 90% sequence identity of the main locus ORF). Ga-Gi refer to the IscB/IsrB main ωRNA profiles in FIG. 40. HNH domain associations are shown with 3 colors, with cyan indicating the HNH domain has the H, N, and H catalytic residues, magenta indicating the HNH domain has the H, N, and N catalytic residues, and grey indicating that the HNH domain has an H, N, and not H/N catalytic residues. Sizes of REC-like insertion in the representative protein sequence for each cluster are shown as determined by the number of amino acids between the BH and the RuvC-II in the alignment. Total size of the representative protein sequence for each cluster is shown on the outer ring.

[0066] FIG. 27—Same phylogenetic tree as FIG. 26 with a focus on early Cas9 evolution. Bayesian posterior probabilities for each branch are shown along with the standard deviation of the posterior across all 4 runs.

[0067] FIG. 28—High resolution early Cas9 evolution tree (aa model) (IQ Tree 2). Maximum likelihood phylogenetic analysis of early Cas9 evolution complete protein sequences (excluding large portions of Cas9 specific REC-like insertions) using IQ Tree 2. The WAG substitution model with empirical amino acid frequencies, invariant sites, and Gamma rates with 4 categories was used with 5000 ultra fast bootstraps (with hill-climbing nearest neighbor change for each bootstrap tree). Tree is rooted using a representative from cluster 18054, which is more distantly related to the other sequences as determined by RuvC/BH/HNH trees. Support values are shown above each branch.

[0068] FIG. 29—Complete RuvC/BH phylogenetic analysis with IQ Tree 2. Maximum likelihood phylogenetic analysis of all IsrB, IscB and Cas9 RuvC/BH domains using IQ Tree 2. The LG substitution model with Gamma rates with 4 categories was used with 5000 ultra fast bootstraps (with hill-climbing nearest neighbor change for each bootstrap tree). The tree was rooted on the IsrB family. Associations are calculated for each cluster based on non-redundant loci (at 90% sequence identity of the main locus ORF). Ga-Gi refer to the IscB/IsrB main ωRNA profiles in FIG. 40. HNH domain associations are shown with 3 colors, with cyan indicating the HNH domain has the H, N, and H catalytic residues, magenta indicating the HNH domain has the H, N, and N catalytic residues, and grey indicating that the HNH domain has an H, N, and not H/N catalytic residues. Sizes of REC-like insertion in the representative protein sequence for each cluster are shown as determined by the number of amino acids between the BH and the RuvC-II in the alignment. Total size of the representative protein sequence for each cluster is shown on the outer ring.

[0069] FIG. 30—IscB/IsrB ωRNA phylogenetic analysis focused on Cas9 evolution. Same phylogenetic tree is FIG. 39 but focused on the early Cas9 evolution with the CRISPR-associated IscB cluster 2089. Support values for each branching are shown above the branches. Not all clusters included in other phylogenetic analyses could not be included in this analysis due to lack of a completely alignable ωRNA. For example, clusters 57212 and 50962 were not included. Clusters 2964, 21041, 57212, and 50962 were inferred as ancestral relative to the CRISPR-associated IscB cluster 2089 for the RuvC/BH/HNH amino acid phylogenetic analyses with RAxML (FIG. 37).

[0070] FIG. 31A-31C—Diversity and evolution of IscB. (31A) Phylogenetic tree of IsrB, IscB and Cas9. Associations with IS200/605 TnpA, ωRNA, CRISPR arrays, anti-repeats (where applicable), and Cas acquisition genes. ORF size of cluster representative is shown on the outermost ring. Positions of evolutionary events described in (31A) are marked by colored circles/squares. (31B) Inferred evolutionary timeline linking IsrB to Cas9 with exemplifying loci. (31C) Structural diversity and evolution of ωRNAs in IsrB and IscB systems.

[0071] FIG. 32A-32B—High resolution early Cas9 evolution tree (aa model) (IQ Tree 2). (32A) Maximum likelihood phylogenetic analysis of early Cas9 evolution complete protein sequences (excluding large portions of Cas9 specific REC-like insertions) using IQ Tree 2. The WAG substitution model with empirical amino acid frequencies, invariant sites, and Gamma rates with 4 categories was used with 5000 ultra fast bootstraps (with hill-climbing nearest neighbor change for each bootstrap tree). Tree is rooted using a representative from cluster 18054, which is more distantly related to the other sequences as determined by RuvC/BH/HNH trees. Support values are shown above each branch. (32B) Bayesian phylogenetic analysis of the high resolution early Cas9 amino acid alignment. MrBayes was run with 8 independent runs with 16 chains and a temperature delta of 0.025 per chain for 1M generations with 1000 swaps attempted each generation. The model parameters were LG substitution model and Gamma rates with 4 categories. MCMC samples were collected from each cold chain every 50 generations. The average standard deviation of split frequencies was 0.005069 at the final generation. Each leaf in the tree corresponds to an individual locus with the cluster id preceding the contig accession number separated by an underscore. Taxon 18054_CP026721.1 was included as a more distant IscB in the alignment and selected as the outgroup. Posterior branch probabilities (percentages) are displayed along with the standard deviation computed across all 8 runs with branch colors ranging from red (probability 0.7) to black (probability 1.0).

[0072] FIG. 33A-33C—High resolution early Cas9 evolution tree (dna model). (33A) Maximum likelihood phylogenetic analysis of early Cas9 evolution CDS DNA sequences using IQ-Tree 2. The GTR substitution model with empirical amino acid frequencies, invariant sites, and Gamma rates with 4 categories was used with 5000 ultrafast bootstraps (with hill-climbing nearest neighbor change for each bootstrap tree). Tree is rooted using a representative from cluster 18054, which is more distantly related to the other sequences as determined by RuvC/BH/HNH trees. Support values are shown above each branch. (33B) Same as (A) except with the GHOST heterotachy mixture model with 2 mixture classes in place of Gamma rates (Crotty, S. et al. (2020), Syst. Biol. 69, 249-264). Bootstrap support values are shown for each branch, followed by the corresponding branch length for each mixture tree separated by a backslash. Taxa are shown at each leaf followed by the corresponding branch length for each mixture tree. (33C) Bayesian phylogenetic analysis of the high resolution early Cas9 DNA alignment. MrBayes was run with 8 independent runs with random starting trees, and 16 chains with a temperature delta of 0.01 per chain for 2M generations with 1000 swaps attempted each generation. The model parameters were GTR substitution model and Gamma rates with 4 categories. MCMC samples were collected from each cold chain every 50 generations. The average standard deviation of split frequencies was 0.043215 at the final generation. Each leaf in the tree corresponds to an individual locus with the cluster id preceding the contig accession number separated by an underscore. Taxon 18054_CP026721.1 was included as a more distant IscB in the alignment and selected as the outgroup. Posterior branch probabilities (percentages) are displayed along with the standard deviation computed across all 8 runs with branch colors ranging from red (probability 0.7) to black (probability 1.0).

[0073] FIG. 34A-34B—Early Cas9 phylogeny using maximum likelihood Phylogenetic analysis of the RuvC/BH/HNH domains of early Cas9s and all IscBs using IQ Tree 2. Each tree is the best scoring ML tree of 5 independent runs. Bootstrap supports were computed with 5000 ultrafast bootstraps. (34A) Phylogenetic analysis using the LG substitution model with gamma rates (4 categories). (34B) Phylogenetic analysis using the LG substitution model with invariant sites and gamma rates (4 categories).

[0074] FIG. 35A-35D-Sensitivity analysis for inferred Cas9 ancestor (35A) RAxML maximum likelihood phylogenetic tree of the RuvC/BH/HNH alignment with 2000 rapid boot straps for computing support values. Only sections of the tree relevant to the early evolution of Cas9 are shown. (35B) BLOSUM62 similarity comparison of the RuvC-I, RuvC-II, RuvC-III, and HNH core regions (with alignment trimming, alignments provided in supplementary file XXX) for early Cas9 II-D (clusters Cas9_1261, Cas9_665, Cas9_1079), a typical Cas9 (cluster Cas9_758), the putative Cas9 ancestor (2089), and example IscBs. (35C-35D) random taxon dropout analysis using FastTree2. Sample size for each dropout percentage category was calculated such that each taxon is retained on average for 1000 bootstrap samples. Clusters 2089, Cas9_1079, Cas9_665, and Cas9_1261 were retained in all samples. Error bars were calculated using 2000 bootstraps from the final samples. (35C) proportion of trees supporting CRISPR-associated IscB 2089 as the direct ancestor of all Cas9s as a function of taxa dropout rate. (35D) proportion of trees supporting mono/paraphyletic topologies involving Cas9, IsrB, or early II-D Cas9s as a function of the taxa dropout rate.

[0075] FIG. 36—Comparison of early Cas9 tracrRNAs to conserved ωRNAs from IscB and IsrB. ωRNA from the putative ancestor of all Cas9s (2089) is shown as well. Conserved region shared by the tracrRNA and IscB/IsrB ωRNAs corresponds to the nexus pseudoknot hairpin. Alignment was generated using MAFFT-ginsi. Additional, less conserved regions are not shown for this alignment. Specifically, the 5′ end is not conserved between tracrRNA and IscB ωRNAs.

[0076] FIG. 37—IscB/IsrB ωRNA phylogenetic analysis using IQ Tree 2. Maximum likelihood phylogenetic tree inference for the DNA alignment of ωRNA from IscB/IsrBs using IQ Tree 2. This tree was built using the best likelihood scoring tree of 200 independent runs as the starting tree with 5000 ultra fast bootstraps (with hill-climbing nearest neighbor change for each bootstrap tree) under the GTR substitution model, using empirical DNA frequencies from the alignment, ascertainment bias correction, and Gamma rates with 4 categories.

[0077] FIG. 38A-38B—Diverse ωRNAs associated with isrB and iscB. Secondary structure predictions for the main groups of ωRNA scaffolds associated with iscBs and iscBs. (38A) G1a, G1d, G1e, G1f, G1g, and G1i are associated with iscB while (38B) G1b, G1c, G1h are associated with isrB. G1a, G1b, G1c, G1d, G1h, and G1i secondary structures were predicted using R-scape while G1e, G1f, G1g were computed using consensus secondary structures with ViennaRNA due to the smaller sample sizes. While pseudoknots were not identified de novo for G1e, G2f, G1g, potential pseudoknots in similar locations to the other iscB/isrB RNAs can be found. Guide locations for all iscB/isrB ωRNAs would be predicted to be immediately upstream from each ωRNA scaffold where the 5′ label is located.

[0078] FIG. 39A-39J—Exploration of the diversity of IS200/605 superfamily nucleases. (39A) Evolution between IS200/605 transposon superfamily-encoded nucleases and associated RNAs. Dashed lines reflect tentative/unknown relationships. (39B) Locations of IscB loci and fragments in the I. tetrasporus genome. Intact locus is labeled as “ChlorIscB.” (39C) Small RNA-seq of I. tetrasporus. (39D) Weblogo of ChlorIscB cleavage TAM using a reprogrammed guide in an IVTT TAM screen. (39E) Weblogo of OgeuIscB TAM using a reprogrammed guide in an IVTT TAM screen. (39F) Targeted OgeuIscB mediated indel formation in HEK293FT cells ordered by abundance, with indel size on the left (SEQ ID NO: 2246-2254). (39G) OgeuIscB mediated indel formation at multiple sites in HEK293T cells (* indicates p<0.05). (39H) Native expression of IsrB ωRNA in K. racemifer. (39I) Weblogo of Desulfovigula thermocuniculi (DthIsrB) TAM using a reprogrammed guide in an IVTT TAM screen. (39J) DthIsrB mediates ωRNA-guided non-target strand nicking in a TAM- and target-dependent manner in an IVTT cleavage assay using 5′ strand-specific labeled targets.

[0079] FIG. 40A-40C—Genome editing in human cells with OgeuIscB. (40A) Schematic of experiment to screen large IscB proteins for indel-generating activity in HEK293FT cells. Plasmids expressing the protein of interest were co-transfected with a mini-library of 12 ωRNAs targeting various loci in the human genome. After approximately 3 days, genomic DNA was harvested and amplicons containing loci targeted by each ωRNA in the sample were amplified and sequenced to determine indel rates (SEQ ID NO: 2330-2333). (40B) Targeting OgeuIscB to 3 human genomic loci in HEK293FT cells with ωRNAs containing guides of various lengths shows that a 16 nt guide generally mediates optimal indel formation. NT: non-targeting ωRNA. Statistical significance was assessed using a two-tailed T-test with the non-targeting ωRNA as the null condition, * p<0.05 (SEQ ID NO: 2334-2342). (40C) Additional genomic loci targeted by OgeuIscB using ωRNAs with 16 nt guides. Statistical significance was assessed using a two-tailed T-test with the non-targeting ωRNA as the null condition, *p<0.05.

[0080] FIG. 41—Small RNA-seq of IsrB loci from K. racemifer shows expressed associated ωRNAs. Small RNA-seq reads greater than 200 bp mapped to the 5 IsrB loci present in K. racemifer. Each locus contains an expressed ncRNA transcript corresponding to a guide and ωRNA scaffold upstream of the IsrB ORF.

[0081] FIG. 42A-42C—IsrB nicks dsDNA in a target and TAM-dependent manner. (42A) Target cleavage by DthIsrB at various temperatures from 40 C to 70 C at 5 C increments. All cleavage reactions were performed using RNP complexes produced by IVTT reactions for 1 hour at the indicated temperatures, run on denaturing PAGE gels, and imaged in the IR800 and IR700 channels. Optimal temperature for nicking activity is approximately 60 C. Additionally, double-stranded cleavage was not observed at any temperature. (42B) Target cleavage by DchIsrB at various temperatures from 30 C to 60 C at 5 C increments. All cleavage reactions were performed using NP complexes produced by IVTT reactions for 1 hour at the indicated temperatures for 1 hour at the indicated temperatures, run on denaturing PAGE gels, and imaged in the IR700 and IR800 channels. Optimal temperature for nicking activity is approximately 45° C. Double-stranded cleavage was not observed at any temperature. (42C) Target cleavage by DthIsrB, DchIsrB, and KraIscB-1 performed at optimal temperatures (60° C., 45° C., and 37° C. respectively). All cleavage reactions were performed using RNP complexes produced by IVTT and incubated for 1 hour at their respective temperatures. Products were run on native PAGe and denaturing PAGE gels and imaged in the IR800 and IR700 channels. DthIsrB and DchIsrB perform non-target strand dsDNA nicking with no detectable double-stranded cleavage compared to KraIscB.

[0082] FIG. 43—Phylogenetic distribution. Distribution of IscB, IsrB, and Cas9 across archaeal and bacterial phyla. Heatmap displays percentages of genomes containing a specific system.

[0083] FIG. 44—Examples of Type II-E Cas9 loci. ITRs are found in multiple loci, though ITRs within the same loci may not be identical. Black rectangles represent CRISPR direct repeats.

[0084] FIG. 45—Naturally-occurring RNA-guided DNA-targeting systems. Comparison of 22 (OMEGA) systems with other known RNA-guided systems. In contrast to CRISPR systems, which capture spacer sequences and store them within the CRISPR array, in the locus, 22 systems transpose their loci (or trans-acting loci) into target sequences, apparently, converting targets into ωRNA guides in a process that can be called guide conscription.

[0085] FIGS. 46A-46C-Activity of individual spacers from a CRISPR-associated IscB locus. (46A) Schematic of CRISPR-associated IscB locus from Chesapeake Bay sample containing three spacers flanked by four DRs in a CRISPR array. (46B) Spacer and corresponding 8N PAM library targets for each spacer in the CRISPR array. PSP3 (Fn) is reprogrammed from the sequence endogenously present in the locus to the Fn spacer (SEQ ID NO: 2343-2351). (46C) Weblogos of 3′ PAMs depleted more than 5 standard deviations relative to a non-targeting control for each protospacer library.

[0086] FIG. 47A-47B—CRISPR-associated IscB ncRNA pseudoknot plays a necessary role in target cleavage. (47A) CRISPR-associated IscB ncRNA nexus pseudoknot mutants tested. The leftmost sequence is the endogenous sequence. Middle sequence (ncRNA mutant 1) is mutated (blue) on the nexus-adjacent region to abolish predicted base-pairing interactions in the pseudoknot. The rightmost sequence (ncRNA mutant 2) contains mutations in both strands of the pseudoknot (blue) such that predicted base pairing is retained. (47B) IVTT cleavage assays with CRISPR-associated IscB and ncRNA variants shows that mutations which abolish the predicted base-pairing (ncRNA 1) also abolish activity, whereas compensatory mutations that retain the predicted base-pairing interaction (ncRNA 2) allow for target cleavage, implying that the pseudoknot structure plays a necessary functional role in CRISPR-associated IscB-mediated target cleavage.

[0087] FIG. 48—TAMs of active IscB proteins. TAMs of active IscB proteins determined by in vitro plasmid cleavage assays. 57/86 of tested IscBs were found to mediate RNA-guided cleavage activity as assessed by the detection of a TAM. All tested protein sequences and accession of source contig are listed in Table 9.

[0088] FIG. 49—PLMP domain is essential for RNA-guided cleavage function. Cell-free transcription translation cleavage assays with AwaIscB successively truncated at single aa resolution from the N-terminal end guided to labeled Fn target with an ATGAGATC 3′ TAM. In vitro transcription/translation cleavage assays were performed as described, run on a 6% TBE-Urea gel and imaged in the Cy3 and Cy5 channels. Truncating more than 4 aa from the N-terminal PLMP domain abolished cleavage activity.

[0089] FIG. 50—Targets of IscB/IsrB guides. Same as FIG. 52A with results of target search mapped on the second outermost ring. Notable groups are shown as labeled arcs on the outermost ring.

[0090] FIG. 51A-51C—Examples of iscB-containing IS200/605 insertions. (51A) Full view of alignment of contigs with uninserted (top) versus IS200/605 inserted (bottom) sequences. (51B) 5′ end of alignment of uninserted (top) and inserted (bottom) locus. The inferred ωRNA guide (light gray), perfectly matches the target (dark gray), with the alignment gap beginning at the immediate 5′ end of the ωRNA scaffold (SEQ ID NO: 2352-2355). (53C) 3′ end of alignment of uninserted (top) and inserted (bottom) locus. ATAAA, a common IscB TAM (FIG. 50), is present at the junction (SEQ ID NO: 2356-2359).

[0091] FIG. 52A-52B—Complete RuvC/BH phylogenetic analysis. (52A) Maximum likelihood phylogenetic analysis of all IsrB, IscB and Cas9 RuvC/BH domains using IQ-Tree 2. The LG substitution model with Gamma rates with 4 categories was used with 5000 ultrafast bootstraps (with hill-climbing nearest neighbor change for each bootstrap tree). (52B) Maximum likelihood phylogenetic analysis of all IsrB, IscB and Cas9 RuvC/BH domains using RAxML. The PROTGAMMALG model was used with 2000 rapid bootstraps. For both (52A) and (52B), the tree was rooted on the IsrB family. Associations are calculated for each cluster based on non-redundant loci (at 90% sequence identity of the main locus ORF). Ga-Gi refer to the IscB/IsrB main ωRNA profiles in FIG. 38A. HNH domain associations are shown with 3 colors, with cyan indicating the HNH domain has the H, N, and H catalytic residues, magenta indicating the HNH domain has the H, N, and N catalytic residues, and grey indicating that the HNH domain has an H, N, and not H/N catalytic residues. Sizes of REC-like insertion in the representative protein sequence for each cluster are shown as determined by the number of amino acids between the BH and the RuvC-II in the alignment. Total size of the representative protein sequence for each cluster is shown on the second outermost ring. Notable groups are shown as labeled colored arcs on the outermost ring.

[0092] FIG. 53A-53B—Complete RuvC/BH/HNH phylogenetic analysis. (53A) Maximum likelihood phylogenetic analysis of all IscB and Cas9 RuvC/BH/HNH domains using IQ-Tree 2. The LG substitution model with Gamma rates with 4 categories was used with 5000 ultrafast bootstraps (with hill-climbing nearest neighbor change for each bootstrap tree). (53B) Maximum likelihood phylogenetic analysis of all IscB and Cas9 RuvC/BH/HNH domains using RAxML. The PROTGAMMALG model was used with 2000 rapid bootstraps. For both (A) and (B), tree is rooted using cluster 34777, which include some of the most ancestral IscBs as determined by the RuvC/BH phylogenetic analyses. Associations are calculated for each cluster based on non-redundant loci (at 90% sequence identity of the main locus ORF). Ga-Gi refer to the IscB/IsrB main ωRNA profiles in FIG. 38A. HNH domain associations are shown with 3 colors, with cyan indicating the HNH domain has the H, N, and H catalytic residues, magenta indicating the HNH domain has the H, N, and N catalytic residues, and grey indicating that the HNH domain has an H, N, and not H/N catalytic residues. Sizes of REC-like insertion in the representative protein sequence for each cluster are shown as determined by the number of amino acids between the BH and the RuvC-II in the alignment. Total size of the representative protein sequence for each cluster is shown on the second outermost ring. Notable groups are shown as labeled colored arcs on the outermost ring.

[0093] FIG. 54A-54D—Complete RuvC/BH/HNH phylogenetic analysis of early Cas9 evolution. (54A) Bayesian phylogenetic analysis of IscB and early Cas9 RuvC/BH/HNH domains using MrBayes with random starting trees. The LG substitution model was used with Gamma rates with 4 categories. 4 independent runs were run with 16 chains per with a delta temperature of 0.025 per chain for a total of 10M generations on a GPU for ˜10 days. 1000 swaps were attempted each generation, and tree samples were collected every 50 generations. The average standard deviation of split frequencies was 0.057890 at the final generation. Associations are calculated for each cluster based on non-redundant loci (at 90% sequence identity of the main locus ORF). Ga-Gi refer to the IscB/IsrB main ωRNA profiles in FIG. 38A. HNH domain associations are shown with 3 colors, with cyan indicating the HNH domain has the H, N, and H catalytic residues, magenta indicating the HNH domain has the H, N, and N catalytic residues, and grey indicating that the HNH domain has an H, N, and not H/N catalytic residues. Sizes of REC-like insertion in the representative protein sequence for each cluster are shown as determined by the number of amino acids between the BH and the RuvC-II in the alignment. Total size of the representative protein sequence for each cluster is shown on the second outermost ring. Notable groups are shown as labeled colored arcs on the outermost ring. (54B) Same phylogenetic tree as (A) with a focus on early Cas9 evolution. Bayesian posterior probabilities for each branch are shown along with the standard deviation of the posterior across all 4 runs. (54C)-(54D) Phylogenetic analysis of the RuvC/BH/HNH domains of early Cas9s and all IscBs using IQ-Tree 2. Each tree is the best scoring ML tree of 5 independent runs. Bootstrap supports were computed with 5000 ultrafast bootstraps. (54C) Phylogenetic analysis using the LG substitution model with gamma rates (4 categories). (54D) Phylogenetic analysis using the LG substitution model with invariant sites and gamma rates (4 categories).

[0094] FIG. 55A-55C—IscB/IsrB ωRNA phylogenetic analysis. (55A) Maximum likelihood phylogenetic tree inference for the DNA alignment of ωRNA from IscB/IsrBs using IQ-Tree 2. This tree was built using the best likelihood scoring tree of 200 independent runs as the starting tree with 5000 ultrafast bootstraps (with hill-climbing nearest neighbor change for each bootstrap tree) under the GTR substitution model, using empirical DNA frequencies from the alignment, ascertainment bias correction, and Gamma rates with 4 categories. (55B) Same phylogenetic tree as (55A) but focused on the early Cas9 evolution with the CRISPR-associated IscB cluster 2089. Support values for each branching are shown above the branches. Not all clusters included in other phylogenetic analyses could not be included in this analysis due to lack of a completely alignable ωRNA. For example, clusters 57212 and 50962 were not included. Clusters 2964, 21041, 57212, and 50962 were inferred as ancestral relative to the CRISPR-associated IscB cluster 2089 for the RuvC/BH/HNH amino acid phylogenetic analyses with RAxML (FIG. 35). (55C) Bayesian phylogenetic analysis of tracrRNA like ωRNAs. TracrRNAs from the early Cas9 clusters Cas9_1261 and Cas9_1665 were joined with their respective DRs and separated by a 4 bp poly-A tetraloop. 23 ωRNAs sharing alignment homology to all structural regions from the two tracrRNAs were identified. The resulting 25 RNAs were then aligned with MAFFT-ginsi and manually curated to reduce gappiness. Bayesian phylogenetic analysis of the resulting alignment was performed using MrBayes with 2 chains at a delta temperature of 0.025 with 8 independent runs for 5M generations. A standard GTR model with gamma rates and 4 categories was used. Trees were sampled every 50 generations. The average standard deviation of split frequencies was 0.005966 at the final generation. Bayesian posterior probabilities for each branching are shown above the branch, along with the average standard deviation across the 8 runs. The analysis suggests that the putative modern IscB ancestor of Cas9 (IscB cluster 2089) has an ωRNA descending from the same lineage of ωRNAs that likely resulted in the DR/tracrRNA (Bayesian posterior probability 89%).

[0095] FIG. 56—Full protein phylogenetic analysis of IscB+earliest Cas9s. Maximum likelihood phylogenetic inference of all IscBs plus earliest Cas9s (Cas9_1261, Cas9_665) with complete protein alignments excluding the PLMP domain and C terminal domain. Tree was inferred using IQ-Tree 2 with the LG substitution model and Gamma rates with 4 categories. Support values for 5000 ultrafast bootstraps are shown above each branch.

[0096] FIG. 57A-57D—Comparison of IsrB, IscB and Cas9 subtype features. (57A) Comparison of protein lengths between IsrB, IscB, IscB (large) and Cas9 subtypes identified in this study. The II-D Cas9 group contains members which are substantially smaller than other Cas9 subtypes, while tnpA-associated II-C encompasses some substantially larger members. (57B) P-values resulting from t-tests of pairwise comparison of length distributions shown in (A). (57C) Comparison of median DR lengths for CRISPR arrays associated with IsrB, IscB, IscB (large), where CRISPR-associated, and Cas9 subtypes. Some tnpA-associated II-C loci contain substantially longer DRs (46-47 bp). (57D) Rate of tnpA association with IsrB, IscB, IscB (large) and Cas9 subtypes. 1/545 (0.2%) of unique IsrB loci, 56/2811 (2.0%) of unique IscB loci, including both IscB and IscB (large), and 115/1918 (6.0%) of unique II-C (TnpA) loci are associated with tnpA.

[0097] FIG. 58—Alignment of IscBs and early Cas9s. Alignment of early Cas9s with the founding IscB (cluster 2089) and other various IscB. Domains and conserved motifs are annotated by red arrows below the consensus alignment (SEQ ID NO: 2362-2371).

[0098] FIG. 59A-59C—IscB loci in I. tetrasporus UTEX B 2012. (59A) Alignment of IscB loci in I. tetrasporus UTEX B 2012 chloroplast genome. Experimentally characterized active iscB CDS is shown in dark red, with fragmented iscB CDS shown in lighter red. Top row represents consensus sequence. Second row represents percent identity over a 5 bp sliding window. (59B) Codon usage distribution of iscB (red bars) vs non-iscB (black points) CDS. (59C) Kullback-Leibler divergence of codon usage distribution in each CDS in the I. tetrasporus UTEX B 2012 chloroplast genome relative to the average distribution across all CDS. Experimentally characterized active iscB CDS is shown in red.

[0099] FIG. 60—TnpB locus conservation analysis. Conservation of the 3′ end of tnpB loci that share the KraIscB-1 transposon end. The conserved region on the 3′ region of the tnpB loci corresponds to the 5′ region of the ωRNA of iscB. The conservation of the tnpB loci outside of the ORF on the 3′ end suggests the presence of a ncRNA that may function similarly to the ωRNA of iscB.

[0100] FIG. 61A-61F—Characterization of TnpB ωRNA-guided cleavage. (61A) Small RNA-seq of A. lobatus DSM 43150 TnpB-2 recombinantly purified in the presence of the downstream predicted ωRNA and guide. The predicted ωRNA scaffold and a downstream region constituting the putative guide co-purified with the A. lobatus TnpB-2 protein, suggesting interaction of the protein with the ωRNA transcript. Contig accession and start codon information is available in Tables 11 and 13. NCBI contig accession of original locus: JACHNC010000001.1; tnpB start coordinate: 25000. (61B) TAM screens of additional TnpB loci. (61C) Target cleavage by AmaTnpB at various temperatures. Reactions were performed at the indicated temperature for 1 hour and subsequently run on 2% agarose gels stained with SYBR Gold for imaging. Optimal cleavage activity is observed from 50-60° C. (61D) Kinetics of AmaTnpB target cleavage. Reactions were performed at 60° C., terminated by addition of EDTA at the indicated times, and subsequently run on a 2% agarose gel stained with SYBR Gold for imaging. Cleavage activity is saturated after 30 min. (61E) Sanger sequencing traces of AmaTnpB-digested dsDNA targets show 5′ staggered overhangs. The non-templated addition of a final base is an artifact of the polymerase used in sequencing (which manifests as a terminal Adenine in the TS trace and a terminal Thymine in the NTS trace). The trace for the NTS cleavage product is reverse complemented so that both traces illustrate the sequence of the NTS. Cleavage sites are indicated by red triangles. TS: target strand; NTS: non-target strand (SEQ ID NO: 2360-2361). (61F) Cleavage of Cy5-labeled ssRNA by AmaTnpB. Reactions were performed at 60° C. for 1 hour, run on denaturing PAGE gels and imaged in the Cy5 channel. No cleavage of RNA substrates is observed.

[0101] FIG. 62 shows reclustering IscB at 60% sequence identity revealed novel IscB proteins.

[0102] FIG. 63A-63C show that the identified IscB proteins from 00644 cluster were functional with an NAC PAM sequence. (63A) Best fit curve and Weblogo for locus 1: JGI accession Gaa0099850_1002913; (63B) Best fit curve and Weblogo for Locus 2: (JGI Accession Ga0348337_018242). (63C) Best fit curve and Weblogo for Locus 2: (JGI Accession Ga0208542_1002724).

[0103] FIG. 64. PLMP domain is essential for RNA-guided cleavage function. Cell-free transcription translation cleavage assays with AwaIscB successively truncated at single aa resolution from the N-terminal end guided to labeled Fn target with an ATGAGATC 3′ TAM. In vitro transcription/translation cleavage assays were performed as described, run on a 6% TBE-Urea gel and imaged in the Cy3 and Cy5 channels. Panels show that truncations up to 70 aa including deletion of the PLMP domain abolishes activity. For reference, the RuvC-I active aspartate is at residue 57.

[0104] The figures herein are for illustrative purposes only and are not necessarily drawn to scale.

### DETAILED DESCRIPTION OF THE EXAMPLE EMBODIMENTS

### General Definitions

[0105] Unless defined otherwise, technical and scientific terms used herein have the same meaning as commonly understood by one of ordinary skill in the art to which this disclosure pertains. Definitions of common terms and techniques in molecular biology may be found in Molecular Cloning: A Laboratory Manual, 2^{nd} edition (1989) (Sambrook, Fritsch, and Maniatis); Molecular Cloning: A Laboratory Manual, 4^{th} edition (2012) (Green and Sambrook); Current Protocols in Molecular Biology (1987) (F. M. Ausubel et al. eds.); the series Methods in Enzymology (Academic Press, Inc.): PCR 2: A Practical Approach (1995) (M. J. MacPherson, B. D. Hames, and G. R. Taylor eds.): Antibodies, A Laboratory Manual (1988) (Harlow and Lane, eds.): Antibodies A Laboratory Manual, 2^{nd} edition 2013 (E. A. Greenfield ed.); Animal Cell Culture (1987) (R. I. Freshney, ed.); Benjamin Lewin, Genes IX, published by Jones and Bartlet, 2008 (ISBN 0763752223); Kendrew et al. (eds.), The Encyclopedia of Molecular Biology, published by Blackwell Science Ltd., 1994 (ISBN 0632021829); Robert A. Meyers (ed.), Molecular Biology and Biotechnology: a Comprehensive Desk Reference, published by VCH Publishers, Inc., 1995 (ISBN 9780471185710); Singleton et al., Dictionary of Microbiology and Molecular Biology 2nd ed., J. Wiley & Sons (New York, N.Y. 1994), March, Advanced Organic Chemistry Reactions, Mechanisms and Structure 4th ed., John Wiley & Sons (New York, N.Y. 1992); and Marten H. Hofker and Jan van Deursen, Transgenic Mouse Methods and Protocols, 2^{nd} edition (2011).

[0106] As used herein, the singular forms “a”, “an”, and “the” include both singular and plural referents unless the context clearly dictates otherwise.

[0107] The term “optional” or “optionally” means that the subsequent described event, circumstance or substituent may or may not occur, and that the description includes instances where the event or circumstance occurs and instances where it does not.

[0108] The recitation of numerical ranges by endpoints includes all numbers and fractions subsumed within the respective ranges, as well as the recited endpoints.

[0109] The terms “about” or “approximately” as used herein when referring to a measurable value such as a parameter, an amount, a temporal duration, and the like, are meant to encompass variations of and from the specified value, such as variations of +/−10% or less, +/−5% or less, +/−1% or less, and +/−0.1% or less of and from the specified value, insofar such variations are appropriate to perform in the disclosed invention. For example, the amount “about 10” includes 10 and any amounts from 9 to 11. For example, the term “about” in relation to a reference numerical value can also include a range of values plus or minus 10%, 9%, 8%, 7%, 6%, 5%, 4%, 3%, 2%, or 1% from that value. It is to be understood that the value to which the modifier “about” or “approximately” refers is itself also specifically, and preferably, disclosed.

[0110] The term “about” as used herein when describing an amino acid sequence length or size or a range or ranges of amino acid sequence lengths or sizes are meant to encompass variations of and from the specified value, such as variations in amino acid length or size of +/−5 amino acids.

[0111] As used herein, a “biological sample” may contain whole cells and/or live cells and/or cell debris. The biological sample may contain (or be derived from) a “bodily fluid”. The present invention encompasses embodiments wherein the bodily fluid is selected from amniotic fluid, aqueous humour, vitreous humour, bile, blood serum, breast milk, cerebrospinal fluid, cerumen (earwax), chyle, chyme, endolymph, perilymph, exudates, feces, female ejaculate, gastric acid, gastric juice, lymph, mucus (including nasal drainage and phlegm), pericardial fluid, peritoneal fluid, pleural fluid, pus, rheum, saliva, sebum (skin oil), semen, sputum, synovial fluid, sweat, tears, urine, vaginal secretion, vomit and mixtures of one or more thereof. Biological samples include cell cultures, bodily fluids, cell cultures from bodily fluids. Bodily fluids may be obtained from a mammal organism, for example by puncture, or other collecting or sampling procedures.

[0112] The terms “subject,” “individual,” and “patient” are used interchangeably herein to refer to a vertebrate, preferably a mammal, more preferably a human. Mammals include, but are not limited to, murines, simians, humans, farm animals, sport animals, and pets. Tissues, cells and their progeny of a biological entity obtained in vivo or cultured in vitro are also encompassed.

[0113] The term “exemplary” is used herein to mean serving as an example, instance, or illustration. Any aspect or design described herein as “exemplary” is not necessarily to be construed as preferred or advantageous over other aspects or designs. Rather, use of the word exemplary is intended to present concepts in a concrete fashion.

[0114] A protein or nucleic acid derived from a species means that the protein or nucleic acid has a sequence identical to an endogenous protein or nucleic acid or a portion thereof in the species. The protein or nucleic acid derived from the species may be directly obtained from an organism of the species (e.g., by isolation), or may be produced, e.g., by recombination production or chemical synthesis.

[0115] Various embodiments are described hereinafter. It should be noted that the specific embodiments are not intended as an exhaustive description or as a limitation to the broader aspects discussed herein. One aspect described in conjunction with a particular embodiment is not necessarily limited to that embodiment and can be practiced with any other embodiment(s). Reference throughout this specification to “one embodiment”, “an embodiment,” “an example embodiment,” means that a particular feature, structure or characteristic described in connection with the embodiment is included in at least one embodiment of the present invention. Thus, appearances of the phrases “in one embodiment,” “in an embodiment,” or “an example embodiment” in various places throughout this specification are not necessarily all referring to the same embodiment but may. Furthermore, the particular features, structures or characteristics may be combined in any suitable manner, as would be apparent to a person skilled in the art from this disclosure, in one or more embodiments. Furthermore, while some embodiments described herein include some but not other features included in other embodiments, combinations of features of different embodiments are meant to be within the scope of the invention. For example, in the appended claims, any of the claimed embodiments can be used in any combination.

[0116] All publications, published patent documents, and patent applications cited herein are hereby incorporated by reference to the same extent as though each individual publication, published patent document, or patent application was specifically and individually indicated as being incorporated by reference.

### Overview

[0117] Embodiments disclosed herein provide IscB systems that function as RNA-guided re-programmable nucleases. An IscB system comprises an IscB polypeptide and a nucleic acid component capable of forming a complex with the IscB polypeptide and directing the complex to a target polynucleotide. The IscB systems, along with IsrB, IshB and TnpB systems, may be referred to collectively as OMEGA (Obligate Mobile Element Guided Activity) systems or complexes, or 22 systems or complexes. These systems use a RNA element that is structurally distinct from CRISPR-Cas systems, which may also be referred to herein as a ωRNA or hRNA. The IscB systems disclosed herein also include a separate clade that are CRISPR-array associated (“CRISPR-associated IscBs) and utilize a RNA molecule similar to the guide RNA of CRISPR-Cas systems. In general, the CRISPR-associated IscB's are larger than then OMEGA associated. IscB systems are not associated with CRISPR-Cas adaptation genes (e.g., cas1, cas2, cas4, and csn1).

[0118] The IscB polypeptides, and homologs thereof, are considerably smaller than other known RNA-guide nucleases. As such, IscB polypeptides represent a novel class of RNA-guided nucleases that do not suffer from the delivery size limitations of other larger single-effector, RNA-guided nucleases, such as Type II and Type V CRISPR-Cas systems. Due to their smaller size, IscBs may be combined with other functional domains, such as nucleobase deaminases, reverse transcriptases, transposases, ligases, topoisomerases, and serine and threonine recombinases (integrases) and still be packaged in conventional delivery systems, like certain adenoviruses and lentiviral based viral vectors. Thus, among other improvements, the IscB system disclosed herein allow more flexible and effective strategies to manipulate and modify target polynucleotides.

### Omega IscB Compositions

[0119] In one aspect embodiments disclosed herein are direct to compositions comprising an IscB polypeptide and ωRNA having nuclease activity, which can be used in NHEJ and HDR mediated gene editing applications. Compositions also include IscB nickase variants, and catalytically inactive variants (“dIscB”). Compositions comprising catalytically inactive variants may be fused with other functional domains to enable alternate uses such as base editing, prime editing, Non-LTR retrotransposon mediated editing, and integrase mediated editing.

### IscB Polypeptides

[0120] In one example embodiment, IscB proteins may comprise a N-terminal PLMP domain, a RuvC endoculease, and a HNH domain. The RuvC domain may be a split RuvC domain comprising RuvC-I, RuvC-II, and RuvC-III subdomains. A bridge helix domain may be inserted between two of the RuvC domains. In one example embodiment, the bridge helix domain is inserted between the RuvC-I and RuvC-II subdomains. Unlike Cas9, IscB polypeptides do not contain a Rec domain. IscB proteins may also further comprise a conserved C-terminal domain.

[0121] In certain example embodiments, the IscB polypeptides are between 180 and 800 amino acids in size, between 200 and 790 amino acids in size, between 200 and 780 amino acids in size, between 200 and 770 amino acids in size, between 200 and 760 amino acids in size, between 200 and 750 amino acids in size, between 200 and 740 amino acids in size, between 200 and 730 amino acids in size, between 200 and 720 amino acids in size, between 200 and 720 amino acids in size, between 200 and 710 amino acids in size, between 200 and 700 amino acids in size, between 200 and 690 amino acids in size, between 200 and 680 amino acids in size, between 200 and 670 amino acids in size, between 200 and 660 amino acids in size, between 200 and 650 amino acids in size, between 200 and 640 amino acids in size, between 200 and 630 amino acids in size, between 200 and 620 amino acids in size, between 200 and 610 amino acids in size, between 200 and 600 amino acids in size, between 200 and 590 amino acids in size, between 200 and 580 amino acids in size, between 200 and 570 amino acids in size, between 200 and 560 amino acid, between 200 between 550 amino acids, between 200 and 540 amino acids, between 200 and 530 amino acids, between 200 and 520 amino acids, between 200 and 510 amino acids, between 200 and 500 amino acids, between 200 and 490 amino acids, between 200 and 480 amino acids, between 200 and 470 amino acids, between 200 and 460 amino acids, between 200 and 450 amino acids, between 200 and 440 amino acids, between 200 and 430 amino acids, between 200 and 420 amino acids, between 200 and 410 amino acids, between 200 and 400 amino acids, between 300 and 400 amino acids. between 300 and 500 amino acids, between 300 and 600 amino acids, between 400 and 500 amino acids, or between 500-600 amino acids. In one example embodiment, the polypeptide may range in size from 400-500 amino acids, 400-490 amino acids, 400-480 amino acids, 400-470 amino acids, 400-460 amino acids, 400-450 amino acids, 400-440 amino acids, 400-430 amino acids. Size variation may be dependent, in part, on the particular domain architecture of the IscB or its homolog.

[0122] The IscB polypeptides may be derived from a naturally occurring protein, a modified naturally occurring protein, functional fragment or truncated version thereof, or a non-naturally occurring protein. In one example embodiments, the IscB polypeptide may comprise one or more domains originating from other IscB polypeptide nucleases, more particularly originating from different organisms. In an embodiment, the IscB polypeptide nucleases may be designed by in silico approaches. Examples of in silico protein design have been described in the art and are therefore known to a skilled person. In particular embodiments, the IscB polypeptide loci is not associated with a CRISPR array.

[0123] The IscB polypeptides may also encompasses homologs or orthologs of IscB polypeptides whose sequences are specifically described herein. The terms “ortholog” and “homolog” are well known in the art. By means of further guidance, a “homolog” refers to two genes that share a common ancestral gene. Homologous proteins may but need not be structurally related or are only partially structurally related. An “ortholog” are two genes that share common ancestral gene but occur in different species. Orthologous proteins may but need not be structurally related or are only partially structurally related. In one embodiment, the homolog or ortholog of IscB polypeptide nucleases such as referred to herein have a sequence homology or identity of at least 80%, at least 85%, at least 90%, at least 95% with an IscB polypeptide nuclease. In further embodiments, the homolog or ortholog of an IscB polypeptide nuclease has a sequence identity of at least 80%, at least 85%, at least 90%, or at least 95% with a wildtype IscB polypeptide nuclease, in a particular embodiment, the IscB sequence is identified in Table 1A, Table 1B and Table 12.

[0124] The IscB polypeptide may comprise an inactive RuvC domain, an inactive HNH domain, or both. In an embodiment, the IscB polypeptide comprises an inactive RuvC domain. In one embodiment the IscB polypeptide comprising an inactive RuvC domain is a nickase. In one embodiment, the IscB nuclease has a sequence identity of at least 80%, at least 85%, at least 90%, or at least 95% with a wildtype IscB polypeptide, in an embodiment, an IscB sequence identified in Table 1C.

[0125] The IscB polypeptide may comprise an inactive HNH domain; in one embodiment the IscB polypeptide comprising an inactive HNH domain is a nickase. In one embodiment, the IscB nuclease has a sequence identity of at least 80%, at least 85%, at least 90%, or at least 95% with a wildtype IscB polypeptide, in an embodiment an IscB sequence identified in Table 1D.

[0126] In an embodiment, the IscB polypeptide comprises an inactive RuvC domain and an inactive HNH domain; in one embodiment the IscB polypeptide comprises an inactive RuvC domain and an inactive HNH domain and is catalytically inactive. In one embodiment, the IscB nuclease has a sequence identity of at least 80%, at least 85%, at least 90%, or at least 95% with a wildtype IscB polypeptide, in a particular embodiment, the IscB sequence is identified in Table 1E.

### Domains

[0127] In one example embodiment, an IscB polypeptide comprises moving from the N- to C-terminus, a PLMP domain, a RuvC-I subdomain, a bridge helix, a RuvC-II subdomain, a HNH domain, a RuvC-III subdomain, and a C terminal domain.

### RuvC Domain

[0128] The RuvC domain may comprise multiple subdomains, e.g., RuvC-I, RuvC-II and RuvC-III. The subdomains may be separated by interval sequences on the amino acid sequence of the protein.

[0129] Examples of RuvC domains include any polypeptides having a structural similarity and/or sequence similarity to a RuvC domain described in the art. For example, the RuvC domain may share a structural similarity and/or sequence similarity to a RuvC of Cas9. In some examples, the RuvC domain may have an amino acid sequence that share at least 50%, at least 55%, at least 60%, at least 5%, at least 70%, at least 75%, at least 80%, at least 85%, at least 90%, at least 95%, at least 99%, or 100% sequence identity with RuvC domains.

[0130] In some examples, the RuvC domain comprise RuvC-I polypeptide, RuvC-II polypeptide, and RuvC-III polypeptide. Examples of the RuvC-I domain also include any polypeptides having a structural similarity and/or sequence similarity to a RuvC-I domain described in the art. For example, the RuvC-I domain may share a structural similarity and/or sequence similarity to a RuvC-I of Cas9. In some examples, the RuvC domain may have an amino acid sequence that share at least 50%, at least 55%, at least 60%, at least 5%, at least 70%, at least 75%, at least 80%, at least 85%, at least 90%, at least 95%, at least 99%, or 100% sequence identity with RuvC-I domain. The RuvC-II domain also include any polypeptides a structural similarity and/or sequence similarity to a RuvC-II domain described in the art. For example, the RuvC-II domain may share a structural similarity and/or sequence similarity to a RuvC-II of Cas9. In some examples, the RuvC domain may have an amino acid sequence that share at least 50%, at least 55%, at least 60%, at least 5%, at least 70%, at least 75%, at least 80%, at least 85%, at least 90%, at least 95%, at least 99%, or 100% sequence identity with RuvC-II domains. The RuvC-III domain also include any polypeptides a structural similarity and/or sequence similarity to a RuvC-III domain described in the art. For example, the RuvC-III domains may share a structural similarity and/or sequence similarity to a RuvC-III of Cas9. In some examples, the RuvC domain may have an amino acid sequence that share at least 50%, at least 55%, at least 60%, at least 5%, at least 70%, at least 75%, at least 80%, at least 85%, at least 90%, at least 95%, at least 99%, or 100% sequence identity with RuvC-III domains.

[0131] For example, and as described in the art (e.g., Crystal structure of Cas9 in complex with guide RNA and target DNA, Nishimasu et al. Cell, 2014) the RuvC domain of Cas9 consists of a six-stranded mixed β-sheet (β1, β2, β5, β11, β14 and β17) flanked by α-helices (α33, α34 and α39-α45) and two additional two-stranded antiparallel β-sheets (β3/β4 and β15/β16). It has been described that the RuvC domain of Cas9 shares structural similarity with the retroviral integrase superfamily members characterized by an RNase H fold, such as Escherichia coli RuvC (PDB code 1HJR, 14% identity, root-mean-square deviation (rmsd) of 3.6 Å for 126 equivalent Cα atoms) and Thermus thermophilus RuvC (PDB code 4LD0, 12% identity, rmsd of 3.4 Å for 131 equivalent Cα atoms). E. coli RuvC is a 3-layer alpha-beta sandwich containing a 5-stranded beta-sheet sandwiched between 5 alpha-helices. RuvC nucleases have four catalytic residues (e.g., Asp7, Glu70, His143 and Asp146 in T. thermophilus RuvC), and cleave Holliday junctions (or structurally analogous cruciform junctions) through a two-metal mechanism. Asp10 (Ala), Glu762, His983 and Asp986 of the Cas9 RuvC domain are located at positions similar to those of the catalytic residues of T. thermophilus RuvC.

[0132] In an example embodiment, split Ruv-C domain of the IscB proteins may have an HNH domain located between the Ruv-C II and Ruv-C III subdomains as described in more detail below. For example, the IscB protein domain architecture is comprised of the PLMP (P) domain, RuvC-I-II-III domains, a bridge domain (B), an HNH domain and a 3′ terminal carboxyl (C) domain spanning 494 amino acids in the schematic shown in FIG. 9A. The bridge domain is located between the RuvC-I and RuvC-II domains and the HNH domain is located between the RuvC-II and RuvC-III domains (FIG. 9A).

### HNH Domain

[0133] HNH domain comprise two antiparallel β strands connected with a variable length loop, an alpha helix, with a metal binding site between the two. The HNH conserved sites are conserved across the HNH superfamily, with HNH conservation throughout bacteria. In Cas9 proteins, for example, the HNH domain comprises a two-stranded antiparallel β-sheet (β12 and β13) flanked by four α-helices (α35-α38). It shares structural similarity with the HNH endonucleases characterized by a ββα-metal fold, such as phage T4 endonuclease VII (Endo VII) (PDB code 2QNC, 20% identity, rmsd of 2.7 Å for 61 equivalent Cα atoms) and Vibrio vulnificus nuclease (PDB code 1OUP, 8% identity, rmsd of 2.7 Å for 77 equivalent Cα atoms). HNH nucleases have three catalytic residues (e.g., Asp40, His41, and Asn62 in Endo VII), and cleave nucleic acid substrates through a single-metal mechanism. In the structure of the Endo VII N62D mutant in complex with a Holliday junction, a Mg2+ ion is coordinated by Asp40, Asp62, and the oxygen atoms of the scissile phosphate group of the substrate, while His41 acts as a general base to activate a water molecule for catalysis. Asp839, His840, and Asn863 of the Cas9 HNH domain correspond to Asp40, His41, and Asn62 of Endo VII, respectively, consistent with the observation that His840 is critical for the cleavage of the complementary DNA strand. The N863A mutant functions as a nickase, indicating that Asn863 participates in catalysis. The Cas9 HNH domain may cleave the complementary strand of the target DNA through a single-metal mechanism, as observed for other HNH superfamily nucleases. Although the Cas9 HNH domain shares a ββα-metal fold with other HNH endonucleases, their overall structures are distinct, consistent with the differences in their substrate specificities. Accordingly, IscB polypeptides of the present invention may comprises similar HNH domains in terms of sequence and/or function and may likewise comprise mutations analogous to those described above for Cas9 which convert the IscB polypeptide to a nickase. In an exemplary embodiment, a mutation to catalytic RuvC-II residue corresponding to E157A in corresponding to the sequence numbering of AwaIscB in an IscB polypeptide can be performed to abolish or significantly reduce the nucleolytic activity on the non-target DNA strand.

### PLMP Domain

[0134] The IscB polypeptides comprise a conserved N-terminal domain, which is referred to herein as a PLMP domain or an X domain. In embodiments, the N-terminal X domain may have one or more conserved residues and/or motifs as identified in FIG. 3 and FIG. 10; see also FIG. 4-3 for PLMP motif alignment. In one embodiment, the PLMP domain comprises a conserved PLMP (SEQ ID NO:2372) amino acid motif. The PLMP motif can be located at or near the N terminus of the IscB polypeptide, including, for example at amino acids 12-15 of AwaIscB, or amino acids corresponding to A. warmingii IscB.

[0135] In some examples, the PLMP domain may be no more than 10, no more than 20, no more than 30, no more than 40, no more than 50, no more than 60, no more than 70, no more than 80, no more than 90, or no more than 100 amino acids in length. For example, the PLMP domain may be no more than 70 amino acids in length, such as comprising 2 3, 4, 5, 6, 7, 8, 9, 10, 11, 12, 13, 14, 15, 16, 17, 18, 19, 20, 21, 22, 23, 24, 25, 26, 27, 28, 29, 30, 31, 32, 33, 34, 35, 36, 37, 38, 39, 40, 41, 42, 43, 44, 45, 46, 47, 48, 49, 50, 51, 52, 53, 54, 55, 56, 57, 58, 59, 60, 61, 62, 63, 64, 65, 66, 67, 68, 69, or 70 amino acids in length. An example PLMP domain can be as identified in, e.g., FIG. 58. PLMP domains may be found upstream of the RuvC-I domain and/or Bridge Helix, where present, of an IscB polypeptide. In one embodiment, the PLMP domain is located within 150, 140, 130, 120, 110, 100, 90, 80, 70, 60, 50, 40, 30, 20 or 10 amino acids upstream of the RuvC-1 domain. See, e.g., FIG. 58.

[0136] In an aspect, truncation of the N-terminus domain of an IscB polypeptide, including, more than 4, 5, 6, 7, 8, 9, 10, 11, 12, 13, 14 or 15 amino acids, up to 70 amino acids of the N terminus, i.e., truncation of the PLMP domain, abolishes activity of the IscB polypeptide. In an aspect, more than 4 amino acids PLMP domain may reduce or abolish IscB activity. C-terminal domain.

[0137] The C-terminal domain (also referred to herein as a Y domain) may comprise one or more conserved residues or motifs as shown in FIG. 3. See also, FIGS. 4, 58; The C-terminal domain may be no more than 10, no more than 20, no more than 30, no more than 40, no more than 50, no more than 60, no more than 70, no more than 80, no more than 90, or no more than 100 amino acids in length. For example, the Y domain may be no more than 70 amino acids in length, such as comprising 2, 3, 4, 5, 6, 7, 8, 9, 10, 11, 12, 13, 14, 15, 16, 17, 18, 19, 20, 21, 22, 23, 24, 25, 26, 27, 28, 29, 30, 31, 32, 33, 34, 35, 36, 37, 38, 39, 40, 41, 42, 43, 44, 45, 46, 47, 48, 49, 50, 51, 52, 53, 54, 55, 56, 57, 58, 59, 60, 61, 62, 63, 64, 65, 66, 67, 68, 69, or 70 amino acids in length.

[0138] In an aspect, the IscB polypeptide comprises a C-terminal domain that is structurally homologous to a tudor domain. See, e.g., Ren et al., Cell Res. (2014) 24:1146-1149. Tudor domains typically comprise a barrel-shaped beta strand fold and range in size around 50 and 60 amino acids. See, e.g., Kawale, A. A. & Burmann, B. M. Inherent backbone dynamics fine-tune the functional plasticity of Tudor domains. Structure (2021), incorporated herein by reference; see, in particular, FIG. 1 showing exemplary tudor domain structure.

### Bridge Helix

[0139] The nucleic-acid guided nuclease comprises a bridge helix (BH) domain. The bridge helix domain refers to a helix and arginine rich polypeptide. The bridge helix domain may be located next to anyone of the amino acid domains in the nucleic-acid guided nuclease. In one embodiment, the bridge helix domain is next to a RuvC domain, e.g., next to RuvC-I, RuvC-II, or RuvC-III subdomain. In one example, the bridge helix domain is between a RuvC-1 and RuvC2 subdomains.

[0140] The bridge helix domain may be from 10 to 100, from 20 to 60, from 30 to 50, e.g., 35, 36, 37, 38, 39, 40, 41, 42, 43, 44, 45, 46 or 47, 48, 49, or 50 amino acids in length. Examples of bridge helix includes the polypeptide of amino acids 60-93 of the sequence of S. pyogenes Cas9.

[0141] In an embodiment, examples of the BH domain include those in Table 2. Examples of the BH domain also include any polypeptides a structural similarity and/or sequence similarity to a BH domain described in the art. For example, the BH domain may share a structural similarity and/or sequence similarity to a BH domain of Cas9. In some examples, the BH domain may have an amino acid sequence that share at least 50%, at least 55%, at least 60%, at least 5%, at least 70%, at least 75%, at least 80%, at least 85%, at least 90%, at least 95%, at least 99%, or 100% sequence identity with BH domains in Table 2.

### Example IscB Systems

[0142] Example IscB polypeptide and ωRNAs that may be used in the composition embodiments disclosed herein are set forth in Table 1A.

TABLE 1A
IscB and ωRNAs

| SEQ ID NO: | |
|---|---|
| IscB, ωRNA | Name |
| 4-5 | Ga0207030_1011 \| GENOME_ACESSION: Alteio_BWMinCont_147_$F_3300020741 GENOME_ID: |
| | 22586 CONTIG_ID: 10 SOURCE: JGI |
| 6-7 | Moorea sp. SIO3B2 3B2_NODE_173, whole genome shotgun sequence \| GENOME_ACESSION: |
| | GCA_010692525.1_ASM1069252v1_genomic GENOME_ID: 325542 CONTIG_ID: 100 SOURCE: |
| | NCBI_Prokaryotes |
| 8-9 | contig_4171967 \| GENOME_ACESSION: mgm4547164.3 GENOME_ID: 237431 CONTIG_ID: 388754 |
| | SOURCE: MG-RAST DATE: 2019 Jan. 27. |
| 10-11 | rumenHiSeq_NODE_3861232_len_211451_cov_5_332990 \| GENOME_ACESSION: |
| | IMG_2061766007_$F_2061766007 GENOME_ID: 27375 CONTIG_ID: 59183 SOURCE: JGI |
| 12-13 | Ga0334820_006144 \| GENOME_ACESSION: 713E2X2metaG_FD_$F_3300037089 GENOME_ID: |
| | 312159 CONTIG_ID: 6143 SOURCE: JGI |
| 14-15 | Ga0210025_1000354 \| GENOME_ACESSION: CryGey0102SPAdes_$F_3300025126 GENOME_ID: |
| | 25008 CONTIG_ID: 353 SOURCE: JGI |
| 16-17 | Ga0256405_10001455 \| GENOME_ACESSION: RumenRJG_02DNA_2_$F_3300028048 |
| | GENOME_ID: 34937 CONTIG_ID: 1454 SOURCE: JGI |
| 18-19 | Ga0224415_10000689 \| GENOME_ACESSION: 3300021399 GENOME_ID: 241587 CONTIG_ID: 297 |
| | SOURCE: JGI Dark_Harvest |
| 20-21 | Ga0210041_1000150 \| GENOME_ACESSION: CryGey2003SPAdes_$F_3300025034 GENOME_ID: |
| | 25011 CONTIG_ID: 149 SOURCE: JGI |
| 22-23 | Ga0163150_10004194 \| GENOME_ACESSION: OliLakLV19P2IB_2_$F_3300020195 GENOME_ID: |
| | 33727 CONTIG_ID: 4193 SOURCE: JGI |
| 24-25 | Ga0209777_10000113 \| GENOME_ACESSION: FrelakHBHBSPAdes_$F_3300027896 GENOME_ID: |
| | 26210 CONTIG_ID: 112 SOURCE: JGI |
| 26-27 | uncultured Clostridiales bacterium isolate RUG10138 genome assembly, contig: RUG10138_asm_5, |
| | whole genome shotgun sequence \| GENOME_ACESSION: |
| | GCA_902756305.1_Rumen_uncultured_genome_RUG10138_genomic GENOME_ID: 344355 |
| | CONTIG_ID: 4 SOURCE: NCBI_Prokaryotes |
| 28-29 | Ga0190327_1001504 \| GENOME_ACESSION: 48720401_MG_2_$F_3300021505 GENOME_ID: |
| | 20975 CONTIG_ID: 1503 SOURCE: JGI |
| 30-31 | Ga0376669_0068582 \| GENOME_ACESSION: CalSwaMetagenome_3_FD_$F_3300036830 |
| | GENOME_ID: 312381 CONTIG_ID: 68581 SOURCE: JGI |
| 32-33 | Ga0394878_0025107 \| GENOME_ACESSION: SIS_S4_MG_FD_$F_3300037310 GENOME_ID: |
| | 312643 CONTIG_ID: 25106 SOURCE: JGI |
| 34-35 | Ga0163150_10002834 \| GENOME_ACESSION: OliLakLV19P2IB_2_$F_3300020195 GENOME_ID: |
| | 33727 CONTIG_ID: 2833 SOURCE: JGI |
| 36-37 | Ga0208279_1011523 \| GENOME_ACESSION: AntAce02UKSPAdes_7_$F_3300025649 |
| | GENOME_ID: 22962 CONTIG_ID: 11522 SOURCE: JGI |
| 38-39 | Ga0247609_10000157 \| GENOME_ACESSION: 172DNAGHGlowgp2_2_$F_3300028888 |
| | GENOME_ID: 279758 CONTIG_ID: 156 SOURCE: JGI |
| 40-41 | Ga0116227_10015234 \| GENOME_ACESSION: S1TSphgellanicum_5_$F_3300009709 GENOME_ID: |
| | 34953 CONTIG_ID: 15233 SOURCE: JGI |
| 42-43 | wastewater metagenome genome assembly, contig: NODE_3741_length_6258_cov_6.828954, whole |
| | genome shotgun sequence \| GENOME_ACESSION: OVQQ01.1 GENOME_ID: 11626 CONTIG_ID: |
| | 3740 SOURCE: WGS |
| 44-45 | Ga0207421_10008055 \| GENOME_ACESSION: SodLak8KL_SPAdes_$F_3300027784 GENOME_ID: |
| | 35608 CONTIG_ID: 8054 SOURCE: JGI |
| 46-47 | k141_555391 flag = 1 multi = 18.2163 len = 111838 \| GENOME_ACESSION: mgm4781941.3 |
| | GENOME_ID: 238320 CONTIG_ID: 63078 SOURCE: MG-RAST |
| 48-49 | Candidatus Anoxychlamydiales bacterium isolate K940_chlam_1 K940chlam1_4, whole genome shotgun |
| | sequence \| GENOME_ACESSION: GCA_011064745.1_ASM1106474v1_genomic GENOME_ID: |
| | 327239 CONTIG_ID: 90 SOURCE: NCBI_Prokaryotes |
| 50-51 | Ga0172380_10022713 \| GENOME_ACESSION: Leawe162metaG_2_$F_3300014205 GENOME_ID: |
| | 31497 CONTIG_ID: 22712 SOURCE: JGI |
| 52-53 | Ga0310695_10007302 \| GENOME_ACESSION: RumRJGDNAv2_$F_3300032007 GENOME_ID: |
| | 280889 CONTIG_ID: 7301 SOURCE: JGI |
| 54-55 | contig_1148181 \| GENOME_ACESSION: mgm4547164.3 GENOME_ID: 237431 CONTIG_ID: 176019 |
| | SOURCE: MG-RAST DATE: 2019 Jan. 27. |
| 56-57 | contig_421708 \| GENOME_ACESSION: mgm4547164.3 GENOME_ID: 237431 CONTIG_ID: 76265 |
| | SOURCE: MG-RAST |
| 58-59 | Ga0255336_100223 \| GENOME_ACESSION: MeOH1_35cm_T3_17_2_$F_3300028024 |
| | GENOME_ID: 32475 CONTIG_ID: 222 SOURCE: JGI |
| 60-61 | Okeania sp. SIO315_315_NODE_11, whole genome shotgun sequence \| GENOME_ACESSION: |
| | GCA_010672085.1_ASM1067208v1_genomic GENOME_ID: 325455 CONTIG_ID: 12 SOURCE: |
| | NCBI_Prokaryotes |
| 62-63 | JGI11783J13700_1016113 \| GENOME_ACESSION: ElkSlonscriptome_47_$F_3300001214 |
| | GENOME_ID: 25904 CONTIG_ID: 483 SOURCE: JGI |
| 64-65 | Symploca sp. SIO2C1 2C1_NODE_137, whole genome shotgun sequence \| GENOME_ACESSION: |
| | GCA_010692635.1_ASM1069263v1_genomic GENOME_ID: 325548 CONTIG_ID: 42 SOURCE: |
| | NCBI_Prokaryotes |
| 66-67 | Burkholderiaceae bacterium 16 contig55, whole genome shotgun sequence \| GENOME_ACESSION: |
| | GCA_000955785.1_ASM95578v1_genomic GENOME_ID: 71753 CONTIG_ID: 209 SOURCE: |
| | NCBI_Prokaryotes |
| 68-69 | filamentous cyanobacterium ESFC-1 genomic scaffold A3MYDRAFT_scaffold1.1, whole genome |
| | shotgun sequence \| GENOME_ACESSION: GCA_000380225.1_ASM38022v1_genomic GENOME_ID: |
| | 49861 CONTIG_ID: 0 SOURCE: NCBI_Prokaryotes |
| 70-71 | Erysipelotrichaceae bacterium SG0102 DNA, complete genome \| GENOME_ACESSION: |
| | GCA_003925875.1_ASM392587v1_genomic GENOME_ID: 208690 CONTIG_ID: 0 SOURCE: |
| | NCBI_Prokaryotes |
| 72-73 | Ga0075125_10000791 \| GENOME_ACESSION: AntAceMinimDraft_18_$F_3300005935 |
| | GENOME_ID: 22974 CONTIG_ID: 790 SOURCE: JGI |
| 74-75 | Ga0180109_1294567 \| GENOME_ACESSION: EasRivAnnotation_4_$F_3300020067 GENOME_ID: |
| | 25739 CONTIG_ID: 523 SOURCE: JGI |
| 76-77 | Ga0073583_1167572 \| GENOME_ACESSION: IMG_3300005253_$F_3300005253 GENOME_ID: |
| | 27780 CONTIG_ID: 10098 SOURCE: JGI |
| 78-79 | Ga0070741_10072506 \| GENOME_ACESSION: CoaSoiStandDraft_11_$F_3300005529 GENOME_ID: |
| | 24556 CONTIG_ID: 72505 SOURCE: JGI |
| 80-81 | JGI12273J12029_10000967 \| GENOME_ACESSION: SoiCrureplicaC0C_FD_$F_3300000833 |
| | GENOME_ID: 310246 CONTIG_ID: 106 SOURCE: JGI |
| 82-83 | MIS_10001517 \| GENOME_ACESSION: IMG_3300002026_$F_3300002026 GENOME_ID: 305123 |
| | CONTIG_ID: 1516 SOURCE: JGI |
| 84-85 | MIS_1002273 \| GENOME_ACESSION: IMG_3300001765_$F_3300001765 GENOME_ID: 305120 |
| | CONTIG_ID: 2272 SOURCE: JGI |
| 86-87 | Ga0377217_000700 \| GENOME_ACESSION: AD121II_FD_$F_3300036959 GENOME_ID: 312260 |
| | CONTIG_ID: 699 SOURCE: JGI |
| 88-89 | Ga0180007_10009944 \| GENOME_ACESSION: MM_PC_MetaG_2_$F_3300014656 GENOME_ID: |
| | 32273 CONTIG_ID: 9943 SOURCE: JGI |
| 90-91 | Ga0233412_10000478 \| GENOME_ACESSION: Na_anoxic_4_MG_2_$F_3300023210 GENOME_ID: |
| | 33123 CONTIG_ID: 477 SOURCE: JGI |
| 92-93 | Clostridia bacterium isolate INTA.CYC.035 contig-100_13312, whole genome shotgun sequence \| |
| | GENOME_ACESSION: GCA_009929415.1_ASM992941v1_genomic GENOME_ID: 322825 |
| | CONTIG_ID: 177 SOURCE: NCBI_Prokaryotes |
| 94-95 | activated sludge metagenome genome assembly, contig: NODE_177_length_83344_cov_7.320066, |
| | whole genome shotgun sequence \| GENOME_ACESSION: UZXI01.1 GENOME_ID: 18141 |
| | CONTIG_ID: 176 SOURCE: WGS |
| 96-97 | human gut metagenome genome assembly, contig: NODE_944_length_18029_cov_11.5452, whole |
| | genome shotgun sequence \| GENOME_ACESSION: UPDH01.1 GENOME_ID: 16418 CONTIG_ID: |
| | 943 SOURCE: WGS DATE: 2019 Jan. 27. |
| 98-99 | Ga0180007_10001273 \| GENOME_ACESSION: MM_PC_MetaG_2_$F_3300014656 GENOME_ID: |
| | 32273 CONTIG_ID: 1272 SOURCE: JGI DATE: 2019 Jan. 27. |
| 100-101 | Ga0256407_10000103 \| GENOME_ACESSION: RumenRJG_04DNA_2_$F_3300028886 |
| | GENOME_ID: 280890 CONTIG_ID: 102 SOURCE: JGI DATE: 2019 Jun. 13. |
| 102-103 | Ga0373630_0001637 \| GENOME_ACESSION: YL18G_13C_MG_FD_$F_3300035179 GENOME_ID: |
| | 312754 CONTIG_ID: 1696 SOURCE: JGI DATE: 2020 Apr. 07. |
| 104-105 | human gut metagenome genome assembly, contig: NODE_298_length_70969_cov_7.505500, whole |
| | genome shotgun sequence \| GENOME_ACESSION: UPDC01.1 GENOME_ID: 16413 CONTIG_ID: |
| | 297 SOURCE: WGS DATE: 2019 Jan. 27. |
| 106-107 | human gut metagenome genome assembly, contig: scaffold2386_25, whole genome shotgun sequence \| |
| | GENOME_ACESSION: UMBD01.1 GENOME_ID: 15693 CONTIG_ID: 2562 SOURCE: WGS DATE: |
| | 2019 Jan. 27. |
| 108-109 | Ga0315279_10002905 \| GENOME_ACESSION: YL17G06_20_MG_2_$F_3300032070 GENOME_ID: |
| | 281630 CONTIG_ID: 2904 SOURCE: JGI DATE: 2019 Jun. 13. |
| 110--111 | Ga0194137_10007470 \| GENOME_ACESSION: TAR4v2_2_$F_3300018411 GENOME_ID: 35909 |
| | CONTIG_ID: 7469 SOURCE: JGI DATE: 2019 Jan. 27. |
| 112-113 | Ga0310696_10080563 \| GENOME_ACESSION: AusTroGonzalMGv2_2_$F_3300031993 |
| | GENOME_ID: 279930 CONTIG_ID: 80562 SOURCE: JGI DATE: 2019 Jun. 13. |
| 114-115 | human gut metagenome genome assembly, contig: NODE_66_length_128068_cov_9.837282, whole |
| | genome shotgun sequence \| GENOME_ACESSION: OWGP01.1 GENOME_ID: 11987 CONTIG_ID: 65 |
| | SOURCE: WGS DATE: 2019 Jan. 27. |
| 116-117 | Ga0307373_10037003 \| GENOME_ACESSION: OX2MG_2_$F_3300031672 GENOME_ID: 280771 |
| | CONTIG_ID: 37002 SOURCE: JGI DATE: 2019 Jun. 13. |
| 118-119 | Ga0373633_0030533 \| GENOME_ACESSION: RO12treamer_MG_2_FD_$F_3300035661 |
| | GENOME_ID: 312627 CONTIG_ID: 30532 SOURCE: JGI |
| 120-121 | Ktedonobacter sp. 13_2_20CM_2_56_8 13_2_20cm_2_scaffold_1557, whole genome shotgun sequence \| |
| | GENOME_ACESSION: GCA_001915055.1_ASM191505v1_genomic GENOME_ID: 113898 |
| | CONTIG_ID: 45 SOURCE: NCBI_Prokaryotes |
| 122-123 | Ga0209048_10010134 \| GENOME_ACESSION: FrelakCRCRSPAdes_$F_3300027902 GENOME_ID: |
| | 26208 CONTIG_ID: 10133 SOURCE: JGI |
| 124-125 | human gut metagenome genome assembly, contig: NODE_2129_length_9608_cov_1.985450, whole |
| | genome shotgun sequence \| GENOME_ACESSION: OOZA01.1 GENOME_ID: 8927 CONTIG_ID: |
| | 2128 SOURCE: WGS |
| 126-127 | Proteobacteria bacterium isolate F1-120-MAGs186 F1-120_c560309, whole genome shotgun sequence \| |
| | GENOME_ACESSION: GCA_005777235.1_ASM577723v1_genomic GENOME_ID: 284306 |
| | CONTIG_ID: 130 SOURCE: NCBI_Prokaryotes |
| 128-129 | Ga0256831_1000378 \| GENOME_ACESSION: 132544metaG_2_$F_3300028030 GENOME_ID: 20588 |
| | CONTIG_ID: 377 SOURCE: JGI |
| 130-131 | Ga0315550_1018591 \| GENOME_ACESSION: SalMarSW160190MG_4_$F_3300031653 |
| | GENOME_ID: 280938 CONTIG_ID: 18590 SOURCE: JGI |
| 132-133 | Ga0137384_10001405 \| GENOME_ACESSION: SagtaG_31_$F_3300012357 GENOME_ID: 35418 |
| | CONTIG_ID: 1404 SOURCE: JGI |
| 134-135 | human gut metagenome genome assembly, contig: NODE_13340_length_3149_cov_39.749515, whole |
| | genome shotgun sequence \| GENOME_ACESSION: OIWV01.1 GENOME_ID: 6110 CONTIG_ID: |
| | 13339 SOURCE: WGS |
| 136-137 | Ga0137365_10006127 \| GENOME_ACESSION: SagtaG_29_$F_3300012201 GENOME_ID: 35416 |
| | CONTIG_ID: 6126 SOURCE: JGI |
| 138-139 | human gut metagenome genome assembly, contig: NODE_3863_length_3753_cov_1.622173, whole |
| | genome shotgun sequence \| GENOME_ACESSION: ORBQ01.1 GENOME_ID: 10332 CONTIG_ID: |
| | 3862 SOURCE: WGS |
| 140-141 | human gut metagenome genome assembly, contig: NODE_801_length_33819_cov_6.114886, whole |
| | genome shotgun sequence \| GENOME_ACESSION: OGQE01.1 GENOME_ID: 4614 CONTIG_ID: 800 |
| | SOURCE: WGS |
| 142-143 | human metagenome genome assembly, contig: NODE_23_length_112647_cov_10.9368, whole genome |
| | shotgun sequence \| GENOME_ACESSION: ODKX01.1 GENOME_ID: 3080 CONTIG_ID: 22 |
| | SOURCE: WGS |
| 144-145 | Ga0070706_100018127 \| GENOME_ACESSION: KBSK5StandDraft_5_$F_3300005467 |
| | GENOME_ID: 30504 CONTIG_ID: 18126 SOURCE: JGI |
| 146-147 | Ga0137383_10047051 \| GENOME_ACESSION: SagtaG_26_$F_3300012199 GENOME_ID: 35413 |
| | CONTIG_ID: 47050 SOURCE: JGI |
| 148-149 | Ga0373956_0000940 \| GENOME_ACESSION: WV9ome_35_$F_3300035119 GENOME_ID: 307019 |
| | CONTIG_ID: 939 SOURCE: JGI |
| 150-151 | contig_6736066 \| GENOME_ACESSION: mgm4547164.3 GENOME_ID: 237431 CONTIG_ID: 457213 |
| | SOURCE: MG-RAST |
| 152-153 | Ga0256831_1010291 \| GENOME_ACESSION: 132544metaG_2_$F_3300028030 GENOME_ID: 20588 |
| | CONTIG_ID: 10290 SOURCE: JGI |
| 154-155 | Marinobacter lipolyticus BF04_CF-4 genomic scaffold A3OIDRAFT_scaffold_4.5, whole genome |
| | shotgun sequence \| GENOME_ACESSION: GCA_000372805.1_ASM37280v1_genomic GENOME_ID: |
| | 49512 CONTIG_ID: 70 SOURCE: NCBI_Prokaryotes |
| 156-157 | Ga0307968_1027799 \| GENOME_ACESSION: OrgLakmetagen650_2_$F_3300031399 GENOME_ID: |
| | 280800 CONTIG_ID: 27796 SOURCE: JGI |
| 158-159 | Moorea sp. SIO215 215_NODE_702, whole genome shotgun sequence \| GENOME_ACESSION: |
| | GCA_010672285.1_ASM1067228v1_genomic GENOME_ID: 325465 CONTIG_ID: 3298 SOURCE: |
| | NCBI_Prokaryotes |
| 160-161 | Geitlerinema sp. PCC 7105 genomic scaffold Gei7105DRAFT_GPC.5, whole genome shotgun sequence \| |
| | GENOME_ACESSION: GCA_000332355.1_ASM33235v1_genomic GENOME_ID: 47783 |
| | CONTIG_ID: 3 SOURCE: NCBI_Prokaryotes |
| 162-163 | Methylobacter whittenburyi strain UCM-B-3033 GY38DRAFT_scf7180000000022_quiver.3_C, whole |
| | genome shotgun sequence \| GENOME_ACESSION: GCA_000745375.1_ASM74537v1_genomic |
| | GENOME_ID: 66732 CONTIG_ID: 2 SOURCE: NCBI_Prokaryotes |
| 164-165 | JGI24702J35022_10000018 \| GENOME_ACESSION: TergutTh196P4_2_$F_3300002462 |
| | GENOME_ID: 36062 CONTIG_ID: 17 SOURCE: JGI |
| 166-167 | Leptospirillum ferrodiazotrophum UBAL3_9453_1, whole genome shotgun sequence \| |
| | GENOME_ACESSION: ACNP01.1 GENOME_ID: 279014 CONTIG_ID: 103 SOURCE: WGS |
| 168-169 | Ga0101770_1065076 \| GENOME_ACESSION: IMG_3300006674_$F_3300006674 GENOME_ID: |
| | 27981 CONTIG_ID: 25118 SOURCE: JGI |
| 170-171 | Ga0075125_10001675 \| GENOME_ACESSION: AntAceMinimDraft_18_$F_3300005935 |
| | GENOME_ID: 22974 CONTIG_ID: 1674 SOURCE: JGI |
| 172-173 | Ga0209347_1000563 \| GENOME_ACESSION: AutmicBR23SPAdes_$F_3300027640 GENOME_ID: |
| | 23478 CONTIG_ID: 562 SOURCE: JGI |
| 174-175 | Ga0209941_1000055 \| GENOME_ACESSION: ThiBioThioSPAdes_5_$F_3300024978 GENOME_ID: |
| | 36135 CONTIG_ID: 54 SOURCE: JGI |
| 176-177 | Ga0208186_100002 \| GENOME_ACESSION: Uti3Day2SPAdes_$F_3300026735 GENOME_ID: 37211 |
| | CONTIG_ID: 1 SOURCE: JGI |
| 178-179 | Ga0315284_10000153 \| GENOME_ACESSION: YL17G09_16_MG_2_$F_3300032053 GENOME_ID: |
| | 281635 CONTIG_ID: 152 SOURCE: JGI DATE: 2019 Jun. 13. |
| 180-181 | Nocardiopsis sp. JB363 genome assembly, contig: Scaffold25, whole genome shotgun sequence \| |
| | GENOME_ACESSION: GCA_900143625.1_ASM90014362v1_genomic GENOME_ID: 187582 |
| | CONTIG_ID: 87 SOURCE: NCBI_Prokaryotes |
| 182-183 | Wastewater metagenome scaffold_5, whole genome shotgun sequence \| GENOME_ACESSION: |
| | RCMZ01.1 GENOME_ID: 14570 CONTIG_ID: 5 SOURCE: WGS |
| 184-185 | Ga0371488_0019773 \| GENOME_ACESSION: MB2SIPfraction_8_$F_3300033983 GENOME_ID: |
| | 280663 CONTIG_ID: 19772 SOURCE: JGI |
| 186-187 | Ga0302192_10002069 \| GENOME_ACESSION: II_Bog_E3_2_2_$F_3300030507 GENOME_ID: |
| | 280464 CONTIG_ID: 2068 SOURCE: JGI DATE: 2019 Jun. 13. |
| 188-189 | Ga0376455_0025877 \| GENOME_ACESSION: Beaver2Cecum1_2_$F_3300035501 GENOME_ID: |
| | 304484 CONTIG_ID: 25876 SOURCE: JGI |
| 190-191 | NODE_97041_length_14755_cov_4.431176 \| GENOME_ACESSION: mgm4743569.3 GENOME_ID: |
| | 238070 CONTIG_ID: 7617 SOURCE: MG-RAST |
| 192-193 | Ga0265294_10008100 \| GENOME_ACESSION: MunlanPumphouse3_2_$F_3300028602 |
| | GENOME_ID: 280699 CONTIG_ID: 8099 SOURCE: JGI |
| 194-195 | Ga0104756_1007894 \| GENOME_ACESSION: IMG_3300007352_$F_3300007352 GENOME_ID: |
| | 28138 CONTIG_ID: 7893 SOURCE: JGI |
| 196-197 | Ga0394872_0157437 \| GENOME_ACESSION: CP_S2_MG_FD_$F_3300037308 GENOME_ID: |
| | 312363 CONTIG_ID: 157436 SOURCE: JGI |
| 198-199 | Ga0376456_0000023 \| GENOME_ACESSION: Beaon1_8_$F_3300035502 GENOME_ID: 304479 |
| | CONTIG_ID: 22 SOURCE: JGI |
| 200-201 | Ga0370511 0001040 \| GENOME_ACESSION: Frozen_pond_0310_2_$F_3300035210 GENOME_ID: |
| | 304715 CONTIG_ID: 1039 SOURCE: JGI |
| 202-203 | JGI25616J43925_10003507 \| GENOME_ACESSION: GraSoi2013_100cm_2_$F_3300002917 |
| | GENOME_ID: 26954 CONTIG_ID: 3506 SOURCE: JGI |
| 204-205 | Ga0315295_10008866 \| GENOME_ACESSION: YL17G14_0_MG_2_$F_3300032156 GENOME_ID: |
| | 281646 CONTIG_ID: 8865 SOURCE: JGI DATE: 2019 Jun. 13. |
| 206-207 | Ga0256845_1000645 \| GENOME_ACESSION: RiftiametaG_2_$F_3300028029 GENOME_ID: 34913 |
| | CONTIG_ID: 644 SOURCE: JGI DATE: 2019 Jan. 27. |
| 208-209 | human gut metagenome genome assembly, contig: scaffold23046_11, whole genome shotgun sequence \| |
| | GENOME_ACESSION: ULYY01.1 GENOME_ID: 15636 CONTIG_ID: 26983 SOURCE: WGS |
| | DATE: 2019 Jan. 27. |
| 210-211 | Chloroflexi bacterium isolate CF_154_14_0903_05_20cm scaffold_224, whole genome shotgun |
| | sequence \| GENOME_ACESSION: GCA_005879655.1 ASM587965v1_genomic GENOME_ID: |
| | 285751 CONTIG_ID: 235 SOURCE: NCBI_Prokaryotes DATE: 2019 Jul. 22. |
| 212-213 | Ga0376455_0000343 \| GENOME_ACESSION: Beaver2Cecum1_2_$F_3300035501 GENOME_ID: |
| | 304484 CONTIG_ID: 342 SOURCE: JGI DATE: 2019 Nov. 15. |
| 214-215 | Leptolyngbyaceae cyanobacterium CCMR0082 Scaffold_1b, whole genome shotgun sequence \| |
| | GENOME_ACESSION: GCA_011009535.1_ASM1100953v1_genomic GENOME_ID: 325887 |
| | CONTIG_ID: 11 SOURCE: NCBI_Prokaryotes DATE: 2020 Apr. 22. |
| 216-217 | Scytonema sp. HK-05 NIES-2130_Scaffold_41, whole genome shotgun sequence \| |
| | GENOME_ACESSION: GCA_001904675.1_ASM190467v1_genomic GENOME_ID: 113419 |
| | CONTIG_ID: 115 SOURCE: NCBI_Prokaryotes DATE: 2019 Jan. 27. |
| 218-219 | Ga0310150_005743 \| GENOME_ACESSION: K76_2_$F_3300033987 GENOME_ID: 280576 |
| | CONTIG_ID: 5742 SOURCE: JGI DATE: 2019 Jun. 13. |
| 220-221 | Leptospirillum rubarum LeptoII_Scaffold_8524 genomic scaffold, whole genome shotgun sequence \| |
| | GENOME_ACESSION: GCA_000205145.2_ASM20514v2_genomic GENOME_ID: 242318 |
| | CONTIG_ID: 3 SOURCE: NCBI_Prokaryotes DATE: 2019 May 30. |
| 222-223 | Ga0209061_1001914 \| GENOME_ACESSION: CoaSoiSPAdes_10_$F_3300027968 GENOME_ID: |
| | 24544 CONTIG_ID: 1913 SOURCE: JGI DATE: 2019 Jan. 27. |
| 224-225 | Ga0334887_1007052 \| GENOME_ACESSION: GraSluR1_MG_15_$F_3300033169 GENOME_ID: |
| | 280352 CONTIG_ID: 7051 SOURCE: JGI DATE: 2019 Jun. 13. |
| 226-227 | Halomonas jeotgali Hwa 50.KUC.1_11, whole genome shotgun sequence \| GENOME_ACESSION: |
| | GCA_000334215.1_Hwa_genomic GENOME_ID: 47861 CONTIG_ID: 10 SOURCE: |
| | NCBI_Prokaryotes DATE: 2019 Jan. 27. |
| 228-229 | Ga0222658_1000616 \| GENOME_ACESSION: AntAcemetagen476_2_$F_3300023257 GENOME_ID: |
| | 23034 CONTIG_ID: 615 SOURCE: JGI DATE: 2019 Jan. 27. |
| 230-231 | rumenHiSeq_NODE_4217176_len_12824_cov_1_499766 \| GENOME_ACESSION: |
| | IMG_2061766007_$F_2061766007 GENOME_ID: 27375 CONTIG_ID: 82748 SOURCE: JGI DATE: |
| | 2019 Jan. 27. |
| 232-233 | Microcystis aeruginosa PCC 7941 genomic scaffold, AAI_D_2198_scaffold23, whole genome shotgun |
| | sequence \| GENOME_ACESSION: GCA_000312205.1_ASM31220v1_genomic GENOME_ID: 46951 |
| | CONTIG_ID: 22 SOURCE: NCBI_Prokaryotes DATE: 2019 Jan. 27. |
| 234-235 | Ga0255147_1001158 \| GENOME_ACESSION: Atl_Miss_RepA_8h_2_$F_3300024289 GENOME_ID: |
| | 23386 CONTIG_ID: 1157 SOURCE: JGI DATE: 2019 Jan. 27. |
| 236-237 | Ga0137716_10010158 \| GENOME_ACESSION: IMG_3300010938_$F_3300010938 GENOME_ID: |
| | 28662 CONTIG_ID: 10157 SOURCE: JGI DATE: 2019 Jan. 27. |
| 238-239 | Ga0257068_1000081 \| GENOME_ACESSION: GoafecGen5Rep2v2_$F_3300023705 GENOME_ID: |
| | 280338 CONTIG_ID: 80 SOURCE: JGI DATE: 2019 Jun. 13. |
| 240-241 | Desulfobacter sp. isolate S02.Bin034 NODE_29_length_48907_cov_12.536371, whole genome shotgun |
| | sequence \| GENOME_ACESSION: GCA_011391705.1_ASM1139170v1_genomic GENOME_ID: |
| | 329340 CONTIG_ID: 28 SOURCE: NCBI_Prokaryotes DATE: 2020 Apr. 22. |
| 242-243 | Anaerobic digester metagenome 6175, whole genome shotgun sequence \| GENOME_ACESSION: |
| | MTBK01.1 GENOME_ID: 1684 CONTIG_ID: 79072 SOURCE: WGS DATE: 2019 Jan. 27. |
| 244-245 | Fischerella sp. PCC 9605 FIS9605DRAFT_scaffold12.12_C, whole genome shotgun sequence \| |
| | GENOME_ACESSION: GCA_000517105.1_ASM51710v1_genomic GENOME_ID: 55988 |
| | CONTIG_ID: 3 SOURCE: NCBI_Prokaryotes DATE: 2019 Jan. 27. |
| 246-247 | Ga0187846_10005139 \| GENOME_ACESSION: TC_taG_2_$F_3300021476 GENOME_ID: 35912 |
| | CONTIG_ID: 5138 SOURCE: JGI DATE: 2019 Jan. 27. |
| 248-249 | Moorea sp. SIO3G5 3G5_NODE_179, whole genome shotgun sequence \| GENOME_ACESSION: |
| | GCA_010692495.1_ASM1069249v1_genomic GENOME_ID: 325541 CONTIG_ID: 878 SOURCE: |
| | NCBI_Prokaryotes DATE: 2020 Apr. 22. |
| 250-251 | KEY_1011702 \| GENOME_ACESSION: IMG_3300000938_$F_3300000938 GENOME_ID: 308319 |
| | CONTIG_ID: 3733 SOURCE: JGI DATE: 2020 Apr. 07. |
| 252-253 | Ga0172380_10006798 \| GENOME_ACESSION: Leawe162metaG_2_$F_3300014205 GENOME_ID: |
| | 31497 CONTIG_ID: 6797 SOURCE: JGI DATE: 2019 Jan. 27. |
| 254-255 | Ga0114359_1005163 \| GENOME_ACESSION: IMG_3300008122_$F_3300008122 GENOME_ID: |
| | 305744 CONTIG_ID: 5162 SOURCE: JGI DATE: 2019 Nov. 15. |
| 256-257 | Ga0394881_0010240 \| GENOME_ACESSION: WSA_S1_MG_FD_$F_3300037311 GENOME_ID: |
| | 312717 CONTIG_ID: 10239 SOURCE: JGI DATE: 2020 Apr. 07. |
| 258-259 | Erysipelotrichaceae bacterium SG0102 DNA, complete genome \| GENOME_ACESSION: |
| | GCA_003925875.1_ASM392587v1_genomic GENOME_ID: 208690 CONTIG_ID: 0 SOURCE: |
| | NCBI_Prokaryotes DATE: 2019 Jan. 27. |
| 260-261 | Ga0247609_10038159 \| GENOME_ACESSION: 172DNAGHGlowgp2_2_$F_3300028888 |
| | GENOME_ID: 279758 CONTIG_ID: 38151 SOURCE: JGI DATE: 2019 Jun. 13. |
| 262-263 | Pseudomonas sp. OV081 Ga0215794_101, whole genome shotgun sequence \| GENOME_ACESSION: |
| | GCA_003391585.1_ASM339158v1_genomic GENOME_ID: 169706 CONTIG_ID: 0 SOURCE: |
| | NCBI_Prokaryotes DATE: 2019 Jan. 27. |
| 264-265 | Ga0307373_10033165 \| GENOME_ACESSION: OX2MG_2_$F_3300031672 GENOME_ID: 280771 |
| | CONTIG_ID: 33164 SOURCE: JGI DATE: 2019 Jun. 13. |
| 266-267 | Ga0118725_1008328 \| GENOME_ACESSION: IMG_3300009377_$F_3300009377 GENOME_ID: |
| | 311715 CONTIG_ID: 8327 SOURCE: JGI DATE: 2020 Apr. 07. |
| 268-269 | Ga0247841_10001800 \| GENOME_ACESSION: LaCruzMarch2015 16_$F_3300029286 |
| | GENOME_ID: 280592 CONTIG_ID: 1799 SOURCE: JGI DATE: 2019 Jun. 13. |
| 270-271 | Ga0194121_10011106 \| GENOME_ACESSION: TA2MahCa50mmetaG_2_$F_3300020200 |
| | GENOME_ID: 35901 CONTIG_ID: 11105 SOURCE: JGI DATE: 2019 Jan. 27. |
| 272-273 | ElkS_mat_CD6ADRAFT_1002000 \| GENOME_ACESSION: ElkSloMetagenome_4_$F_3300000354 |
| | GENOME_ID: 25895 CONTIG_ID: 1999 SOURCE: JGI DATE: 2019 Jan. 27. |
| 274-275 | Museum specimen metagenome DNA, contig: SAMD00035458.scaffold_600, whole genome shotgun |
| | sequence \| GENOME_ACESSION: BCQK01.1 GENOME_ID: 159 CONTIG_ID: 600 SOURCE: WGS |
| | DATE: 2019 Jan. 27. |
| 276-277 | Ga0170573_10661034 \| GENOME_ACESSION: IMG_3300013232_$F_3300013232 GENOME_ID: |
| | 28678 CONTIG_ID: 11314 SOURCE: JGI DATE: 2019 Jan. 27. |
| 278-279 | Beggiatoa sp. 4572_84 ex4572_84_scaffold_4922, whole genome shotgun sequence \| |
| | GENOME_ACESSION: GCA_002085445.1_ASM208544v1_genomic GENOME_ID: 120561 |
| | CONTIG_ID: 281 SOURCE: NCBI_Prokaryotes DATE: 2019 Jan. 27. |
| 280-281 | Groundwater metagenome DNA, contig: GPS12011_contig_3985, whole genome shotgun sequence \| |
| | GENOME_ACESSION: BBPF01.1 GENOME_ID: 157 CONTIG_ID: 3224 SOURCE: WGS DATE: |
| | 2019 Jan. 27. |
| 282-283 | Ga0315276_10000018 \| GENOME_ACESSION: YL17G05_0_MG_2_$F_3300032177 GENOME_ID: |
| | 281627 CONTIG_ID: 17 SOURCE: JGI DATE: 2019 Jun. 13. |
| 284-285 | Ga0117909_1048905 \| GENOME_ACESSION: IMG_3300009320_$F_3300009320 GENOME_ID: |
| | 311703 CONTIG_ID: 48904 SOURCE: JGI DATE: 2020 Apr. 07. |
| 286-287 | human gut metagenome genome assembly, contig: NODE_25_length_91722_cov_8.591391, whole |
| | genome shotgun sequence \| GENOME_ACESSION: OIYR01.1 GENOME_ID: 6152 CONTIG_ID: 24 |
| | SOURCE: WGS DATE: 2019 Jan. 27. |
| 288-289 | human gut metagenome genome assembly, contig: NODE_113_length_83145_cov_5.672704, whole |
| | genome shotgun sequence \| GENOME_ACESSION: OLRJ01.1 GENOME_ID: 7925 CONTIG_ID: 112 |
| | SOURCE: WGS DATE: 2019 Jan. 27. |
| 290-291 | Ga0074469_10883752 \| GENOME_ACESSION: IMG_3300005832_$F_3300005832 GENOME_ID: |
| | 311650 CONTIG_ID: 72826 SOURCE: JGI DATE: 2020 Apr. 07. |
| 292-293 | Ga0209253_10060444 \| GENOME_ACESSION: FrelakBRBRSPAdes_$F_3300027900 GENOME_ID: |
| | 26207 CONTIG_ID: 60443 SOURCE: JGI DATE: 2019 Jan. 27. |
| 294-295 | Ga0172378_10009394 \| GENOME_ACESSION: GrowelOW332metaG_2_$F_3300014203 |
| | GENOME_ID: 27072 CONTIG_ID: 9393 SOURCE: JGI DATE: 2019 Jan. 27. |
| 296-297 | Ga0137388_10019024 \| GENOME_ACESSION: 15con2h14AmetaG_2_$F_3300012189 GENOME_ID: |
| | 20760 CONTIG_ID: 19023 SOURCE: JGI DATE: 2019 Jan. 27. |
| 298-299 | Ga0126377_10033159 \| GENOME_ACESSION: PanSoiMetPlot_22_2_$F_3300010362 GENOME_ID: |
| | 34141 CONTIG_ID: 33158 SOURCE: JGI DATE: 2019 Jan. 27. |
| 300-301 | AAAGATAC-AGAAGACT_L001_R1_001_(paired)_trimmed_(paired)_contig_11_[cov = 823346] |
| | GENOME_ACESSION: mgm4581772.3 GENOME_ID: 237567 CONTIG_ID: 9 SOURCE: MG-RAST |
| | DATE: 2019 Jan. 27. |
| 302-303 | Streptomyces sp. SAT1 chromosome, complete genome \| GENOME_ACESSION: |
| | GCA_001654495.1_ASM165449v1_genomic GENOME_ID: 102820 CONTIG_ID: 0 SOURCE: |
| | NCBI_Prokaryotes D ATE: 2019 Jan. 27. |
| 304-305 | NODE_1262_length_19346_cov_6.071588, whole genome shotgun sequence \| GENOME_ACESSION: |
| | GCA_009843725.1_ASM984372v1_genomic GENOME_ID: 319939 CONTIG_ID: 76 SOURCE: |
| | NCBI_Prokaryotes DATE: 2020 Apr. 22. |
| 306-307 | Ga0376441_00010 \| GENOME_ACESSION: stlouis1_FD_$F_3300035388 GENOME_ID: 312032 |
| | CONTIG_ID: 9 SOURCE: JGI DATE: 2020 Apr. 07. |
| 308-309 | human metagenome genome assembly, contig: NODE_158_length_54829_cov_5.54544, whole genome |
| | shotgun sequence \| GENOME_ACESSION: ODWR01.1 GENOME_ID: 3365 CONTIG_ID: 157 |
| | SOURCE: WGS DATE: 2019 Jan. 27. |
| 310-311 | Ga0307374_10008841 \| GENOME_ACESSION: OX3MG_2_$F_3300031670 GENOME_ID: 280772 |
| | CONTIG_ID: 8840 SOURCE: JGI DATE: 2019 Jun. 13. |
| 312-313 | Ga0111052_100017 \| GENOME_ACESSION: IMG_3300007996_$F_3300007996 GENOME_ID: |
| | 28344 CONTIG_ID: 16 SOURCE: JGI DATE: 2019 Jan. 27. |
| 314-315 | Ga0210003_1012872 \| GENOME_ACESSION: LanmetSPAdes_$F_3300024262 GENOME_ID: 31358 |
| | CONTIG_ID: 12871 SOURCE: JGI DATE: 2019 Jan. 27. |
| 316-317 | Ga0310695_10070301 \| GENOME_ACESSION: RumRJGDNAv2_$F_3300032007 GENOME_ID: |
| | 280889 CONTIG_ID: 70297 SOURCE: JGI DATE: 2019 Jun. 13. |
| 318-319 | Ga0137371_10000096 \| GENOME_ACESSION: SagtaG_43_$F_3300012356 GENOME_ID: 35430 |
| | CONTIG_ID: 95 SOURCE: JGI DATE: 2019 Jan. 27. |
| 320-321 | human gut metagenome genome assembly, contig: NODE_633_length_34118_cov_2.922379, whole |
| | genome shotgun sequence \| GENOME_ACESSION: OPBE01.1 GENOME_ID: 8983 CONTIG_ID: 632 |
| | SOURCE: WGS DATE: 2019 Jan. 27. |
| 322-323 | Ga0129284_10010797 \| GENOME_ACESSION: IMG_3300009514_$F_3300009514 GENOME_ID: |
| | 311720 CONTIG_ID: 10796 SOURCE: JGI DATE: 2020 Apr. 07. |
| 324-325 | Human gut metagenome isolate S6163 scaffold_1873, whole genome shotgun sequence \| |
| | GENOME_ACESSION: QZLU01.1 GENOME_ID: 14549 CONTIG_ID: 1871 SOURCE: WGS DATE: |
| | 2019 Jan. 27. |
| 326-327 | Ga0315288_10027781 \| GENOME_ACESSION: YL17G11_20_MG_2_$F_3300031772 GENOME_ID: |
| | 281639 CONTIG_ID: 27780 SOURCE: JGI DATE: 2019 Jun. 13. |
| 328-329 | Ga0123349_10013493 \| GENOME_ACESSION: ElkDunMetagenome_6_$F_3300012983 |
| | GENOME_ID: 25860 CONTIG_ID: 13492 SOURCE: JGI DATE: 2019 Jan. 27. |
| 330-331 | Ga0117908_1041818 \| GENOME_ACESSION: IMG_3300009314_$F_3300009314 GENOME_ID: |
| | 311702 CONTIG_ID: 41817 SOURCE: JGI DATE: 2020 Apr. 07. |
| 332-333 | Ga0395718_000631 \| GENOME_ACESSION: 713C1X0metaG_FD_$F_3300037107 GENOME_ID: |
| | 312125 CONTIG_ID: 630 SOURCE: JGI DATE: 2020 Apr. 07. |
| 334-335 | Ga0187860_1009162 \| GENOME_ACESSION: June2016WEW_10_4_2_$F_3300018014 |
| | GENOME_ID: 30387 CONTIG_ID: 9161 SOURCE: JGI DATE: 2019 Jan. 27. |
| 336-337 | Ga0074046_10018987 \| GENOME_ACESSION: BogForStandDraft_3_$F_3300010339 GENOME_ID: |
| | 23904 CONTIG_ID: 18986 SOURCE: JGI DATE: 2019 Jan. 27. |
| 338-339 | Ga0307380_10077270 \| GENOME_ACESSION: UN3MG_2_$F_3300031539 GENOME_ID: 281081 |
| | CONTIG_ID: 77269 SOURCE: JGI DATE: 2019 Jun. 13. |
| 340-341 | Ga0209647_1007495 \| GENOME_ACESSION: GraSoiAngeSPAdes_43_$F_3300026319 |
| | GENOME_ID: 26992 CONTIG_ID: 7494 SOURCE: JGI DATE: 2019 Jan. 27. |
| 342-343 | human gut metagenome genome assembly, contig: NODE_5822_length_3860_cov_1.827332, whole |
| | genome shotgun sequence \| GENOME_ACESSION: OKVP01.1 GENOME_ID: 7395 CONTIG_ID: |
| | 5821 SOURCE: WGS DATE: 2019 Jan. 27. |
| 344-345 | Ga0070698_100018796 \| GENOME_ACESSION: KBSK1StandDraft_6_$F_3300005471 |
| | GENOME_ID: 30496 CONTIG_ID: 18795 SOURCE: JGI DATE: 2019 Jan. 27. |
| 346-347 | Tepidimonas sp. SPSP-6 Tepi_SPSP6_38, whole genome shotgun sequence \| GENOME_ACESSION: |
| | GCA_007556685.1_ASM755668v1_genomic GENOME_ID: 294239 CONTIG_ID: 59 SOURCE: |
| | NCBI_Prokaryotes DATE: 2019 Nov. 09. |
| 348-349 | human gut metagenome genome assembly, contig: NODE_1020_length_31560_cov_3.164799, whole |
| | genome shotgun sequence \| GENOME_ACESSION: UYDE01.1 GENOME_ID: 279396 CONTIG_ID: |
| | 1019 SOURCE: WGS DATE: 2019 Jun. 06. |
| 350-351 | Ga0190367_1011244 \| GENOME_ACESSION: 4872181011_MG_2_$F_3300022470 GENOME_ID: |
| | 20998 CONTIG_ID: 11243 SOURCE: JGI DATE: 2019 Jan. 27. |
| 352-353 | Azohydromonas sp. 13393 Scaffold36, whole genome shotgun sequence \| GENOME_ACESSION: |
| | GCA_009760915.1_ASM976091v1_genomic GENOME_ID: 317215 CONTIG_ID: 145 SOURCE: |
| | NCBI_Prokaryotes DATE: 2020 Apr. 22. |
| 354-355 | Draft_c051504 \| GENOME_ACESSION: IMG_3300000053_$F_3300000053 GENOME_ID: 27425 |
| | CONTIG_ID: 4381 SOURCE: JGI DATE: 2019 Jan. 27. |
| 356-357 | Moorea sp. SIO318 3I8_NODE_1, whole genome shotgun sequence \| GENOME_ACESSION: |
| | GCA_010692325.1 ASM1069232v1_genomic GENOME_ID: 325532 CONTIG_ID: 0 SOURCE: |
| | NCBI_Prokaryotes DATE: 2020 Apr. 22. |
| 358-359 | Methanosarcina sp. 2.H.T.1A.3 scaffold7_1_size162551-refined, whole genome shotgun sequence \| |
| | GENOME_ACESSION: GCA_000979425.1_gtlEnvA5udCFS_genomic GENOME_ID: 234720 |
| | CONTIG_ID: 76 SOURCE: NCBI_Archaea DATE: 2019 Jan. 27. |
| 360-361 | KEY_1008596 \| GENOME_ACESSION: IMG_3300000938_$F_3300000938 GENOME_ID: 308319 |
| | CONTIG_ID: 2543 SOURCE: JGI DATE: 2020 Apr. 07. |
| 362-363 | Ga0376654_0004951 \| GENOME_ACESSION: AusEucMetagenome_6_FD_$F_3300036782 |
| | GENOME_ID: 312290 CONTIG_ID: 4950 SOURCE: JGI DATE: 2020 Apr. 07. |
| 364-365 | Ga0070741_10036040 \| GENOME_ACESSION: CoaSoiStandDraft_11_$F_3300005529 GENOME_ID: |
| | 24556 CONTIG_ID: 36039 SOURCE: JGI DATE: 2019 Jan. 27. |
| 366-367 | TPA_asm: Methanosarcinales archaeon UBA203 UBA203_contig_49351, whole genome shotgun |
| | sequence \| GENOME_ACESSION: GCA_002503595.1_ASM250359v1_genomic GENOME_ID: |
| | 235754 CONTIG_ID: 165 SOURCE: NCBI_Archaea DATE: 2019 Jan. 27. |
| 368-369 | Ga0376443_00295 \| GENOME_ACESSION: stlouis3_FD_$F_3300035390 GENOME_ID: 312034 |
| | CONTIG_ID: 294 SOURCE: JGI DATE: 2020 Apr. 07. |
| 370-371 | Ga0211577_10055383 \| GENOME_ACESSION: IMG_3300020469_$F_3300020469 GENOME_ID: |
| | 278952 CONTIG_ID: 55382 SOURCE: JGI DATE: 2019 Jun. 01. |
| 372-373 | Burkholderia turbans type strain LMG 29316 genome assembly, contig: contig000014, whole genome |
| | shotgun sequence \| GENOME_ACESSION: GCA_001544655.2_ASM154465v2_genomic |
| | GENOME_ID: 98378 CONTIG_ID: 67 SOURCE: NCBI_Prokaryotes DATE: 2019 Jan. 27. |
| 374-375 | human gut metagenome genome assembly, contig: NODE_575_length_29402_cov_7.466760, whole |
| | genome shotgun sequence \| GENOME_ACESSION: OLPO01.1 GENOME_ID: 7878 CONTIG_ID: 574 |
| | SOURCE: WGS DATE: 2019 Jan. 27. |
| 376-377 | Ga0061017_10387965 \| GENOME_ACESSION: CoaofCornStover_3_$F_3300031119 GENOME_ID: |
| | 280051 CONTIG_ID: 7826 SOURCE: JGI DATE: 2019 Jun. 13. |
| 378-379 | Ga0310140_0030813 \| GENOME_ACESSION: K1A_FD_$F_3300035703 GENOME_ID: 312523 |
| | CONTIG_ID: 30812 SOURCE: JGI DATE: 2020 Apr. 07. |
| 380-381 | human gut metagenome genome assembly, contig: NODE_1950_length_25370_cov_3.785187, whole |
| | genome shotgun sequence \| GENOME_ACESSION: ORVF01.1 GENOME_ID: 10838 CONTIG_ID: |
| | 1949 SOURCE: WGS DATE: 2019 Jan. 27. |
| 382-383 | Ga0120377_1000528 \| GENOME_ACESSION: IMG_3300013830_$F_3300013830 GENOME_ID: |
| | 278117 CONTIG_ID: 527 SOURCE: JGI DATE: 2019 Jun. 01. |
| 384-385 | Ga0209066_10011920 \| GENOME_ACESSION: AllZonSPAdes_$F_3300027851 GENOME_ID: 22535 |
| | CONTIG_ID: 11919 SOURCE: JGI DATE: 2019 Jan. 27. |
| 386-387 | Ga0373621_017898 \| GENOME_ACESSION: YL18G_03A_MG_2_$F_3300035099 GENOME_ID: |
| | 307034 CONTIG_ID: 17897 SOURCE: JGI DATE: 2019 Nov. 15. |
| 388-389 | Ga0209726_10008685 \| GENOME_ACESSION: Subgroc54mSPAdes_$F_3300027815 GENOME_ID: |
| | 35774 CONTIG_ID: 8684 SOURCE: JGI DATE: 2019 Jan. 27. |
| 390-391 | Ga0376502_004060 \| GENOME_ACESSION: B26 SRodWell665_2_$F_3300035540 GENOME_ID: |
| | 304280 CONTIG_ID: 4059 SOURCE: JGI DATE: 2019 Nov. 15. |
| 392-393 | Oribacterium sp. NK2B42 G625DRAFT_scaffold00048.48_C, whole genome shotgun sequence \| |
| | GENOME_ACESSION: GCA_000424445.1_ASM42444v1_genomic GENOME_ID: 51832 |
| | CONTIG_ID: 47 SOURCE: NCBI_Prokaryotes DATE: 2019 Jan. 27. |
| 394-395 | Ga0099364_10003290 \| GENOME_ACESSION: TergutTh196P3_$F_3300006226 GENOME_ID: |
| | 36060 CONTIG_ID: 3289 SOURCE: JGI DATE: 2019 Jan. 27. |
| 396-397 | human gut metagenome genome assembly, contig: NODE_6243_length_6895_cov_3.894444, whole |
| | genome shotgun sequence \| GENOME_ACESSION: OGOW01.1 GENOME_ID: 4581 CONTIG_ID: |
| | 6242 SOURCE: WGS DATE: 2019 Jan. 27. |
| 398-399 | Ga0209948_1000490 \| GENOME_ACESSION: SalPonR2_CSPAdes_3_$F_3300026120 GENOME_ID: |
| | 35496 CONTIG_ID: 489 SOURCE: JGI DATE: 2019 Jan. 27. |
| 400-401 | Ga0123355_10000410 \| GENOME_ACESSION: TergutEmb28metaG_6_$F_3300009826 |
| | GENOME_ID: 36034 CONTIG_ID: 409 SOURCE: JGI DATE: 2019 Jan. 27. |
| 402-403 | Ga0134588_000160 \| GENOME_ACESSION: IMG_3300038309_$F_3300038309 GENOME_ID: |
| | 311742 CONTIG_ID: 159 SOURCE: JGI DATE: 2020 Apr. 07. |
| 404-405 | uncultured Clostridium sp. isolate RUG13060 genome assembly, contig: RUG13060_asm_28, whole |
| | genome shotgun sequence \| GENOME_ACESSION: |
| | GCA_902785295.1_Rumen_uncultured_genome_RUG13060_genomic GENOME_ID: 346965 |
| | CONTIG_ID: 27 SOURCE: NCBI_Prokaryotes DATE: 2020 Apr. 22. |
| 406-407 | Ga0066903_100182758 \| GENOME_ACESSION: PanSoiDrversion2_2_$F_3300005764 GENOME_ID: |
| | 34135 CONTIG_ID: 182757 SOURCE: JGI DATE: 2019 Jan. 27. |
| 408-409 | Microcoleus chthonoplastes PCC 7420 scf_1103659003824 genomic scaffold, whole genome shotgun |
| | sequence \| GENOME_ACESSION: GCA_000155555.1_ASM15555v1_genomic GENOME_ID: 40746 |
| | CONTIG_ID: 45 SOURCE: NCBI_Prokaryotes DATE: 2019 Jan. 27. |
| 410-411 | Ga0376082_0035695 \| GENOME_ACESSION: CLC_S1_MG_FICUS_FD_$F_3300035674 |
| | GENOME_ID: 312359 CONTIG_ID: 35694 SOURCE: JGI DATE: 2020 Apr. 07. |
| 412-413 | Actinoplanes derwentensis strain DSM 43941 genome assembly, chromosome: I \| |
| | GENOME_ACESSION: GCA_900104725.1_IMG-taxon_2634166338_annotated_assembly_genomic |
| | GENOME_ID: 183929 CONTIG_ID: 0 SOURCE: NCBI_Prokaryotes DATE: 2019 Jan. 27. |
| 414-415 | Ga0310375_1000145 \| GENOME_ACESSION: IMG_3300028923_$F_3300028923 GENOME_ID: |
| | 278994 CONTIG_ID: 144 SOURCE: JGI DATE: 2019 Jun. 01. |
| 416-417 | Ga0265297_10088569 \| GENOME_ACESSION: Munlanlwell13791_2_$F_3300029288 GENOME_ID: |
| | 280701 CONTIG_ID: 88568 SOURCE: JGI DATE: 2019 Jun. 13. |
| 418-419 | Ga0209608_1000352 \| GENOME_ACESSION: AD_des_41_$F_3300025609 GENOME_ID: 21341 |
| | CONTIG_ID: 351 SOURCE: JGI DATE: 2019 Jan. 27. |
| 420-421 | Ga0208824_1000448 \| GENOME_ACESSION: AD_des_30_$F_3300025629 GENOME_ID: 21329 |
| | CONTIG_ID: 447 SOURCE: JGI DATE: 2019 Jan. 27. |
| 422-423 | Ga0223845_10169920 \| GENOME_ACESSION: 3300021387 GENOME_ID: 241586 CONTIG_ID: |
| | 33254 SOURCE: JGI_Dark_Harvest DATE: 2019 Jan. 27. |
| 424-425 | sediment metagenome genome assembly, contig: NODE_20_length_14530_cov_3.617064, whole |
| | genome shotgun sequence \| GENOME_ACESSION: OFOG01.1 GENOME_ID: 4133 CONTIG_ID: 19 |
| | SOURCE: WGS DATE: 2019 Jan. 27. |
| 426-427 | Ga0310139_000809 \| GENOME_ACESSION: M274_2_$F_3300034759 GENOME_ID: 292993 |
| | CONTIG_ID: 808 SOURCE: JGI DATE: 2019 Aug. 09. |
| 428-429 | Activated sludge metagenome, whole genome shotgun sequence \| GENOME_ACESSION: LAHR01.1 |
| | GENOME_ID: 1476 CONTIG_ID: 1779 SOURCE: WGS DATE: 2019 Jan. 27. |
| 430-431 | Ga0373625_0000621 \| GENOME_ACESSION: YL18G_12A_MG_FD_$F_3300035701 GENOME_ID: |
| | 312749 CONTIG_ID: 620 SOURCE: JGI DATE: 2020 Apr. 07. |
| 432-433 | Ga0307928_10005039 \| GENOME_ACESSION: AceLakmetagen232_2_$F_3300031227 |
| | GENOME_ID: 279923 CONTIG_ID: 5038 SOURCE: JGI DATE: 2019 Jun. 13. |
| 434-435 | Ga0315291_10038423 \| GENOME_ACESSION: YL17G12_20_MG_2_$F_3300031707 GENOME_ID: |
| | 281642 CONTIG_ID: 38422 SOURCE: JGI DATE: 2019 Jun. 13. |
| 436-437 | NODE_96009_length_10312_cov_4.222265 \| GENOME_ACESSION: mgm4743564.3 GENOME_ID: |
| | 238065 CONTIG_ID: 5727 SOURCE: MG-RAST DATE: 2019 Jan. 27. |
| 438-439 | human gut metagenome genome assembly, contig: NODE_2344_length_11408_cov_4.198538, whole |
| | genome shotgun sequence \| GENOME_ACESSION: OPQW01.1 GENOME_ID: 9393 CONTIG_ID: |
| | 2343 SOURCE: WGS DATE: 2019 Jan. 27. |
| 440-441 | Ga0172382_10042448 \| GENOME_ACESSION: Leawel138RmetaG_2_$F_3300015214 GENOME_ID: |
| | 31498 CONTIG_ID: 42447 SOURCE: JGI DATE: 2019 Jan. 27. |
| 442-443 | human gut metagenome genome assembly, contig: NODE_63_length_109543_cov_6.260805, whole |
| | genome shotgun sequence \| GENOME_ACESSION: ORUX01.1 GENOME_ID: 10830 CONTIG_ID: 62 |
| | SOURCE: WGS DATE: 2019 Jan. 27. |
| 444-445 | EM338_1079660 \| GENOME_ACESSION: IMG_3300000297_$F_3300000297 GENOME_ID: 304967 |
| | CONTIG_ID: 10232 SOURCE: JGI DATE: 2019 Nov. 15. |
| 446-447 | Ga0209249_1001676 \| GENOME_ACESSION: SaaInlSI03SPAdes_5_$F_3300025659 GENOME_ID: |
| | 35322 CONTIG_ID: 1675 SOURCE: JGI DATE: 2019 Jan. 27. |
| 448-449 | Ga0116188_1006392 \| GENOME_ACESSION: AD_JPNTR2_MetaG_2_$F_3300009658 |
| | GENOME_ID: 21268 CONTIG_ID: 6391 SOURCE: JGI DATE: 2019 Jan. 27. |
| 450-451 | Ga0307376_10003019 \| GENOME_ACESSION: TR2MG_2_$F_3300031578 GENOME_ID: 281014 |
| | CONTIG_ID: 3018 SOURCE: JGI DATE: 2019 Jun. 13. |
| 452-453 | Ga0247608_10100524 \| GENOME_ACESSION: 176DNAGHGlowgp2_2_$F_3300028805 |
| | GENOME_ID: 279762 CONTIG_ID: 100517 SOURCE: JGI DATE: 2019 Jun. 13. |
| 454-455 | Ga0194060_10004581 \| GENOME_ACESSION: SepL225m_MetaG_2_$F_3300021602 GENOME_ID: |
| | 35568 CONTIG_ID: 4580 SOURCE: JGI DATE: 2019 Jan. 27. |
| 456-457 | Ga0209056_10004009 \| GENOME_ACESSION: GraSoiAngeSPAdes_47_$F_3300026538 |
| | GENOME_ID: 26996 CONTIG_ID: 4008 SOURCE: JGI DATE: 2019 Jan. 27. |
| 458-459 | Streptomyces sp. NL15-2K DNA, Scaffold95, whole genome shotgun sequence \| |
| | GENOME_ACESSION: GCA_003851625.1_ASM385162v1_genomic GENOME_ID: 249446 |
| | CONTIG_ID: 94 SOURCE: NCBI_Prokaryotes DATE: 2019 May 30. |
| 460-461 | Ga0376465_0015542 \| GENOME_ACESSION: Beaver4Cecum1_FD_$F_3300035510 GENOME_ID: |
| | 312344 CONTIG_ID: 15541 SOURCE: JGI DATE: 2020 Apr. 07. |
| 462-463 | Ga0373622_0034557 \| GENOME_ACESSION: YL18G_05S_MG_FD_$F_3300036766 GENOME_ID: |
| | 312747 CONTIG_ID: 34556 SOURCE: JGI DATE: 2020 Apr. 07. |
| 464-465 | human gut metagenome genome assembly, contig: NODE_399_length_63365_cov_4.825295, whole |
| | genome shotgun sequence \| GENOME_ACESSION: OQMP01.1 GENOME_ID: 9944 CONTIG_ID: 398 |
| | SOURCE: WGS DATE: 2019 Jan. 27. |
| 466-467 | Ga0373620_0052976 \| GENOME_ACESSION: YL18G_03S_MG_FD_$F_3300036760 GENOME_ID: |
| | 312746 CONTIG_ID: 52975 SOURCE: JGI DATE: 2020 Apr. 07. |
| 468-469 | Ga0114925_10000117 \| GENOME_ACESSION: SumtaG_3_$F_3300009488 GENOME_ID: 35784 |
| | CONTIG_ID: 116 SOURCE: JGI DATE: 2019 Jan. 27. |
| 470-471 | Ga0370498_000007 \| GENOME_ACESSION: Frozen_pond_05D_6_$F_3300034155 GENOME_ID: |
| | 280199 CONTIG_ID: 6 SOURCE: JGI DATE: 2019 Jun. 13. |
| 472-473 | Ga0247608 10002058 \| GENOME_ACESSION: 176DNAGHGlowgp2_2_$F_3300028805 |
| | GENOME_ID: 279762 CONTIG_ID: 2057 SOURCE: JGI DATE: 2019 Jun. 13. |
| 474-475 | Ga0401359_0000081 \| GENOME_ACESSION: Sitel salt MV_1_FD_$F_3300037341 GENOME_ID: |
| | 312663 CONTIG_ID: 80 SOURCE: JGI DATE: 2020 Apr. 07. |
| 476-477 | Ga0181589_10009757 \| GENOME_ACESSION: 071ome_50_$F_3300017964 GENOME_ID: 20511 |
| | CONTIG_ID: 9756 SOURCE: JGI DATE: 2019 Jan. 27. |
| 478-479 | Ga0080699_1005680 \| GENOME_ACESSION: IMG_3300006137_$F_3300006137 GENOME_ID: |
| | 305391 CONTIG_ID: 5679 SOURCE: JGI DATE: 2019 Nov. 15. |
| 480-481 | Fischerella sp. PCC 9431 genomic scaffold Fis9431DRAFT_Scaffold1.2, whole genome shotgun |
| | sequence \| GENOME_ACESSION: GCA_000447295.1_ASM44729v1_genomic GENOME_ID: 52896 |
| | CONTIG_ID: 0 SOURCE: NCBI_Prokaryotes DATE: 2019 Jan. 27. |
| 482-483 | Ga0310136_005546 \| GENOME_ACESSION: M271_2_$F_3300034520 GENOME_ID: 292992 |
| | CONTIG_ID: 5545 SOURCE: JGI DATE: 2019 Aug. 09. |
| 484-485 | Ga0063591_100011 \| GENOME_ACESSION: IMG_3300003966_$F_3300003966 GENOME_ID: |
| | 305235 CONTIG_ID: 10 SOURCE: JGI DATE: 2019 Nov. 15. |
| 486-487 | Branchiibius hedensis strain DSM 22951 Ga0074746_11, whole genome shotgun sequence \| |
| | GENOME_ACESSION: GCA_003149195.1_ASM314919v1_genomic GENOME_ID: 160454 |
| | CONTIG_ID: 0 SOURCE: NCBI_Prokaryotes DATE: 2019 Jan. 27. |
| 488-489 | Brevibacterium aurantiacum strain XU54 Scaffold17, whole genome shotgun sequence \| |
| | GENOME_ACESSION: GCA_007558825.1_ASM755882v1_genomic GENOME_ID: 291903 |
| | CONTIG_ID: 8 SOURCE: NCBI_Prokaryotes DATE: 2019 Aug. 27. |
| 490-491 | Ga0209594_1000294 \| GENOME_ACESSION: AshMeaSpriSPAdes_2_$F_3300025130 GENOME_ID: |
| | 23359 CONTIG_ID: 293 SOURCE: JGI DATE: 2019 Jan. 27. |
| 492-493 | Ga0207997_1001251 \| GENOME_ACESSION: AntAce02UKSPAdes_2_$F_3300025736 |
| | GENOME_ID: 22957 CONTIG_ID: 1250 SOURCE: JGI DATE: 2019 Jan. 27. |
| 494-495 | Ga0193914_10090 \| GENOME_ACESSION: 4F_dil_4869_18_0_2_$F_3300019454 GENOME_ID: |
| | 21020 CONTIG_ID: 89 SOURCE: JGI DATE: 2019 Jan. 27. |
| 496-497 | Ga0223825_11034434 \| GENOME_ACESSION: 3300021255 GENOME_ID: 241584 CONTIG_ID: 33 |
| | SOURCE: JGI Dark Harvest DATE: 2019 Jan. 27. |
| 498-499 | Ga0116592_1000084 \| GENOME_ACESSION: IMG_3300009305_$F_3300009305 GENOME_ID: |
| | 305874 CONTIG_ID: 83 SOURCE: JGI DATE: 2019 Nov. 15. |
| 500-501 | PROU1_101214 \| GENOME_ACESSION: IMG_3300000530_$F_3300000530 GENOME_ID: 305015 |
| | CONTIG_ID: 147 SOURCE: JGI DATE: 2019 Nov. 15. |
| 502-503 | Ga0256407_10017433 \| GENOME_ACESSION: RumenRJG_04DNA_2_$F_3300028886 |
| | GENOME_ID: 280890 CONTIG_ID: 17432 SOURCE: JGI DATE: 2019 Jun. 13. |
| 504-505 | Ga0190346_1003230 \| GENOME_ACESSION: 48721345_MG_2_$F_3300021486 GENOME_ID: |
| | 20994 CONTIG_ID: 3229 SOURCE: JGI DATE: 2019 Jan. 27. |
| 506-507 | Moorea sp. SIO4A5 4A5_NODE_11, whole genome shotgun sequence \| GENOME_ACESSION: |
| | GCA_010672005.1_ASM1067200v1_genomic GENOME_ID: 325451 CONTIG_ID: 12 SOURCE: |
| | NCBI_Prokaryotes DATE: 2020 Apr. 22. |
| 508-509 | Ga0207747_1000200 \| GENOME_ACESSION: HigsolSP1DSPAdes_$F_3300025534 GENOME_ID: |
| | 27183 CONTIG_ID: 199 SOURCE: JGI DATE: 2019 Jan. 27. |
| 510-511 | Ga0315268_10018380 \| GENOME_ACESSION: C1_top_MG_2_$F_3300032173 GENOME_ID: |
| | 279979 CONTIG_ID: 18379 SOURCE: JGI DATE: 2019 Jun. 13. |
| 512-513 | Ga0209317_1000713 \| GENOME_ACESSION: RifGroB2SPAdes_$F_3300025013 GENOME_ID: |
| | 34862 CONTIG_ID: 712 SOURCE: JGI DATE: 2019 Jan. 27 |
| 514-515 | Ga0373927_0000546 \| GENOME_ACESSION: GW9ome_3_FD_$F_3300035695 GENOME_ID: |
| | 312474 CONTIG_ID: 545 SOURCE: JGI DATE: 2020 Apr. 07. |
| 516-517 | Ga0136449_100279210 \| GENOME_ACESSION: Sb_comassembly_$F_3300010379 GENOME_ID: |
| | 35517 CONTIG_ID: 279209 SOURCE: JGI DATE: 2019 Jan. 27. |
| 518-519 | Ga0213873_10000897 \| GENOME_ACESSION: VelepicomBERX_R3_2_$F_3300021358 |
| | GENOME_ID: 37230 CONTIG_ID: 896 SOURCE: JGI DATE: 2019 Jan. 27. |
| 520-521 | Ga0070717_10012599 \| GENOME_ACESSION: LARL11StandDraft_3_$F_3300006028 GENOME_ID: |
| | 31022 CONTIG_ID: 12598 SOURCE: JGI DATE: 2019 Jan. 27. |
| 522-523 | Ga0163147_10008687 \| GENOME_ACESSION: OliLakLV19MP6G1_2_$F_3300020192 |
| | GENOME_ID: 33721 CONTIG_ID: 8686 SOURCE: JGI DATE: 2019 Jan. 27. |
| 524-525 | TPA_asm: Euryarchaeota archaeon isolate HyVt-292 HyVt-292_k295_120690, whole genome shotgun |
| | sequence \| GENOME_ACESSION: GCA_011040935.1_ASM1104093v1_genomic GENOME_ID: |
| | 326302 CONTIG_ID: 9 SOURCE: NCBI_Prokaryotes DATE: 2020 Apr. 22. |
| 526-527 | Ga0256404_1016703 \| GENOME_ACESSION: RumenRJG_01DNA_2_$F_3300026549 GENOME_ID: |
| | 34936 CONTIG_ID: 16702 SOURCE: JGI DATE: 2019 Jan. 27. |
| 528-59 | Ga0247608_10002393 \| GENOME_ACESSION: 176DNAGHGlowgp2_2_$F_3300028805 |
| | GENOME_ID: 279762 CONTIG_ID: 2392 SOURCE: JGI DATE: 2019 Jun. 13. |
| 530-531 | Ga0370498_000133 \| GENOME_ACESSION: Frozen_pond_05D 6_$F_3300034155 GENOME_ID: |
| | 280199 CONTIG_ID: 132 SOURCE: JGI DATE: 2019 Jun. 13. |
| 532-533 | Ga0197142_1009778 \| GENOME_ACESSION: GBS60_MetaG_2_$F_3300020153 GENOME_ID: |
| | 26410 CONTIG_ID: 9777 SOURCE: JGI DATE: 2019 Jan. 27. |
| 534-535 | human gut metagenome genome assembly, contig: NODE_725_length_36961_cov_16.589144, whole |
| | genome shotgun sequence \| GENOME_ACESSION: UEPH01.1 GENOME_ID: 15077 CONTIG_ID: 724 |
| | SOURCE: WGS DATE: 2019 Jan. 27. |
| 536-537 | Ga0307988_1006404 \| GENOME_ACESSION: EllFjometagen183_2_$F_3300031741 GENOME_ID: |
| | 280157 CONTIG_ID: 6403 SOURCE: JGI DATE: 2019 Jun. 13. |
| 538-539 | bioreactor metagenome genome assembly, contig: NODE_150_length_105757_cov_135.353352, whole |
| | genome shotgun sequence \| GENOME_ACESSION: UPAD01.1 GENOME_ID: 16334 CONTIG_ID: |
| | 149 SOURCE: WGS DATE: 2019 Jan. 27. |
| 540-541 | Ga0070738_10015183 \| GENOME_ACESSION: CoaSoiStandDraft_9_$F_3300005531 GENOME_ID: |
| | 24565 CONTIG_ID: 15182 SOURCE: JGI DATE: 2019 Jan. 27. |
| 542-543 | human gut metagenome genome assembly, contig: NODE_9436_length_5042_cov_3.339082, whole |
| | genome shotgun sequence \| GENOME_ACESSION: OVZI01.1 GENOME_ID: 11798 CONTIG_ID: |
| | 9435 SOURCE: WGS DATE: 2019 Jan. 27. |
| 544-545 | Ga0071116_1002195 \| GENOME_ACESSION: IMG_3300005077_$F_3300005077 GENOME_ID: |
| | 311639 CONTIG_ID: 2194 SOURCE: JGI DATE: 2020 Apr. 07. |
| 546-547 | human gut metagenome genome assembly, contig: NODE_8540_length_2630_cov_2.261748, whole |
| | genome shotgun sequence \| GENOME_ACESSION: UZOQ01.1 GENOME_ID: 279611 CONTIG_ID: |
| | 8539 SOURCE: WGS DATE: 2019 Jun. 06. |
| 548-549 | Ga0116164_10013910 \| GENOME_ACESSION: AD_UKC109_MetaG_2_$F_3300009775 |
| | GENOME_ID: 21298 CONTIG_ID: 13909 SOURCE: JGI DATE: 2019 Jan. 27. |
| 550-551 | Ga0074478_1419092 \| GENOME_ACESSION: IMG_3300005827_$F_3300005827 GENOME_ID: |
| | 311646 CONTIG_ID: 9600 SOURCE: JGI DATE: 2020 Apr. 07. |
| 552-553 | Ga0400266_0006374 \| GENOME_ACESSION: UnnLak12425_FD_$F_3300037330 GENOME_ID: |
| | 312715 CONTIG_ID: 6373 SOURCE: JGI DATE: 2020 Apr. 07. |
| 554-555 | Methanocalculaceae archaeon isolate CSSed10_120 CS-Sed10-C174733, whole genome shotgun |
| | sequence \| GENOME_ACESSION: GCA_003560275.1_ASM356027v1_genomic GENOME_ID: |
| | 245326 CONTIG_ID: 125 SOURCE: NCBI_Prokaryotes DATE: 2019 May 30. |
| 556-557 | Ga0265294_10038476 \| GENOME_ACESSION: MunlanPumphouse3_2_$F_3300028602 |
| | GENOME_ID: 280699 CONTIG_ID: 38475 SOURCE: JGI DATE: 2019 Jun. 13. |
| 558-559 | wastewater metagenome genome assembly, contig: NODE_7314_length_4451_cov_2.613512, whole |
| | genome shotgun sequence \| GENOME_ACESSION: OVQC01.1 GENOME_ID: 11612 CONTIG_ID: |
| | 7313 SOURCE: WGS DATE: 2019 Jan. 27. |
| 560-561 | Ga0206225_1000096 \| GENOME_ACESSION: MancosB2_2_$F_3300021064 GENOME_ID: 32426 |
| | CONTIG_ID: 95 SOURCE: JGI DATE: 2019 Jan. 27. |
| 562-563 | Ga0335049_0000303 \| GENOME_ACESSION: TYMME1rr0156_2_$F_3300034272 GENOME_ID: |
| | 282112 CONTIG_ID: 302 SOURCE: JGI DATE: 2019 Jul. 18. |
| 564-565 | Scytonema sp. HK-05 NIES-2130_Scaffold_20, whole genome shotgun sequence \| |
| | GENOME_ACESSION: GCA_001904675.1_ASM190467v1_genomic GENOME_ID: 113419 |
| | CONTIG_ID: 92 SOURCE: NCBI_Prokaryotes DATE: 2019 Jan. 27. |
| 566-567 | Ga0120161_1001269 \| GENOME_ACESSION: 3300012005 GENOME_ID: 239592 CONTIG_ID: 1268 |
| | SOURCE: JGI_Dark_Harvest DATE: 2019 Jan. 27. |
| 568-569 | Cyanothece sp. PCC 7822 plasmid Cy782202, complete sequence \| GENOME_ACESSION: |
| | GCA_000147335.1_ASM14733v1_genomic GENOME_ID: 40504 CONTIG_ID: 2 SOURCE: |
| | NCBI_Prokaryotes DATE: 2019 Jan. 27. |
| 570-571 | Ga0193910_10667 \| GENOME_ACESSION: 4E_4869_18_06_2_$F_3300019455 GENOME_ID: 21018 |
| | CONTIG_ID: 666 SOURCE: JGI DATE: 2019 Jan. 27. |
| 572-573 | Bacillus sp. AFS014408 AFS014408_98_D11_Contig119_140514, whole genome shotgun sequence \| |
| | GENOME_ACESSION: GCA_002557915.1_ASM255791v1_genomic GENOME_ID: 141756 |
| | CONTIG_ID: 20 SOURCE: NCBI_Prokaryotes DATE: 2019 Jan. 27. |
| 574-575 | Ga0315282_10014819 \| GENOME_ACESSION: YL17G07_20_MG_2_$F_3300032069 GENOME_ID: |
| | 281633 CONTIG_ID: 14818 SOURCE: JGI DATE: 2019 Jun. 13. |
| 576-577 | TPA_asm: Chlamydiae bacterium isolate HyVt-353 HyVt-353_k145_730505, whole genome shotgun |
| | sequence \| GENOME_ACESSION: GCA_011056925.1_ASM1105692v1_genomic GENOME_ID: |
| | 327094 CONTIG_ID: 88 SOURCE: NCBI_Prokaryotes DATE: 2020 Apr. 22. |
| 578-579 | Ga0223845_11964739 \| GENOME_ACESSION: 3300021387 GENOME_ID: 241586 CONTIG_ID: 316 |
| | SOURCE: JGI_Dark_Harvest DATE: 2019 Jan. 27. |
| 580-581 | Ga0376681_0131425 \| GENOME_ACESSION: CalMonMetagenome_5_FD_$F_3300036805 |
| | GENOME_ID: 312378 CONTIG_ID: 131424 SOURCE: JGI DATE: 2020 Apr. 07. |
| 582-583 | Ga0315902_10061306 \| GENOME_ACESSION: LakEriMetagenome_16_$F_3300032093 |
| | GENOME_ID: 280599 CONTIG_ID: 61305 SOURCE: JGI DATE: 2019 Jun. 13. |
| 584-585 | contig_9137_[cov = 16] \| GENOME_ACESSION: mgm4527699.3 GENOME_ID: 237371 CONTIG_ID: |
| | 9136 SOURCE: MG-RAST DATE: 2019 Jan. 27. |
| 586-587 | Ga0307377_10069547 \| GENOME_ACESSION: TR3MG_2_$F_3300031673 GENOME_ID: 281015 |
| | CONTIG_ID: 69546 SOURCE: JGI DATE: 2019 Jun. 13. |
| 588-589 | Ga0223826_10002115 \| GENOME_ACESSION: 3300021256 GENOME_ID: 241585 CONTIG_ID: |
| | 2154 SOURCE: JGI_Dark_Harvest DATE: 2019 Jan. 27. |
| 590-591 | fermentation metagenome genome assembly, contig: NODE_1217_length_24863_cov_7.295993, whole |
| | genome shotgun sequence \| GENOME_ACESSION: UOOU01.1 GENOME_ID: 16052 CONTIG_ID: |
| | 1216 SOURCE: WGS DATE: 2019 Jan. 27. |
| 592-593 | Ga0117909_1085896 \| GENOME_ACESSION: IMG_3300009320_$F_3300009320 GENOME_ID: |
| | 305879 CONTIG_ID: 85895 SOURCE: JGI DATE: 2019 Nov. 15. |
| 594-595 | Ga0175859_1302585 \| GENOME_ACESSION: IMG_3300013314_$F_3300013314 GENOME_ID: |
| | 28680 CONTIG_ID: 20373 SOURCE: JGI DATE: 2019 Jan. 27. |
| 596-597 | Ga0394874_0000250 \| GENOME_ACESSION: KP_S3_MG_FD_$F_3300037309 GENOME_ID: |
| | 312525 CONTIG_ID: 249 SOURCE: JGI DATE: 2020 Apr. 07. |
| 598-599 | Ga0007854_10018219 \| GENOME_ACESSION: APCry1669191629_$F_3300004806 GENOME_ID: |
| | 21780 CONTIG_ID: 18218 SOURCE: JGI DATE: 2019 Jan. 27. |
| 600-601 | Ga0209720_1000657 \| GENOME_ACESSION: AD_des_11_$F_3300025605 GENOME_ID: 21309 |
| | CONTIG_ID: 656 SOURCE: JGI DATE: 2019 Jan. 27. |
| 602-603 | Ga0177923_1152199 \| GENOME_ACESSION: IMG_3300013414_$F_3300013414 GENOME_ID: |
| | 28682 CONTIG_ID: 6545 SOURCE: JGI DATE: 2019 Jan. 27. |
| 604-605 | Ga0256405_10019152 \| GENOME_ACESSION: RumenRJG_02DNA_2_$F_3300028048 |
| | GENOME_ID: 34937 CONTIG_ID: 19151 SOURCE: JGI DATE: 2019 Jan. 27. |
| 606-607 | mouse gut metagenome genome assembly, contig: NODE_1060_length_37573_cov_4.643504, whole |
| | genome shotgun sequence \| GENOME_ACESSION: UWSV01.1 GENOME_ID: 279227 CONTIG_ID: |
| | 1059 SOURCE: WGS DATE: 2019 Jun. 06. |
| 608-609 | Ga0114843_102905 \| GENOME_ACESSION: IMG_3300008138_$F_3300008138 GENOME_ID: |
| | 28389 CONTIG_ID: 2904 SOURCE: JGI DATE: 2019 Jan. 27. |
| 610-611 | uncultured Erysipelotrichaceae bacterium isolate RUG13468 genome assembly, contig: |
| | RUG13468_asm_35, whole genome shotgun sequence \| GENOME_ACESSION: |
| | GCA_902789375.1_Rumen_uncultured_genome_RUG13468_genomic GENOME_ID: 347331 |
| | CONTIG_ID: 34 SOURCE: NCBI_Prokaryotes DATE: 2020 Apr. 22. |
| 612-613 | Ga0105046_10007489 \| GENOME_ACESSION: MAT03_2_$F_3300009084 GENOME_ID: 31818 |
| | CONTIG_ID: 7488 SOURCE: JGI DATE: 2019 Jan. 27. |
| 614-615 | human gut metagenome genome assembly, contig: NODE_671_length_25457_cov_5.408117, whole |
| | genome shotgun sequence \| GENOME_ACESSION: OIYO01.1 GENOME_ID: 6149 CONTIG_ID: 670 |
| | SOURCE: WGS DATE: 2019 Jan. 27. |
| 616-617 | Ga0209647_1002274 \| GENOME_ACESSION: GraSoiAngeSPAdes_43_$F_3300026319 |
| | GENOME_ID: 26992 CONTIG_ID: 2273 SOURCE: JGI DATE: 2019 Jan. 27. |
| 618-619 | Ga0401364_0036777 \| GENOME_ACESSION: Site2_nosalt_MIX_4_FD_$F_3300037317 |
| | GENOME_ID: 312665 CONTIG_ID: 36776 SOURCE: JGI DATE: 2020 Apr. 07. |
| 620-621 | Proteobacteria bacterium isolate F1-120-MAGs186 F1-120_c247377, whole genome shotgun sequence \| |
| | GENOME_ACESSION: GCA_005777235.1_ASM577723v1_genomic GENOME_ID: 284306 |
| | CONTIG_ID: 42 SOURCE: NCBI_Prokaryotes DATE: 2019 Jul. 22. |
| 622-623 | Ga0137390_10046836 \| GENOME_ACESSION: 15con2h24AmetaG_2_$F_3300012363 GENOME_ID: |
| | 20762 CONTIG_ID: 46835 SOURCE: JGI DATE: 2019 Jan. 27. |
| 624-625 | JGI11876J14442_10022172 \| GENOME_ACESSION: ComassMDCD2ACD6A_$F_3300001357 |
| | GENOME_ID: 24872 CONTIG_ID: 22171 SOURCE: JGI DATE: 2019 Jan. 27. |
| 626-627 | Ga0209616_1000698 \| GENOME_ACESSION: FloCalmetaSPAdes_$F_3300025091 GENOME_ID: |
| | 26000 CONTIG_ID: 697 SOURCE: JGI DATE: 2019 Jan. 27. |
| 628-629 | Okeania hirsuta strain PAB-10Feb10-1 PAB_NODE_716, whole genome shotgun sequence \| |
| | GENOME_ACESSION: GCA_003838195.1_ASM383819v1_genomic GENOME_ID: 204924 |
| | CONTIG_ID: 685 SOURCE: NCBI_Prokaryotes DATE: 2019 Jan. 27. |
| 630-631 | Okeania sp. SIO2H7 2H7_NODE_770, whole genome shotgun sequence \| GENOME_ACESSION: |
| | GCA_010692585.1_ASM1069258v1_genomic GENOME_ID: 325546 CONTIG_ID: 3798 SOURCE: |
| | NCBI_Prokaryotes DATE: 2020 Apr. 22. |
| 632-633 | Ga0256832_1033259 \| GENOME_ACESSION: 134614metaG_2_$F_3300028400 GENOME_ID: 20589 |
| | CONTIG_ID: 33258 SOURCE: JGI DATE: 2019 Jan. 27. |
| 634-635 | Ga0105041_100006 \| GENOME_ACESSION: LS_189metaG_2_$F_3300009983 GENOME_ID: 31076 |
| | CONTIG_ID: 5 SOURCE: JGI DATE: 2019 Jan. 27. |
| 636-637 | Ga0370539_00069 \| GENOME_ACESSION: 20181212_24i_2_$F_3300034631 GENOME_ID: 304144 |
| | CONTIG_ID: 68 SOURCE: JGI DATE: 2019 Nov. 15. |
| 638-639 | Okeania sp. SIO4D6 4D6_NODE_771, whole genome shotgun sequence \| GENOME_ACESSION: |
| | GCA_010672015.1_ASM1067201v1_genomic GENOME_ID: 325452 CONTIG_ID: 2197 SOURCE: |
| | NCBI_Prokaryotes DATE: 2020 Apr. 22. |
| 640-641 | Acidithiobacillus ferrivorans strain PQ33 Aferri_contig000098, whole genome shotgun sequence \| |
| | GENOME_ACESSION: GCA_001857665.2_ASM185766v2_genomic GENOME_ID: 111397 |
| | CONTIG_ID: 99 SOURCE: NCBI_Prokaryotes DATE: 2019 Jan. 27. |
| 642-643 | Ga0209318_1005124 \| GENOME_ACESSION: RifGroE1SPAdes_$F_3300025000 GENOME_ID: |
| | 34868 CONTIG_ID: 5123 SOURCE: JGI DATE: 2019 Jan. 27. |
| 644-645 | NODE_3724_length_28610_cov_9.117721 \| GENOME_ACESSION: mgm4743560.3 GENOME_ID: |
| | 238062 CONTIG_ID: 1440 SOURCE: MG-RAST DATE: 2019 Jan. 27. |
| 646-647 | 2206908067 \| GENOME_ACESSION: IMG_2199352033_$F_2199352033 GENOME_ID: 308158 |
| | CONTIG_ID: 638 SOURCE: JGI DATE: 2020 Apr. 07. |
| 648-649 | Ga0272428_1021842 \| GENOME_ACESSION: FingerMtnordMG_2_$F_3300031520 GENOME_ID: |
| | 280175 CONTIG_ID: 21841 SOURCE: JGI DATE: 2019 Jun. 13. |
| 650-651 | Ga0310134_003633 \| GENOME_ACESSION: M172_2_$F_3300033999 GENOME_ID: 280646 |
| | CONTIG_ID: 3632 SOURCE: JGI DATE: 2019 Jun. 13. |
| 652-653 | Ga0247610_10094209 \| GENOME_ACESSION: 174DNAGHGhighgp2_2_$F_3300028833 |
| | GENOME_ID: 279759 CONTIG_ID: 94202 SOURCE: JGI DATE: 2019 Jun. 13. |
| 654-655 | Ga0265292_1000080 \| GENOME_ACESSION: Munlanlewell296A_2_$F_3300028028 GENOME_ID: |
| | 32898 CONTIG_ID: 79 SOURCE: JGI DATE: 2019 Jan. 27. |
| 656-657 | Ga0257070_1000485 \| GENOME_ACESSION: GoafecGen0Rep3v2_2_$F_3300023711 GENOME_ID: |
| | 280332 CONTIG_ID: 484 SOURCE: JGI DATE: 2019 Jun. 13. |
| 658-659 | uncultured Erysipelotrichaceae bacterium isolate RUG10685 genome assembly, contig: |
| | RUG10685_asm_16, whole genome shotgun sequence \| GENOME_ACESSION: |
| | GCA_902761625.1_Rumen_uncultured_genome_RUG10685_genomic GENOME_ID: 344834 |
| | CONTIG_ID: 15 SOURCE: NCBI_Prokaryotes DATE: 2020 Apr. 22. |
| 660-661 | Ga0223845_11721960 \| GENOME_ACESSION: 3300021387 GENOME_ID: 241586 CONTIG_ID: |
| | 22774 SOURCE: JGI_Dark_Harvest DATE: 2019 Jan. 27. |
| 662-663 | Ga0118727_1075366 \| GENOME_ACESSION: IMG_3300009128_$F_3300009128 GENOME_ID: |
| | 305857 CONTIG_ID: 75365 SOURCE: JGI DATE: 2019 Nov. 15 |
| 664-665 | Ga0326512_10006706 \| GENOME_ACESSION: 1_2617_0518 D_2_$F_3300032038 GENOME_ID: |
| | 279770 CONTIG_ID: 6705 SOURCE: JGI DATE: 2019 Jun. 13. |
| 666-667 | Ga0209777_10000441 \| GENOME_ACESSION: FrelakHBHBSPAdes_$F_3300027896 GENOME_ID: |
| | 26210 CONTIG_ID: 440 SOURCE: JGI DATE: 2019 Jan. 27. |
| 668-669 | Ga0268280_1002972 \| GENOME_ACESSION: saktaG_18_$F_3300028298 GENOME_ID: 37736 |
| | CONTIG_ID: 2971 SOURCE: JGI DATE: 2019 Jan. 27. |
| 670-671 | LHMISPF_alex1_c100 \| GENOME_ACESSION: IMG_2049941002_$F_2049941002 GENOME_ID: |
| | 27373 CONTIG_ID: 2 SOURCE: JGI DATE: 2019 Jan. 27. |
| 672-673 | Ga0307249_10042978 \| GENOME_ACESSION: GoaFecpelsamples_$F_3300029305 GENOME_ID: |
| | 280327 CONTIG_ID: 42977 SOURCE: JGI DATE: 2019 Jun. 13. |
| 674-675 | Ga0163144_10177891 \| GENOME_ACESSION: OliLak19BULKMAT1_2_$F_3300015360 |
| | GENOME_ID: 33717 CONTIG_ID: 177890 SOURCE: JGI DATE: 2019 Jan. 27. |
| 676-677 | Ga0265595_1002166 \| GENOME_ACESSION: saktaG_23_$F_3300028191 GENOME_ID: 37741 |
| | CONTIG_ID: 2165 SOURCE: JGI DATE: 2019 Jan. 27. |
| 678-679 | Ga0111033_1162652 \| GENOME_ACESSION: IMG_3300008516_$F_3300008516 GENOME_ID: |
| | 311683 CONTIG_ID: 53090 SOURCE: JGI DATE: 2020 Apr. 07. |
| 680-681 | Ga0373927_0000008 \| GENOME_ACESSION: GW9ome_3_FD_$F_3300035695 GENOME_ID: |
| | 312474 CONTIG_ID: 7 SOURCE: JGI DATE: 2020 Apr. 07. |
| 682-683 | Ga0070730_10006957 \| GENOME_ACESSION: CoaSoiStandDraft_4_$F_3300005537 GENOME_ID: |
| | 24560 CONTIG_ID: 6956 SOURCE: JGI DATE: 2019 Jan. 27. |
| 684-685 | Ga0118720_1022568 \| GENOME_ACESSION: IMG_3300009374_$F_3300009374 GENOME_ID: |
| | 305905 CONTIG_ID: 22567 SOURCE: JGI DATE: 2019 Nov. 15. |
| 686-687 | Ga0395674_000262 \| GENOME_ACESSION: 711E1SmetaG_FD_$F_3300037239 GENOME_ID: |
| | 312082 CONTIG_ID: 261 SOURCE: JGI DATE: 2020 Apr. 07. |
| 688-689 | Ga0315273_10011693 \| GENOME_ACESSION: YL17G02_0_MG_2_$F_3300032516 GENOME_ID: |
| | 281624 CONTIG_ID: 11692 SOURCE: JGI DATE: 2019 Jun. 13. |
| 690-691 | Ga0113881_100828 \| GENOME_ACESSION: IMG_3300008726_$F_3300008726 GENOME_ID: |
| | 28620 CONTIG_ID: 827 SOURCE: JGI DATE: 2019 Jan. 27. |
| 692-694 | Coprobacillus sp. 3_3_56FAA genomic scaffold supercont1.7, whole genome shotgun sequence \| |
| | GENOME_ACESSION: GCA_000239735.1_Coprobacillus_sp_3_3_56FAA_V1_genomic |
| | GENOME_ID: 43727 CONTIG_ID: 6 SOURCE: NCBI_Prokaryotes DATE: 2019 Jan. 27. |
| 694-695 | metagenome genome assembly, contig: NODE_4188_length_5897_cov_3.274050, whole genome |
| | shotgun sequence \| GENOME_ACESSION: OWLW01.1 GENOME_ID: 12087 CONTIG_ID: 4187 |
| | SOURCE: WGS DATE: 2019 Jan. 27. |
| 696-697 | Ga0209343_10010378 \| GENOME_ACESSION: RifCSPlow2SPAdes_$F_3300025311 GENOME_ID: |
| | 34854 CONTIG_ID: 10377 SOURCE: JGI DATE: 2019 Jan. 27. |
| 698-699 | Ga0209737_10031347 \| GENOME_ACESSION: TergutCu12SPAdes_$F_3300027904 GENOME_ID: |
| | 36027 CONTIG_ID: 31344 SOURCE: JGI DATE: 2019 Jan. 27. |
| 700-701 | Ga0075011_10000624 \| GENOME_ACESSION: TARMetStandDraft_6_$F_3300006192 GENOME_ID: |
| | 35911 CONTIG_ID: 623 SOURCE: JGI DATE: 2019 Jan. 27. |
| 702-703 | Ga0116227_10001884 \| GENOME_ACESSION: S1TSphgellanicum_5_$F_3300009709 GENOME_ID: |
| | 34953 CONTIG_ID: 1883 SOURCE: JGI DATE: 2019 Jan. 27. |
| 704-705 | contig_854547 \| GENOME_ACESSION: mgm4547164.3 GENOME_ID: 237431 CONTIG_ID: 139596 |
| | SOURCE: MG-RAST DATE: 2019 Jan. 27. |
| 706-707 | Pelotomaculum sp. PtaB.Bin104 A4E53_contig000144, whole genome shotgun sequence \| |
| | GENOME_ACESSION: GCA_002067205.1_ASM206720v1_genomic GENOME_ID: 242484 |
| | CONTIG_ID: 143 SOURCE: NCBI_Prokaryotes DATE: 2019 May 30. |
| 708-709 | Ga0256404_1034523 \| GENOME_ACESSION: RumenRJG_01DNA_2_$F_3300026549 GENOME_ID: |
| | 34936 CONTIG_ID: 34522 SOURCE: JGI DATE: 2019 Jan. 27. |
| 710-711 | viral metagenome genome assembly, contig: NODE_117_length_3294_cov_0.884433, whole genome |
| | shotgun sequence \| GENOME_ACESSION: OOMW01.1 GENOME_ID: 8612 CONTIG_ID: 116 |
| | SOURCE: WGS DATE: 2019 Jan. 27. |
| 712-713 | contig_11853115 \| GENOME_ACESSION: mgm4547164.3 GENOME_ID: 237431 CONTIG_ID: |
| | 486630 SOURCE: MG-RAST DATE: 2019 Jan. 27. |
| 714-715 | Ga0190303_1007606 \| GENOME_ACESSION: 48700701_MG_2_$F_3300021512 GENOME_ID: |
| | 20966 CONTIG_ID: 7605 SOURCE: JGI DATE: 2019 Jan. 27. |
| 716-717 | EMG_10019972 \| GENOME_ACESSION: IMG_3300001598_$F_3300001598 GENOME_ID: 27525 |
| | CONTIG_ID: 19969 SOURCE: JGI DATE: 2019 Jan. 27. |
| 718-719 | NODE_9_length_105734_cov_102.449 \| GENOME_ACESSION: mgm4784118.3 GENOME_ID: |
| | 238329 CONTIG_ID: 8 SOURCE: MG-RAST DATE: 2019 Jan. 27. |
| 720-721 | Chloroflexi bacterium isolate CF_154 14_0903_05_20cm_scaffold_339, whole genome shotgun |
| | sequence \| GENOME_ACESSION: GCA_005879655.1_ASM587965v1_genomic GENOME_ID: |
| | 285751 CONTIG_ID: 335 SOURCE: NCBI_Prokaryotes DATE: 2019 Jul. 22. |
| 722-723 | Ga0183746_00132 \| GENOME_ACESSION: IMG_3300037962_$F_3300037962 GENOME_ID: |
| | 309636 CONTIG_ID: 131 SOURCE: JGI DATE: 2020 Apr. 07. |
| 724-725 | Rock porewater metagenome BRHa_1004791, whole genome shotgun sequence \| |
| | GENOME_ACESSION: LADL02.1 GENOME_ID: 1462 CONTIG_ID: 3045 SOURCE: WGS DATE: |
| | 2019 Jan. 27. |
| 726-727 | Symploca sp. SIO2E9 2E9_NODE_8, whole genome shotgun sequence \| GENOME_ACESSION: |
| | GCA_010692645.1_ASM1069264v1_genomic GENOME_ID: 325549 CONTIG_ID: 361 SOURCE: |
| | NCBI_Prokaryotes DATE: 2020 Apr. 22. |
| 728-729 | Ga0374055_0154238 \| GENOME_ACESSION: MBmetcoassembly_$F_3300035696 GENOME_ID: |
| | 306290 CONTIG_ID: 154237 SOURCE: JGI DATE: 2019 Nov. 15. |
| 730-731 | Ga0310147_000821 \| GENOME_ACESSION: K73_2_$F_3300034683 GENOME_ID: 292989 |
| | CONTIG_ID: 820 SOURCE: JGI DATE: 2019 Aug. 09. |
| 732-733 | metagenome genome assembly, contig: NODE_3892_length_5503_cov_2.770374, whole genome |
| | shotgun sequence \| GENOME_ACESSION: OGDP01.1 GENOME_ID: 4288 CONTIG_ID: 3891 |
| | SOURCE: WGS DATE: 2019 Jan. 27. |
| 734-735 | Ga0310695_10005296 \| GENOME_ACESSION: RumRJGDNAv2_$F_3300032007 GENOME_ID: |
| | 280889 CONTIG_ID: 5295 SOURCE: JGI DATE: 2019 Jun. 13. |
| 736-737 | Human gut metagenome isolate term5_stool term5_stool_scaffold_2128, whole genome shotgun |
| | sequence \| GENOME_ACESSION: QWCB01.1 GENOME_ID: 14510 CONTIG_ID: 2128 SOURCE: |
| | WGS DATE: 2019 Jan. 27. |
| 738-739 | Ga0111054_100026 \| GENOME_ACESSION: IMG_3300008541_$F_3300008541 GENOME_ID: |
| | 28547 CONTIG_ID: 25 SOURCE: JGI DATE: 2019 Jan. 27. |
| 740-741 | Ga0272423_1005921 \| GENOME_ACESSION: MtNewZealasudMG_2_$F_3300033168 GENOME_ID: |
| | 280697 CONTIG_ID: 5920 SOURCE: JGI DATE: 2019 Jun. 13. |
| 742-743 | Ga0116158_10014977 \| GENOME_ACESSION: AD_UKC052 MetaG_2_$F_3300009783 |
| | GENOME_ID: 21284 CONTIG_ID: 14976 SOURCE: JGI DATE: 2019 Jan. 27. |
| 744-745 | Ga0207997 1002358 \| GENOME_ACESSION: AntAce02UKSPAdes_2_$F_3300025736 |
| | GENOME_ID: 22957 CONTIG_ID: 2357 SOURCE: JGI DATE: 2019 Jan. 27. |
| 746-747 | Ga0101770_1107140 \| GENOME_ACESSION: IMG_3300006674_$F_3300006674 GENOME_ID: |
| | 27981 CONTIG_ID: 28184 SOURCE: JGI DATE: 2019 Jan. 27. |
| 748-749 | Ga0307373_10069487 \| GENOME_ACESSION: OX2MG_2_$F_3300031672 GENOME_ID: 280771 |
| | CONTIG_ID: 69486 SOURCE: JGI DATE: 2019 Jun. 13. |
| 750-751 | human gut metagenome genome assembly, contig: NODE_229_length_14486_cov_2.676301, whole |
| | genome shotgun sequence \| GENOME_ACESSION: OQLS01.1 GENOME_ID: 9921 CONTIG_ID: 228 |
| | SOURCE: WGS DATE: 2019 Jan. 27. |
| 752-753 | human gut metagenome genome assembly, contig: NODE_877_length_31106_cov_4.049725, whole |
| | genome shotgun sequence \| GENOME_ACESSION: OWGA01.1 GENOME_ID: 11972 CONTIG_ID: |
| | 876 SOURCE: WGS DATE: 2019 Jan. 27. |
| 754-755 | human gut metagenome genome assembly, contig: NODE_939_length_19541_cov_1.798317, whole |
| | genome shotgun sequence \| GENOME_ACESSION: OOZR01.1 GENOME_ID: 8944 CONTIG_ID: 938 |
| | SOURCE: WGS DATE: 2019 Jan. 27. |
| 756-757 | mouse gut metagenome genome assembly, contig: NODE_281_lengt_46225_cov_26.608620, whole |
| | genome shotgun sequence \| GENOME_ACESSION: OFHM01.1 GENOME_ID: 3964 CONTIG_ID: 280 |
| | SOURCE: WGS DATE: 2019 Jan. 27. |
| 758-759 | Ga0256404_1004876 \| GENOME_ACESSION: RumenRJG_01DNA_2_$F_3300026549 GENOME_ID: |
| | 34936 CONTIG_ID: 4875 SOURCE: JGI DATE: 2019 Jan. 27. |
| 760-761 | Ga0164242_10000399 \| GENOME_ACESSION: OricomgcompostMG_2_$F_3300012942 |
| | GENOME_ID: 33846 CONTIG_ID: 398 SOURCE: JGI DATE: 2019 Jan. 27. |
| 762-763 | human oral metagenome genome assembly, contig: NODE_381_length_32678_cov_10.933728, whole |
| | genome shotgun sequence \| GENOME_ACESSION: UPJM01.1 GENOME_ID: 16567 CONTIG_ID: 380 |
| | SOURCE: WGS DATE: 2019 Jan. 27. |
| 764-765 | Ga0318466_10005777 \| GENOME_ACESSION: GoaFecpsamplesv2_$F_3300031555 GENOME_ID: |
| | 280328 CONTIG_ID: 5776 SOURCE: JGI DATE: 2019 Jun. 13. |
| 766-767 | Ga0118733_100054452 \| GENOME_ACESSION: Marsedof8samples_$F_3300010430 GENOME_ID: |
| | 32450 CONTIG_ID: 54451 SOURCE: JGI DATE: 2019 Jan. 27. |
| 768-769 | Ktedonobacter sp. 13_1_20CM_4_53_11 13_1_20cm_4_scaffold_568, whole genome shotgun sequence \| |
| | GENOME_ACESSION: GCA_001919995.1_ASM191999v1_genomic GENOME_ID: 114122 |
| | CONTIG_ID: 157 SOURCE: NCBI_Prokaryotes DATE: 2019 Jan. 27. |
| 770-771 | Ga0272449_1005167 \| GENOME_ACESSION: YNPCB0241_2_$F_3300029977 GENOME_ID: |
| | 281651 CONTIG_ID: 5166 SOURCE: JGI DATE: 2019 Jun. 13. |
| 772-773 | Human oral metagenome isolate term3_saliva term3_saliva_scaffold_5562, whole genome shotgun |
| | sequence \| GENOME_ACESSION: QWCI01.1 GENOME_ID: 14517 CONTIG_ID: 5557 SOURCE: |
| | WGS DATE: 2019 Jan. 27. |
| 774-775 | Lactobacillus equi DPC 6820 NODE_4, whole genome shotgun sequence \| GENOME_ACESSION: |
| | GCA_000504525.1_Lactobacillus_equi_DPC_6820_genomic GENOME_ID: 55485 CONTIG_ID: 157 |
| | SOURCE: NCBI_Prokaryotes DATE: 2019 Jan. 27. |
| 776-777 | Ga0335394_10066399 \| GENOME_ACESSION: MAT03spassembly_$F_3300032456 GENOME_ID: |
| | 280657 CONTIG_ID: 66398 SOURCE: JGI DATE: 2019 Jun. 13. |
| 778-779 | Ga0115617_100462 \| GENOME_ACESSION: IMG_3300008733_$F_3300008733 GENOME_ID: |
| | 28627 CONTIG_ID: 461 SOURCE: JGI DATE: 2019 Jan. 27. |
| 780-781 | Ga0209607_1003300 \| GENOME_ACESSION: AD_des_42_$F_3300025847 GENOME_ID: 21342 |
| | CONTIG_ID: 3299 SOURCE: JGI DATE: 2019 Jan. 27. |
| 782-783 | soil metagenome genome assembly, contig: NODE_51_length_30035_cov_3.493647, whole genome |
| | shotgun sequence \| GENOME_ACESSION: OFHI01.1 GENOME_ID: 3960 CONTIG_ID: 50 SOURCE: |
| | WGS DATE: 2019 Jan. 27. |
| 784-785 | Ga0116227_10003227 \| GENOME_ACESSION: SITSphgellanicum_5_$F_3300009709 GENOME_ID: |
| | 34953 CONTIG_ID: 3226 SOURCE: JGI DATE: 2019 Jan. 27. |
| 786-787 | Ga0393264_0001341 \| GENOME_ACESSION: LB_025metaG_FD_$F_3300036981 GENOME_ID: |
| | 312532 CONTIG_ID: 1340 SOURCE: JGI DATE: 2020 Apr. 07. |
| 788-789 | Ga0127503_10276577 \| GENOME_ACESSION: WCWIAnnotation_$F_3300010154 GENOME_ID: |
| | 281607 CONTIG_ID: 1097 SOURCE: JGI DATE: 2019 Jun. 13. |
| 790-791 | Ga0075519_1000010 \| GENOME_ACESSION: NGEPerStandDraft_$F_3300009010 GENOME_ID: |
| | 32976 CONTIG_ID: 9 SOURCE: JGI DATE: 2019 Jan. 27. |
| 792-793 | Ga0063356_100000074 \| GENOME_ACESSION: Comassommunities_FD_$F_3300004463 |
| | GENOME_ID: 312390 CONTIG_ID: 73 SOURCE: JGI DATE: 2020 Apr. 07. |
| 794-795 | Soda lake metagenome LT5-BRINE-C1859, whole genome shotgun sequence \| GENOME_ACESSION: |
| | LFIK01.1 GENOME_ID: 1496 CONTIG_ID: 1858 SOURCE: WGS DATE: 2019 Jan. 27. |
| 796-797 | Lactobacillus delbrueckii strain UMB0003 ERR1203589.17957_1_1.7, whole genome shotgun sequence \| |
| | GENOME_ACESSION: GCA_002847905.1_ASM284790v1_genomic GENOME_ID: 149568 |
| | CONTIG_ID: 66 SOURCE: NCBI_Prokaryotes DATE: 2019 Jan. 27. |
| 798-799 | Ga0197810_1087 \| GENOME_ACESSION: Chlbac000151CJ13_2_$F_3300019509 GENOME_ID: |
| | 24519 CONTIG_ID: 86 SOURCE: JGI DATE: 2019 Jan. 27. |
| 800-801 | Ga0116167_1020986 \| GENOME_ACESSION: AD_JPNMR3_MetaG_2_$F_3300009654 |
| | GENOME_ID: 21263 CONTIG_ID: 20985 SOURCE: JGI DATE: 2019 Jan. 27. |
| 802-803 | Ga0123348_10016055 \| GENOME_ACESSION: ElkDunMetagenome_5_$F_3300012979 |
| | GENOME_ID: 25859 CONTIG_ID: 16054 SOURCE: JGI DATE: 2019 Jan. 27. |
| 804-805 | Ga0257072_1000039 \| GENOME_ACESSION: GoafecGen1Rep3v2_2_$F_3300023707 GENOME_ID: |
| | 280336 CONTIG_ID: 38 SOURCE: JGI DATE: 2019 Jun. 13. |
| 806-807 | Ga0075017_100018482 \| GENOME_ACESSION: AleBraStandDraft_$F_3300006059 GENOME_ID: |
| | 22526 CONTIG_ID: 18481 SOURCE: JGI DATE: 2019 Jan. 27. |
| 808-809 | ERB_1001085 \| GENOME_ACESSION: IMG_3300003453_$F_3300003453 GENOME_ID: 308444 |
| | CONTIG_ID: 1084 SOURCE: JGI DATE: 2020 Apr. 07. |
| 810-811 | human gut metagenome genome assembly, contig: scaffold97368_3, whole genome shotgun sequence \| |
| | GENOME_ACESSION: UMJL01.1 GENOME_ID: 15909 CONTIG_ID: 18423 SOURCE: WGS DATE: |
| | 2019 Jan. 27. |
| 812-813 | Ga0074432_100015 \| GENOME_ACESSION: IMG_3300005683_$F_3300005683 GENOME_ID: |
| | 27814 CONTIG_ID: 6 SOURCE: JGI DATE: 2019 Jan. 27. |
| 814-815 | Chloroflexi bacterium isolate Amazon FNV 2010 25 1 |
| | contig_75_703380_length_11508_multi_3_in_2_out_2, whole genome shotgun sequence \| |
| | GENOME_ACESSION: GCA_003175725.1_ASM317572v1_genomic GENOME_ID: 161678 |
| | CONTIG_ID: 303 SOURCE: NCBI_Prokaryotes DATE: 2019 Jan. 27. |
| 816-817 | Ga0123338_10037050 \| GENOME_ACESSION: grotaG_2_$F_3300009686 GENOME_ID: 37706 |
| | CONTIG_ID: 37049 SOURCE: JGI DATE: 2019 Jan. 27. |
| 818-819 | Ga0187784_10040265 \| GENOME_ACESSION: 1015_SJ02_MP15_2_2_$F_3300018062 |
| | GENOME_ID: 20522 CONTIG_ID: 40264 SOURCE: JGI DATE: 2019 Jan. 27. |
| 820-821 | Ga0373634_0000655 \| GENOME_ACESSION: RO12ediment_MG_FD_$F_3300036715 GENOME_ID: |
| | 312626 CONTIG_ID: 654 SOURCE: JGI DATE: 2020 Apr. 07. |
| 822-823 | uncultured Bacteroidales bacterium isolate RUG14530 genome assembly, contig: RUG14530_asm_132, |
| | whole genome shotgun sequence \| GENOME_ACESSION: |
| | GCA_902800075.1 Rumen_uncultured_genome_RUG14530_genomic GENOME_ID: 348289 |
| | CONTIG_ID: 131 SOURCE: NCBI_Prokaryotes DATE: 2020 Apr. 22. |
| 824-825 | Fischerella sp. NIES-4106 DNA, nearly complete genome \| GENOME_ACESSION: |
| | GCA_002368315.1_ASM236831v1_genomic GENOME_ID: 133469 CONTIG_ID: 0 SOURCE: |
| | NCBI_Prokaryotes DATE: 2019 Jan. 27. |
| 826-827 | Synechococcus sp. PCC 7335 scf_1103496006892 genomic scaffold, whole genome shotgun sequence \| |
| | GENOME_ACESSION: GCA_000155595.1_ASM15559v1_genomic GENOME_ID: 40748 |
| | CONTIG_ID: 7 SOURCE: NCBI_Prokaryotes DATE: 2019 Jan. 27. |
| 828-829 | Parasutterella excrementihominis strain BIOML-A4 scaffold1_size158658, whole genome shotgun |
| | sequence \| GENOME_ACESSION: GCA_009719445.1_ASM971944v1_genomic GENOME_ID: |
| | 316075 CONTIG_ID: 96 SOURCE: NCBI_Prokaryotes DATE: 2020 Apr. 22. |
| 830-831 | human gut metagenome genome assembly, contig: NODE_2506_length_13891_cov_2.537872, whole |
| | genome shotgun sequence \| GENOME_ACESSION: UXRB01.1 GENOME_ID: 279330 CONTIG_ID: |
| | 2505 SOURCE: WGS DATE: 2019 Jun. 06. |
| 832-833 | Ga0307928_10013462 \| GENOME_ACESSION: AceLakmetagen232_2_$F_3300031227 |
| | GENOME_ID: 279923 CONTIG_ID: 13461 SOURCE: JGI DATE: 2019 Jun. 13. |
| 834-835 | Lactobacillus harbinensis DSM 16991 H627DRAFT_scaffold00014.14_C, whole genome shotgun |
| | sequence \| GENOME_ACESSION: GCA_000425885.1_ASM42588v1_genomic GENOME_ID: 51904 |
| | CONTIG_ID: 13 SOURCE: NCBI_Prokaryotes DATE: 2019 Jan. 27. |
| 836-837 | human gut metagenome genome assembly, contig: NODE_185_length_60551_cov_7.280233, whole |
| | genome shotgun sequence \| GENOME_ACESSION: OVYF01.1 GENOME_ID: 11769 CONTIG_ID: |
| | 184 SOURCE: WGS DATE: 2019 Jan. 27. |
| 838-839 | SAR324 cluster bacterium isolate NORP136 Contig_source1382A_8018, whole genome shotgun |
| | sequence \| GENOME_ACESSION: GCA_002401295.1_ASM240129v1_genomic GENOME_ID: |
| | 135030 CONTIG_ID: 170 SOURCE: NCBI_Prokaryotes DATE: 2019 Jan. 27. |
| 840-841 | Ga0395987_006804 \| GENOME_ACESSION: 713CPN11X4metaG_FD_$F_3300037132 |
| | GENOME_ID: 311343 CONTIG_ID: 6803 SOURCE: JGI DATE: 2020 Apr. 07. |
| 842-843 | NODE_45992_length_4239_cov_6.566407 \| GENOME_ACESSION: mgm4743561.3 GENOME_ID: |
| | 238063 CONTIG_ID: 3254 SOURCE: MG-RAST DATE: 2019 Jan. 27. |
| 844-845 | Ga0172381_10008462 \| GENOME_ACESSION: Leawel6488metaG_2_$F_3300014204 GENOME_ID: |
| | 31499 CONTIG_ID: 8461 SOURCE: JGI DATE: 2019 Jan. 27. |
| 846-847 | Ga0268280_1002972 \| GENOME_ACESSION: saktaG_18_$F_3300028298 GENOME_ID: 37736 |
| | CONTIG_ID: 2971 SOURCE: JGI DATE: 2019 Jan. 27. |
| 848-849 | Lactobacillus salivarius strain AH43324 AH43324_contig_69, whole genome shotgun sequence \| |
| | GENOME_ACESSION: GCA_002079805.1_ASM207980v1_genomic GENOME_ID: 120315 |
| | CONTIG_ID: 67 SOURCE: NCBI_Prokaryotes DATE: 2019 Jan. 27. |
| 850-851 | Ga0233437_1033046 \| GENOME_ACESSION: SI_122_August201_7_$F_3300024259 GENOME_ID: |
| | 35158 CONTIG_ID: 33045 SOURCE: JGI DATE: 2019 Jan. 27. |
| 852-853 | Ga0209175_10000039 \| GENOME_ACESSION: JI9CDNASPAdes_$F_3300027781 GENOME_ID: |
| | 30210 CONTIG_ID: 38 SOURCE: JGI DATE: 2019 Jan. 27. |
| 854-855 | Ga0306922_10010477 \| GENOME_ACESSION: sta12C44000082v2_$F_3300032001 GENOME_ID: |
| | 281679 CONTIG_ID: 10476 SOURCE: JGI DATE: 2019 Jun. 13. |
| 856-857 | Ga0393278_0001403 \| GENOME_ACESSION: LZ_38metaG_FD_$F_3300036985 GENOME_ID: |
| | 312543 CONTIG_ID: 1402 SOURCE: JGI DATE: 2020 Apr. 07. |
| 858-859 | Ga0272428_1004076 \| GENOME_ACESSION: FingerMtnordMG_2_$F_3300031520 GENOME_ID: |
| | 280175 CONTIG_ID: 4075 SOURCE: JGI DATE: 2019 Jun. 13. |
| 860-861 | Ga0315294_10016080 \| GENOME_ACESSION: YL17G13_40_MG_2_$F_3300031952 GENOME_ID: |
| | 281645 CONTIG_ID: 16079 SOURCE: JGI DATE: 2019 Jun. 13. |
| 862-863 | Ga0136617_10020436 \| GENOME_ACESSION: AntDrymUQ3222106_4_$F_3300017789 |
| | GENOME_ID: 23166 CONTIG_ID: 20435 SOURCE: JGI DATE: 2019 Jan. 27. |
| 864-865 | Ga0376462_0006212 \| GENOME_ACESSION: Beaver3Rectum1_2_$F_3300035507 GENOME_ID: |
| | 304486 CONTIG_ID: 6211 SOURCE: JGI DATE: 2019 Nov. 15. |
| 866-867 | TPA_asm: Spirochaetales bacterium UBA4673 UBA4673_contig_503, whole genome shotgun sequence \| |
| | GENOME_ACESSION: GCA_002405195.1_ASM240519v1_genomic GENOME_ID: 135224 |
| | CONTIG_ID: 68 SOURCE: NCBI_Prokaryotes DATE: 2019 Jan. 27. |
| 868-869 | human gut metagenome genome assembly, contig: NODE_9257_length_4009_cov_72.398331, whole |
| | genome shotgun sequence \| GENOME_ACESSION: OOBZ01.1 GENOME_ID: 8412 CONTIG_ID: |
| | 9256 SOURCE: WGS DATE: 2019 Jan. 27. |
| 870-871 | Ktedonobacterales bacterium SCAWS-G2 chromosome, complete genome \| GENOME_ACESSION: |
| | GCA_004208415.1_ASM420841v1_genomic GENOME_ID: 252008 CONTIG_ID: 0 SOURCE: |
| | NCBI_Prokaryotes DATE: 2019 May 30. |
| 872-873 | Ga0180433_10023929 \| GENOME_ACESSION: SS_ome_13_$F_3300018080 GENOME_ID: 35197 |
| | CONTIG_ID: 23928 SOURCE: JGI DATE: 2019 Jan. 27. |
| 874-875 | NODE_5238_length_5917_cov_2.09499 \| GENOME_ACESSION: mgm4784220.3 GENOME_ID: |
| | 238330 CONTIG_ID: 5237 SOURCE: MG-RAST DATE: 2019 Jan. 27. |
| 876-877 | human gut metagenome genome assembly, contig: NODE_6773_length_5968_cov_3.051265, whole |
| | genome shotgun sequence \| GENOME_ACESSION: ORJR01.1 GENOME_ID: 10538 CONTIG_ID: |
| | 6772 SOURCE: WGS DATE: 2019 Jan. 27. |
| 878-879 | Ga0376486_000912 \| GENOME_ACESSION: B11_SRodWell667_FD_$F_3300035524 GENOME_ID: |
| | 311392 CONTIG_ID: 911 SOURCE: JGI DATE: 2020 Apr. 07. |
| 880-881 | human gut metagenome genome assembly, contig: NODE_98_length_85073_cov_10.354925, whole |
| | genome shotgun sequence \| GENOME_ACESSION: OIYE01.1 GENOME_ID: 6139 CONTIG_ID: 97 |
| | SOURCE: WGS DATE: 2019 Jan. 27. |
| 882-883 | Ga0114934_10005458 \| GENOME_ACESSION: 4SBtaG_3_$F_3300011013 GENOME_ID: 21023 |
| | CONTIG_ID: 5457 SOURCE: JGI DATE: 2019 Jan. 27. |
| 884-885 | Ga0377182_011632 \| GENOME_ACESSION: B610_RodWell662_FD_$F_3300036940 GENOME_ID: |
| | 311426 CONTIG_ID: 11631 SOURCE: JGI DATE: 2020 Apr. 07. |
| 886-887 | Ga0311301_10001791 \| GENOME_ACESSION: Sb_comMetaSPAdes_$F_3300032160 GENOME_ID: |
| | 280981 CONTIG_ID: 1790 SOURCE: JGI DATE: 2019 Jun. 13. |
| 888-889 | BBAY79_10002962 \| GENOME_ACESSION: IMG_3300000980_$F_3300000980 GENOME_ID: |
| | 27489 CONTIG_ID: 2961 SOURCE: JGI DATE: 2019 Jan. 27. |
| 890-891 | Candidatus Diapherotrites archaeon isolate CSSed10_239 CS-Sed10-C837, whole genome shotgun |
| | sequence \| GENOME_ACESSION: GCA_003559395.1_ASM355939v1_genomic GENOME_ID: |
| | 245282 CONTIG_ID: 102 SOURCE: NCBI_Prokaryotes DATE: 2019 May 30. |
| 892-893 | Nocardiopsis sp. CNR-923 NODE_20_length_84413_cov_159.688_ID_35, whole genome shotgun |
| | sequence \| GENOME_ACESSION: GCA_001942255.1_ASM194225v1_genomic GENOME_ID: |
| | 114820 CONTIG_ID: 65 SOURCE: NCBI_Prokaryotes DATE: 2019 Jan. 27. |
| 894-895 | Streptosporangium sp. ‘caverna’ chromosome \| GENOME_ACESSION: |
| | GCA_003203775.1_ASM320377v1_genomic GENOME_ID: 162526 CONTIG_ID: 0 SOURCE: |
| | NCBI_Prokaryotes DATE: 2019 Jan. 27. |
| 896-897 | Ga0307928_10027040 \| GENOME_ACESSION: AceLakmetagen232_2_$F_3300031227 |
| | GENOME_ID: 279923 CONTIG_ID: 27039 SOURCE: JGI DATE: 2019 Jun. 13. |
| 898-899 | Ga0209749_1010998 \| GENOME_ACESSION: EPASupSA47SPAdes_$F_3300027958 GENOME_ID: |
| | 25534 CONTIG_ID: 10997 SOURCE: JGI DATE: 2019 Jan. 27. |
| 900-901 | Ga0376086_0000584 \| GENOME_ACESSION: LAC_S2_MG_FICUS_FD_$F_3300035686 |
| | GENOME_ID: 312530 CONTIG_ID: 583 SOURCE: JGI DATE: 2020 Apr. 07. |
| 902-903 | Synergistales bacterium isolate INTA.AUR.055 contig-100_2301, whole genome shotgun sequence \| |
| | GENOME_ACESSION: GCA_009929915.1_ASM992991v1_genomic GENOME_ID: 322850 |
| | CONTIG_ID: 232 SOURCE: NCBI_Prokaryotes DATE: 2020 Apr. 22. |
| 904-905 | Ga0310695_10017382 \| GENOME_ACESSION: RumRJGDNAv2_$F_3300032007 GENOME_ID: |
| | 280889 CONTIG_ID: 17381 SOURCE: JGI DATE: 2019 Jun. 13. |
| 906-907 | Ga0197142_1000319 \| GENOME_ACESSION: GBS60_MetaG_2_$F_3300020153 GENOME_ID: |
| | 26410 CONTIG_ID: 318 SOURCE: JGI DATE: 2019 Jan. 27. |
| 908-909 | Ga0310136_007496 \| GENOME_ACESSION: M271_2_$F_3300034520 GENOME_ID: 292992 |
| | CONTIG_ID: 7495 SOURCE: JGI DATE: 2019 Aug. 09. |
| 910-911 | Ga0181858_1003566 \| GENOME_ACESSION: NewIslPassag4_SG_FD_$F_3300017832 |
| | GENOME_ID: 309944 CONTIG_ID: 3565 SOURCE: JGI DATE: 2020 Apr. 07. |
| 912-913 | Ga0137378_10000779 \| GENOME_ACESSION: SagtaG_37_$F_3300012210 GENOME_ID: 35424 |
| | CONTIG_ID: 778 SOURCE: JGI DATE: 2019 Jan. 27. |
| 914-915 | Ga0247842_10000474 \| GENOME_ACESSION: LaCruzMarch2015_15_$F_3300029268 |
| | GENOME_ID: 280591 CONTIG_ID: 473 SOURCE: JGI DATE: 2019 Jun. 13. |
| 916-917 | Ga0310696_10000167 \| GENOME_ACESSION: AusTroGonzalMGv2_2_$F_3300031993 |
| | GENOME_ID: 279930 CONTIG_ID: 166 SOURCE: JGI DATE: 2019 Jun. 13. |
| 918-919 | Ga0257048_100529 \| GENOME_ACESSION: IMG_3300023543_$F_3300023543 GENOME_ID: |
| | 309626 CONTIG_ID: 528 SOURCE: JGI DATE: 2020 Apr. 07. |
| 920-921 | Clostridium estertheticum strain FP3 scaffold_9, whole genome shotgun sequence \| |
| | GENOME_ACESSION: GCA_011065935.1_ASM1106593v1_genomic GENOME_ID: 327298 |
| | CONTIG_ID: 84 SOURCE: NCBI_Prokaryotes DATE: 2020 Apr. 22. |
| 922-923 | Acidithiobacillus sp. GGI-221 contig_1300, whole genome shotgun sequence \| GENOME_ACESSION: |
| | GCA_000179815.2_ASM17981v2_genomic GENOME_ID: 41877 CONTIG_ID: 1551 SOURCE: |
| | NCBI_Prokaryotes DATE: 2019 Jan. 27. |
| 924-925 | Ga0105758_1004307 \| GENOME_ACESSION: IMG_3300007742_$F_3300007742 GENOME_ID: |
| | 28195 CONTIG_ID: 4306 SOURCE: JGI DATE: 2019 Jan. 27. |
| 926-927 | human gut metagenome genome assembly, contig: NODE_3246_length_4557_cov_1.626388, whole |
| | genome shotgun sequence \| GENOME_ACESSION: OHYD01.1 GENOME_ID: 5476 CONTIG_ID: |
| | 3245 SOURCE: WGS DATE: 2019 Jan. 27. |
| 928-929 | Ga0311351_10027103 \| GENOME_ACESSION: II_bly_15_$F_3300031722 GENOME_ID: 280479 |
| | CONTIG_ID: 27102 SOURCE: JGI DATE: 2019 Jun. 13. |
| 930-931 | Marine metagenome k99_2163173, whole genome shotgun sequence \| GENOME_ACESSION: |
| | SPKZ01.1 GENOME_ID: 279200 CONTIG_ID: 16826 SOURCE: WGS DATE: 2019 Jun. 06. |
| 932-933 | NODE_4_length_65995_cov_8.35354_ID_1269190 \| GENOME_ACESSION: mgm4799991.3 |
| | GENOME_ID: 238386 CONTIG_ID: 3 SOURCE: MG-RAST DATE: 2019 Jan. 27. |
| 934-935 | JGI24025J20009_10017887 \| GENOME_ACESSION: Cruoilmetagenom3_2_$F_3300001749 |
| | GENOME_ID: 24902 CONTIG_ID: 17886 SOURCE: JGI DATE: 2019 Jan. 27. |
| 936-937 | Ga0182027_10092596 \| GENOME_ACESSION: 712metIlAssembly_$F_3300014839 GENOME_ID: |
| | 21119 CONTIG_ID: 92595 SOURCE: JGI DATE: 2019 Jan. 27. |
| 938-939 | human gut metagenome genome assembly, contig: NODE_3479_length_5529_cov_6.161409, whole |
| | genome shotgun sequence \| GENOME_ACESSION: UESJ01.1 GENOME_ID: 15157 CONTIG_ID: |
| | 3478 SOURCE: WGS DATE: 2019 Jan. 27. |
| 940-941 | human gut metagenome genome assembly, contig: NODE_3969_length_3508_cov_1.320319, whole |
| | genome shotgun sequence \| GENOME_ACESSION: OQCF01.1 GENOME_ID: 9680 CONTIG_ID: |
| | 3968 SOURCE: WGS DATE: 2019 Jan. 27. |
| 942-943 | Ga0066665_10044143 \| GENOME_ACESSION: GraSoiStandDraft_32_$F_3300006796 GENOME_ID: |
| | 27025 CONTIG_ID: 44141 SOURCE: JGI DATE: 2019 Jan. 27. |
| 944-945 | Ga0216255_10000297 \| GENOME_ACESSION: IMG_3300021179_$F_3300021179 GENOME_ID: |
| | 311738 CONTIG_ID: 296 SOURCE: JGI DATE: 2020 Apr. 07. |
| 946-947 | wastewater metagenome genome assembly, contig: NODE_9891_length_3035_cov_2.017785, whole |
| | genome shotgun sequence \| GENOME_ACESSION: OVQI01.1 GENOME_ID: 11618 CONTIG_ID: |
| | 9890 SOURCE: WGS DATE: 2019 Jan. 27. |
| 948-949 | Ga0306925_10047498 \| GENOME_ACESSION: flu12C44000176v2_$F_3300031890 GENOME_ID: |
| | 281676 CONTIG_ID: 47497 SOURCE: JGI DATE: 2019 Jun. 13. |
| 950-951 | human gut metagenome genome assembly, contig: NODE_33_length_113206_cov_37.108961, whole |
| | genome shotgun sequence \| GENOME_ACESSION: OGOX01.1 GENOME_ID: 4582 CONTIG_ID: 32 |
| | SOURCE: WGS DATE: 2019 Jan. 27. |
| 952-953 | Mine drainage metagenome contig00009, whole genome shotgun sequence \| GENOME_ACESSION: |
| | AOMP01.1 GENOME_ID: 99 CONTIG_ID: 8 SOURCE: WGS DATE: 2019 Jan. 27. |
| 954-955 | Ga0401356_0239 \| GENOME_ACESSION: 20190111_54_FD_$F_3300036521 GENOME_ID: 307143 |
| | CONTIG_ID: 238 SOURCE: JGI DATE: 2020 Apr. 07. |
| 956-957 | human metagenome genome assembly, contig: NODE_1669_length_17466_cov_67.5101, whole genome |
| | shotgun sequence \| GENOME_ACESSION: ODJC01.1 GENOME_ID: 3042 CONTIG_ID: 1668 |
| | SOURCE: WGS DATE: 2019 Jan. 27. |
| 958-959 | Ga0213833_1005875 \| GENOME_ACESSION: SWATP21_2_$F_3300021419 GENOME_ID: 35212 |
| | CONTIG_ID: 5874 SOURCE: JGI DATE: 2019 Jan. 27. |
| 960-961 | contig_288372 \| GENOME_ACESSION: mgm4547164.3 GENOME_ID: 237431 CONTIG_ID: 54383 |
| | SOURCE: MG-RAST DATE: 2019 Jan. 27. |
| 962-963 | Ga0209345_10000187 \| GENOME_ACESSION: Cruoilmet7SPAdes_$F_3300027852 GENOME_ID: |
| | 24899 CONTIG_ID: 186 SOURCE: JGI DATE: 2019 Jan. 27. |
| 964-965 | uncultured Clostridiales bacterium isolate RUG12885 genome assembly, contig: RUG12885_asm_36, |
| | whole genome shotgun sequence \| GENOME_ACESSION: |
| | GCA_902783575.1_Rumen_uncultured_genome_RUG12885_genomic GENOME_ID: 346814 |
| | CONTIG_ID: 35 SOURCE: NCBI_Prokaryotes DATE: 2020 Apr. 22. |
| 966-967 | sediment metagenome genome assembly, contig: NODE_10398_length_3581_cov_1.964041, whole |
| | genome shotgun sequence \| GENOME_ACESSION: ORXB01.1 GENOME_ID: 10886 CONTIG_ID: |
| | 10397 SOURCE: WGS DATE: 2019 Jan. 27. |
| 968-969 | Ga0172379_10011290 \| GENOME_ACESSION: GrowelOW334metaG_2_$F_3300014208 |
| | GENOME_ID: 27073 CONTIG_ID: 11289 SOURCE: JGI DATE: 2019 Jan. 27. |
| 970-971 | Ga0120380_1006999 \| GENOME_ACESSION: 3300011989 GENOME_ID: 239578 CONTIG_ID: 4011 |
| | SOURCE: JGI_Dark_Harvest_DATE: 2019 Jan. 27. |
| 972-973 | Ga0256407_10008120 \| GENOME_ACESSION: RumenRJG_04DNA_2_$F_3300028886 |
| | GENOME_ID: 280890 CONTIG_ID: 8119 SOURCE: JGI DATE: 2019 Jun. 13. |
| 974-975 | Ga0315286_10038107 \| GENOME_ACESSION: YL17G10_0_MG_2_$F_3300032342 GENOME_ID: |
| | 281637 CONTIG_ID: 38106 SOURCE: JGI DATE: 2019 Jun. 13. |
| 976-977 | Ga0224423_10002744 \| GENOME_ACESSION: 3300021431 GENOME_ID: 241590 CONTIG_ID: |
| | 2640 SOURCE: JGI_Dark_Harvest DATE: 2019 Jan. 27. |
| 978-979 | Ga0224508_10013895 \| GENOME_ACESSION: SF_Jan12_sed_USG_8_$F_3300022413 |
| | GENOME_ID: 35052 CONTIG_ID: 13894 SOURCE: JGI DATE: 2019 Jan. 27. |
| 980-981 | Ga0272428_1003415 \| GENOME_ACESSION: FingerMtnordMG_2_$F_3300031520 GENOME_ID: |
| | 280175 CONTIG_ID: 3414 SOURCE: JGI DATE: 2019 Jun. 13. |
| 982-983 | JGI1684J13235_1001204 \| GENOME_ACESSION: PonA232FremontCA_3_$F_3300001136 |
| | GENOME_ID: 34628 CONTIG_ID: 1203 SOURCE: JGI DATE: 2019 Jan. 27. |
| 984-985 | Ga0071116_1000008 \| GENOME_ACESSION: IMG_3300005077_$F_3300005077 GENOME_ID: |
| | 305312 CONTIG_ID: 7 SOURCE: JGI DATE: 2019 Nov. 15. |
| 986-987 | Ga0180438_10003339 \| GENOME_ACESSION: SS_ome_18_$F_3300017971 GENOME_ID: 35200 |
| | CONTIG_ID: 3338 SOURCE: JGI DATE: 2019 Jan. 27. |
| 988-989 | Ga0213878_10002132 \| GENOME_ACESSION: VelepicoBEBS_R02_2_$F_3300021444 |
| | GENOME_ID: 37226 CONTIG_ID: 2131 SOURCE: JGI DATE: 2019 Jan. 27. |
| 990-991 | Ga0181296_101698 \| GENOME_ACESSION: IMG_3300013886_$F_3300013886 GENOME_ID: |
| | 28693 CONTIG_ID: 1697 SOURCE: JGI DATE: 2019 Jan. 27. |
| 992-993 | Ga0335394_10010380 \| GENOME_ACESSION: MAT03spassembly_$F_3300032456 GENOME_ID: |
| | 280657 CONTIG_ID: 10379 SOURCE: JGI DATE: 2019 Jun. 13. |
| 994-995 | human gut metagenome genome assembly, contig: NODE_621_length_25902_cov_19.039652, whole |
| | genome shotgun sequence \| GENOME_ACESSION: USZF01.1 GENOME_ID: 17063 CONTIG_ID: 620 |
| | SOURCE: WGS DATE: 2019 Jan. 27. |
| 996-997 | JGI11958J13698_1112174 \| GENOME_ACESSION: ElkSlonscriptome_39_$F_3300001229 |
| | GENOME_ID: 25896 CONTIG_ID: 673 SOURCE: JGI DATE: 2019 Jan. 27. |
| 998-999 | Ga0206349_1775808 \| GENOME_ACESSION: DieMetAnnotativ2_7_$F_3300020075 GENOME_ID: |
| | 280099 CONTIG_ID: 2787 SOURCE: JGI DATE: 2019 Jun. 13. |
| 1000-1001 | Calothrix parasitica NIES-267 DNA, nearly complete genome \| GENOME_ACESSION: |
| | GCA_002368095.1_ASM236809v1_genomic GENOME_ID: 133458 CONTIG_ID: 0 SOURCE: |
| | NCBI_Prokaryotes DATE: 2019 Jan. 27. |
| 1002-1003 | human oral metagenome genome assembly, contig: NODE_37_length_118949_cov_9.025561, whole |
| | genome shotgun sequence \| GENOME_ACESSION: UPUN01.1 GENOME_ID: 16847 CONTIG_ID: 36 |
| | SOURCE: WGS DATE: 2019 Jan. 27. |
| 1004-1005 | Halomonas pantelleriensis strain AAP genome assembly, contig: Ga0075190_101, whole genome |
| | shotgun sequence \| GENOME_ACESSION: GCA_900102875.1_IMG- |
| | taxon_2654587879_annotated_assembly_genomic GENOME_ID: 183751 CONTIG_ID: 17 SOURCE: |
| | NCBI_Prokaryotes DATE: 2019 Jan. 27. |
| 1006-1007 | Ga0136257_102499 \| GENOME_ACESSION: IMG_3300010222_$F_3300010222 GENOME_ID: |
| | 306173 CONTIG_ID: 2498 SOURCE: JGI DATE: 2019 Nov. 15. |
| 1008-1009 | Ga0137385_10003252 \| GENOME_ACESSION: SagtaG_30_$F_3300012359 GENOME_ID: 35417 |
| | CONTIG_ID: 3251 SOURCE: JGI DATE: 2019 Jan. 27. |
| 1010-1011 | Ktedonobacter sp. 13_2_20CM_2_54_8 13_2_20cm_2_scaffold_10398, whole genome shotgun sequence |
| | \| GENOME_ACESSION: GCA_001914965.1_ASM191496v1_genomic GENOME_ID: 113894 |
| | CONTIG_ID: 13 SOURCE: NCBI_Prokaryotes DATE: 2019 Jan. 27. |
| 1012-1013 | wastewater metagenome genome assembly MBR_assembly, scaffold 53832, whole genome shotgun |
| | sequence \| GENOME_ACESSION: CXWK01.1 GENOME_ID: 678 CONTIG_ID: 53831 SOURCE: |
| | WGS DATE: 2019 Jan. 27. |
| 1014-1015 | mouse gut metagenome genome assembly, contig: NODE_2358_length_22209_cov_9.968132, whole |
| | genome shotgun sequence \| GENOME_ACESSION: UWSU01.1 GENOME_ID: 279226 CONTIG_ID: |
| | 2357 SOURCE: WGS DATE: 2019 Jun. 06. |
| 1016-1017 | Ga0223845_11796712 \| GENOME_ACESSION: 3300021387 GENOME_ID: 241586 CONTIG_ID: |
| | 38073 SOURCE: JGI_Dark_Harvest DATE: 2019 Jan. 27. |
| 1018-1019 | human oral metagenome genome assembly, contig: NODE_892_length_16394_cov_3.332334, whole |
| | genome shotgun sequence \| GENOME_ACESSION: UPUY01.1 GENOME_ID: 16858 CONTIG_ID: |
| | 891 SOURCE: WGS DATE: 2019 Jan. 27. |
| 1020-1021 | Ga0256407_10001717 \| GENOME_ACESSION: RumenRJG_04DNA_2_$F_3300028886 |
| | GENOME_ID: 280890 CONTIG_ID: 1716 SOURCE: JGI DATE: 2019 Jun. 13. |
| 1022-1023 | Ga0223824_10002447 \| GENOME_ACESSION: 3300021254 GENOME_ID: 241583 CONTIG_ID: |
| | 2462 SOURCE: JGI_Dark_Harvest DATE: 2019 Jan. 27. |
| 1024-1025 | Ga0307929_1001023 \| GENOME_ACESSION: AceLakmetage1330_2_$F_3300031697 GENOME_ID: |
| | 279922 CONTIG_ID: 1022 SOURCE: JGI DATE: 2019 Jun. 13. |
| 1026-1027 | contig6504_4380_Ch2-EY65S_meta \| GENOME_ACESSION: mgm4530144.3 GENOME_ID: 237411 |
| | CONTIG_ID: 1016 SOURCE: MG-RAST DATE: 2019 Jan. 27. |
| 1028-1029 | metagenome genome assembly, contig: NODE_193_length_67362_cov_18.951298, whole genome |
| | shotgun sequence \| GENOME_ACESSION: OGJK01.1 GENOME_ID: 4439 CONTIG_ID: 192 |
| | SOURCE: WGS DATE: 2019 Jan. 27. |
| 1030-1031 | Ga0310691_10013239 \| GENOME_ACESSION: 176DNAGHGlogp2v2_$F_3300031994 |
| | GENOME_ID: 279761 CONTIG_ID: 13236 SOURCE: JGI DATE: 2019 Jun. 13. |
| 1032-1033 | Ga0117908_1060975 \| GENOME_ACESSION: IMG_3300009314_$F_3300009314 GENOME_ID: |
| | 311702 CONTIG_ID: 60974 SOURCE: JGI DATE: 2020 Apr. 07. |
| 1034-1035 | Ga0117908_1013265 \| GENOME_ACESSION: IMG_3300009314_$F_3300009314 GENOME_ID: |
| | 311702 CONTIG_ID: 13264 SOURCE: JGI DATE: 2020 Apr. 07. |
| 1036-1037 | Ga0137372_10037833 \| GENOME_ACESSION: SagtaG_40_$F_3300012350 GENOME_ID: 35427 |
| | CONTIG_ID: 37832 SOURCE: JGI DATE: 2019 Jan. 27. |
| 1038-1039 | Ga0137380_10001296 \| GENOME_ACESSION: SagtaG_34_$F_3300012206 GENOME_ID: 35421 |
| | CONTIG_ID: 1295 SOURCE: JGI DATE: 2019 Jan. 27. |
| 1040-1041 | JGI24023J19991_10009125 \| GENOME_ACESSION: Cruoilmetagenom1_2_$F_3300001750 |
| | GENOME_ID: 24900 CONTIG_ID: 9124 SOURCE: JGI DATE: 2019 Jan. 27. |
| 1042-1043 | Ga0079367_1013592 \| GENOME_ACESSION: IMG_3300005782_$F_3300005782 GENOME_ID: |
| | 305361 CONTIG_ID: 13591 SOURCE: JGI DATE: 2019 Nov. 15. |
| 1044-1045 | Ga0134857_007242 \| GENOME_ACESSION: IMG_3300038321_$F_3300038321 GENOME_ID: |
| | 311752 CONTIG_ID: 7241 SOURCE: JGI DATE: 2020 Apr. 07. |
| 1046-1047 | Ga0224514_10000173 \| GENOME_ACESSION: SF_May12_sed_USG_10_$F_3300022217 |
| | GENOME_ID: 35059 CONTIG_ID: 172 SOURCE: JGI DATE: 2019 Jan. 27. |
| 1048-1049 | contig_283691 \| GENOME_ACESSION: mgm4547164.3 GENOME_ID: 237431 CONTIG_ID: 53603 |
| | SOURCE: MG-RAST DATE: 2019 Jan. 27. |
| 1050-1051 | Ga0209992_10008281 \| GENOME_ACESSION: 2SBmetSPAdes_$F_3300024344 GENOME_ID: |
| | 20867 CONTIG_ID: 8280 SOURCE: JGI DATE: 2019 Jan. 27. |
| 1052-1053 | Brachybacterium phenoliresistens strain W13A50 genomic scaffold V9_scaffold_01, whole genome |
| | shotgun sequence \| GENOME_ACESSION: GCA_000576425.1_Braphev1_genomic GENOME_ID: |
| | 58848 CONTIG_ID: 0 SOURCE: NCBI_Prokaryotes DATE: 2019 Jan. 27. |
| 1054-1055 | Ga0116183_1003561 \| GENOME_ACESSION: AD_UKC078_MetaG_2_$F_3300009670 |
| | GENOME_ID: 21291 CONTIG_ID: 3560 SOURCE: JGI DATE: 2019 Jan. 27. |
| 1056-1057 | Pseudothermotoga lettingae TMO chromosome, complete genome \| GENOME_ACESSION: |
| | GCA_000017865.1_ASM1786v1_genomic GENOME_ID: 39811 CONTIG_ID: 0 SOURCE: |
| | NCBI_Prokaryotes DATE: 2019 Jan. 27. |
| 1058-1059 | contig_5238951 \| GENOME_ACESSION: mgm4547164.3 GENOME_ID: 237431 CONTIG_ID: 422111 |
| | SOURCE: MG-RAST DATE: 2019 Jan. 27. |
| 1060-1061 | Ga0247841_10015468 \| GENOME_ACESSION: LaCruzMarch2015_16_$F_3300029286 |
| | GENOME_ID: 280592 CONTIG_ID: 15467 SOURCE: JGI DATE: 2019 Jun. 13. |
| 1062-1063 | Ga0070741_10034480 \| GENOME_ACESSION: CoaSoiStandDraft_11_$F_3300005529 GENOME_ID: |
| | 24556 CONTIG_ID: 34479 SOURCE: JGI DATE: 2019 Jan. 27. |
| 1064-1065 | Ga0163155_10003458 \| GENOME_ACESSION: OliLakLV19SP4G1_2_$F_3300020180 GENOME_ID: |
| | 33728 CONTIG_ID: 3457 SOURCE: JGI DATE: 2019 Jan. 27. |
| 1066-1067 | Ga0315289_10016130 \| GENOME_ACESSION: YL17G11_40_MG_2_$F_3300032046 GENOME_ID: |
| | 281640 CONTIG_ID: 16129 SOURCE: JGI DATE: 2019 Jun. 13. |
| 1068-1069 | human oral metagenome genome assembly, contig: NODE_4988_length_5676_cov_2.188756, whole |
| | genome shotgun sequence \| GENOME_ACESSION: UPQL01.1 GENOME_ID: 16747 CONTIG_ID: |
| | 4987 SOURCE: WGS DATE: 2019 Jan. 27. |
| 1070-1071 | Ga0395764_001082 \| GENOME_ACESSION: AusTroGonzalo_MT_8_FD_$F_3300037731 |
| | GENOME_ID: 311391 CONTIG_ID: 1081 SOURCE: JGI DATE: 2020 Apr. 07. |
| 1072-1073 | Ga0373632_0063621 \| GENOME_ACESSION: RO12ediment_MG_6_$F_3300035181 GENOME_ID: |
| | 306458 CONTIG_ID: 63620 SOURCE: JGI DATE: 2019 Nov. 15. |
| 1074-1075 | Ga0137373_10002777 \| GENOME_ACESSION: SagtaG_42_$F_3300012532 GENOME_ID: 35429 |
| | CONTIG_ID: 2776 SOURCE: JGI DATE: 2019 Jan. 27. |
| 1076-1077 | Ga0373625_0005570 \| GENOME_ACESSION: YL18G_12A_MG_FD_$F_3300035701 GENOME_ID: |
| | 312749 CONTIG_ID: 5569 SOURCE: JGI DATE: 2020 Apr. 07. |
| 1078-1079 | NODE_67_length_48612_cov_5.28557 \| GENOME_ACESSION: mgm4784118.3 GENOME_ID: |
| | 238329 CONTIG_ID: 66 SOURCE: MG-RAST DATE: 2019 Jan. 27. |
| 1080-1081 | Gloeocapsa sp. PCC 73106 scaffold_00137, whole genome shotgun sequence \| GENOME_ACESSION: |
| | GCA_000332035.1_ASM33203v1_genomic GENOME_ID: 47767 CONTIG_ID: 136 SOURCE: |
| | NCBI_Prokaryotes DATE: 2019 Jan. 27. |
| 1082-1083 | Human gut metagenome DNA, contig sequence: In-M_001490, whole genome shotgun sequence \| |
| | GENOME_ACESSION: BABF01.1 GENOME_ID: 148 CONTIG_ID: 1488 SOURCE: WGS DATE: |
| | 2019 Jan. 27. |
| 1084-1085 | Ga0307928_10009122 \| GENOME_ACESSION: AceLakmetagen232_2_$F_3300031227 |
| | GENOME_ID: 279923 CONTIG_ID: 9121 SOURCE: JGI DATE: 2019 Jun. 13. |
| 1086-1087 | Ga0126373_10059781 \| GENOME_ACESSION: PanSoiMetPlot_11_2_$F_3300010048 GENOME_ID: |
| | 34137 CONTIG_ID: 59780 SOURCE: JGI DATE: 2019 Jan. 27. |
| 1988-1089 | Ga0120401_1040793 \| GENOME_ACESSION: IMG_3300009431_$F_3300009431 GENOME_ID: |
| | 311717 CONTIG_ID: 40792 SOURCE: JGI DATE: 2020 Apr. 07. |
| 1090-1091 | Ga0101770_1001685 \| GENOME_ACESSION: IMG_3300006674_$F_3300006674 GENOME_ID: |
| | 27981 CONTIG_ID: 1591 SOURCE: JGI DATE: 2019 Jan. 27. |
| 1092-1093 | Ga0114977_10001865 \| GENOME_ACESSION: S_130805_MF_Meta_2_$F_3300009158 |
| | GENOME_ID: 35224 CONTIG_ID: 1864 SOURCE: JGI DATE: 2019 Jan. 27. |
| 1094-1095 | Ga0137384_10058259 \| GENOME_ACESSION: SagtaG_31_$F_3300012357 GENOME_ID: 35418 |
| | CONTIG_ID: 58257 SOURCE: JGI DATE: 2019 Jan. 27. |
| 1096-1097 | rank12_10070934 \| GENOME_ACESSION: IMG_3300001484_$F_3300001484 GENOME_ID: 27520 |
| | CONTIG_ID: 2351 SOURCE: JGI DATE: 2019 Jan. 27. |
| 1098-1099 | Ga0116142_10030893 \| GENOME_ACESSION: AD_UKC033_MetaG_2_$F_3300009685 |
| | GENOME_ID: 21279 CONTIG_ID: 30892 SOURCE: JGI DATE: 2019 Jan. 27. |
| 1100-1101 | Ga0180432_10045612 \| GENOME_ACESSION: SS_ome_17_$F_3300017989 GENOME_ID: 35199 |
| | CONTIG_ID: 45611 SOURCE: JGI DATE: 2019 Jan. 27. |
| 1102-1103 | Ga0311361_10020611 \| GENOME_ACESSION: IIIbly_16_$F_3300029911 GENOME_ID: 280449 |
| | CONTIG_ID: 20610 SOURCE: JGI DATE: 2019 Jun. 13. |
| 1104-1105 | Ga0163148_10007436 \| GENOME_ACESSION: OliLakLV19MP7P2_2_$F_3300020203 |
| | GENOME_ID: 33724 CONTIG_ID: 7435 SOURCE: JGI DATE: 2019 Jan. 27. |
| 1106-1107 | Ga0272448_1029175 \| GENOME_ACESSION: YNPCB0191_2_$F_3300031463 GENOME_ID: |
| | 281650 CONTIG_ID: 29174 SOURCE: JGI DATE: 2019 Jun. 13. |
| 1108-1109 | Ga0224414_10007183 \| GENOME_ACESSION: GoaFecdilinmedia_$F_3300029705 GENOME_ID: |
| | 280326 CONTIG_ID: 7182 SOURCE: JGI DATE: 2019 Jun. 13. |
| 1110-1111 | Ga0182027_10069116 \| GENOME_ACESSION: 712metIlAssembly_$F_3300014839 GENOME_ID: |
| | 21119 CONTIG_ID: 69115 SOURCE: JGI DATE: 2019 Jan. 27. |
| 1112-1113 | Ga0307430_1002475 \| GENOME_ACESSION: SalMarWE160130MG_2_$F_3300031337 |
| | GENOME_ID: 280957 CONTIG_ID: 2474 SOURCE: JGI DATE: 2019 Jun. 13. |
| 1114-1115 | human gut metagenome genome assembly, contig: scaffold32196_3, whole genome shotgun sequence \| |
| | GENOME_ACESSION: ULVP01.1 GENOME_ID: 15549 CONTIG_ID: 49215 SOURCE: WGS DATE: |
| | 2019 Jan. 27. |
| 1116-1117 | Ga0190313_1000813 \| GENOME_ACESSION: 4870071011_MG_2_$F_3300022188 GENOME_ID: |
| | 20967 CONTIG_ID: 812 SOURCE: JGI DATE: 2019 Jan. 27. |
| 1118-1119 | Ga0272429_1007931 \| GENOME_ACESSION: FingerMtsudMG_2_$F_3300031449 GENOME_ID: |
| | 280176 CONTIG_ID: 7930 SOURCE: JGI DATE: 2019 Jun. 13. |
| 1120-1121 | Ga0137383_10000411 \| GENOME_ACESSION: SagtaG_26_$F_3300012199 GENOME_ID: 35413 |
| | CONTIG_ID: 410 SOURCE: JGI DATE: 2019 Jan. 27. |
| 1122-1123 | human gut metagenome genome assembly, contig: NODE_181_length_41557_cov_9.331606, whole |
| | genome shotgun sequence \| GENOME_ACESSION: USVZ01.1 GENOME_ID: 16979 CONTIG_ID: 180 |
| | SOURCE: WGS DATE: 2019 Jan. 27. |
| 1124-1125 | contig_3041208 \| GENOME_ACESSION: mgm4547164.3 GENOME_ID: 237431 CONTIG_ID: 335256 |
| | SOURCE: MG-RAST DATE: 2019 Jan. 27. |
| 1126-1127 | Ga0210056_1025515 \| GENOME_ACESSION: CryGey1480SPAdes_$F_3300025022 GENOME_ID: |
| | 280077 CONTIG_ID: 25514 SOURCE: JGI DATE: 2019 Jun. 13. |
| 1128-1129 | Geitlerinema sp. FC II Abyss71_314_len:29491, whole genome shotgun sequence \| |
| | GENOME_ACESSION: GCA_002286845.1_ASM228684v1_genomic GENOME_ID: 129498 |
| | CONTIG_ID: 158 SOURCE: NCBI_Prokaryotes DATE: 2019 Jan. 27. |
| 1130-1131 | Ga0307954_1000334 \| GENOME_ACESSION: OrgLakmetagen437_2_$F_3300031391 GENOME_ID: |
| | 280790 CONTIG_ID: 333 SOURCE: JGI DATE: 2019 Jun. 13. |
| 1132-1133 | Ga0376687_0042770 \| GENOME_ACESSION: AusPinMetagenome_11_FD_$F_3300036817 |
| | GENOME_ID: 312296 CONTIG_ID: 42769 SOURCE: JGI DATE: 2020 Apr. 07. |
| 1134-1135 | Ga0172375_10015289 \| GENOME_ACESSION: LakKiv1m_2_$F_3300013137 GENOME_ID: 31118 |
| | CONTIG_ID: 15288 SOURCE: JGI DATE: 2019 Jan. 27. |
| 1136-1137 | Ga0180732_1000856 \| GENOME_ACESSION: KR11_01MetaG_2_$F_3300020171 GENOME_ID: |
| | 30715 CONTIG_ID: 855 SOURCE: JGI DATE: 2019 Jan. 27. |
| 1138-1139 | human oral metagenome genome assembly, contig: NODE_518_length_20447_cov_4.380541, whole |
| | genome shotgun sequence \| GENOME_ACESSION: UPWB01.1 GENOME_ID: 16887 CONTIG_ID: |
| | 517 SOURCE: WGS DATE: 2019 Jan. 27. |
| 1140-1141 | Ga0307930_1006096 \| GENOME_ACESSION: OrgLakmetageno46_2_$F_3300031600 GENOME_ID: |
| | 280812 CONTIG_ID: 6095 SOURCE: JGI DATE: 2019 Jun. 13. |
| 1142-1143 | Ga0182741_1016627 \| GENOME_ACESSION: eDN5th3BELigOPv2_$F_3300017649 GENOME_ID: |
| | 37689 CONTIG_ID: 16626 SOURCE: JGI DATE: 2019 Jan. 27. |
| 1144-1145 | Ga0164242_10000581 \| GENOME_ACESSION: OricomgcompostMG_2_$F_3300012942 |
| | GENOME_ID: 33846 CONTIG_ID: 580 SOURCE: JGI DATE: 2019 Jan. 27. |
| 1146-1147 | Ga0209697_10006283 \| GENOME_ACESSION: AliMusmetaSPAdes_2_$F_3300025316 |
| | GENOME_ID: 22533 CONTIG_ID: 6282 SOURCE: JGI DATE: 2019 Jan. 27. |
| 1148-1149 | Ga0137371_10000193 \| GENOME_ACESSION: SagtaG_43_$F_3300012356 GENOME_ID: 35430 |
| | CONTIG_ID: 192 SOURCE: JGI DATE: 2019 Jan. 27. |
| 1150-1151 | human gut metagenome genome assembly, contig: NODE_4561_length_4588_cov_3.294066, whole |
| | genome shotgun sequence \| GENOME_ACESSION: OIZI01.1 GENOME_ID: 6169 CONTIG_ID: 4560 |
| | SOURCE: WGS DATE: 2019 Jan. 27. |
| 1152-1153 | Ga0079226_10027342 \| GENOME_ACESSION: PoulitStandDraft_2_$F_3300006879 GENOME_ID: |
| | 34654 CONTIG_ID: 27341 SOURCE: JGI DATE: 2019 Jan. 27. |
| 1154-1155 | Ga0315295_10106663 \| GENOME_ACESSION: YL17G14_0_MG_2_$F_3300032156 GENOME_ID: |
| | 281646 CONTIG_ID: 106662 SOURCE: JGI DATE: 2019 Jun. 13. |
| 1156-1157 | Ga0265297_10033497 \| GENOME_ACESSION: Munlanlwell13791_2_$F_3300029288 GENOME_ID: |
| | 280701 CONTIG_ID: 33496 SOURCE: JGI DATE: 2019 Jun. 13. |
| 1158-1159 | Ga0256842_1000027 \| GENOME_ACESSION: 4559240metaG_2_$F_3300026512 GENOME_ID: |
| | 20948 CONTIG_ID: 26 SOURCE: JGI DATE: 2019 Jan. 27. |
| 1160-1161 | Ga0209123_1000186 \| GENOME_ACESSION: BarGra031ASPAdes_$F_3300025718 GENOME_ID: |
| | 23742 CONTIG_ID: 185 SOURCE: JGI DATE: 2019 Jan. 27. |
| 1162-1163 | Ga0373956_0001933 \| GENOME_ACESSION: WV9ome_14_FD_$F_3300035119 GENOME_ID: |
| | 312721 CONTIG_ID: 1932 SOURCE: JGI DATE: 2020 Apr. 07. |
| 1164-1165 | Ga0316622_100118550 \| GENOME_ACESSION: OWC_Aug_OW2_C1_D_3_$F_3300033416 |
| | GENOME_ID: 280756 CONTIG_ID: 118549 SOURCE: JGI DATE: 2019 Jun. 13. |
| 1166-1167 | Oscillatoria sp. PCC 10802 genomic scaffold Osc10802DRAFT_Contig7.7, whole genome shotgun |
| | sequence \| GENOME_ACESSION: GCA_000332335.1_ASM33233v1_genomic GENOME_ID: 47782 |
| | CONTIG_ID: 2 SOURCE: NCBI_Prokaryotes DATE: 2019 Jan. 27. |
| 1168-1169 | Ga0101763_1138 \| GENOME_ACESSION: IMG_3300006673_$F_3300006673 GENOME_ID: 308857 |
| | CONTIG_ID: 137 SOURCE: JGI DATE: 2020 Apr. 07. |
| 1170-1171 | uncultured Nitrospira sp. isolate Nitrospira sp. RBC083 genome assembly, contig: MAG083_64, whole |
| | genome shotgun sequence \| GENOME_ACESSION: GCA_902500745.1_RBC083_genomic |
| | GENOME_ID: 337206 CONTIG_ID: 63 SOURCE: NCBI_Prokaryotes DATE: 2020 Apr. 22. |
| 1172-1173 | Ga0209639_1000561 \| GENOME_ACESSION: EPASupHS05SPAdes_$F_3300027566 GENOME_ID: |
| | 25530 CONTIG_ID: 560 SOURCE: JGI DATE: 2019 Jan. 27. |
| 1174-1175 | Ga0209347_1003246 \| GENOME_ACESSION: AutmicBR23SPAdes_$F_3300027640 GENOME_ID: |
| | 23478 CONTIG_ID: 3245 SOURCE: JGI DATE: 2019 Jan. 27. |
| 1176-1177 | Streptomyces sp. SID12501 NODE_3_length_364520_cov_60.6328_ID_5/0, whole genome shotgun |
| | sequence \| GENOME_ACESSION: GCA_010550245.1_ASM1055024v1_genomic GENOME_ID: |
| | 324827 CONTIG_ID: 465 SOURCE: NCBI_Prokaryotes DATE: 2020 Apr. 22. |
| 1178-1179 | TPA_asm: Lachnospiraceae bacterium UBA2891 UBA2891_contig_1233, whole genome shotgun |
| | sequence \| GENOME_ACESSION: GCA_002350125.1_ASM235012v1_genomic GENOME_ID: |
| | 132595 CONTIG_ID: 4 SOURCE: NCBI_Prokaryotes DATE: 2019 Jan. 27. |
| 1180-1181 | metagenome genome assembly, contig: NODE_3439_length_13191_cov_268.301586, whole genome |
| | shotgun sequence \| GENOME_ACESSION: OVKZ01.1 GENOME_ID: 11487 CONTIG_ID: 3438 |
| | SOURCE: WGS DATE: 2019 Jan. 27. |
| 1182-1183 | Ga0257069_1000440 \| GENOME_ACESSION: GoafecGen1Rep2v2_$F_3300023687 GENOME_ID: |
| | 280334 CONTIG_ID: 439 SOURCE: JGI DATE: 2019 Jun. 13. |
| 1184-1185 | human gut metagenome genome assembly, contig: NODE_551_length_27492_cov_18.9512, whole |
| | genome shotgun sequence \| GENOME_ACESSION: OBXO01.1 GENOME_ID: 2388 CONTIG_ID: 550 |
| | SOURCE: WGS DATE: 2019 Jan. 27. |
| 1186-1187 | Ga0310136_005540 \| GENOME_ACESSION: M271_2_$F_3300034520 GENOME_ID: 292992 |
| | CONTIG_ID: 5539 SOURCE: JGI DATE: 2019 Aug. 09. |
| 1188-1189 | Ga0187878_1000231 \| GENOME_ACESSION: June2016WEW_17_1_5_$F_3300018005 |
| | GENOME_ID: 30401 CONTIG_ID: 230 SOURCE: JGI DATE: 2019 Jan. 27. |
| 1190-1191 | Ga0268280_1010517 \| GENOME_ACESSION: saktaG_18_$F_3300028298 GENOME_ID: 37736 |
| | CONTIG_ID: 10516 SOURCE: JGI DATE: 2019 Jan. 27. |
| 1192-1193 | Ga0326511_10041793 \| GENOME_ACESSION: 0_2496_0518_D_2_$F_3300031867 GENOME_ID: |
| | 279726 CONTIG_ID: 41792 SOURCE: JGI DATE: 2019 Jun. 13. |
| 1194-1195 | Ga0334886_1000752 \| GENOME_ACESSION: GraSluR1_MG_19_$F_3300033176 GENOME_ID: |
| | 280356 CONTIG_ID: 751 SOURCE: JGI DATE: 2019 Jun. 13. |
| 1196-1197 | human gut metagenome genome assembly, contig: NODE_64_length_112578_cov_13.342685, whole |
| | genome shotgun sequence \| GENOME_ACESSION: UPIZ01.1 GENOME_ID: 16554 CONTIG_ID: 63 |
| | SOURCE: WGS DATE: 2019 Jan. 27. |
| 1198-1199 | Ga0172375_10009941 \| GENOME_ACESSION: LakKiv1m_2_$F_3300013137 GENOME_ID: 31118 |
| | CONTIG_ID: 9940 SOURCE: JGI DATE: 2019 Jan. 27. |
| 1200 | human gut metagenome genome assembly, contig: scaffold16000_1, whole genome shotgun sequence \| |
| | GENOME_ACESSION: ULWC01.1 GENOME_ID: 15562 CONTIG_ID: 7528 SOURCE: WGS DATE: |
| | 2019 Jan. 27. |
| 1201-1202 | Ga0114919_10025663 \| GENOME_ACESSION: BlataG_2_$F_3300009529 GENOME_ID: 23889 |
| | CONTIG_ID: 25662 SOURCE: JGI DATE: 2019 Jan. 27. |
| 1203-1204 | Ga0376445_000045 \| GENOME_ACESSION: PitchLake_TarA_s_2_$F_3300035492 GENOME_ID: |
| | 306414 CONTIG_ID: 44 SOURCE: JGI DATE: 2019 Nov. 15. |
| 1205-1206 | Ga0255344_1006041 \| GENOME_ACESSION: wastewater_treat_13_$F_3300028564 GENOME_ID: |
| | 281794 CONTIG_ID: 6040 SOURCE: JGI DATE: 2019 Jun. 13. |
| 1207-1208 | Bacillus sp. REN51N contig_15, whole genome shotgun sequence \| GENOME_ACESSION: |
| | GCA_000815345.1_ASM81534v1_genomic GENOME_ID: 69819 CONTIG_ID: 6 SOURCE: |
| | NCBI_Prokaryotes DATE: 2019 Jan. 27. |
| 1209-1210 | NODE_3452_length_33331_cov_8.192224 \| GENOME_ACESSION: mgm4491404.3 GENOME_ID: |
| | 237261 CONTIG_ID: 556 SOURCE: MG-RAST DATE: 2019 Jan. 27. |
| 1211-1212 | Ga0079226_10038291 \| GENOME_ACESSION: PoulitStandDraft_2_$F_3300006879 GENOME_ID: |
| | 34654 CONTIG_ID: 38290 SOURCE: JGI DATE: 2019 Jan. 27. |
| 1213-1214 | Ga0194044_10012301 \| GENOME_ACESSION: JunL4417m_MetaG_2_$F_3300021074 |
| | GENOME_ID: 30309 CONTIG_ID: 12300 SOURCE: JGI DATE: 2019 Jan. 27. |
| 1215-1216 | Ga0310914_10061055 \| GENOME_ACESSION: GREbulkMGAN108_2_$F_3300033289 |
| | GENOME_ID: 280317 CONTIG_ID: 61054 SOURCE: JGI DATE: 2019 Jun. 13. |
| | Ga0256871_1000783 \| GENOME_ACESSION: RumRJGAnnotation_$F_3300025804 GENOME_ID: |
| | 34932 CONTIG_ID: 782 SOURCE: JGI DATE: 2019 Jan. 27. |
| 1217-1218 | Ga0223826_10007721 \| GENOME_ACESSION: 3300021256 GENOME_ID: 241585 CONTIG_ID: |
| | 6980 SOURCE: JGI_Dark_Harvest DATE: 2019 Jan. 27. |
| 1219-1220 | Ga0209656_10018899 \| GENOME_ACESSION: BogForECP1SPAdes_4_$F_3300027812 |
| | GENOME_ID: 23899 CONTIG_ID: 18898 SOURCE: JGI DATE: 2019 Jan. 27. |
| 1221-1222 | Candidate divison MSBL1 archaeon SCGC-AAA382M17 AAA382M17_Contig_8_C, whole genome |
| | shotgun sequence \| GENOME_ACESSION: GCA_001549475.1_SCGC-AAA382M17_genomic |
| | GENOME_ID: 234923 CONTIG_ID: 61 SOURCE: NCBI_Archaea DATE: 2019 Jan. 27. |
| 1223-1224 | Ferroplasma sp. Type II AMC_Cont1579, whole genome shotgun sequence \| GENOME_ACESSION: |
| | AADL01.1 GENOME_ID: 0 CONTIG_ID: 1469 SOURCE: WGS DATE: 2019 Jan. 27. |
| 1225-1226 | Mastigocladus laminosus UU774 scaffold_4, whole genome shotgun sequence \| GENOME_ACESSION: |
| | GCA_000934435.1_ASM93443v1_genomic GENOME_ID: 70910 CONTIG_ID: 108 SOURCE: |
| | NCBI_Prokaryotes DATE: 2019 Jan. 27. |
| 1227-1228 | Lactococcus sp. 1JSPR-7 chromosome, complete genome \| GENOME_ACESSION: |
| | GCA_003627095.1_ASM362709v1_genomic GENOME_ID: 246772 CONTIG_ID: 0 SOURCE: |
| | NCBI_Prokaryotes DATE: 2019 May 30. |
| 1229-1230 | wastewater metagenome genome assembly, contig: NODE_1534_length_12224_cov_158.353768, whole |
| | genome shotgun sequence \| GENOME_ACESSION: UOQZ01.1 GENOME_ID: 16109 CONTIG_ID: |
| | 1533 SOURCE: WGS DATE: 2019 Jan. 27. |
| 1231-1232 | Ga0099741_1041 \| GENOME_ACESSION: KloWWTsluDR11_LA_2_$F_3300008024 GENOME_ID: |
| | 30893 CONTIG_ID: 40 SOURCE: JGI DATE: 2019 Jan. 27. |
| 1233-1234 | Ga0376514_000350 \| GENOME_ACESSION: B38_SRoWell1209_FD_$F_3300035040 GENOME_ID: |
| | 311412 CONTIG_ID: 349 SOURCE: JGI DATE: 2020 Apr. 07. |
| 1235-1236 | human gut metagenome genome assembly, contig: NODE_3498_length_12905_cov_12.405058, whole |
| | genome shotgun sequence \| GENOME_ACESSION: OWGD01.1 GENOME_ID: 11975 CONTIG_ID: |
| | 3497 SOURCE: WGS DATE: 2019 Jan. 27. |
| 1237-1238 | Ga0256829_1001599 \| GENOME_ACESSION: 131447metaG_2_$F_3300026518 GENOME_ID: 20587 |
| | CONTIG_ID: 1598 SOURCE: JGI DATE: 2019 Jan. 27. |
| 1239-1240 | NODE_22_length_170560_cov_21.0839_ID_3751648 \| GENOME_ACESSION: mgm4799989.3 |
| | GENOME_ID: 238384 CONTIG_ID: 24 SOURCE: MG-RAST DATE: 2019 Jan. 27. |
| 1241-1242 | Viral metagenome NODE_4741_length_29778_cov_7.47405, whole genome shotgun sequence \| |
| | GENOME_ACESSION: SCLI01.1 GENOME_ID: 279143 CONTIG_ID: 341 SOURCE: WGS DATE: |
| | 2019 Jun. 06. |
| 1243-1244 | Ga0207433_10050431 \| GENOME_ACESSION: YelNatRA01SPAdes_$F_3300027863 GENOME_ID: |
| | 37535 CONTIG_ID: 50430 SOURCE: JGI DATE: 2019 Jan. 27. |
| 1245-1246 | Ga0207433_10084486 \| GENOME_ACESSION: YelNatPaOPGAMG01_FD_$F_3300027863 |
| | GENOME_ID: 312031 CONTIG_ID: 84485 SOURCE: JGI DATE: 2020 Apr. 07. |
| 1247-1248 | Cupriavidus basilensis strain CCUG 49340 contig_0000008, whole genome shotgun sequence \| |
| | GENOME_ACESSION: GCA_008801925.1_ASM880192v1_genomic GENOME_ID: 300461 |
| | CONTIG_ID: 7 SOURCE: NCBI_Prokaryotes DATE: 2019 Nov. 09. |
| 1249-1250 | Archaeon BMS3Bbin15 DNA, contig: NODE_38, whole genome shotgun sequence \| |
| | GENOME_ACESSION: GCA_002897955.1_ASM289795v1_genomic GENOME_ID: 236434 |
| | CONTIG_ID: 33 SOURCE: NCBI_Archaea DATE: 2019 Jan. 27. |
| 1251-1252 | Ga0209591_10003844 \| GENOME_ACESSION: MAT01SPAdes_$F_3300027850 GENOME_ID: |
| | 31815 CONTIG_ID: 3843 SOURCE: JGI DATE: 2019 Jan. 27. |
| 1253-1254 | Ga0307929_1002028 \| GENOME_ACESSION: AceLakmetage1330_2_$F_3300031697 GENOME_ID: |
| | 279922 CONTIG_ID: 2027 SOURCE: JGI DATE: 2019 Jun. 13. |
| 1255-1256 | Ga0208461_1018587 \| GENOME_ACESSION: AD_des_26_$F_3300025613 GENOME_ID: 21324 |
| | CONTIG_ID: 18586 SOURCE: JGI DATE: 2019 Jan. 27. |
| 1257-1258 | TPA_asm: Lachnospiraceae bacterium isolate UBA11485 contig_10948, whole genome shotgun |
| | sequence \| GENOME_ACESSION: GCA_003538295.1_ASM353829v1_genomic GENOME_ID: |
| | 174355 CONTIG_ID: 4 SOURCE: NCBI_Prokaryotes DATE: 2019 Jan. 27. |
| 1259-1260 | Ga0163147_10029708 \| GENOME_ACESSION: OliLakLV19MP6G1_2_$F_3300020192 |
| | GENOME_ID: 33721 CONTIG_ID: 29707 SOURCE: JGI DATE: 2019 Jan. 27 |
| 1261-1262 | Ga0137385_10022959 \| GENOME_ACESSION: SagtaG_30_$F_3300012359 GENOME_ID: 35417 |
| | CONTIG_ID: 22958 SOURCE: JGI DATE: 2019 Jan. 27. |
| 1263-1264 | Ga0376681_0062128 \| GENOME_ACESSION: CalMonMetagenome_5_FD_$F_3300036805 |
| | GENOME_ID: 312378 CONTIG_ID: 62127 SOURCE: JGI DATE: 2020 Apr. 07. |
| 1265-1266 | human gut metagenome genome assembly, contig: NODE_7107_length_3523_cov_7.120819, whole |
| | genome shotgun sequence \| GENOME_ACESSION: OGQF01.1 GENOME_ID: 4615 CONTIG_ID: |
| | 7106 SOURCE: WGS DATE: 2019 Jan. 27. |
| 1267-1268 | human gut metagenome genome assembly, contig: NODE_287_length_77719_cov_9.382185, whole |
| | genome shotgun sequence \| GENOME_ACESSION: OVYC01.1 GENOME_ID: 11766 CONTIG_ID: |
| | 286 SOURCE: WGS DATE: 2019 Jan. 27. |
| 1269-1270 | Ga0400264_0001320 \| GENOME_ACESSION: GliderLake422_FD_$F_3300037329 GENOME_ID: |
| | 311581 CONTIG_ID: 1319 SOURCE: JGI DATE: 2020 Apr. 07. |
| 1271-1272 | TB_FS06_10DRAFT_1000002 \| GENOME_ACESSION: UncGr_3300000233_$F_3300000233 |
| | GENOME_ID: 36372 CONTIG_ID: 1 SOURCE: JGI DATE: 2019 Jan. 27. |
| 1273-1274 | Ga0206350_10291578 \| GENOME_ACESSION: DieMetAnnotativ2_6_$F_3300020080 GENOME_ID: |
| | 280098 CONTIG_ID: 1822 SOURCE: JGI DATE: 2019 Jun. 13. |
| 1275-1276 | Janthinobacterium sp. isolate palsa_998 73.20120500_P28.8_contig_1114, whole genome shotgun |
| | sequence \| GENOME_ACESSION: GCA_003133225.1_20120500_P28_genomic GENOME_ID: |
| | 159801 CONTIG_ID: 5 SOURCE: NCBI_Prokaryotes DATE: 2019 Jan. 27. |
| 1277-1278 | Streptomyces regalis strain NRRL 3151 P010contig20.2, whole genome shotgun sequence \| |
| | GENOME_ACESSION: GCA_001509475.1_ASM150947v1_genomic GENOME_ID: 96760 |
| | CONTIG_ID: 117 SOURCE: NCBI_Prokaryotes DATE: 2019 Jan. 27. |
| 1279-1280 | Sulfobacillus thermosulfidooxidans strain CBAR-13 Scaffold_2_CBAR13, whole genome shotgun |
| | sequence \| GENOME_ACESSION: GCA_001280565.1 ASS.CBAR13.1 genomic GENOME_ID: |
| | 86729 CONTIG_ID: 2 SOURCE: NCBI_Prokaryotes DATE: 2019 Jan. 27. |
| 1281-1282 | Ga0209615_100317 \| GENOME_ACESSION: 4B3metaGSPAdes_$F_3300025075 GENOME_ID: |
| | 21011 CONTIG_ID: 316 SOURCE: JGI DATE: 2019 Jan. 27. |
| 1283-1284 | Ga0394881_0001061 \| GENOME_ACESSION: WSA_S1_MG_FD_$F_3300037311 GENOME_ID: |
| | 312717 CONTIG_ID: 1060 SOURCE: JGI DATE: 2020 Apr. 07. |
| 1285-1286 | Desulfovibrio sp. isolate SA7853_bin2 NODE_147_length_23776_cov_35.726614, whole genome |
| | shotgun sequence \| GENOME_ACESSION: GCA_009712225.1 ASM971222v1_genomic |
| | GENOME_ID: 315930 CONTIG_ID: 7 SOURCE: NCBI_Prokaryotes DATE: 2020 Apr. 22. |
| 1287-1288 | Ga0394874_0001047 \| GENOME_ACESSION: KP_S3_MG_FD_$F_3300037309 GENOME_ID: |
| | 312525 CONTIG_ID: 1046 SOURCE: JGI DATE: 2020 Apr. 07. |
| 1289-1290 | Ga0376669_0038378 \| GENOME_ACESSION: CalSwaMetagenome_3_FD_$F_3300036830 |
| | GENOME_ID: 312381 CONTIG_ID: 38377 SOURCE: JGI DATE: 2020 Apr. 07. |
| 1291-1292 | Ga0334819_000080 \| GENOME_ACESSION: 713E2X1metaG_FD_$F_3300037088 GENOME_ID: |
| | 312158 CONTIG_ID: 79 SOURCE: JGI DATE: 2020 Apr. 07. |
| 1293-1294 | Ga0172381_10002433 \| GENOME_ACESSION: Leawel6488metaG_2_$F_3300014204 GENOME_ID: |
| | 31499 CONTIG_ID: 2432 SOURCE: JGI DATE: 2019 Jan. 27. |
| 1295-1296 | Archaeon IPdc08 DNA, NODE_102_48, whole genome shotgun sequence \| GENOME_ACESSION: |
| | GCA_006538205.1_ASM653820v1_genomic GENOME_ID: 289565 CONTIG_ID: 47 SOURCE: |
| | NCBI_Prokaryotes DATE: 2019 Jul. 22. |
| 1297-1298 | Ga0376652_0002900 \| GENOME_ACESSION: CalCamMetagenome_6_FD_$F_3300036780 |
| | GENOME_ID: 312370 CONTIG_ID: 2899 SOURCE: JGI DATE: 2020 Apr. 07. |
| 1299-1300 | MLSBCLC_10010460 \| GENOME_ACESSION: IMG_3300002220_$F_3300002220 GENOME_ID: |
| | 27621 CONTIG_ID: 5321 SOURCE: JGI DATE: 2019 Jan. 27. |
| 1301-1302 | Ga0335055_0000121 \| GENOME_ACESSION: TYMME0rr0171_2_$F_3300034110 GENOME_ID: |
| | 281031 CONTIG_ID: 120 SOURCE: JGI DATE: 2019 Jun. 13. |
| 1303-1304 | Ga0265338_10013913 \| GENOME_ACESSION: 42126metaG_2_$F_3300028800 GENOME_ID: |
| | 279820 CONTIG_ID: 13912 SOURCE: JGI DATE: 2019 Jun. 13. |
| 1305-1306 | Ga0063011_10003046 \| GENOME_ACESSION: IMG_3300003891_$F_3300003891 GENOME_ID: |
| | 308497 CONTIG_ID: 1946 SOURCE: JGI DATE: 2020 Apr. 07. |
| 1307-1308 | human gut metagenome genome assembly, contig: NODE_10685_length_3428_cov_3.671806, whole |
| | genome shotgun sequence \| GENOME_ACESSION: UPOI01.1 GENOME_ID: 16693 CONTIG_ID: |
| | 10684 SOURCE: WGS DATE: 2019 Jan. 27. |
| 1309-1310 | Ga0315284_10064466 \| GENOME_ACESSION: YL17G09_16_MG_2_$F_3300032053 GENOME_ID: |
| | 281635 CONTIG_ID: 64465 SOURCE: JGI DATE: 2019 Jun. 13. |
| 1311-1312 | Ga0194138_10000001 \| GENOME_ACESSION: TAR4v2_3_$F_3300018405 GENOME_ID: 35910 |
| | CONTIG_ID: 0 SOURCE: JGI DATE: 2019 Jan. 27. |
| 1313-1314 | Ga0070706_100065069 \| GENOME_ACESSION: KBSK5StandDraft_5_$F_3300005467 |
| | GENOME_ID: 30504 CONTIG_ID: 65068 SOURCE: JGI DATE: 2019 Jan. 27. |
| 1315-1316 | metagenome genome assembly, contig: NODE_3533_length_6154_cov_2.708149, whole genome |
| | shotgun sequence \| GENOME_ACESSION: OGDP01.1 GENOME_ID: 4288 CONTIG_ID: 3532 |
| | SOURCE: WGS DATE: 2019 Jan. 27. |
| 1317-1318 | Firmicutes bacterium isolate MGYG-HGUT-02286 genome assembly, contig: |
| | GUT_GENOME140265_8, whole genome shotgun sequence \| GENOME_ACESSION: |
| | GCA_902385415.1_UHGG_MGYG-HGUT-02286_genomic GENOME_ID: 303325 CONTIG_ID: 7 |
| | SOURCE: NCBI_Prokaryotes DATE: 2019 Nov. 09. |
| 1319-1320 | Ga0370526_00122 \| GENOME_ACESSION: 20181107_10A_FD_$F_3300035008 GENOME_ID: |
| | 307132 CONTIG_ID: 121 SOURCE: JGI DATE: 2020 Apr. 07. |
| 1321-1322 | Nostoc commune HK-02 DNA, nearly complete genome \| GENOME_ACESSION: |
| | GCA_003990685.1_ASM399068v1_genomic GENOME_ID: 249565 CONTIG_ID: 0 SOURCE: |
| | NCBI_Prokaryotes DATE: 2019 May 30. |
| 1323-1324 | Streptomyces lincolnensis strain LC-G chromosome, complete genome \| GENOME_ACESSION: |
| | GCA_003344445.1 ASM334444v1_genomic GENOME_ID: 168281 CONTIG_ID: 0 SOURCE: |
| | NCBI_Prokaryotes DATE: 2019 Jan. 27. |
| 1325-1326 | Thermoplasmatales archaeon Gpl AMC_Cont1933, whole genome shotgun sequence \| |
| | GENOME_ACESSION: AADL01.1 GENOME_ID: 0 CONTIG_ID: 1823 SOURCE: WGS DATE: |
| | 2019 Jan. 27. |
| 1327-1328 | Microcoleus chthonoplastes PCC 7420 scf_1103659003802 genomic scaffold, whole genome shotgun |
| | sequence \| GENOME_ACESSION: GCA_000155555.1_ASM15555v1_genomic GENOME_ID: 40746 |
| | CONTIG_ID: 47 SOURCE: NCBI_Prokaryotes DATE: 2019 Jan. 27. |
| 1329-1330 | Moorea bouillonii PNG strain PNG5-198 Ga0081470_101, whole genome shotgun sequence \| |
| | GENOME_ACESSION: GCA_001942495.1_ASM194249v1_genomic GENOME_ID: 114832 |
| | CONTIG_ID: 0 SOURCE: NCBI_Prokaryotes DATE: 2019 Jan. 27. |
| 1331-1332 | human gut metagenome genome assembly, contig: NODE_98_length_93064_cov_26.028363, whole |
| | genome shotgun sequence \| GENOME_ACESSION: OLRQ01.1 GENOME_ID: 7932 CONTIG_ID: 97 |
| | SOURCE: WGS DATE: 2019 Jan. 27. |
| 1333-1334 | Ga0119967_10003500 \| GENOME_ACESSION: IMG_3300014060_$F_3300014060 GENOME_ID: |
| | 278220 CONTIG_ID: 3499 SOURCE: JGI DATE: 2019 Jun. 01. |
| 1335-1336 | Polaromonas sp. JS666 plasmid 2, complete sequence \| GENOME_ACESSION: |
| | GCA_000013865.1_ASM1386v1_genomic GENOME_ID: 39632 CONTIG_ID: 2 SOURCE: |
| | NCBI_Prokaryotes DATE: 2019 Jan. 27. |
| 1337-1338 | Fervidicola ferrireducens strain Y170 AN618_contig000036, whole genome shotgun sequence \| |
| | GENOME_ACESSION: GCA_001562425.1_ASM156242v1_genomic GENOME_ID: 99018 |
| | CONTIG_ID: 35 SOURCE: NCBI_Prokaryotes DATE: 2019 Jan. 27. |
| 1339-1340 | uncultured Lachnospiraceae bacterium isolate RUG11561 genome assembly, contig: |
| | RUG11561_asm_92, whole genome shotgun sequence \| GENOME_ACESSION: |
| | GCA_902770305.1_Rumen_uncultured_genome_RUG11561_genomic GENOME_ID: 345617 |
| | CONTIG_ID: 91 SOURCE: NCBI_Prokaryotes DATE: 2020 Apr. 22. |
| 1341-1342 | TPA_asm: Thermotogaceae bacterium isolate HyVt-16 Ga0136651_10009681, whole genome shotgun |
| | sequence \| GENOME_ACESSION: GCA_011043375.1_ASM1104337v1_genomic GENOME_ID: |
| | 326424 CONTIG_ID: 149 SOURCE: NCBI_Prokaryotes DATE: 2020 Apr. 22. |
| 1343-1344 | Ga0307376_10002476 \| GENOME_ACESSION: TR2MG_2_$F_3300031578 GENOME_ID: 281014 |
| | CONTIG_ID: 2475 SOURCE: JGI DATE: 2019 Jun. 13. |
| 1345-1346 | human gut metagenome genome assembly, contig: NODE_253_length_57288_cov_8.992662, whole |
| | genome shotgun sequence \| GENOME_ACESSION: OGYY01.1 GENOME_ID: 4822 CONTIG_ID: 252 |
| | SOURCE: WGS DATE: 2019 Jan. 27. |
| 1347-1348 | uncultured Erysipelotrichaceae bacterium isolate RUG12334 genome assembly, contig: |
| | RUG12334_asm_183, whole genome shotgun sequence \| GENOME_ACESSION: |
| | GCA_902778065.1_Rumen_uncultured_genome_RUG12334_genomic GENOME_ID: 346312 |
| | CONTIG_ID: 182 SOURCE: NCBI_Prokaryotes DATE: 2020 Apr. 22. |
| 1349-1350 | Ga0265594_1010503 \| GENOME_ACESSION: saktaG_20_$F_3300028193 GENOME_ID: 37738 |
| | CONTIG_ID: 10502 SOURCE: JGI DATE: 2019 Jan. 27. |
| 1351-1352 | Ga0310786_10003093 \| GENOME_ACESSION: AusTroGonzalMGv2_3_$F_3300031998 |
| | GENOME_ID: 279931 CONTIG_ID: 3092 SOURCE: JGI DATE: 2019 Jun. 13. |
| 1353-1354 | human gut metagenome genome assembly, contig: NODE_122_length_81971_cov_5.420492, whole |
| | genome shotgun sequence \| GENOME_ACESSION: OMAC01.1 GENOME_ID: 8152 CONTIG_ID: 121 |
| | SOURCE: WGS DATE: 2019 Jan. 27. |
| 1355-1356 | Ga0302213_1000513 \| GENOME_ACESSION: II_Fen_N1_2_2_$F_3300028769 GENOME_ID: 27309 |
| | CONTIG_ID: 512 SOURCE: JGI DATE: 2019 Jan. 27. |
| 1357-1358 | LO132_10002610 \| GENOME_ACESSION: IMG_3300002465_$F_3300002465 GENOME_ID: 305139 |
| | CONTIG_ID: 2609 SOURCE: JGI DATE: 2019 Nov. 15. |
| 1359-1360 | human gut metagenome genome assembly, contig: NODE_9_length_216355_cov_6.761368, whole |
| | genome shotgun sequence \| GENOME_ACESSION: OWPY01.1 GENOME_ID: 12183 CONTIG_ID: 8 |
| | SOURCE: WGS DATE: 2019 Jan. 27. |
| 1361-1362 | NODE_1723_length_10022_cov_2.7427 \| GENOME_ACESSION: mgm4790047.3 GENOME_ID: |
| | 238341 CONTIG_ID: 1722 SOURCE: MG-RAST DATE: 2019 Jan. 27. |
| 1363-1364 | Ga0194137_10001287 \| GENOME_ACESSION: TAR4v2_2_$F_3300018411 GENOME_ID: 35909 |
| | CONTIG_ID: 1286 SOURCE: JGI DATE: 2019 Jan. 27. |
| 1365-1366 | contig_3211414 \| GENOME_ACESSION: mgm4547164.3 GENOME_ID: 237431 CONTIG_ID: 344745 |
| | SOURCE: MG-RAST DATE: 2019 Jan. 27. |
| 1367-1368 | Ga0373632_0083918 \| GENOME_ACESSION: RO12ediment_MG_6_$F_3300035181 GENOME_ID: |
| | 306458 CONTIG_ID: 83917 SOURCE: JGI DATE: 2019 Nov. 15. |
| 1369-1370 | Ga0172378_10001289 \| GENOME_ACESSION: GrowelOW332metaG_2_$F_3300014203 |
| | GENOME_ ID: 27072 CONTIG_ID: 1288 SOURCE: JGI DATE: 2019 Jan. 27. |
| 1371-1372 | human gut metagenome genome assembly, contig: NODE_90_length_104766_cov_9.938421, whole |
| | genome shotgun sequence \| GENOME_ACESSION: UPME01.1 GENOME_ID: 16637 CONTIG_ID: 89 |
| | SOURCE: WGS DATE: 2019 Jan. 27. |
| 1373-1374 | Ga0395718_011872 \| GENOME_ACESSION: 713C1X0metaG_FD_$F_3300037107 GENOME_ID: |
| | 312125 CONTIG_ID: 11871 SOURCE: JGI DATE: 2020 Apr. 07. |
| 1375-1376 | Ga0208461_1004216 \| GENOME_ACESSION: AD_des_26_$F_3300025613 GENOME_ID: 21324 |
| | CONTIG_ID: 4215 SOURCE: JGI DATE: 2019 Jan. 27. |
| 1377-1378 | human gut metagenome genome assembly, contig: NODE_33_length_114217_cov_11.444533, whole |
| | genome shotgun sequence \| GENOME_ACESSION: USYB01.1 GENOME_ID: 17033 CONTIG_ID: 32 |
| | SOURCE: WGS DATE: 2019 Jan. 27. |
| 1379-1380 | Ga0137392_10005405 \| GENOME_ACESSION: 15con2h34AmetaG_2_$F_3300011269 GENOME_ID: |
| | 20764 CONTIG_ID: 5404 SOURCE: JGI DATE: 2019 Jan. 27. |
| 1381-1382 | metagenome genome assembly, contig: NODE_226_length_40329_cov_4.185215, whole genome |
| | shotgun sequence \| GENOME_ACESSION: OJKJ01.1 GENOME_ID: 6455 CONTIG_ID: 225 |
| | SOURCE: WGS DATE: 2019 Jan. 27. |
| 1383-1384 | Ga0131092_10008720 \| GENOME_ACESSION: IMG_3300009870_$F_3300009870 GENOME_ID: |
| | 312511 CONTIG_ID: 8719 SOURCE: JGI DATE: 2020 Apr. 07. |
| 1385-1386 | Planktothrix serta PCC 8927 isolate BBR_PRJEB10992 genome assembly, scaffold: |
| | BBR_A_PL8927_scaffold59, whole genome shotgun sequence \| GENOME_ACESSION: |
| | GCA_900010725.1 BBR_PRJEB10992_genomic GENOME_ID: 176102 CONTIG_ID: 58 SOURCE: |
| | NCBI_Prokaryotes DATE: 2019 Jan. 27. |
| 1387-1388 | human gut metagenome genome assembly, contig: NODE_655_length_4111_cov_3.00098, whole |
| | genome shotgun sequence \| GENOME_ACESSION: UYAI01.1 GENOME_ID: 17510 CONTIG_ID: 654 |
| | SOURCE: WGS DATE: 2019 Jan. 27. |
| 1389-1390 | Ga0209200_1016766 \| GENOME_ACESSION: AD_des_33_$F_3300025784 GENOME_ID: 21332 |
| | CONTIG_ID: 16765 SOURCE: JGI DATE: 2019 Jan. 27. |
| 1391-1392 | Oscillatoriales cyanobacterium isolate PH2015_10S_46_199 PH2015_10S_scaffold_837, whole genome |
| | shotgun sequence \| GENOME_ACESSION: GCA_004292945.1_ASM429294v1_genomic |
| | GENOME_ID: 252669 CONTIG_ID: 590 SOURCE: NCBI_Prokaryotes DATE: 2019 May 30. |
| 1393-1394 | Ga0376086_0019836 \| GENOME_ACESSION: LAC_S2_MG_FICUS_FD_$F_3300035686 |
| | GENOME_ID: 312530 CONTIG_ID: 19835 SOURCE: JGI DATE: 2020 Apr. 07. |
| 1395-1396 | Chloroflexi bacterium isolate CF_131 14_1009_09_20cm_scaffold_4778, whole genome shotgun |
| | sequence \| GENOME_ACESSION: GCA_005881015.1_ASM588101v1_genomic GENOME_ID: |
| | 285819 CONTIG_ID: 485 SOURCE: NCBI_Prokaryotes DATE: 2019 Jul. 22. |
| 1397-1398 | Ga0370494_000001 \| GENOME_ACESSION: Collapse_03_16_2_$F_3300034130 GENOME_ID: |
| | 280058 CONTIG_ID: 0 SOURCE: JGI DATE: 2019 Jun. 13. |
| 1399-1400 | Gammaproteobacteria bacterium isolate CSSed10_2 CS-Sed10-C100006, whole genome shotgun |
| | sequence \| GENOME_ACESSION: GCA_003560635.1_ASM356063v1_genomic GENOME_ID: |
| | 245344 CONTIG_ID: 0 SOURCE: NCBI_Prokaryotes DATE: 2019 May 30. |
| 1401-1402 | Trichococcus palustris genome assembly, contig: TpalDRAFT_scaffold-1, whole genome shotgun |
| | sequence \| GENOME_ACESSION: GCA_900067125.1 ASM90006712v1_genomic GENOME_ID: |
| | 181408 CONTIG_ID: 4 SOURCE: NCBI_Prokaryotes DATE: 2019 Jan. 27. |
| 1403-1404 | Ga0209167_10018693 \| GENOME_ACESSION: CoaSoiSPAdes_4_$F_3300027867 GENOME_ID: |
| | 24548 CONTIG_ID: 18692 SOURCE: JGI DATE: 2019 Jan. 27. |
| 1405-1406 | Ga0222637_1000159 \| GENOME_ACESSION: AntAcemetagen143_2_$F_3300023435 GENOME_ID: |
| | 23014 CONTIG_ID: 158 SOURCE: JGI DATE: 2019 Jan. 27. |
| 1407-1408 | Ga0070698_100047374 \| GENOME_ACESSION: KBSK1StandDraft_6_$F_3300005471 |
| | GENOME_ID: 30496 CONTIG_ID: 47373 SOURCE: JGI DATE: 2019 Jan. 27. |
| 1409-1410 | Ga0070739_10029292 \| GENOME_ACESSION: CoaSoiStandDraft_10_$F_3300005532 GENOME_ID: |
| | 24555 CONTIG_ID: 29291 SOURCE: JGI DATE: 2019 Jan. 27. |
| 1411-1412 | Sutterellaceae bacterium Marseille-P2968 strain Marseille-P2968T genome assembly, scaffold: |
| | scaffold00021, whole genome shotgun sequence \| GENOME_ACESSION: |
| | GCA_900128485.1 PRJEB18048_genomic GENOME_ID: 186107 CONTIG_ID: 20 SOURCE: |
| | NCBI_Prokaryotes DATE: 2019 Jan. 27. |
| 1413-1414 | fermentation metagenome genome assembly, contig: NODE_189_length_93511_cov_123.725550, whole |
| | genome shotgun sequence \| GENOME_ACESSION: UOOR01.1 GENOME_ID: 16049 CONTIG_ID: |
| | 188 SOURCE: WGS DATE: 2019 Jan. 27. |
| 1415-1416 | Ga0373625_0031164 \| GENOME_ACESSION: YL18G_12A_MG_FD_$F_3300035701 GENOME_ID: |
| | 312749 CONTIG_ID: 31163 SOURCE: JGI DATE: 2020 Apr. 07. |
| 1417-1418 | Ga0114939_10003065 \| GENOME_ACESSION: AshMeaCrysSpring_2_$F_3300009455 GENOME_ID: |
| | 23357 CONTIG_ID: 3064 SOURCE: JGI DATE: 2019 Jan. 27. |
| 1419-1420 | uncultured Erysipelotrichaceae bacterium isolate RUG813 genome assembly, contig: k87_14161652, |
| | whole genome shotgun sequence \| GENOME_ACESSION: |
| | GCA_900313495.1_Rumen_uncultured_genome_RUG813_genomic GENOME_ID: 192862 |
| | CONTIG_ID: 396 SOURCE: NCBI_Prokaryotes DATE: 2019 Jan. 27. |
| 1421-1422 | Ga0307376_10002158 \| GENOME_ACESSION: TR2MG_2_$F_3300031578 GENOME_ID: 281014 |
| | CONTIG_ID: 2157 SOURCE: JGI DATE: 2019 Jun. 13. |
| 1423-1424 | Synechococcales cyanobacterium S06 isolate S06.Bin197 NODE_15_length_70997_cov_8.27074, whole |
| | genome shotgun sequence \| GENOME_ACESSION: GCA_011391125.1_ASM1139112v1_genomic |
| | GENOME_ID: 329312 CONTIG_ID: 65 SOURCE: NCBI_Prokaryotes DATE: 2020 Apr. 22. |
| 1425-1426 | marine metagenome genome assembly, contig: NODE_200_length_24402_cov_20.823563, whole |
| | genome shotgun sequence \| GENOME_ACESSION: OVSA01.1 GENOME_ID: 11662 CONTIG_ID: |
| | 199 SOURCE: WGS DATE: 2019 Jan. 27. |
| 1427-1428 | uncultured Lachnospiraceae bacterium isolate RUG13593 genome assembly, contig: |
| | RUG13593_asm_26, whole genome shotgun sequence \| GENOME_ACESSION: |
| | GCA_902790665.1_Rumen_uncultured_genome_RUG13593_genomic GENOME_ID: 347445 |
| | CONTIG_ID: 25 SOURCE: NCBI_Prokaryotes DATE: 2020 Apr. 22. |
| 1429-1430 | Ga0233412_10000063 \| GENOME_ACESSION: Na_anoxic_4_MG_2_$F_3300023210 GENOME_ID: |
| | 33123 CONTIG_ID: 62 SOURCE: JGI DATE: 2019 Jan. 27. |
| 1431-1432 | Gammaproteobacteria bacterium DM2 chromosome, complete genome \| GENOME_ACESSION: |
| | GCA_003072645.1_ASM307264v1_genomic GENOME_ID: 158616 CONTIG_ID: 0 SOURCE: |
| | NCBI_Prokaryotes DATE: 2019 Jan. 27. |
| 1433-1434 | Sutterellaceae bacterium Marseille-P2968 strain Marseille-P2968T genome assembly, scaffold: |
| | scaffold00022, whole genome shotgun sequence \| GENOME_ACESSION: |
| | GCA_900128485.1_PRJEB18048_genomic GENOME_ID: 186107 CONTIG_ID: 21 SOURCE: |
| | NCBI_Prokaryotes DATE: 2019 Jan. 27. |
| 1435-1436 | Candidatus Acidulodesulfobacterium acidiphilum isolate AP4 contig002, whole genome shotgun |
| | sequence \| GENOME_ACESSION: GCA_008534395.1_ASM853439v1_genomic GENOME_ID: |
| | 298711 CONTIG_ID: 1 SOURCE: NCBI_Prokaryotes DATE: 2019 Nov. 09. |
| 1437-1438 | Ga0209647_1000722 \| GENOME_ACESSION: GraSoiAngeSPAdes_43_$F_3300026319 |
| | GENOME_ID: 26992 CONTIG_ID: 721 SOURCE: JGI DATE: 2019 Jan. 27. |
| 1439-1440 | Chroococcidiopsis thermalis PCC 7203, complete genome \| GENOME_ACESSION: |
| | GCA_000317125.1_ASM31712v1_genomic GENOME_ID: 47152 CONTIG_ID: 0 SOURCE: |
| | NCBI_Prokaryotes DATE: 2019 Jan. 27. |
| 1441-1442 | Ga0310694_10002417 \| GENOME_ACESSION: 174DNAGHGhigp2v2_$F_3300031992 |
| | GENOME_ID: 279760 CONTIG_ID: 2416 SOURCE: JGI DATE: 2019 Jun. 13. |
| 1443-1444 | Ga0070697_100040654 \| GENOME_ACESSION: KBSK1StandDraft_5_$F_3300005536 |
| | GENOME_ID: 30495 CONTIG_ID: 40653 SOURCE: JGI DATE: 2019 Jan. 27. |
| 1445-1446 | Bioreactor metagenome contig_111, whole genome shotgun sequence \| GENOME_ACESSION: |
| | AMWB02.1 GENOME_ID: 96 CONTIG_ID: 5442 SOURCE: WGS DATE: 2019 Jan. 27. |
| 1447-1448 | Ga0209511_1005681 \| GENOME_ACESSION: SSSSmetaGSPAdes_$F_3300025147 GENOME_ID: |
| | 35187 CONTIG_ID: 5680 SOURCE: JGI DATE: 2019 Jan. 27. |
| 1449-1450 | Ga0118733_100051634 \| GENOME_ACESSION: Marsedof8samples_$F_3300010430 GENOME_ID: |
| | 32450 CONTIG_ID: 51633 SOURCE: JGI DATE: 2019 Jan. 27. |
| 1451-1452 | Clostridioides difficile strain 7468-NonSp/ST97 LCH7468_contig000007, whole genome shotgun |
| | sequence \| GENOME_ACESSION: GCA_002302755.1_ASM230275v1_genomic GENOME_ID: |
| | 130261 CONTIG_ID: 6 SOURCE: NCBI_Prokaryotes DATE: 2019 Jan. 27. |
| 1453-1454 | Ga0307994_1018066 \| GENOME_ACESSION: EllFjometagen261_2_$F_3300031660 GENOME_ID: |
| | 280160 CONTIG_ID: 18065 SOURCE: JGI DATE: 2019 Jun. 13. |
| 1455-1456 | Ga0114919_10027729 \| GENOME_ACESSION: BlataG_2_$F_3300009529 GENOME_ID: 23889 |
| | CONTIG_ID: 27728 SOURCE: JGI DATE: 2019 Jan. 27. |
| 1457-1458 | Ga0256404_1000183 \| GENOME_ACESSION: RumenRJG_01DNA_2_$F_3300026549 GENOME_ID: |
| | 34936 CONTIG_ID: 182 SOURCE: JGI DATE: 2019 Jan. 27. |
| 1459-1460 | Ga0272443_10006725 \| GENOME_ACESSION: SSMAcet12_2_$F_3300028883 GENOME_ID: |
| | 280921 CONTIG_ID: 6724 SOURCE: JGI DATE: 2019 Jun. 13. |
| 1461-1462 | Ga0118725_1014359 \| GENOME_ACESSION: IMG_3300009377_$F_3300009377 GENOME_ID: |
| | 311715 CONTIG_ID: 14358 SOURCE: JGI DATE: 2020 Apr. 07. |
| 1463-1464 | Ga0335001_0013376 \| GENOME_ACESSION: TYMME1rr0054_2_$F_3300034064 GENOME_ID: |
| | 281041 CONTIG_ID: 13375 SOURCE: JGI DATE: 2019 Jun. 13. |
| 1465-1466 | Ga0311301_10014764 \| GENOME_ACESSION: Sb_comMetaSPAdes_$F_3300032160 GENOME_ID: |
| | 280981 CONTIG_ID: 14763 SOURCE: JGI DATE: 2019 Jun. 13. |
| 1467-1468 | human gut metagenome genome assembly, contig: NODE_9203_length_4842_cov_4.000000, whole |
| | genome shotgun sequence \| GENOME_ACESSION: USUO01.1 GENOME_ID: 16942 CONTIG_ID: |
| | 9202 SOURCE: WGS DATE: 2019 Jan. 27. |
| 1469-1470 | human gut metagenome genome assembly, contig: NODE_64_length_52191_cov_7.228997, whole |
| | genome shotgun sequence \| GENOME_ACESSION: OMDM01.1 GENOME_ID: 8240 CONTIG_ID: 63 |
| | SOURCE: WGS DATE: 2019 Jan. 27. |
| 1471-1472 | Ga0394881_0018228 \| GENOME_ACESSION: WSA_S1_MG_FD_$F_3300037311 GENOME_ID: |
| | 312717 CONTIG_ID: 18227 SOURCE: JGI DATE: 2020 Apr. 07. |
| 1473-1474 | Ga0070717_10057385 \| GENOME_ACESSION: LARL11StandDraft_3_$F_3300006028 GENOME_ID: |
| | 31022 CONTIG_ID: 57384 SOURCE: JGI DATE: 2019 Jan. 27. |
| 1475-1476 | Ga0224423_10003602 \| GENOME_ACESSION: 3300021431 GENOME_ID: 241590 CONTIG_ID: |
| | 3272 SOURCE: JGI_Dark_Harvest DATE: 2019 Jan. 27. |
| 1477-1478 | Ga0395631_0033223 \| GENOME_ACESSION: 716E22024metaG_FD_$F_3300037196 GENOME_ID: |
| | 312229 CONTIG_ID: 33222 SOURCE: JGI DATE: 2020 Apr. 07. |
| 1479-1480 | Ga0137383_10023908 \| GENOME_ACESSION: SagtaG_26_$F_3300012199 GENOME_ID: 35413 |
| | CONTIG_ID: 23907 SOURCE: JGI DATE: 2019 Jan. 27. |
| 1481-1482 | Ga0208478_1004398 \| GENOME_ACESSION: NGESur0720SPAdes_15_$F_3300025475 |
| | GENOME_ID: 32998 CONTIG_ID: 4397 SOURCE: JGI DATE: 2019 Jan. 27. |
| 1483-1484 | human gut metagenome genome assembly, contig: NODE_4377_length_3674_cov_3.131498, whole |
| | genome shotgun sequence \| GENOME_ACESSION: UPWN01.1 GENOME_ID: 16899 CONTIG_ID: |
| | 4376 SOURCE: WGS DATE: 2019 Jan. 27. |
| 1485-1486 | Ga0066650_10013185 \| GENOME_ACESSION: CryGeyStandDraft_18_$F_3300004239 |
| | GENOME_ID: 25052 CONTIG_ID: 13184 SOURCE: JGI DATE: 2019 Jan. 27. |
| 1487-1488 | Microcoleus chthonoplastes PCC 7420 scf_1103659003791 genomic scaffold, whole genome shotgun |
| | sequence \| GENOME_ACESSION: GCA_000155555.1_ASM15555v1_genomic GENOME_ID: 40746 |
| | CONTIG_ID: 53 SOURCE: NCBI_Prokaryotes DATE: 2019 Jan. 27. |
| 1489-1490 | Ga0302349_1003924 \| GENOME_ACESSION: PhyAR1v2_$F_3300031370 GENOME_ID: 280832 |
| | CONTIG_ID: 3923 SOURCE: JGI DATE: 2019 Jun. 13. |
| 1491-1492 | Leptolyngbya sp. IPPAS B-1204 Mongol_c4, whole genome shotgun sequence \| GENOME_ACESSION: |
| | GCA_003724315.1_ASM372431v1_genomic GENOME_ID: 202667 CONTIG_ID: 81 SOURCE: |
| | NCBI_Prokaryotes DATE: 2019 Jan. 27. |
| 1493-1494 | Ga0114918 10006480 \| GENOME_ACESSION: LantaG_2_$F_3300009149 GENOME_ID: 31359 |
| | CONTIG_ID: 6479 SOURCE: JGI DATE: 2019 Jan. 27. |
| 1495-1496 | NODE_1208_length_4004_cov_2.52747_ID_794590 \| GENOME_ACESSION: mgm4799983.3 |
| | GENOME_ID: 238380 CONTIG_ID: 1207 SOURCE: MG-RAST DATE: 2019 Jan. 27. |
| 1497-1498 | Ga0307376_10007847 \| GENOME_ACESSION: TR2MG_2_$F_3300031578 GENOME_ID: 281014 |
| | CONTIG_ID: 7846 SOURCE: JGI DATE: 2019 Jun. 13. |
| 1499-1500 | Ga0209800_10000857 \| GENOME_ACESSION: HigcelmetaSPAdes_2_$F_3300027800 GENOME_ID: |
| | 27174 CONTIG_ID: 856 SOURCE: JGI DATE: 2019 Jan. 27. |
| 1501-1502 | Ga0180438_10006853 \| GENOME_ACESSION: SS_ome_18_$F_3300017971 GENOME_ID: 35200 |
| | CONTIG_ID: 6852 SOURCE: JGI DATE: 2019 Jan. 27. |
| 1503-1504 | Ga0098074_1007018 \| GENOME_ACESSION: 32_taG_2_$F_3300006790 GENOME_ID: 20884 |
| | CONTIG_ID: 7017 SOURCE: JGI DATE: 2019 Jan. 27. |
| 1505-1506 | Draft_11733483 \| GENOME_ACESSION: IMG_3300000558_$F_3300000558 GENOME_ID: 27455 |
| | CONTIG_ID: 35644 SOURCE: JGI DATE: 2019 Jan. 27. |
| 1507-1508 | Ga0104854_10039936 \| GENOME_ACESSION: IMG_3300007643_$F_3300007643 GENOME_ID: |
| | 311670 CONTIG_ID: 4122 SOURCE: JGI DATE: 2020 Apr. 07. |
| 1509-1510 | Ga0376082_0008098 \| GENOME_ACESSION: CLC_S1_MG_FICUS_FD_$F_3300035674 |
| | GENOME_ID: 312359 CONTIG_ID: 8097 SOURCE: JGI DATE: 2020 Apr. 07. |
| 1511-1512 | Ga0373620_0000796 \| GENOME_ACESSION: YL18G_03S_MG_FD_$F_3300036760 GENOME_ID: |
| | 312746 CONTIG_ID: 795 SOURCE: JGI DATE: 2020 Apr. 07. |
| 1513-1514 | Ga0180008_1007149 \| GENOME_ACESSION: MM_PW_MetaG_2_$F_3300014613 GENOME_ID: |
| | 32274 CONTIG_ID: 7148 SOURCE: JGI DATE: 2019 Jan. 27. |
| 1515-1516 | human gut metagenome genome assembly, contig: NODE_1050_length_10980_cov_1.51689, whole |
| | genome shotgun sequence \| GENOME_ACESSION: UXMT01.1 GENOME_ID: 17221 CONTIG_ID: |
| | 1049 SOURCE: WGS DATE: 2019 Jan. 27. |
| 1517-1518 | Ga0268283_1011674 \| GENOME_ACESSION: saktaG_17_$F_3300028283 GENOME_ID: 37735 |
| | CONTIG_ID: 11673 SOURCE: JGI DATE: 2019 Jan. 27. |
| 1519-1520 | uncultured Methanobrevibacter sp. isolate RUG10470 genome assembly, contig: RUG10470_asm_5, |
| | whole genome shotgun sequence \| GENOME_ACESSION: |
| | GCA_902759475.1_Rumen_uncultured_genome_RUG10470_genomic GENOME_ID: 344641 |
| | CONTIG_ID: 4 SOURCE: NCBI_Prokaryotes DATE: 2020 Apr. 22. |
| 1521-1522 | Ga0401685_0570 \| GENOME_ACESSION: 1704MEGAvirome_2_FD_$F_3300036182 GENOME_ID: |
| | 307114 CONTIG_ID: 569 SOURCE: JGI DATE: 2020 Apr. 07. |
| 1523-1524 | Ga0400245_005261 \| GENOME_ACESSION: CampLake17_FD_$F_3300037285 GENOME_ID: |
| | 311512 CONTIG_ID: 5260 SOURCE: JGI DATE: 2020 Apr. 07. |
| 1525-1526 | Ga0394872_0000490 \| GENOME_ACESSION: CP_S2_MG_FD_$F_3300037308 GENOME_ID: |
| | 312363 CONTIG_ID: 489 SOURCE: JGI DATE: 2020 Apr. 07. |
| 1527-1528 | human gut metagenome genome assembly, contig: NODE_8903_length_3490_cov_3.366812, whole |
| | genome shotgun sequence \| GENOME_ACESSION: OLQX01.1 GENOME_ID: 7913 CONTIG_ID: |
| | 8902 SOURCE: WGS DATE: 2019 Jan. 27. |
| 1529-1530 | LHMISPF_alex1_c86 \| GENOME_ACESSION: IMG_2049941002_$F_2049941002 GENOME_ID: |
| | 27373 CONTIG_ID: 1246 SOURCE: JGI DATE: 2019 Jan. 27. |
| 1531-1532 | Ga0172362_10014068 \| GENOME_ACESSION: LakKivs1_kivu2a2_2_$F_3300013133 GENOME_ID: |
| | 31130 CONTIG_ID: 14067 SOURCE: JGI DATE: 2019 Jan. 27. |
| 1533-1534 | Ga0134404_104661 \| GENOME_ACESSION: IMG_3300014769_$F_3300014769 GENOME_ID: |
| | 280515 CONTIG_ID: 4660 SOURCE: JGI DATE: 2019 Jun. 13. |
| 1535-1536 | Ga0123338_10030355 \| GENOME_ACESSION: grotaG_2_$F_3300009686 GENOME_ID: 37706 |
| | CONTIG_ID: 30354 SOURCE: JGI DATE: 2019 Jan. 27. |
| 1537-1538 | NODE_10969_length_3841_cov_6.272065 \| GENOME_ACESSION: mgm4743570.3 GENOME_ID: |
| | 238071 CONTIG_ID: 2352 SOURCE: MG-RAST DATE: 2019 Jan. 27. |
| 1539-1540 | Ga0114919_10008950 \| GENOME_ACESSION: BlataG_2_$F_3300009529 GENOME_ID: 23889 |
| | CONTIG_ID: 8949 SOURCE: JGI DATE: 2019 Jan. 27. |
| 1541-1542 | Bioreactor metagenome contig_107124, whole genome shotgun sequence \| GENOME_ACESSION: |
| | AMWB02.1 GENOME_ID: 96 CONTIG_ID: 3559 SOURCE: WGS DATE: 2019 Jan. 27. |
| 1543-1544 | Ga0070707_100019090 \| GENOME_ACESSION: KBSK5StandDraft_9_$F_3300005468 |
| | GENOME_ID: 30508 CONTIG_ID: 19089 SOURCE: JGI DATE: 2019 Jan. 27. |
| 1545-1546 | Ga0187899_10002485 \| GENOME_ACESSION: Goafecreptomycin_6_$F_3300019376 GENOME_ID: |
| | 26928 CONTIG_ID: 2484 SOURCE: JGI DATE: 2019 Jan. 27. |
| 1547-1548 | Ga0394882_0012572 \| GENOME_ACESSION: WSA_S4_MG_FD_$F_3300037422 GENOME_ID: |
| | 312718 CONTIG_ID: 12571 SOURCE: JGI DATE: 2020 Apr. 07. |
| 1549-1550 | human gut metagenome genome assembly, contig: NODE_12009_length_3547_cov_2.304410, whole |
| | genome shotgun sequence \| GENOME_ACESSION: OURT01.1 GENOME_ID: 11174 CONTIG_ID: |
| | 12008 SOURCE: WGS DATE: 2019 Jan. 27. |
| 1551-1552 | human gut metagenome genome assembly, contig: NODE_3708_length_6101_cov_2.219618, whole |
| | genome shotgun sequence \| GENOME_ACESSION: OQNV01.1 GENOME_ID: 9976 CONTIG_ID: |
| | 3707 SOURCE: WGS DATE: 2019 Jan. 27. |
| 1553-1554 | Bacillus sp. FJAT-29814 scaffold2, whole genome shotgun sequence \| GENOME_ACESSION: |
| | GCA_001510715.1_ASM151071v1_genomic GENOME_ID: 96811 CONTIG_ID: 11 SOURCE: |
| | NCBI_Prokaryotes DATE: 2019 Jan. 27. |
| 1555-1556 | k141_28014 flag = 0 multi = 166.3446 len = 3617 \| GENOME_ACESSION: mgm4773634.3 GENOME_ID: |
| | 238274 CONTIG_ID: 349 SOURCE: MG-RAST DATE: 2019 Jan. 27. |
| 1557-1558 | human gut metagenome genome assembly, contig: NODE_6_length_339981_cov_10.284268, whole |
| | genome shotgun sequence \| GENOME_ACESSION: UEYJ01.1 GENOME_ID: 15178 CONTIG_ID: 5 |
| | SOURCE: WGS DATE: 2019 Jan. 27. |
| 1559-1560 | JGI1357J11328_10012623 \| GENOME_ACESSION: Subgrocontami54m_3_$F_3300000574 |
| | GENOME_ID: 35777 CONTIG_ID: 12622 SOURCE: JGI DATE: 2019 Jan. 27. |
| 1561-1562 | Ga0099364_10003009 \| GENOME_ACESSION: TergutTh196P3_$F_3300006226 GENOME_ID: |
| | 36060 CONTIG_ID: 3008 SOURCE: JGI DATE: 2019 Jan. 27. |
| 1563-1564 | Ga0272440_1006716 \| GENOME_ACESSION: SSMMMBAug17_2_$F_3300028595 GENOME_ID: |
| | 280924 CONTIG_ID: 6715 SOURCE: JGI DATE: 2019 Jun. 13. |
| 1565-1566 | Ga0209212_1034368 \| GENOME_ACESSION: RifGroC2SPAdes_$F_3300025309 GENOME_ID: |
| | 34864 CONTIG_ID: 34367 SOURCE: JGI DATE: 2019 Jan. 27. |
| 1567-1568 | Ga0123353_10014374 \| GENOME_ACESSION: TergutLab28metaG_6_$F_3300010167 GENOME_ID: |
| | 36036 CONTIG_ID: 14373 SOURCE: JGI DATE: 2019 Jan. 27. |
| 1569-1570 | Ga0209124_10001910 \| GENOME_ACESSION: BarGra022ASPAdes_$F_3300025852 GENOME_ID: |
| | 23741 CONTIG_ID: 1909 SOURCE: JGI DATE: 2019 Jan. 27. |
| 1571-1572 | Ga0216255_10040300 \| GENOME_ACESSION: IMG_3300021179_$F_3300021179 GENOME_ID: |
| | 311738 CONTIG_ID: 40299 SOURCE: JGI DATE: 2020 Apr. 07. |
| 1573-1574 | Activated carbon metagenome, whole genome shotgun sequence \| GENOME_ACESSION: LNFM01.2 |
| | GENOME_ID: 1525 CONTIG_ID: 23713 SOURCE: WGS DATE: 2019 Jan. 27. |
| 1575-1576 | wastewater metagenome genome assembly, contig: NODE_129_length_43041_cov_48.731052, whole |
| | genome shotgun sequence \| GENOME_ACESSION: OVQT01.1 GENOME_ID: 11629 CONTIG_ID: |
| | 128 SOURCE: WGS DATE: 2019 Jan. 27. |
| 1577-1578 | human gut metagenome genome assembly, contig: NODE_207_length_13266_cov_7.084551, whole |
| | genome shotgun sequence \| GENOME_ACESSION: OXLJ01.1 GENOME_ID: 12718 CONTIG_ID: 206 |
| | SOURCE: WGS DATE: 2019 Jan. 27. |
| 1579-1580 | human oral metagenome genome assembly, contig: NODE_4_length_74797_cov_34.078711, whole |
| | genome shotgun sequence \| GENOME_ACESSION: OQOW01.1 GENOME_ID: 10003 CONTIG_ID: 3 |
| | SOURCE: WGS DATE: 2019 Jan. 27. |
| 1581-1582 | Ga0222708_1003174 \| GENOME_ACESSION: AntAcemetage1576_2_$F_3300023242 GENOME_ID: |
| | 23008 CONTIG_ID: 3173 SOURCE: JGI DATE: 2019 Jan. 27. |
| 1583-1584 | Ga0207145_1003 \| GENOME_ACESSION: Alteio_BWMinHeat_169_$F_3300020828 GENOME_ID: |
| | 22696 CONTIG_ID: 2 SOURCE: JGI DATE: 2019 Jan. 27. |
| 1585-1586 | Ga0376510_00006 \| GENOME_ACESSION: B34_SRodWell667_2_$F_3300035036 GENOME_ID: |
| | 304288 CONTIG_ID: 5 SOURCE: JGI DATE: 2019 Nov. 15. |
| 1587-1588 | Ga0172381_10003644 \| GENOME_ACESSION: Leawel6488metaG_2_$F_3300014204 GENOME_ID: |
| | 31499 CONTIG_ID: 3643 SOURCE: JGI DATE: 2019 Jan. 27. |
| 1589-1590 | Desulfitobacterium chlororespirans DSM 11544 genome assembly, contig: |
| | EJ42DRAFT_scaffold00015.15, whole genome shotgun sequence \| GENOME_ACESSION: |
| | GCA_900143285.1_IMG-taxon_2582580732_annotated_assembly_genomic GENOME_ID: 187554 |
| | CONTIG_ID: 19 SOURCE: NCBI_Prokaryotes DATE: 2019 Jan. 27. |
| 1591-1592 | Archaeon SCG-AAA382B04 isolate SCG-AAA382B04 AAA382B04_8, whole genome shotgun |
| | sequence \| GENOME_ACESSION: GCA_003034855.1_ASM303485v1_genomic GENOME_ID: |
| | 236541 CONTIG_ID: 110 SOURCE: NCBI_Archaea DATE: 2019 Jan. 27. |
| 1593-1594 | Ga0376085_0000839 \| GENOME_ACESSION: LAC_S1_MG_FICUS_FD_$F_3300035685 |
| | GENOME_ID: 312529 CONTIG_ID: 838 SOURCE: JGI DATE: 2020 Apr. 07. |
| 1595-1596 | Ga0137370_10002449 \| GENOME_ACESSION: SagtaG_47_$F_3300012285 GENOME_ID: 35434 |
| | CONTIG_ID: 2448 SOURCE: JGI DATE: 2019 Jan. 27. |
| 1597-1598 | TPA_asm: Prevotellaceae bacterium UBA3839 UBA3839_contig_75, whole genome shotgun sequence \| |
| | GENOME_ACESSION: GCA_002392805.1_ASM239280v1_genomic GENOME_ID: 134605 |
| | CONTIG_ID: 205 SOURCE: NCBI_Prokaryotes DATE: 2019 Jan. 27. |
| 1599-1600 | Ga0302321_100092658 \| GENOME_ACESSION: Fen_T0_1_2_$F_3300031726 GENOME_ID: 280172 |
| | CONTIG_ID: 92657 SOURCE: JGI DATE: 2019 Jun. 13. |
| 1601-1602 | Pelotomaculum thermopropionicum SI DNA, complete genome \| GENOME_ACESSION: |
| | GCA_000010565.1_ASM1056v1_genomic GENOME_ID: 39479 CONTIG_ID: 0 SOURCE: |
| | NCBI_Prokaryotes DATE: 2019 Jan. 27. |
| 1603-1604 | Ga0163153_10017205 \| GENOME_ACESSION: OliLakLV19MP6IB1_$F_3300020186 GENOME_ID: |
| | 33722 CONTIG_ID: 17204 SOURCE: JGI DATE: 2019 Jan. 27. |
| 1605-1606 | uncultured Roseburia sp. isolate UMGS2025 genome assembly, contig: |
| | NODE 85_length_109015_cov_32.350597, whole genome shotgun sequence \| GENOME_ACESSION: |
| | GCA_900557275.1_UMGS2025_genomic GENOME_ID: 270068 CONTIG_ID: 5 SOURCE: |
| | NCBI_Prokaryotes DATE: 2019 May 30. |
| 1607-1608 | Ga0307377_10081489 \| GENOME_ACESSION: TR3MG_2_$F_3300031673 GENOME_ID: 281015 |
| | CONTIG_ID: 81488 SOURCE: JGI DATE: 2019 Jun. 13. |
| 1609-1610 | Ga0310147_000164 \| GENOME_ACESSION: K73_2_$F_3300034683 GENOME_ID: 292989 |
| | CONTIG_ID: 163 SOURCE: JGI DATE: 2019 Aug. 09. |
| 1611-1612 | Ga0073582_115410 \| GENOME_ACESSION: IMG_3300005663_$F_3300005663 GENOME_ID: |
| | 276644 CONTIG_ID: 15409 SOURCE: JGI DATE: 2019 Jun. 01. |
| 1613-1614 | Anaerobic digester metagenome, whole genome shotgun sequence \| GENOME_ACESSION: LSQX01.3 |
| | GENOME_ID: 1539 CONTIG_ID: 89099 SOURCE: WGS DATE: 2019 Jan. 27. |
| 1615-1616 | Ga0376687_0067215 \| GENOME_ACESSION: AusPinMetagenome_11_FD_$F_3300036817 |
| | GENOME_ID: 312296 CONTIG_ID: 67214 SOURCE: JGI DATE: 2020 Apr. 07. |
| 1617-1618 | human gut metagenome genome assembly, contig: NODE_8362_length_2558_cov_1.603676, whole |
| | genome shotgun sequence \| GENOME_ACESSION: UZUR01.1 GENOME_ID: 279697 CONTIG_ID: |
| | 8361 SOURCE: WGS DATE: 2019 Jun. 06. |
| 1619-1620 | Draft_c0007806 \| GENOME_ACESSION: IMG_3300000032_$F_3300000032 GENOME_ID: 27423 |
| | CONTIG_ID: 3439 SOURCE: JGI DATE: 2019 Jan. 27. |
| 1621-1622 | Ga0376513_002019 \| GENOME_ACESSION: B37 SRodWell667_2_$F_3300035039 GENOME_ID: |
| | 304291 CONTIG_ID: 2018 SOURCE: JGI DATE: 2019 Nov. 15. |
| 1623-1624 | Ga0071116_1000899 \| GENOME_ACESSION: IMG_3300005077_$F_3300005077 GENOME_ID: |
| | 305312 CONTIG_ID: 898 SOURCE: JGI DATE: 2019 Nov. 15. |
| 1625-1626 | Ga0134388_1000763 \| GENOME_ACESSION: IMG_3300014806_$F_3300014806 GENOME_ID: |
| | 278586 CONTIG_ID: 762 SOURCE: JGI DATE: 2019 Jun. 01. |
| 1627-1628 | human gut metagenome genome assembly, contig: NODE_4209_length_4046_cov_2.370370, whole |
| | genome shotgun sequence \| GENOME_ACESSION: OJAM01.1 GENOME_ID: 6199 CONTIG_ID: |
| | 4208 SOURCE: WGS DATE: 2019 Jan. 27. |
| 1629-1630 | Ruminococcaceae bacterium isolate Emb289P3bin136 Ga0123356_10018641, whole genome shotgun |
| | sequence \| GENOME_ACESSION: GCA_009785015.1_ASM978501v1_genomic GENOME_ID: |
| | 318182 CONTIG_ID: 213 SOURCE: NCBI_Prokaryotes DATE: 2020 Apr. 22. |
| 1631-1632 | SL_8KL_010_SEDDRAFT_10000047 \| GENOME_ACESSION: |
| | SodLakKL_010_SED_6_$F_3300000557 GENOME_ID: 35611 CONTIG_ID: 46 SOURCE: JGI DATE: |
| | 2019 Jan. 27. |
| 1633-1634 | Ga0137415_10000002 \| GENOME_ACESSION: CZOHybAssembly_2_$F_3300028536 GENOME_ID: |
| | 280031 CONTIG_ID: 1 SOURCE: JGI DATE: 2019 Jun. 13. |
| 1635-1636 | Ga0256842_1002984 \| GENOME_ACESSION: 4559240metaG_2_$F_3300026512 GENOME_ID: |
| | 20948 CONTIG_ID: 2983 SOURCE: JGI DATE: 2019 Jan. 27 |
| 1637-1638 | Ga0209777_10021516 \| GENOME_ACESSION: FrelakHBHBSPAdes_$F_3300027896 GENOME_ID: |
| | 26210 CONTIG_ID: 21515 SOURCE: JGI DATE: 2019 Jan. 27. |
| 1639-1640 | human oral metagenome genome assembly, contig: NODE_138_length_60038_cov_8.947085, whole |
| | genome shotgun sequence \| GENOME_ACESSION: UPOV01.1 GENOME_ID: 16706 CONTIG_ID: |
| | 137 SOURCE: WGS DATE: 2019 Jan. 27. |
| 1641-1642 | Ga0167622_1004112 \| GENOME_ACESSION: IMG_3300015158_$F_3300015158 GENOME_ID: |
| | 28719 CONTIG_ID: 4111 SOURCE: JGI DATE: 2019 Jan. 27. |
| 1643-1644 | Draft_10008528 \| GENOME_ACESSION: IMG_3300001594_$F_3300001594 GENOME_ID: 27524 |
| | CONTIG_ID: 8527 SOURCE: JGI DATE: 2019 Jan. 27. |
| 1645-1646 | Ga0315284_10052402 \| GENOME_ACESSION: YL17G09_16_MG_2_$F_3300032053 GENOME_ID: |
| | 281635 CONTIG_ID: 52401 SOURCE: JGI DATE: 2019 Jun. 13. |
| 1647-1648 | Ga0207193_1000837 \| GENOME_ACESSION: IMG_3300020048_$F_3300020048 GENOME_ID: |
| | 30012 CONTIG_ID: 836 SOURCE: JGI DATE: 2019 Jan. 27. |
| 1649-1650 | Ga0180732_1000047 \| GENOME_ACESSION: KR11_01MetaG_2_$F_3300020171 GENOME_ID: |
| | 30715 CONTIG_ID: 46 SOURCE: JGI DATE: 2019 Jan. 27. |
| 1651-1652 | Ga0256404_1003517 \| GENOME_ACESSION: RumenRJG_01DNA_2_$F_3300026549 GENOME_ID: |
| | 34936 CONTIG_ID: 3516 SOURCE: JGI DATE: 2019 Jan. 27. |
| 1653-1654 | human gut metagenome genome assembly, contig: NODE_911_length_18023_cov_19.4281, whole |
| | genome shotgun sequence \| GENOME_ACESSION: OWAV01.1 GENOME_ID: 11837 CONTIG_ID: |
| | 910 SOURCE: WGS DATE: 2019 Jan. 27. |
| 1655-1656 | Ga0255345_1013787 \| GENOME_ACESSION: wastewater_treat_10_$F_3300028568 GENOME_ID: |
| | 281791 CONTIG_ID: 13786 SOURCE: JGI DATE: 2019 Jun. 13. |
| 1657-1658 | Ga0376497_007558 \| GENOME_ACESSION: B210_RoWell1209_2_$F_3300035535 GENOME_ID: |
| | 304274 CONTIG_ID: 7557 SOURCE: JGI DATE: 2019 Nov. 15. |
| 1659-1660 | Ga0247608_10001764 \| GENOME_ACESSION: 176DNAGHGlowgp2_2_$F_3300028805 |
| | GENOME_ID: 279762 CONTIG_ID: 1763 SOURCE: JGI DATE: 2019 Jun. 13. |
| 1661-1662 | human gut metagenome genome assembly, contig: scaffold82971_2, whole genome shotgun sequence \| |
| | GENOME_ACESSION: ULMK01.1 GENOME_ID: 15310 CONTIG_ID: 26480 SOURCE: WGS |
| | DATE: 2019 Jan. 27. |
| 1663-1664 | Ga0315282_10018675 \| GENOME_ACESSION: YL17G07_20_MG_2_$F_3300032069 GENOME_ID: |
| | 281633 CONTIG_ID: 18674 SOURCE: JGI DATE: 2019 Jun. 13. |
| 1665-1666 | Ga0315288_10049882 \| GENOME_ACESSION: YL17G11_20_MG_2_$F_3300031772 GENOME_ID: |
| | 281639 CONTIG_ID: 49881 SOURCE: JGI DATE: 2019 Jun. 13. |
| 1667-1668 | Ga0180435_10000153 \| GENOME_ACESSION: SS_ome_21_$F_3300017992 GENOME_ID: 35203 |
| | CONTIG_ID: 152 SOURCE: JGI DATE: 2019 Jan. 27. |
| 1669-1670 | Ga0070738_10016471 \| GENOME_ACESSION: CoaSoiStandDraft_9_$F_3300005531 GENOME_ID: |
| | 24565 CONTIG_ID: 16470 SOURCE: JGI DATE: 2019 Jan. 27. |
| 1671-1672 | Ga0114918_10012039 \| GENOME_ACESSION: LantaG_2_$F_3300009149 GENOME_ID: 31359 |
| | CONTIG_ID: 12038 SOURCE: JGI DATE: 2019 Jan. 27. |
| 1673-1674 | Ga0137391_10019969 \| GENOME_ACESSION: 15con2h24BmetaG_2_$F_3300011270 GENOME_ID: |
| | 20763 CONTIG_ID: 19968 SOURCE: JGI DATE: 2019 Jan. 27. |
| 1675-1676 | JGI11643J12802_10127370 \| GENOME_ACESSION: Grami_3300000033_$F_3300000890 |
| | GENOME_ID: 27064 CONTIG_ID: 1825 SOURCE: JGI DATE: 2019 Jan. 27. |
| 1677-1678 | human gut metagenome genome assembly, contig: NODE_539_length_54612_cov_5.601316, whole |
| | genome shotgun sequence \| GENOME_ACESSION: ORVF01.1 GENOME_ID: 10838 CONTIG_ID: |
| | 538 SOURCE: WGS DATE: 2019 Jan. 27. |
| 1679-1680 | marine metagenome genome assembly, contig: NODE_629_length_21822_cov_14.725040, whole |
| | genome shotgun sequence \| GENOME_ACESSION: ORDN01.1 GENOME_ID: 10380 CONTIG_ID: |
| | 628 SOURCE: WGS DATE: 2019 Jan. 27. |
| 1681-1682 | Ga0063293_10084471 \| GENOME_ACESSION: IMG_3300003886_$F_3300003886 GENOME_ID: |
| | 311638 CONTIG_ID: 84470 SOURCE: JGI DATE: 2020 Apr. 07. |
| 1683-1684 | Ga0074255_1053809 \| GENOME_ACESSION: LumHo_2088090016_$F_3300005361 GENOME_ID: |
| | 31619 CONTIG_ID: 2696 SOURCE: JGI DATE: 2019 Jan. 27. |
| 1685-1686 | Ga0209800 10005712 \| GENOME_ACESSION: HigcelmetaSPAdes_2_$F_3300027800 GENOME_ID: |
| | 27174 CONTIG_ID: 5711 SOURCE: JGI DATE: 2019 Jan. 27. |
| 1687-1688 | Ga0068305_10111221 \| GENOME_ACESSION: IMG_3300005083_$F_3300005083 GENOME_ID: |
| | 311641 CONTIG_ID: 12741 SOURCE: JGI DATE: 2020 Apr. 07. |
| 1689-1690 | human oral metagenome genome assembly, contig: NODE_7457_length_3750_cov_2.000000, whole |
| | genome shotgun sequence \| GENOME_ACESSION: UPKJ01.1 GENOME_ID: 16590 CONTIG_ID: |
| | 7456 SOURCE: WGS DATE: 2019 Jan. 27. |
| 1691-1692 | Ga0070770_10195732 \| GENOME_ACESSION: IMG_3300005078_$F_3300005078 GENOME_ID: |
| | 27773 CONTIG_ID: 4481 SOURCE: JGI DATE: 2019 Jan. 27. |
| 1693-1694 | Thermogemmatispora aurantia A1-2 DNA, sequence09, whole genome shotgun sequence \| |
| | GENOME_ACESSION: GCA_008974285.1_ASM897428v1_genomic GENOME_ID: 312957 |
| | CONTIG_ID: 8 SOURCE: NCBI_Prokaryotes DATE: 2020 Apr. 22. |
| 1695-1696 | Ga0207421_10015550 \| GENOME_ACESSION: SodLak8KL_SPAdes_$F_3300027784 GENOME_ID: |
| | 35608 CONTIG_ID: 15549 SOURCE: JGI DATE: 2019 Jan. 27 |
| 1697-1698 | Ga0180732_1000469 \| GENOME_ACESSION: KR11_01MetaG_2_$F_3300020171 GENOME_ID: |
| | 30715 CONTIG_ID: 468 SOURCE: JGI DATE: 2019 Jan. 27. |
| 1699-1700 | Ga0394881_0000594 \| GENOME_ACESSION: WSA_S1_MG_FD_$F_3300037311 GENOME_ID: |
| | 312717 CONTIG_ID: 593 SOURCE: JGI DATE: 2020 Apr. 07. |
| 1701-1702 | Ga0209591 10074768 \| GENOME_ACESSION: MAT01SPAdes_$F_3300027850 GENOME_ID: |
| | 31815 CONTIG_ID: 74767 SOURCE: JGI DATE: 2019 Jan. 27. |
| 1703-1704 | Lactobacillus mucosae strain CRL573 Contig_36, whole genome shotgun sequence \| |
| | GENOME_ACESSION: GCA_000766905.1_ASM76690v1_genomic GENOME_ID: 67659 |
| | CONTIG_ID: 35 SOURCE: NCBI_Prokaryotes DATE: 2019 Jan. 27. |
| 1705-1706 | Ga0256829_1004322 \| GENOME_ACESSION: 131447metaG_2_$F_3300026518 GENOME_ID: 20587 |
| | CONTIG_ID: 4321 SOURCE: JGI DATE: 2019 Jan. 27. |
| 1707-1708 | Archaeon IPdc08 DNA, NODE_37_36, whole genome shotgun sequence \| GENOME_ACESSION: |
| | GCA_006538205.1_ASM653820v1_genomic GENOME_ID: 289565 CONTIG_ID: 35 SOURCE: |
| | NCBI_Prokaryotes DATE: 2019 Jul. 22. |
| 1709-1710 | Ga0209204_1004127 \| GENOME_ACESSION: AD_des_37_$F_3300025631 GENOME_ID: 21336 |
| | CONTIG_ID: 4126 SOURCE: JGI DATE: 2019 Jan. 27. |
| 1711-1712 | Ga0102924_1014628 \| GENOME_ACESSION: PaiPotIlAssembly_$F_3300007982 GENOME_ID: |
| | 34130 CONTIG_ID: 14627 SOURCE: JGI DATE: 2019 Jan. 27. |
| 1713-1714 | Draft_10001674 \| GENOME_ACESSION: IMG_3300001592_$F_3300001592 GENOME_ID: 27523 |
| | CONTIG_ID: 1673 SOURCE: JGI DATE: 2019 Jan. 27. |
| 1715-1716 | Ga0306921_10158369 \| GENOME_ACESSION: sta12C44000080v2_$F_3300031912 GENOME_ID: |
| | 281678 CONTIG_ID: 158368 SOURCE: JGI DATE: 2019 Jun. 13. |
| 1717-1718 | Ga0103869_10001850 \| GENOME_ACESSION: 3300009257 GENOME_ID: 238854 CONTIG_ID: |
| | 2212 SOURCE: JGI Dark Harvest DATE: 2019 Jan. 27. |
| 1719-1720 | Ga0114939_10008276 \| GENOME_ACESSION: AshMeaCrysSpring_2_$F_3300009455 GENOME_ID: |
| | 23357 CONTIG_ID: 8275 SOURCE: JGI DATE: 2019 Jan. 27. |
| 1721-1722 | Ga0311341_10020266 \| GENOME_ACESSION: II_bly_9_$F_3300029908 GENOME_ID: 280489 |
| | CONTIG_ID: 20265 SOURCE: JGI DATE: 2019 Jun. 13. |
| 1723-1724 | Ga0265294_10058290 \| GENOME_ACESSION: MunlanPumphouse3_2_$F_3300028602 |
| | GENOME_ID: 280699 CONTIG_ID: 58289 SOURCE: JGI DATE: 2019 Jun. 13. |
| 1725-1726 | human gut metagenome genome assembly, contig: NODE_1363_length_7809_cov_11.459247, whole |
| | genome shotgun sequence \| GENOME_ACESSION: UAOH01.1 GENOME_ID: 14968 CONTIG_ID: |
| | 1362 SOURCE: WGS DATE: 2019 Jan. 27. |
| 1727-1728 | sediment metagenome genome assembly, contig: NODE_138_length_117839_cov_9.207605, whole |
| | genome shotgun sequence \| GENOME_ACESSION: OVXO01.1 GENOME_ID: 11753 CONTIG_ID: |
| | 137 SOURCE: WGS DATE: 2019 Jan. 27. |
| 1729-1730 | Ga0376086_0041273 \| GENOME_ACESSION: LAC_S2_MG_FICUS_FD_$F_3300035686 |
| | GENOME_ID: 312530 CONTIG_ID: 41272 SOURCE: JGI DATE: 2020 Apr. 07. |
| 1731-1732 | MIS_10021274 \| GENOME_ACESSION: IMG_3300002026_$F_3300002026 GENOME_ID: 305123 |
| | CONTIG_ID: 21273 SOURCE: JGI DATE: 2019 Nov. 15. |
| 1733-1734 | JGI24712J26585_10005370 \| GENOME_ACESSION: BioPla3DNA2_2_$F_3300002168 |
| | GENOME_ID: 23823 CONTIG_ID: 5369 SOURCE: JGI DATE: 2019 Jan. 27. |
| 1735-1736 | metagenome genome assembly, contig: NODE_590_length_29055_cov_3.058414, whole genome |
| | shotgun sequence \| GENOME_ACESSION: OGEZ01.1 GENOME_ID: 4324 CONTIG_ID: 589 |
| | SOURCE: WGS DATE: 2019 Jan. 27. |
| 1737-1738 | fermentation metagenome genome assembly, contig: NODE_421_length_49700_cov_20.654930, whole |
| | genome shotgun sequence \| GENOME_ACESSION: UOOY01.1 GENOME_ID: 16056 CONTIG_ID: |
| | 420 SOURCE: WGS DATE: 2019 Jan. 27. |
| 1739-1740 | Ga0137379_10004000 \| GENOME_ACESSION: SagtaG_36_$F_3300012209 GENOME_ID: 35423 |
| | CONTIG_ID: 3999 SOURCE: JGI DATE: 2019 Jan. 27. |
| 1741-1742 | human metagenome genome assembly, contig: NODE_7302_length_4277_cov_2.90502, whole genome |
| | shotgun sequence \| GENOME_ACESSION: OEBY01.1 GENOME_ID: 3487 CONTIG_ID: 7301 |
| | SOURCE: WGS DATE: 2019 Jan. 27. |
| 1743-1744 | Chloroflexi bacterium isolate CF_117 14_0929_09_20cm_scaffold_4585, whole genome shotgun |
| | sequence \| GENOME_ACESSION: GCA_005880275.1 ASM588027v1_genomic GENOME_ID: |
| | 285783 CONTIG_ID: 892 SOURCE: NCBI_Prokaryotes DATE: 2019 Jul. 22. |
| 1745-1746 | Ga0072941_1026019 \| GENOME_ACESSION: IMG_3300005201_$F_3300005201 GENOME_ID: |
| | 311642 CONTIG_ID: 12710 SOURCE: JGI DATE: 2020 Apr. 07. |
| 1747-1748 | Ga0374549_000851 \| GENOME_ACESSION: MayFmetaT_FD_$F_3300035593 GENOME_ID: 311788 |
| | CONTIG_ID: 850 SOURCE: JGI DATE: 2020 Apr. 07. |
| 1749-1750 | scaffold15168 7.1 \| GENOME_ACESSION: mgm4707306.3 GENOME_ID: 237990 CONTIG_ID: 1537 |
| | SOURCE: MG-RAST DATE: 2019 Jan. 27. |
| 1751-1752 | Janthinobacterium sp. isolate palsa_998 73.20120500_P28.8_contig_130, whole genome shotgun |
| | sequence \| GENOME_ACESSION: GCA_003133225.1_20120500_P28_genomic GENOME_ID: |
| | 159801 CONTIG_ID: 21 SOURCE: NCBI_Prokaryotes DATE: 2019 Jan. 27. |
| 1753-1754 | Actinomadura latina NBRC 106108 DNA, contig: AL2_CON0019_0001, whole genome shotgun |
| | sequence \| GENOME_ACESSION: GCA_001552195.1_ASM155219v1_genomic GENOME_ID: 98619 |
| | CONTIG_ID: 34 SOURCE: NCBI_Prokaryotes DATE: 2019 Jan. 27. |
| 1755-1756 | Sulfobacillus sp. hq2 scaffold8, whole genome shotgun sequence \| GENOME_ACESSION: |
| | GCA_002903155.1_ASM290315v1_genomic GENOME_ID: 151958 CONTIG_ID: 51 SOURCE: |
| | NCBI_Prokaryotes DATE: 2019 Jan. 27. |
| 1757-1758 | Anoxybacillus flavithermus TNO-09.006 genomic scaffold chrAF6, whole genome shotgun sequence \| |
| | GENOME_ACESSION: GCA_000327465.1_Anoxybacillus_flavithermus_TNO-09.006_v1_genomic |
| | GENOME_ID: 47580 CONTIG_ID: 0 SOURCE: NCBI_Prokaryotes DATE: 2019 Jan. 27. |
| 1759-1760 | Ga0307928_10012696 \| GENOME_ACESSION: AceLakmetagen232_2_$F_3300031227 |
| | GENOME_ID: 279923 CONTIG_ID: 12695 SOURCE: JGI DATE: 2019 Jun. 13. |
| 1761-1762 | Ga0315553_10003099 \| GENOME_ACESSION: SalMarSW160140MG_2_$F_3300031652 |
| | GENOME_ID: 280933 CONTIG_ID: 3098 SOURCE: JGI DATE: 2019 Jun. 13. |
| 1763-1764 | Ga0209985_10000066 \| GENOME_ACESSION: NOAmetSPAdes_$F_3300027806 GENOME_ID: |
| | 33087 CONTIG_ID: 65 SOURCE: JGI DATE: 2019 Jan. 27. |
| 1765-1766 | Ga0307379_10050423 \| GENOME_ACESSION: UN2MG_2_$F_3300031565 GENOME_ID: 281080 |
| | CONTIG_ID: 50422 SOURCE: JGI DATE: 2019 Jun. 13. |
| 1767-1768 | Ga0113559_100101 \| GENOME_ACESSION: IMG_3300008081_$F_3300008081 GENOME_ID: |
| | 28361 CONTIG_ID: 100 SOURCE: JGI DATE: 2019 Jan. 27. |
| 1769-1770 | human gut metagenome genome assembly, contig: NODE_2190_length_16758_cov_18.186733, whole |
| | genome shotgun sequence \| GENOME_ACESSION: UPLV01.1 GENOME_ID: 16628 CONTIG_ID: |
| | 2189 SOURCE: WGS DATE: 2019 Jan. 27. |
| 1771-1772 | Ga0137365_10001047 \| GENOME_ACESSION: SagtaG_29_$F_3300012201 GENOME_ID: 35416 |
| | CONTIG_ID: 1046 SOURCE: JGI DATE: 2019 Jan. 27. |
| 1773-1774 | Ga0070717_10000790 \| GENOME_ACESSION: LARL11StandDraft_3_$F_3300006028 GENOME_ID: |
| | 31022 CONTIG_ID: 789 SOURCE: JGI DATE: 2019 Jan. 27. |
| 1775-1776 | Ga0211664_10024503 \| GENOME_ACESSION: IMG_3300020455_$F_3300020455 GENOME_ID: |
| | 278939 CONTIG_ID: 24502 SOURCE: JGI DATE: 2019 Jun. 01. |
| 1777-1778 | Ga0181555_1021736 \| GENOME_ACESSION: 011ome_28_$F_3300020051 GENOME_ID: 20407 |
| | CONTIG_ID: 21735 SOURCE: JGI DATE: 2019 Jan. 27. |
| 1779-1780 | Chloroflexi bacterium isolate CF_154 14_0903_05_20cm_scaffold_174, whole genome shotgun |
| | sequence \| GENOME_ACESSION: GCA_005879655.1_ASM587965v1_genomic GENOME_ID: |
| | 285751 CONTIG_ID: 151 SOURCE: NCBI_Prokaryotes DATE: 2019 Jul. 22. |
| 1781-1782 | Streptomyces sp. HG99 scaffold3, whole genome shotgun sequence \| GENOME_ACESSION: |
| | GCA_002742045.1_ASM274204v1_genomic GENOME_ID: 145796 CONTIG_ID: 22 SOURCE: |
| | NCBI_Prokaryotes DATE: 2019 Jan. 27. |
| 1783-1784 | Ga0370532_0143 \| GENOME_ACESSION: 20181204_8_FD_$F_3300035014 GENOME_ID: 307140 |
| | CONTIG_ID: 142 SOURCE: JGI DATE: 2020 Apr. 07. |
| 1785-1786 | Oxynema sp. AP17 chromosome, complete genome \| GENOME_ACESSION: |
| | GCA_012295525.1_ASM1229552v1_genomic GENOME_ID: 331850 CONTIG_ID: 0 SOURCE: |
| | NCBI_Prokaryotes DATE: 2020 Apr. 22. |
| 1787-1788 | marine metagenome genome assembly, contig: NODE_793_length_18947_cov_12.879862, whole |
| | genome shotgun sequence \| GENOME_ACESSION: ORDN01.1 GENOME_ID: 10380 CONTIG_ID: |
| | 792 SOURCE: WGS DATE: 2019 Jan. 27. |
| 1789-1790 | Ga0101770_1058525 \| GENOME_ACESSION: IMG_3300006674_$F_3300006674 GENOME_ID: |
| | 27981 CONTIG_ID: 24152 SOURCE: JGI DATE: 2019 Jan. 27. |
| 1791-1792 | Eubacterium sp. An3 An3_contig_51, whole genome shotgun sequence \| GENOME_ACESSION: |
| | GCA_002159465.1_ASM215946v1_genomic GENOME_ID: 123888 CONTIG_ID: 61 SOURCE: |
| | NCBI_Prokaryotes DATE: 2019 Jan. 27. |
| 1793 | human gut metagenome genome assembly, contig: NODE_3304_length_8539_cov_2.986681, whole |
| | genome shotgun sequence \| GENOME_ACESSION: QUOT01.1 GENOME_ID: 11097 CONTIG_ID: |
| | 3303 SOURCE: WGS DATE: 2019 Jan. 27. |
| 1794-1795 | |
| 1796-1797 | Ectothiorhodospira magna strain B7-7 genome assembly, contig: Ga0116939_119, whole genome |
| | shotgun sequence \| GENOME_ACESSION: GCA_900110965.1 IMG- |
| | taxon_2675903141_annotated_assembly_genomic GENOME_ID: 184488 CONTIG_ID: 10 SOURCE: |
| | NCBI_Prokaryotes DATE: 2019 Jan. 27. |
| 1798-1799 | TPA_asm: Euryarchaeota archaeon isolate HyVt-292 HyVt-292_k295_371144, whole genome shotgun |
| | sequence \| GENOME_ACESSION: GCA_011040935.1_ASM1104093v1_genomic GENOME_ID: |
| | 326302 CONTIG_ID: 122 SOURCE: NCBI_Prokaryotes DATE: 2020 Apr. 22. |
| 1800-1801 | Ga0074646_100108 \| GENOME_ACESSION: Etolagbewater25m_FD_$F_3300005470 GENOME_ID: |
| | 311557 CONTIG_ID: 107 SOURCE: JGI DATE: 2020 Apr. 07. |
| 1802-1803 | Ga0318466_10004665 \| GENOME_ACESSION: GoaFecpsamplesv2_$F_3300031555 GENOME_ID: |
| | 280328 CONTIG_ID: 4664 SOURCE: JGI DATE: 2019 Jun. 13. |
| 1804-1805 | Ga0182240_101142 \| GENOME_ACESSION: hydfrates4_PW_90_2_$F_3300020032 GENOME_ID: |
| | 37710 CONTIG_ID: 1141 SOURCE: JGI DATE: 2019 Jan. 27. |
| 1806-1807 | Ga0310695_10004545 \| GENOME_ACESSION: RumRJGDNAv2_$F_3300032007 GENOME_ID: |
| | 280889 CONTIG_ID: 4544 SOURCE: JGI DATE: 2019 Jun. 13. |
| 1808-1809 | Ga0310138_000236 \| GENOME_ACESSION: M273_2_$F_3300033986 GENOME_ID: 280650 |
| | CONTIG_ID: 235 SOURCE: JGI DATE: 2019 Jun. 13. |
| 1810-1811 | TB_LI09_3DRAFT_1004762 \| GENOME_ACESSION: UncGr_3300000229_$F_3300000229 |
| | GENOME_ID: 36368 CONTIG_ID: 4761 SOURCE: JGI DATE: 2019 Jan. 27. |
| 1812-1813 | Ga0180007_10021296 \| GENOME_ACESSION: MM_PC_MetaG_2_$F_3300014656 GENOME_ID: |
| | 32273 CONTIG_ID: 21295 SOURCE: JGI DATE: 2019 Jan. 27. |
| 1814-1815 | Ga0310133_003358 \| GENOME_ACESSION: M171_2_$F_3300033998 GENOME_ID: 280645 |
| | CONTIG_ID: 3357 SOURCE: JGI DATE: 2019 Jun. 13. |
| 1816-1817 | human gut metagenome genome assembly, contig: NODE_78_length_104184_cov_6.349394, whole |
| | genome shotgun sequence \| GENOME_ACESSION: OWCF01.1 GENOME_ID: 11873 CONTIG_ID: 77 |
| | SOURCE: WGS DATE: 2019 Jan. 27. |
| 1818-1819 | Ga0082212_10029072 \| GENOME_ACESSION: TergutNt197P3_$F_3300006045 GENOME_ID: 36056 |
| | CONTIG_ID: 29071 SOURCE: JGI DATE: 2019 Jan. 27. |
| 1820-1821 | Ga0247608_10014894 \| GENOME_ACESSION: 176DNAGHGlowgp2_2_$F_3300028805 |
| | GENOME_ID: 279762 CONTIG_ID: 14891 SOURCE: JGI DATE: 2019 Jun. 13. |
| 1822-1823 | Ga0373631_0015577 \| GENOME_ACESSION: RO123_strea_MG_FD_$F_3300035180 GENOME_ID: |
| | 312623 CONTIG_ID: 15576 SOURCE: JGI DATE: 2020 Apr. 07. |
| 1824-1825 | Ga0194138_10000007 \| GENOME_ACESSION: TAR4v2_3_$F_3300018405 GENOME_ID: 35910 |
| | CONTIG_ID: 6 SOURCE: JGI DATE: 2019 Jan. 27. |
| 1826-1827 | Ga0102947_1000378 \| GENOME_ACESSION: SalPon2A_A_D2_MG_2_$F_3300007619 |
| | GENOME_ID: 35439 CONTIG_ID: 377 SOURCE: JGI DATE: 2019 Jan. 27. |
| 1828-1829 | Ga0210402_10005866 \| GENOME_ACESSION: IncBWC7MmetaG_2_$F_3300021478 GENOME_ID: |
| | 30130 CONTIG_ID: 5865 SOURCE: JGI DATE: 2019 Jan. 27. |
| 1830-1831 | Ga0136175_10101454 \| GENOME_ACESSION: IMG_3300010163_$F_3300010163 GENOME_ID: |
| | 311728 CONTIG_ID: 101453 SOURCE: JGI DATE: 2020 Apr. 07. |
| 1832-1833 | human oral metagenome genome assembly, contig: NODE_46_length_124855_cov_3.86146, whole |
| | genome shotgun sequence \| GENOME_ACESSION: UPCW01.1 GENOME_ID: 16407 CONTIG_ID: 45 |
| | SOURCE: WGS DATE: 2019 Jan. 27. |
| 1834-1835 | human gut metagenome genome assembly, contig: NODE_1068_length_23742_cov_9.115844, whole |
| | genome shotgun sequence \| GENOME_ACESSION: UPOJ01.1 GENOME_ID: 16694 CONTIG_ID: |
| | 1067 SOURCE: WGS DATE: 2019 Jan. 27. |
| 1836-1837 | mouse gut metagenome genome assembly, contig: NODE_4542_length_6004_cov_2.376702, whole |
| | genome shotgun sequence \| GENOME_ACESSION: OFGO01.1 GENOME_ID: 3940 CONTIG_ID: |
| | 4541 SOURCE: WGS DATE: 2019 Jan. 27. |
| 1838-1839 | human gut metagenome genome assembly, contig: NODE_2011_length_11952_cov_14.972463, whole |
| | genome shotgun sequence \| GENOME_ACESSION: UESP01.1 GENOME_ID: 15163 CONTIG_ID: |
| | 2010 SOURCE: WGS DATE: 2019 Jan. 27. |
| 1840-1841 | Ga0136851_10002495 \| GENOME_ACESSION: IMG_3300010413_$F_3300010413 GENOME_ID: |
| | 312516 CONTIG_ID: 2494 SOURCE: JGI DATE: 2020 Apr. 07. |
| 1842-1843 | metagenome genome assembly, contig: NODE_68_length_101563_cov_30.349657, whole genome |
| | shotgun sequence \| GENOME_ACESSION: OGUD01.1 GENOME_ID: 4712 CONTIG_ID: 67 |
| | SOURCE: WGS DATE: 2019 Jan. 27. |
| 1844-1845 | Ga0209636_10070277 \| GENOME_ACESSION: DeeMar52_5SPAdes_$F_3300027893 GENOME_ID: |
| | 25256 CONTIG_ID: 70276 SOURCE: JGI DATE: 2019 Jan. 27. |
| 1846-1847 | Ga0209827_10194947 \| GENOME_ACESSION: OV2TP2SPAdes_$F_3300025149 GENOME_ID: |
| | 33692 CONTIG_ID: 726 SOURCE: JGI DATE: 2019 Jan. 27. |
| 1848-1849 | human gut metagenome genome assembly, contig: NODE_1604_length_6656_cov_3.864566, whole |
| | genome shotgun sequence \| GENOME_ACESSION: UAPJ01.1 GENOME_ID: 14993 CONTIG_ID: |
| | 1603 SOURCE: WGS DATE: 2019 Jan. 27. |
| 1850-1851 | Ga0209648_10006185 \| GENOME_ACESSION: GraSoiAngeSPAdes_42_$F_3300026551 |
| | GENOME_ID: 26991 CONTIG_ID: 6184 SOURCE: JGI DATE: 2019 Jan. 27. |
| 1852-1853 | Okeania sp. SIO3B3 3B3_NODE_558, whole genome shotgun sequence \| GENOME_ACESSION: |
| | GCA_010692535.1_ASM1069253v1_genomic GENOME_ID: 325543 CONTIG_ID: 2076 SOURCE: |
| | NCBI_Prokaryotes DATE: 2020 Apr. 22. |
| 1854-1855 | Scytonema sp. RU_4_4 NODE_236_length_45534_cov_15.648975, whole genome shotgun sequence \| |
| | GENOME_ACESSION: GCA_012031965.1_ASM1203196v1_genomic GENOME_ID: 331080 |
| | CONTIG_ID: 176 SOURCE: NCBI_Prokaryotes DATE: 2020 Apr. 22. |
| 1856-1857 | human gut metagenome genome assembly, contig: NODE_59_length_61911_cov_6.971902, whole |
| | genome shotgun sequence \| GENOME_ACESSION: UZNL01.1 GENOME_ID: 18041 CONTIG_ID: 58 |
| | SOURCE: WGS DATE: 2019 Jan. 27. |
| 1858-1859 | Ga0302251_1000232 \| GENOME_ACESSION: AAG_RA_Gln_MG_2_$F_3300028625 GENOME_ID: |
| | 279887 CONTIG_ID: 231 SOURCE: JGI DATE: 2019 Jun. 13. |
| 1860-1861 | Hymenobacter sp. CCM 8763 NODE_27_length_66586_cov_28.8038_ID_53, whole genome shotgun |
| | sequence \| GENOME_ACESSION: GCA_003417065.1_ASM341706v1_genomic GENOME_ID: |
| | 170640 CONTIG_ID: 44 SOURCE: NCBI_Prokaryotes DATE: 2019 Jan. 27. |
| 1862-1863 | Ga0070707_100063183 \| GENOME_ACESSION: KBSK5StandDraft 9_$F_3300005468 |
| | GENOME_ID: 30508 CONTIG_ID: 63182 SOURCE: JGI DATE: 2019 Jan. 27. |
| 1864-1865 | Ga0307376_10008654 \| GENOME_ACESSION: TR2MG_2_$F_3300031578 GENOME_ID: 281014 |
| | CONTIG_ID: 8653 SOURCE: JGI DATE: 2019 Jun. 13. |
| 1866-1867 | Ga0209096_1014402 \| GENOME_ACESSION: AD_des_43_$F_3300025859 GENOME_ID: 21343 |
| | CONTIG_ID: 14401 SOURCE: JGI DATE: 2019 Jan. 27. |
| 1868-1869 | Tissierella creatinini strain BN11 NODE_17_length_55240_cov_1267.366911, whole genome shotgun |
| | sequence \| GENOME_ACESSION: GCA_005046945.1_ASM504694v1_genomic GENOME_ID: |
| | 263665 CONTIG_ID: 28 SOURCE: NCBI_Prokaryotes DATE: 2019 May 30. |
| 1870-1871 | Ga0208687_1000090 \| GENOME_ACESSION: Jundes 13_$F_3300025469 GENOME_ID: 30316 |
| | CONTIG_ID: 89 SOURCE: JGI DATE: 2019 Jan. 27. |
| 1872-1873 | Petrotoga mobilis SJ95, complete genome \| GENOME_ACESSION: |
| | GCA_000018605.1_ASM1860v1_genomic GENOME_ID: 39841 CONTIG_ID: 0 SOURCE: |
| | NCBI_Prokaryotes DATE: 2019 Jan. 27. |
| 1874-1875 | Chlamydiae bacterium isolate K940_chlam_3 K940chlam3_32, whole genome shotgun sequence \| |
| | GENOME_ACESSION: GCA_011065065.1_ASM1106506v1_genomic GENOME_ID: 327255 |
| | CONTIG_ID: 147 SOURCE: NCBI_Prokaryotes DATE: 2020 Apr. 22. |
| 1876-1877 | human gut metagenome genome assembly, contig: NODE_192_length_38345_cov_13.286210, whole |
| | genome shotgun sequence \| GENOME_ACESSION: OWJA01.1 GENOME_ID: 12050 CONTIG_ID: |
| | 191 SOURCE: WGS DATE: 2019 Jan. 27. |
| 1878-1879 | Ga0326513_10003181 \| GENOME_ACESSION:_2_2465_0518_D_2_$F_3300031760 GENOME_ID: |
| | 279785 CONTIG_ID: 3180 SOURCE: JGI DATE: 2019 Jun. 13. |
| 1880-1881 | Ga0326511_10001255 \| GENOME_ACESSION: 0_2496_0518_D_2_$F_3300031867 GENOME_ID: |
| | 279726 CONTIG_ID: 1254 SOURCE: JGI DATE: 2019 Jun. 13. |
| 1882-1883 | Ga0265293_10014478 \| GENOME_ACESSION: Munlanlewell138R_2_$F_3300028603 GENOME_ID: |
| | 280700 CONTIG_ID: 14477 SOURCE: JGI DATE: 2019 Jun. 13. |
| 1884-1885 | Ga0265298_10029446 \| GENOME_ACESSION: AusTroGonzalo_MG_8_$F_3300028832 |
| | GENOME_ID: 279935 CONTIG_ID: 29445 SOURCE: JGI DATE: 2019 Jun. 13. |
| 1886-1887 | Ga0335394_10082827 \| GENOME_ACESSION: MAT03spassembly_$F_3300032456 GENOME_ID: |
| | 280657 CONTIG_ID: 82826 SOURCE: JGI DATE: 2019 Jun. 13. |
| 1888-1889 | Ga0209720_1016953 \| GENOME_ACESSION: AD_des_11_$F_3300025605 GENOME_ID: 21309 |
| | CONTIG_ID: 16952 SOURCE: JGI DATE: 2019 Jan. 27. |
| 1890-1891 | JGI12150J12686_102082 \| GENOME_ACESSION: ANMFosRound1_$F_3300000857 GENOME_ID: |
| | 21413 CONTIG_ID: 325 SOURCE: JGI DATE: 2019 Jan. 27. |
| 1892-1893 | Ga0137378 10002753 \| GENOME_ACESSION: SagtaG_37_$F_3300012210 GENOME_ID: 35424 |
| | CONTIG_ID: 2752 SOURCE: JGI DATE: 2019 Jan. 27. |
| 1894-1895 | SMTZ23_10055571 \| GENOME_ACESSION: IMG_3300002053_$F_3300002053 GENOME_ID: |
| | 27600 CONTIG_ID: 55570 SOURCE: JGI DATE: 2019 Jan. 27. |
| 1896-1897 | human gut metagenome genome assembly, contig: NODE_117_length_59318_cov_12.435854, whole |
| | genome shotgun sequence \| GENOME_ACESSION: OLON01.1 GENOME_ID: 7851 CONTIG_ID: 116 |
| | SOURCE: WGS DATE: 2019 Jan. 27. |
| 1898-1899 | human gut metagenome genome assembly, contig: NODE_3680_length_4513_cov_6.120682, whole |
| | genome shotgun sequence \| GENOME_ACESSION: UAPB01.1 GENOME_ID: 14988 CONTIG_ID: |
| | 3679 SOURCE: WGS DATE: 2019 Jan. 27. |
| 1900-1901 | human gut metagenome genome assembly, contig: NODE_128_length_79994_cov_7.882986, whole |
| | genome shotgun sequence \| GENOME_ACESSION: UPLO01.1 GENOME_ID: 16621 CONTIG_ID: 127 |
| | SOURCE: WGS DATE: 2019 Jan. 27. |
| 1902-1903 | human gut metagenome genome assembly, contig: NODE_1355_length_19542_cov_13.053583, whole |
| | genome shotgun sequence \| GENOME_ACESSION: UEPG01.1 GENOME_ID: 15076 CONTIG_ID: |
| | 1354 SOURCE: WGS DATE: 2019 Jan. 27. |
| 1904-1905 | Marinitoga sp. 38H-ov contig_19, whole genome shotgun sequence \| GENOME_ACESSION: |
| | GCA_011057715.1_ASM1105771v1_genomic GENOME_ID: 327122 CONTIG_ID: 10 SOURCE: |
| | NCBI_Prokaryotes DATE: 2020 Apr. 22. |
| 1906-1907 | JGI25616J43925_10007359 \| GENOME_ACESSION: GraSoi2013_100cm_2_$F_3300002917 |
| | GENOME_ID: 26954 CONTIG_ID: 7358 SOURCE: JGI DATE: 2019 Jan. 27. |
| 1908-1909 | Bacillus sp. AFS014408 AFS014408_98_D11_Contig119_140514, whole genome shotgun sequence \| |
| | GENOME_ACESSION: GCA_002557915.1_ASM255791v1_genomic GENOME_ID: 141756 |
| | CONTIG_ID: 20 SOURCE: NCBI_Prokaryotes DATE: 2019 Jan. 27. |
| 1910-1911 | Paenibacillus wynnii strain DSM 18334 unitig_2, whole genome shotgun sequence |
| | GENOME_ACESSION: GCA_000757885.1_Pwynnii072014_genomic GENOME_ID: 67270 |
| | CONTIG_ID: 1 SOURCE: NCBI_Prokaryotes DATE: 2019 Jan. 27. |
| 1912-1913 | human gut metagenome genome assembly, contig: NODE_5646_length_3670_cov_1.870263, whole |
| | genome shotgun sequence \| GENOME_ACESSION: UZOC01.1 GENOME_ID: 279602 CONTIG_ID: |
| | 5645 SOURCE: WGS DATE: 2019 Jun. 06. |
| 1914-1915 | Anoxybacillus flavithermus TNO-09.006 genomic scaffold chrAF6, whole genome shotgun sequence \| |
| | GENOME_ACESSION: GCA_000327465.1_Anoxybacillus_flavithermus_TNO-09.006_v1_genomic |
| | GENOME_ID: 47580 CONTIG_ID: 0 SOURCE: NCBI_Prokaryotes DATE: 2019 Jan. 27. |
| 1916-1917 | Ga0121719_100007 \| GENOME_ACESSION: 3300011832 GENOME_ID: 239423 CONTIG_ID: 6 |
| | SOURCE: JGI_Dark_Harvest DATE: 2019 Jan. 27. |
| 1918-1919 | Ga0307928_10003230 \| GENOME_ACESSION: AceLakmetagen232_2_$F_3300031227 |
| | GENOME_ID: 279923 CONTIG_ID: 3229 SOURCE: JGI DATE: 2019 Jun. 13. |
| 1920-1921 | [Bacillus] selenitireducens MLS10 chromosome, complete genome \| GENOME_ACESSION: |
| | GCA_000093085.1_ASM9308v1_genomic GENOME_ID: 40342 CONTIG_ID: 0 SOURCE: |
| | NCBI_Prokaryotes DATE: 2019 Jan. 27. |
| 1922-1923 | Ga0393278_0005903 \| GENOME_ACESSION: LZ_38metaG_FD_$F_3300036985 GENOME_ID: |
| | 312543 CONTIG_ID: 5902 SOURCE: JGI DATE: 2020 Apr. 07. |
| 1924-1925 | Ga0209719_1005600 \| GENOME_ACESSION: AD_des_12_$F_3300025677 GENOME_ID: 21310 |
| | CONTIG_ID: 5599 SOURCE: JGI DATE: 2019 Jan. 27. |
| 1926-1927 | Ga0394882_0003342 \| GENOME_ACESSION: WSA_S4_MG_FD_$F_3300037422 GENOME_ID: |
| | 312718 CONTIG_ID: 3341 SOURCE: JGI DATE: 2020 Apr. 07. |
| 1928-1929 | Ga0334896_1003582 \| GENOME_ACESSION: GraSluR3_MG_18_$F_3300033428 GENOME_ID: |
| | 280364 CONTIG_ID: 3581 SOURCE: JGI DATE: 2019 Jun. 13. |
| 1930-1931 | Ga0101770_1016828 \| GENOME_ACESSION: IMG_3300006674_$F_3300006674 GENOME_ID: |
| | 27981 CONTIG_ID: 7458 SOURCE: JGI DATE: 2019 Jan. 27. |
| 1932-1933 | Streptomyces sp. NBS 14/10 NBS-14-10_1_paired_trimmed_paired_contig_41, whole genome |
| | shotgun sequence \| GENOME_ACESSION: GCA_002224125.1_ASM222412v1_genomic |
| | GENOME_ID: 126671 CONTIG_ID: 63 SOURCE: NCBI_Prokaryotes DATE: 2019 Jan. 27. |
| 1934-1935 | Ga0334813_001619 \| GENOME_ACESSION: 713E1X1metaG_FD_$F_3300036884 GENOME_ID: |
| | 312156 CONTIG_ID: 1618 SOURCE: JGI DATE: 2020 Apr. 07. |
| 1936-1937 | Ga0209617_10003712 \| GENOME_ACESSION: LakEri2011SPAdes_$F_3300027720 GENOME_ID: |
| | 31100 CONTIG_ID: 3711 SOURCE: JGI DATE: 2019 Jan. 27. |
| 1938-1939 | Ga0133913_10206209 \| GENOME_ACESSION: norCanCoassembly_$F_3300010885 GENOME_ID: |
| | 37731 CONTIG_ID: 206208 SOURCE: JGI DATE: 2019 Jan. 27. |
| 1940-1941 | Ga0265319_1000103 \| GENOME_ACESSION: 4824metaG_2_$F_3300028563 GENOME_ID: 279827 |
| | CONTIG_ID: 102 SOURCE: JGI DATE: 2019 Jun. 13. |
| 1942-1943 | Ga0207156_10850 \| GENOME_ACESSION: Alteio_BWMinHeat_179_$F_3300020942 GENOME_ID: |
| | 22706 CONTIG_ID: 849 SOURCE: JGI DATE: 2019 Jan. 27. |
| 1944-1945 | Ga0187869_10014458 \| GENOME_ACESSION: June2016WEW_13_1_4_$F_3300018030 |
| | GENOME_ID: 30392 CONTIG_ID: 14457 SOURCE: JGI DATE: 2019 Jan. 27. |
| 1946-1947 | Ga0207639_10055049 \| GENOME_ACESSION: KBSCorC32SPAdes_$F_3300026041 GENOME_ID: |
| | 30472 CONTIG_ID: 55048 SOURCE: JGI DATE: 2019 Jan. 27. |
| 1948-1949 | Ga0315282_10012226 \| GENOME_ACESSION: YL17G07_20_MG_2_$F_3300032069 GENOME_ID: |
| | 281633 CONTIG_ID: 12225 SOURCE: JGI DATE: 2019 Jun. 13. |
| 1950-1951 | Ga0395714_000473 \| GENOME_ACESSION: 712E3XmetaG_FD_$F_3300037225 GENOME_ID: |
| | 312105 CONTIG_ID: 472 SOURCE: JGI DATE: 2020 Apr. 07. |
| 1952-1953 | Ga0137369_10007808 \| GENOME_ACESSION: SagtaG_48_$F_3300012355 GENOME_ID: 35435 |
| | CONTIG_ID: 7807 SOURCE: JGI DATE: 2019 Jan. 27. |
| 1954-1955 | human gut metagenome genome assembly, contig: NODE_4586_length_3121_cov_1.805284, whole |
| | genome shotgun sequence \| GENOME_ACESSION: OHFR01.1 GENOME_ID: 4996 CONTIG_ID: |
| | 4585 SOURCE: WGS DATE: 2019 Jan. 27. |
| 1956-1957 | human gut metagenome genome assembly, contig: NODE_15547_length_4308_cov_2.449800, whole |
| | genome shotgun sequence \| GENOME_ACESSION: OIXA01.1 GENOME_ID: 6111 CONTIG_ID: |
| | 15546 SOURCE: WGS DATE: 2019 Jan. 27. |
| 1958-1959 | Succinivibrio dextrinosolvens strain Z6 chromosome, complete genome \| GENOME_ACESSION: |
| | GCA_011065405.1_ASM1106540v1_genomic GENOME_ID: 327272 CONTIG_ID: 0 SOURCE: |
| | NCBI_Prokaryotes DATE: 2020 Apr. 22 |
| 1960-1961 | Ga0311329_10041539 \| GENOME_ACESSION: I_Bbly_$F_3300029907 GENOME_ID: 280532 |
| | CONTIG_ID: 41538 SOURCE: JGI DATE: 2019 Jun. 13. |
| 1962-1963 | Ga0210051_1023303 \| GENOME_ACESSION: CryGey14_aSPAdes_2_$F_3300025868 GENOME_ID: |
| | 280081 CONTIG_ID: 23302 SOURCE: JGI DATE: 2019 Jun. 13. |
| 1964-1965 | Ga0307377_10002004 \| GENOME_ACESSION: TR3MG_2_$F_3300031673 GENOME_ID: 281015 |
| | CONTIG_ID: 2003 SOURCE: JGI DATE: 2019 Jun. 13. |
| 1966-1967 | Ga0182238_1001861 \| GENOME_ACESSION: hydfrates6_PW_90_2_$F_3300017922 GENOME_ID: |
| | 37711 CONTIG_ID: 1860 SOURCE: JGI DATE: 2019 Jan. 27. |
| 1968-1969 | human gut metagenome genome assembly, contig: NODE_3471_length_5924_cov_5.665020, whole |
| | genome shotgun sequence \| GENOME_ACESSION: UAOQ01.1 GENOME_ID: 14977 CONTIG_ID: |
| | 3470 SOURCE: WGS DATE: 2019 Jan. 27. |
| 1970-1971 | TPA_asm: Richelia sp. UBA3308 UBA3308_contig_795, whole genome shotgun sequence \| |
| | GENOME_ACESSION: GCA_002361335.1_ASM236133v1_genomic GENOME_ID: 133139 |
| | CONTIG_ID: 369 SOURCE: NCBI_Prokaryotes DATE: 2019 Jan. 27. |
| 1972-1973 | Ga0119972_1000501 \| GENOME_ACESSION: 3300013759 GENOME_ID: 240406 CONTIG_ID: 170 |
| | SOURCE: JGI_Dark_Harvest DATE: 2019 Jan. 27. |
| 1974-1975 | SL_8KL_010_SEDDRAFT_10003558 \| GENOME_ACESSION: |
| | SodLakKL_010_SED_6_$F_3300000557 GENOME_ID: 35611 CONTIG_ID: 3557 SOURCE: JGI |
| | DATE: 2019 Jan. 27. |
| 1976-1977 | Ga0255345_1030292 \| GENOME_ACESSION: wastewater_treat_10_$F_3300028568 GENOME_ID: |
| | 281791 CONTIG_ID: 30291 SOURCE: JGI DATE: 2019 Jun. 13. |
| 1978-1979 | Ga0172372_10005216 \| GENOME_ACESSION: LakKiv5m_4_$F_3300013132 GENOME_ID: 31123 |
| | CONTIG_ID: 5215 SOURCE: JGI DATE: 2019 Jan. 27. |
| 1980-1981 | Ga0334826_004099 \| GENOME_ACESSION: 713E3X2metaG_FD_$F_3300036886 GENOME_ID: |
| | 311349 CONTIG_ID: 4098 SOURCE: JGI DATE: 2020 Apr. 07. |
| 1982-1983 | Ga0310786_10002951 \| GENOME_ACESSION: AusTroGonzalMGv2_3_$F_3300031998 |
| | GENOME_ID: 279931 CONTIG_ID: 2950 SOURCE: JGI DATE: 2019 Jun. 13. |
| 1984-1985 | Ga0393278_0000470 \| GENOME_ACESSION: LZ_38metaG_FD_$F_3300036985 GENOME_ID: |
| | 312543 CONTIG_ID: 469 SOURCE: JGI DATE: 2020 Apr. 07. |
| 1986-1987 | Ga0207870_100010 \| GENOME_ACESSION: CeladaP60BSPAdes_$F_3300027319 GENOME_ID: |
| | 24472 CONTIG_ID: 9 SOURCE: JGI DATE: 2019 Jan. 27. |
| 1988-1989 | Ga0224415_10011456 \| GENOME_ACESSION: 3300021399 GENOME_ID: 241587 CONTIG_ID: |
| | 10807 SOURCE: JGI_Dark_Harvest DATE: 2019 Jan. 27. |
| 1990-1991 | Nocardiopsis sp. JB363 genome assembly, contig: Scaffold2, whole genome shotgun sequence \| |
| | GENOME_ACESSION: GCA_900143625.1_ASM90014362v1_genomic GENOME_ID: 187582 |
| | CONTIG_ID: 161 SOURCE: NCBI_Prokaryotes DATE: 2019 Jan. 27. |
| 1992-1993 | Ga0118657_10064171 \| GENOME_ACESSION: IMG_3300009506_$F_3300009506 GENOME_ID: |
| | 312509 CONTIG_ID: 64170 SOURCE: JGI DATE: 2020 Apr. 07. |
| 1994-1995 | Ga0120401_1023611 \| GENOME_ACESSION: IMG_3300009431_$F_3300009431 GENOME_ID: |
| | 305927 CONTIG_ID: 23610 SOURCE: JGI DATE: 2019 Nov. 15. |
| 1996-1997 | human gut metagenome genome assembly, contig: NODE_564_length_37814_cov_32.665907, whole |
| | genome shotgun sequence \| GENOME_ACESSION: OHAC01.1 GENOME_ID: 4852 CONTIG_ID: 563 |
| | SOURCE: WGS DATE: 2019 Jan. 27. |
| 1998-1999 | Ga0392328_0075420 \| GENOME_ACESSION: OC_3500m_C2_20cm_FD_$F_3300037245 |
| | GENOME_ID: 312580 CONTIG_ID: 75419 SOURCE: JGI DATE: 2020 Apr. 07. |
| 2000-2001 | Ga0207193_1000100 \| GENOME_ACESSION: IMG_3300020048_$F_3300020048 GENOME_ID: |
| | 30012 CONTIG_ID: 99 SOURCE: JGI DATE: 2019 Jan. 27. |

[0143] Further example IscB polypeptides that may be used in the composition embodiments disclosed herein are set forth in Table 1B.

Lengthy table referenced here
US20260117211A1-20260430-T00001
Please refer to the end of the specification for access instructions.

[0144] Further example IscB polypeptides that may be used in the composition embodiments disclosed herein are set forth in Tables 1C to 1E.

TABLE 1C
IscB polypeptides with inactive RuvC domain

| SEQ ID | |
|---|---|
| NO: | Description |
| 24525 | human gut metagenome genome assembly contig: |
| | NODE_7770_length_3007_cov_3.922764 whole |
| | genome shotgun sequence |
| 24526 | Scytonema hofmannii PCC 7110 genomic scaffold |
| | Scaffold1 whole genome shotgun |
| | sequence3211432 |
| 24527 | Scytonema hofmannii PCC 7110 genomic scaffold |
| | Scaffold1 whole genome shotgun |
| | sequence1607544 |
| 24528 | Scytonema hofmannii PCC 7110 genomic scaffold |
| | Scaffold1 whole genome shotgun |
| | sequence9135883 |
| 24529 | Scytonema hofmannii PCC 7110 genomic scaffold |
| | Scaffold1 whole genome shotgun |
| | sequence5279466 |
| 24530 | Scytonema hofmannii PCC 7110 genomic scaffold |
| | Scaffold1 whole genome shotgun |
| | sequence7380091 |
| 24531 | human gut metagenome genome assembly contig: |
| | NODE_1574_length_16343_cov_4.624386 whole |
| | genome shotgun sequence |
| 24532 | human gut metagenome genome assembly contig: |
| | scaffold7032_16 whole genome shotgun sequence |
| 24533 | Tolypothrix bouteillei VB521301 |
| | NODE_1_length_9494340_cov_10.278967 whole |
| | genome shotgun sequence3523150 |
| 24534 | human gut metagenome genome assembly contig: |
| | NODE_3635_length_10780_cov_6.105082 whole |
| | genome shotgun sequence |
| 24535 | Lactobacillus salivarius NIAS840 84_2 whole |
| | genome shotgun sequence49040 |
| 24536 | Lactobacillus equi DSM 15833 = JCM 10991 |
| | strain DSM 15833 NODE_13 whole genome |
| | shotgun sequence58183 |
| 24537 | human gut metagenome genome assembly contig: |
| | NODE_1904_length_9995_cov_3.712777 whole |
| | genome shotgun sequence |
| 24538 | human gut metagenome genome assembly contig: |
| | NODE_1482_length_12347_cov_1.714937 whole |
| | genome shotgun sequence |
| 24539 | Ligilactobacillus agilis strain UMNLA3 |
| | Lagilis08E9S1LR1contig74 whole genome |
| | shotgun sequence70 |
| 24540 | human gut metagenome genome assembly contig: |
| | NODE_6315_length_2806_cov_2.321701 whole |
| | genome shotgun sequence |
| 24541 | human gut metagenome genome assembly contig: |
| | NODE_1613_length_4566_cov_3.468411 whole |
| | genome shotgun sequence |
| 24542 | Acidithiobacillus ferrivorans isolate PRJEB5721 |
| | genome assembly chromosome: AFERRI657657 |
| 24543 | human gut metagenome genome assembly contig: |
| | NODE_6198_length_8350_cov_2.430500 whole |
| | genome shotgun sequence |
| 24544 | Sporosarcina sp. BP05 1 whole genome shotgun |
| | sequence24196 |
| 24545 | gut metagenome genome assembly P19E0-k21- |
| | 2014-09-20 contig contig-19000113 whole |
| | genome shotgun sequence |
| 24546 | Acidiferrobacter thiooxydans strain m-1 Contig2 |
| | whole genome shotgun sequence647573 |
| 24547 | human gut metagenome genome assembly contig: |
| | NODE_634_length 39579_cov_6.358159 whole |
| | genome shotgun sequence |
| 24548 | Lactobacillus sp. UMNPBX9 |
| | NODE_22_length_31946_cov_152.232 whole |
| | genome shotgun sequence29285 |
| 24549 | human gut metagenome genome assembly contig: |
| | NODE_4795_length_7649_cov_6.323940 whole |
| | genome shotgun sequence |
| 24550 | Methylacidimicrobium cyclopophantes isolate 3B |
| | genome assembly contig: MAMC_163 whole |
| | genome shotgun sequence |
| 24551 | Alicyclobacillus sendaiensis NBRC 100866 DNA |
| | contig: AS26_CON0053_0001 whole genome |
| | shotgun sequence |
| 24552 | human gut metagenome genome assembly contig: |
| | NODE_58_length_105482_cov_12.118158 whole |
| | genome shotgun sequence |
| 24553 | Acidithiobacillus ferrivorans WGS project |
| | CCCS000000000 data strain CF27 contig |
| | ATN_AFERRI_Contig_8 |
| 24554 | Sinimarinibacterium sp. NLF-5-8 chromosome |
| | complete genome486508 |
| 24555 | Acidiferrobacter thiooxydans strain m-1 Contig2 |
| | whole genome shotgun sequence647573 |
| 24556 | human gut metagenome genome assembly contig: |
| | scaffold73510_26 whole genome shotgun |
| | sequence |
| 24557 | human gut metagenome genome assembly contig: |
| | NODE_508_length_15698_cov_5.493256 whole |
| | genome shotgun sequence |
| 24558 | Lactobacillus equi DPC 6820 NODE_18 whole |
| | genome shotgun sequence30162 |
| 24559 | human gut metagenome genome assembly contig: |
| | NODE_14924_length_3267_cov_3.486520 whole |
| | genome shotgun sequence |
| 24560 | Verrucomicrobium sp. 3C genomic scaffold |
| | A37ADRAFT_scaffold1.1 whole genome shotgun |
| | sequence100301 |
| 24561 | TPA asm: Bacteroidales bacterium UBA3764 |
| | UBA3764_contig_15563 whole genome shotgun |
| | sequence13285 |
| 24562 | Alicyclobacillus acidocaldarius subsp. |
| | acidocaldarius DSM 446 complete |
| | genome1554174 |
| 24563 | Sutterella sp. KGMB03119 chromosome complete |
| | genome1455941 |
| 24564 | human gut metagenome genome assembly contig: |
| | NODE_183_length_78903_cov_7.593281 whole |
| | genome shotgun sequence |
| 24565 | gut metagenome genome assembly P14E7-k21- |
| | 2014-09-20 contig contig-318000017 whole |
| | genome shotgun sequence |
| 24566 | marine sediment metagenome genome assembly |
| | contig: NODE_976_length_6330_cov_27.563825 |
| | whole genome shotgun sequence |
| 24567 | human gut metagenome genome assembly contig: |
| | NODE_614_length_18108_cov_6.940398 whole |
| | genome shotgun sequence |
| 24568 | gut metagenome genome assembly P25C90-k21- |
| | 2014-09-20 contig contig-3508000039 whole |
| | genome shotgun sequence |
| 24569 | Lactococcus sp. 1JSPR-7 chromosome complete |
| | genome222662 |
| 24570 | Ligilactobacillus salivarius strain KLA002 |
| | NODE_4_length_103341_cov_3.69188 ID 7117 |
| | whole genome shotgun sequence81974 |
| 24571 | Acidithiobacillus ferrooxidans strain BY0502 |
| | contig013 whole genome shotgun sequence60432 |
| 24572 | Candidatus Methyloumidiphilus alinensis isolate |
| | AMbin10 contig31179 whole genome shotgun |
| | sequence1568 |
| 24573 | human gut metagenome genome assembly contig: |
| | NODE_6_length_339981_cov_10.284268 whole |
| | genome shotgun sequence |
| 24574 | Verrucomicrobium sp. 3C genomic scaffold |
| | A37ADRAFT scaffold1.1 whole genome shotgun |
| | sequence87840 |
| 24575 | Lactobacillus salivarius strain KLA004 |
| | NODE_3_length_99083_cov_5.05067_ID_8131 |
| | whole genome shotgun sequence34851 |
| 24576 | human gut metagenome genome assembly contig: |
| | NODE_51_length_52795_cov_7.201384 whole |
| | genome shotgun sequence |
| 24577 | Scytonema sp. UIC 10036 c00014_NODE_14 . . . |
| | whole genome shotgun sequence11375 |
| 24578 | human gut metagenome genome assembly contig: |
| | NODE_546_length_38851_cov_10.608284 whole |
| | genome shotgun sequence |
| 24579 | gut metagenome genome assembly P19E90-k21- |
| | 2014-09-20 contig contig-5000101 whole genome |
| | shotgun sequence |
| 24580 | Verrucomicrobium sp. 3C |
| | A37ADRAFT_scaffold1.1_C4 whole genome |
| | shotgun sequence44327 |
| 24581 | human gut metagenome genome assembly contig: |
| | NODE_339_length_42138_cov_105.547917 |
| | whole genome shotgun sequence |
| 24582 | Ligilactobacillus salivarius strain KLA001 |
| | NODE_16_length_41111_cov_4.45492_ID_7011 |
| | whole genome shotgun sequence 19304 |
| 24583 | human gut metagenome genome assembly contig: |
| | NODE_2785_length_7379_cov_4.727471 whole |
| | genome shotgun sequence |
| 24584 | human gut metagenome genome assembly contig: |
| | NODE_6847_length_6039_cov_3.438670 whole |
| | genome shotgun sequence |
| 24585 | human metagenome genome assembly contig: |
| | NODE_2167_length_8607_cov_7.68487 whole |
| | genome shotgun sequence |
| 24586 | human gut metagenome genome assembly contig: |
| | NODE_29_length_177619_cov_16.825415 whole |
| | genome shotgun sequence |
| 24587 | human gut metagenome genome assembly contig: |
| | NODE_65_length_76179_cov_8.159161 whole |
| | genome shotgun sequence |
| 24588 | human gut metagenome genome assembly contig: |
| | NODE_476_length_51540_cov_18.954686 whole |
| | genome shotgun sequence |
| 24589 | metagenome genome assembly contig: |
| | NODE_750_length_12199_cov_3.450181 whole |
| | genome shotgun sequence |
| 24590 | human gut metagenome genome assembly contig: |
| | NODE_9765_length_3381_cov_2.655569 whole |
| | genome shotgun sequence |
| 24591 | human gut metagenome genome assembly contig: |
| | NODE_3_length_148943_cov_7.939485 whole |
| | genome shotgun sequence |
| 24592 | Lactobacillus equi DSM 15833 = JCM 10991 |
| | DNA contig: JCM10991.contig00062 whole |
| | genome shotgun sequence |
| 24593 | Microcoleus chthonoplastes PCC 7420 |
| | scf 1103659003793 genomic scaffold whole |
| | genome shotgun sequence230910 |
| 24594 | human gut metagenome genome assembly contig: |
| | scaffold93765_1 whole genome shotgun sequence |
| 24595 | human gut metagenome genome assembly contig: |
| | NODE_20_length_126548_cov_9.799799 whole |
| | genome shotgun sequence |
| 24596 | human gut metagenome genome assembly contig: |
| | NODE_4209_length_4046_cov_2.370370 whole |
| | genome shotgun sequence |
| 24597 | human gut metagenome genome assembly contig: |
| | NODE_5808_length_6868_cov_3.589461 whole |
| | genome shotgun sequence |
| 24598 | human gut metagenome genome assembly contig: |
| | NODE_176_length_45656_cov_51.017815 whole |
| | genome shotgun sequence |
| 24599 | Lactobacillus equi DPC 6820 NODE_18 whole |
| | genome shotgun sequence30162 |
| 24600 | human gut metagenome genome assembly contig: |
| | NODE_168_length 45735_cov_6.549650 whole |
| | genome shotgun sequence |
| 24601 | human gut metagenome genome assembly contig: |
| | NODE_1948_length_7968_cov_2.369013 whole |
| | genome shotgun sequence |
| 24602 | human gut metagenome genome assembly contig: |
| | NODE_865_length_24896_cov_5.321646 whole |
| | genome shotgun sequence |
| 24603 | Lactobacillus salivarius NIAS840 84 2 whole |
| | genome shotgun sequence68282 |
| 24604 | human gut metagenome genome assembly contig: |
| | NODE_3054_length_3662_cov_1.598884 whole |
| | genome shotgun sequence |
| 24605 | human gut metagenome genome assembly contig: |
| | NODE_3160_length_7200_cov_4.127082 whole |
| | genome shotgun sequence |
| 24606 | human gut metagenome genome assembly contig: |
| | NODE_2969_length_15316_cov_3.427757 whole |
| | genome shotgun sequence |
| 24607 | human gut metagenome genome assembly contig: |
| | NODE_5339_length_4106_cov_3.087139 whole |
| | genome shotgun sequence |
| 24608 | human gut metagenome genome assembly contig: |
| | NODE_4222_length_3039_cov_4.211461 whole |
| | genome shotgun sequence |
| 24609 | human gut metagenome genome assembly contig: |
| | NODE_5300_length_6107_cov_2.599306 whole |
| | genome shotgun sequence |
| 24610 | human gut metagenome genome assembly contig: |
| | NODE_7019_length_4308_cov_9.343287 whole |
| | genome shotgun sequence |
| 24611 | human gut metagenome genome assembly contig: |
| | scaffold157556_4 whole genome shotgun |
| | sequence |
| 24612 | human gut metagenome genome assembly contig: |
| | NODE_8074_length_4764_cov_3.069866 whole |
| | genome shotgun sequence |
| 24613 | uncultured Microcoleus sp. isolate |
| | AVDCRST_MAG84 genome assembly contig: |
| | NODE1090 whole genome shotgun sequence |
| 24614 | human gut metagenome genome assembly contig: |
| | NODE_288_length_15729_cov_5.804581 whole |
| | genome shotgun sequence |
| 24615 | human gut metagenome genome assembly contig: |
| | scaffold37883_6 whole genome shotgun sequence |
| 24616 | Scytonema hofmannii PCC 7110 Scaffold1_13 |
| | whole genome shotgun sequence542012 |
| 24617 | human gut metagenome genome assembly contig: |
| | NODE_8_length_241752_cov_10.426046 whole |
| | genome shotgun sequence |
| 24618 | human gut metagenome genome assembly contig: |
| | NODE_11291_length_3007_cov_1.681572 whole |
| | genome shotgun sequence |
| 24619 | Alicyclobacillus sendaiensis NBRC 100866 DNA |
| | contig: AS26_CON0053_0001 whole genome |
| | shotgun sequence |
| 24620 | human gut metagenome genome assembly contig: |
| | NODE_3303_length_10135_cov_36.084609 |
| | whole genome shotgun sequence |
| 24621 | human gut metagenome genome assembly contig: |
| | NODE_4999_length_11137_cov_29.963364 |
| | whole genome shotgun sequence |
| 24622 | Candidate divison MSBL1 archaeon SCGC- |
| | AAA382M17 AAA382M17_Contig_8_C whole |
| | genome shotgun sequence7719 |
| 24623 | human gut metagenome genome assembly contig: |
| | NODE_1542_length_22598_cov_7.323382 whole |
| | genome shotgun sequence |
| 24624 | Thermoplasmata archaeon isolate B1Sed10_34 |
| | B1-Sed10-C64554 whole genome shotgun |
| | sequence341 |
| 24625 | human gut metagenome genome assembly contig: |
| | NODE_9187_length_3798_cov_2.433075 whole |
| | genome shotgun sequence |
| 24626 | human gut metagenome genome assembly contig: |
| | scaffold113229_3 whole genome shotgun |
| | sequence |
| 24627 | human gut metagenome genome assembly contig: |
| | NODE_3_length_401351_cov_33.784217 whole |
| | genome shotgun sequence |
| 24628 | metagenome genome assembly contig: |
| | NODE_24_length_153736_cov_6.399789 whole |
| | genome shotgun sequence |
| 24629 | human gut metagenome genome assembly contig: |
| | NODE_2249_length_5207_cov_0.916343 whole |
| | genome shotgun sequence |
| 24630 | human gut metagenome genome assembly contig: |
| | NODE_2741_length 8899_cov_3.879240 whole |
| | genome shotgun sequence |
| 24631 | Ligilactobacillus salivarius strain KLA002 |
| | NODE_4_length_103341_cov_3.69188_ID_7117 |
| | whole genome shotgun sequence66522 |
| 24632 | human gut metagenome genome assembly contig: |
| | NODE_525_length_41212_cov_8.792964 whole |
| | genome shotgun sequence |
| 24633 | human gut metagenome genome assembly contig: |
| | NODE_367_length_53306_cov_19.287901 whole |
| | genome shotgun sequence |
| 24634 | human gut metagenome genome assembly contig: |
| | NODE_84_length_151147_cov_6.093142 whole |
| | genome shotgun sequence |
| 24635 | Alicyclobacillus acidocaldarius LAA1 ctg64 whole |
| | genome shotgun sequence11295 |
| 24636 | human gut metagenome genome assembly contig: |
| | NODE_236_length_47187_cov_5.091848 whole |
| | genome shotgun sequence |
| 24637 | Acidobacteria bacterium isolate CO36386bin 12 |
| | NODE_228_length_71841_cov_20.841640 whole |
| | genome shotgun sequence22313 |
| 24638 | human gut metagenome genome assembly contig: |
| | NODE_27_length_152971_cov_34.834628 whole |
| | genome shotgun sequence |
| 24639 | human gut metagenome genome assembly contig: |
| | NODE_2944_length_4354_cov_2.913933 whole |
| | genome shotgun sequence |
| 24640 | human gut metagenome genome assembly contig: |
| | NODE_2035_length_19019_cov_5.971578 whole |
| | genome shotgun sequence |
| 24641 | Lactobacillus equi DSM 15833 = JCM 10991 |
| | DNA contig: JCM10991.contig00003 whole |
| | genome shotgun sequence |
| 24642 | Scytonema sp. UIC 10036 c00098_NODE_98 . . . |
| | whole genome shotgun sequence61676 |
| 24643 | human gut metagenome genome assembly contig: |
| | NODE_513_length_35882_cov_4.145393 whole |
| | genome shotgun sequence |
| 24644 | human gut metagenome genome assembly contig: |
| | NODE_575_length 25613_cov_4.265279 whole |
| | genome shotgun sequence |
| 24645 | Lactobacillus salivarius strain KLA006 |
| | NODE_18_length_41119_cov_4.56228_ID_9465 |
| | whole genome shotgun sequence5004 |
| 24646 | human gut metagenome genome assembly contig: |
| | NODE_10432_length_5581_cov_2.986192 whole |
| | genome shotgun sequence |
| 24647 | Alicyclobacillus acidocaldarius LAA1 ctg64 whole |
| | genome shotgun sequence11295 |
| 24648 | human gut metagenome genome assembly contig: |
| | NODE_500_length 30854_cov_12.0807 whole |
| | genome shotgun sequence |
| 24649 | Lactobacillus salivarius strain KLW001 |
| | NODE_70_length_6520_cov_0.165603_ID 9537 |
| | whole genome shotgun sequence5439 |
| 24650 | human gut metagenome genome assembly contig: |
| | scaffold16503_1 whole genome shotgun sequence |
| 24651 | human gut metagenome genome assembly contig: |
| | NODE_4343_length_3712_cov_3.46049 whole |
| | genome shotgun sequence |
| 24652 | human gut metagenome genome assembly contig: |
| | scaffold29835_1 whole genome shotgun sequence |
| 24653 | human gut metagenome genome assembly contig: |
| | NODE_839_length_14581_cov_6.925100 whole |
| | genome shotgun sequence |
| 24654 | human gut metagenome genome assembly contig: |
| | scaffold4689_22 whole genome shotgun sequence |
| 24655 | Lactobacillus agilis strain UMNLA2 |
| | Lagilis10C3S6LR1contig74 whole genome |
| | shotgun sequence11508 |
| 24656 | human gut metagenome genome assembly contig: |
| | NODE_495_length_58043_cov_14.810423 whole |
| | genome shotgun sequence |
| 24657 | human gut metagenome genome assembly contig: |
| | NODE_7870_length_5887_cov_3.387860 whole |
| | genome shotgun sequence |
| 24658 | human gut metagenome genome assembly contig: |
| | NODE_6359_length_6275_cov_2.053859 whole |
| | genome shotgun sequence |
| 24659 | human gut metagenome genome assembly contig: |
| | NODE_25_length_132448_cov_16.478560 whole |
| | genome shotgun sequence |
| 24660 | human gut metagenome genome assembly contig: |
| | NODE_123_length_71791_cov_19.663865 whole |
| | genome shotgun sequence |
| 24661 | human gut metagenome genome assembly contig: |
| | NODE_102_length_106074_cov_7.312999 whole |
| | genome shotgun sequence |
| 24662 | TPA asm: uncultured Sutterella sp. isolate |
| | HGM19495 genome assembly contig: |
| | SRS049896_48_k99_111144 whole genome |
| | shotgun sequence |
| 24663 | Acidobacteria bacterium isolate CO36386bin 12 |
| | NODE_228_length_71841_cov_20.841640 whole |
| | genome shotgun sequence26280 |
| 24664 | human gut metagenome genome assembly contig: |
| | scaffold43195_1 whole genome shotgun sequence |
| 24665 | human gut metagenome genome assembly contig: |
| | NODE_857_length_24911_cov_3.830986 whole |
| | genome shotgun sequence |
| 24666 | Lactobacillus salivarius strain KLA006 |
| | NODE_18_length 41119_cov_4.56228_ID_9465 |
| | whole genome shotgun sequence20456 |
| 24667 | Bacterium BMS3Bbin13 DNA contig: NODE_15 |
| | whole genome shotgun sequence |
| 24668 | human gut metagenome genome assembly contig: |
| | NODE_1025_length_10719_cov_4.621999 whole |
| | genome shotgun sequence |
| 24669 | Streptomyces sp. NEAU-C40 Scaffold109 whole |
| | genome shotgun sequence13101 |
| 24670 | human gut metagenome genome assembly contig: |
| | scaffold91964_1 whole genome shotgun sequence |
| 24671 | Ligilactobacillus salivarius strain KLA005 |
| | NODE_4_length_87167_cov_4.94497_ID_7114 |
| | whole genome shotgun sequence20456 |
| 24672 | human gut metagenome genome assembly contig: |
| | NODE_5039_length_5609_cov_2.917177 whole |
| | genome shotgun sequence |
| 24673 | human gut metagenome genome assembly contig: |
| | NODE_4365_length_5725_cov_4.523280 whole |
| | genome shotgun sequence |
| 24674 | Symploca sp. SIO1C4 1C4_NODE_331 whole |
| | genome shotgun sequence4252 |
| 24675 | human gut metagenome genome assembly contig: |
| | scaffold54746_5 whole genome shotgun sequence |
| 24676 | Mine drainage metagenome contig00009 whole |
| | genome shotgun sequence1972 |
| 24677 | human gut metagenome genome assembly contig: |
| | NODE_554_length_42643_cov_8.370550 whole |
| | genome shotgun sequence |
| 24678 | human gut metagenome genome assembly contig: |
| | NODE_4110_length_8937_cov_4.706260 whole |
| | genome shotgun sequence |
| 24679 | Thermoplasmata archaeon isolate T1Sed10_8R1 |
| | T1-Sed10-C830 whole genome shotgun |
| | sequence18830 |
| 24680 | metagenome genome assembly contig: |
| | NODE_82_length_102634_cov_8.895002 whole |
| | genome shotgun sequence |
| 24681 | human gut metagenome genome assembly contig: |
| | NODE_547_length_18272_cov_3.747183 whole |
| | genome shotgun sequence |
| 24682 | human gut metagenome genome assembly contig: |
| | NODE_115_length_65478_cov_21.973318 whole |
| | genome shotgun sequence |
| 24683 | Scytonema hofmannii PCC 7110 Scaffold1_30 |
| | whole genome shotgun sequence15809 |
| 24684 | human gut metagenome genome assembly contig: |
| | NODE_445_length_43992_cov_8.296220 whole |
| | genome shotgun sequence |
| 24685 | human gut metagenome genome assembly contig: |
| | NODE_621_length_25902_cov_19.039652 whole |
| | genome shotgun sequence |
| 24686 | human gut metagenome genome assembly contig: |
| | NODE_737_length_22694_cov_2.436901 whole |
| | genome shotgun sequence |
| 24687 | metagenome genome assembly contig: |
| | NODE_98_length_36639_cov_5.051006 whole |
| | genome shotgun sequence |
| 24688 | uncultured Sutterella sp. isolate UMGS757 |
| | genome assembly contig: |
| | NODE_16_length_182757_cov_9.623770 whole |
| | genome shotgun sequence |
| 24689 | Lactobacillus salivarius strain KLA001 |
| | NODE_16_length_41111_cov_4.45492_ID_7011 |
| | whole genome shotgun sequence34864 |
| 24690 | human gut metagenome genome assembly contig: |
| | NODE_88_length_119413_cov_14.411895 whole |
| | genome shotgun sequence |
| 24691 | Scytonema hofmannii PCC 7110 Scaffold1_37 |
| | whole genome shotgun sequence344551 |
| 24692 | human gut metagenome genome assembly contig: |
| | NODE_2342_length_5243_cov_1.349075 whole |
| | genome shotgun sequence |
| 24693 | Lactobacillus salivarius NIAS840 84_2 whole |
| | genome shotgun sequence68282 |
| 24694 | human gut metagenome genome assembly contig: |
| | NODE_579_length_20796_cov_4.972132 whole |
| | genome shotgun sequence |
| 24695 | Lactobacillus agilis strain SW282 whole genome |
| | shotgun sequence16112 |
| 24696 | uncultured Methylococcaceae bacterium isolate |
| | LinL3_bin-1115 genome assembly contig: bin- |
| | 1115:546/686 whole genome shotgun sequence |
| 24697 | Sutterella sp. KLE1602 genomic scaffold |
| | Scaffold405 whole genome shotgun sequence2 |
| 24698 | human gut metagenome genome assembly contig: |
| | NODE_1292_length_12001_cov_4.121128 whole |
| | genome shotgun sequence |
| 24699 | Viral metagenome |
| | NODE_334_length_100680_cov_16.2094 whole |
| | genome shotgun sequence25697 |
| 24700 | Ligilactobacillus agilis strain UMNLA8 |
| | agilis8I7S4LR1contig104 whole genome shotgun |
| | sequence70 |
| 24701 | human gut metagenome genome assembly contig: |
| | NODE_536_length_25675_cov_6.130445 whole |
| | genome shotgun sequence |
| 24702 | human gut metagenome genome assembly contig: |
| | NODE_3993_length_6520_cov_5.314617 whole |
| | genome shotgun sequence |
| 24703 | human gut metagenome genome assembly contig: |
| | NODE_68_length_106077_cov_6.214691 whole |
| | genome shotgun sequence |
| 24704 | Lactobacillus salivarius NIAS840 84_2 whole |
| | genome shotgun sequence49040 |
| 24705 | human gut metagenome genome assembly contig: |
| | NODE_150_length_70697_cov_22.362051 whole |
| | genome shotgun sequence |
| 24706 | human gut metagenome genome assembly contig: |
| | NODE_7_length_245666_cov_16.936102 whole |
| | genome shotgun sequence |
| 24707 | human gut metagenome genome assembly contig: |
| | scaffold14838_9 whole genome shotgun sequence |
| 24708 | human gut metagenome genome assembly contig: |
| | NODE_4526_length_7151_cov_2.890020 whole |
| | genome shotgun sequence |
| 24709 | Acidithiobacillus ferrivorans WGS project |
| | CCCS000000000 data strain CF27 contig |
| | ATN AFERRI Contig_8 |
| 24710 | human gut metagenome genome assembly contig: |
| | NODE_551_length_25675_cov_8.799610 whole |
| | genome shotgun sequence |
| 24711 | Lactobacillus salivarius strain KLA003 |
| | NODE_14_length_41813_cov_3.96675_ID 6619 |
| | whole genome shotgun sequence4994 |
| 24712 | human gut metagenome genome assembly contig: |
| | NODE_151_length 93889_cov_12.809163 whole |
| | genome shotgun sequence |
| 24713 | Desulfofundulus thermobenzoicus strain DSM |
| | 14055 NODE_34_length_38097_cov_65.3887 |
| | whole genome shotgun sequence31357 |
| 24714 | human gut metagenome genome assembly contig: |
| | NODE_1961_length_13244_cov_7.475851 whole |
| | genome shotgun sequence |
| 24715 | human gut metagenome genome assembly contig: |
| | NODE_3495_length_7928_cov_3.221517 whole |
| | genome shotgun sequence |
| 24716 | human gut metagenome genome assembly contig: |
| | NODE_126_length_96485_cov_6.946427 whole |
| | genome shotgun sequence |
| 24717 | human gut metagenome genome assembly contig: |
| | NODE_2183_length_10114_cov_3.280942 whole |
| | genome shotgun sequence |
| 24718 | Scytonema hofmannii PCC 7110 Scaffold1_7 |
| | whole genome shotgun sequence241826 |
| 24719 | human gut metagenome genome assembly contig: |
| | NODE_1666_length_13118_cov_3.999311 whole |
| | genome shotgun sequence |
| 24720 | human gut metagenome genome assembly contig: |
| | NODE_611_length_25675_cov_8.540398 whole |
| | genome shotgun sequence |
| 24721 | human gut metagenome genome assembly contig: |
| | NODE_90_length_104766_cov_9.938421 whole |
| | genome shotgun sequence |
| 24722 | human gut metagenome genome assembly contig: |
| | NODE_2431_length_8165_cov_5.053268 whole |
| | genome shotgun sequence |
| 24723 | human gut metagenome genome assembly contig: |
| | NODE_238_length_56460_cov_6.717880 whole |
| | genome shotgun sequence |
| 24724 | human gut metagenome genome assembly contig: |
| | NODE_9740_length_3946_cov_4.858134 whole |
| | genome shotgun sequence |
| 24725 | Coleofasciculus chthonoplastes PCC 7420 |
| | ctg_1103659003711 whole genome shotgun |
| | sequence114338 |
| 24726 | human gut metagenome genome assembly contig: |
| | NODE_371_length_56431_cov_11.758887 whole |
| | genome shotgun sequence |
| 24727 | Ligilactobacillus salivarius strain KLA006 |
| | NODE_18_length_41119_cov_4.56228_ID_9465 |
| | whole genome shotgun sequence20456 |
| 24728 | human gut metagenome genome assembly contig: |
| | NODE_3698_length_9950_cov_3.014250 whole |
| | genome shotgun sequence |
| 24729 | Lactobacillus agilis strain UMNLA1 |
| | Lagilis10B1S5LR1contig98 whole genome |
| | shotgun sequence73 |
| 24730 | human gut metagenome genome assembly contig: |
| | NODE_3_length_401211_cov_20.767853 whole |
| | genome shotgun sequence |
| 24731 | human gut metagenome genome assembly contig: |
| | scaffold41377 8 whole genome shotgun sequence |
| 24732 | human gut metagenome genome assembly contig: |
| | NODE_472_length_25675_cov_12.059797 whole |
| | genome shotgun sequence |
| 24733 | Verrucomicrobium sp. 3C |
| | A37ADRAFT scaffold1.1_C4 whole genome |
| | shotgun sequence31866 |
| 24734 | human gut metagenome genome assembly contig: |
| | scaffold105917_12 whole genome shotgun |
| | sequence |
| 24735 | human gut metagenome genome assembly contig: |
| | NODE_2085_length_15256_cov_3.161634 whole |
| | genome shotgun sequence |
| 24736 | human gut metagenome genome assembly contig: |
| | NODE_16693_length_3120_cov_1.619250 whole |
| | genome shotgun sequence |
| 24737 | Bacillus fastidiosus NBRC 101226 DNA contig: |
| | BFA01S_CON0058_0001 whole genome shotgun |
| | sequence |
| 24738 | human gut metagenome genome assembly contig: |
| | NODE_269_length_25313_cov_5.366656 whole |
| | genome shotgun sequence |
| 24739 | Ga0315284_10064466 |
| 24740 | metagenome genome assembly contig: |
| | NODE_2827_length_3392_cov_3.841774 whole |
| | genome shotgun sequence |
| 24741 | Lactobacillus salivarius strain KLA001 |
| | NODE_16_length_41111_cov_4.45492_ID_7011 |
| | whole genome shotgun sequence19304 |
| 24742 | human metagenome genome assembly contig: |
| | NODE_6068_length_4038_cov_6.87798 whole |
| | genome shotgun sequence |
| 24743 | human gut metagenome genome assembly contig: |
| | NODE_486_length 49083_cov_5.365710 whole |
| | genome shotgun sequence |
| 24744 | gut metagenome genome assembly P19E7-k21- |
| | 2014-09-20 contig contig-18000017 whole |
| | genome shotgun sequence |
| 24745 | human gut metagenome genome assembly contig: |
| | NODE_2268_length 16551_cov_3.446411 whole |
| | genome shotgun sequence |
| 24746 | Anaerolineaceae bacterium 4572_78 |
| | ex4572_78 scaffold_3846 whole genome shotgun |
| | sequence6738 |
| 24747 | human gut metagenome genome assembly contig: |
| | scaffold53507_10 whole genome shotgun |
| | sequence |
| 24748 | human gut metagenome genome assembly contig: |
| | NODE_1733_length_10797_cov_2.640663 whole |
| | genome shotgun sequence |
| 24749 | gut metagenome genome assembly P7C7-k21- |
| | 2014-09-20 contig contig-1000048 whole genome |
| | shotgun sequence |
| 24750 | human gut metagenome genome assembly contig: |
| | NODE_5266_length_8097_cov_2.886347 whole |
| | genome shotgun sequence |
| 24751 | human gut metagenome genome assembly contig: |
| | NODE_11799_length_3826_cov_2.510803 whole |
| | genome shotgun sequence |
| 24752 | human gut metagenome genome assembly contig: |
| | scaffold26762_3 whole genome shotgun sequence |
| 24753 | human gut metagenome genome assembly contig: |
| | NODE_7776_length_3803_cov_3.060032 whole |
| | genome shotgun sequence |
| 24754 | human gut metagenome strain SKBSTL033 |
| | genome assembly contig: |
| | NODE_1033_length_3763_cov_4.575512 whole |
| | genome shotgun sequence |
| 24755 | human gut metagenome genome assembly contig: |
| | NODE_19_length_111995_cov_8.871020 whole |
| | genome shotgun sequence |
| 24756 | Ktedonobacteraceae bacterium isolate |
| | MGR_bin154 SD2897-2912_k127_528159 whole |
| | genome shotgun sequence2409 |
| 24757 | uncultured Methylococcaceae bacterium isolate |
| | AlinenSedimentsD1_bin-1930 genome assembly |
| | contig: bin-1930:0788/1548 whole genome |
| | shotgun sequence |
| 24758 | human gut metagenome genome assembly contig: |
| | NODE_11_length_78554_cov_7.466248 whole |
| | genome shotgun sequence |
| 24759 | human gut metagenome genome assembly contig: |
| | NODE_1760_length_13681_cov_22.333554 |
| | whole genome shotgun sequence |
| 24760 | uncultured Prevotellaceae bacterium isolate |
| | hRUG909 genome assembly contig: |
| | NODE_21412_length 5762_cov_7.30769 whole |
| | genome shotgun sequence |
| 24761 | uncultured Bacteroidia bacterium isolate |
| | RUG14924 genome assembly contig: |
| | RUG14924_asm_67 whole genome shotgun |
| | sequence |
| 24762 | uncultured Veillonellaceae bacterium isolate |
| | RUG043 genome assembly contig: scaffold_7508 |
| | whole genome shotgun sequence |
| 24763 | human gut metagenome genome assembly contig: |
| | NODE_742_length_40606_cov_9.242509 whole |
| | genome shotgun sequence |
| 24764 | Acidithiobacillus ferrooxidans strain BY0502 |
| | contig013 whole genome shotgun sequence60432 |
| 24765 | human gut metagenome genome assembly contig: |
| | NODE_1440_length_22467_cov_5.684457 whole |
| | genome shotgun sequence |
| 24766 | human gut metagenome genome assembly contig: |
| | NODE_5700_length_4395_cov_1.677650 whole |
| | genome shotgun sequence |
| 24767 | human gut metagenome genome assembly contig: |
| | NODE_42_length_73618_cov_6.8246 whole |
| | genome shotgun sequence |
| 24768 | human gut metagenome genome assembly contig: |
| | NODE_3689_length 6507_cov_2.519529 whole |
| | genome shotgun sequence |
| 24769 | Lactobacillus salivarius strain KLA002 |
| | NODE_4_length_103341_cov_3.69188_ID_7117 |
| | whole genome shotgun sequence66522 |
| 24770 | human gut metagenome genome assembly contig: |
| | scaffold26880_5 whole genome shotgun sequence |
| 24771 | Lactobacillus equi DSM 15833 = JCM 10991 |
| | DNA contig: JCM10991.contig00062 whole |
| | genome shotgun sequence |
| 24772 | Desulfofundulus thermobenzoicus strain DSM |
| | 14055 NODE_34_length_38097_cov_65.3887 |
| | whole genome shotgun sequence31357 |
| 24773 | human gut metagenome genome assembly contig: |
| | NODE_1012_length_12817_cov_5.200549 whole |
| | genome shotgun sequence |
| 24774 | metagenome genome assembly contig: |
| | NODE_3786_length_3708_cov_0.905283 whole |
| | genome shotgun sequence |
| 24775 | uncultured archaeon isolate |
| | AlinenSedimentsD2_bin-0393 genome assembly |
| | contig: bin-0393:0413/1030 whole genome |
| | shotgun sequence |
| 24776 | human gut metagenome genome assembly contig: |
| | NODE_397_length_55783_cov_11.189294 whole |
| | genome shotgun sequence |
| 24777 | human gut metagenome genome assembly contig: |
| | scaffold128039_3 whole genome shotgun |
| | sequence |
| 24778 | human gut metagenome genome assembly contig: |
| | NODE_1445_length_17912_cov_2.794198 whole |
| | genome shotgun sequence |
| 24779 | human gut metagenome genome assembly contig: |
| | scaffold69002_1 whole genome shotgun sequence |
| 24780 | Scytonema sp. UIC 10036 c00014_NODE_14 . . . |
| | whole genome shotgun sequence11375 |
| 24781 | Scytonema sp. UIC 10036 c00098_NODE_98 . . . |
| | whole genome shotgun sequence61676 |
| 24782 | gut metagenome genome assembly P7C0-k21- |
| | 2014-09-20 contig contig-27000100 whole |
| | genome shotgun sequence |
| 24783 | human gut metagenome genome assembly contig: |
| | scaffold46349_10 whole genome shotgun |
| | sequence |
| 24784 | human gut metagenome genome assembly contig: |
| | NODE_2144_length_10694_cov_3.575712 whole |
| | genome shotgun sequence |
| 24785 | Symploca sp. SIO2E9 2E9_NODE_94 whole |
| | genome shotgun sequence 10653 |
| 24786 | human gut metagenome genome assembly contig: |
| | scaffold160084_5 whole genome shotgun |
| | sequence |
| 24787 | Ligilactobacillus salivarius strain KLA001 |
| | NODE_16_length_41111_cov_4.45492_ID_7011 |
| | whole genome shotgun sequence34864 |
| 24788 | Ligilactobacillus agilis strain UMNLA2 |
| | Lagilis10C3S6LR1contig74 whole genome |
| | shotgun sequence11508 |
| 24789 | human gut metagenome genome assembly contig: |
| | NODE_2449_length_8038_cov_1.937993 whole |
| | genome shotgun sequence |
| 24790 | uncultured Bacteroidales bacterium isolate |
| | RUG14530 genome assembly contig: |
| | RUG14530_asm_132 whole genome shotgun |
| | sequence |
| 24791 | human gut metagenome genome assembly contig: |
| | NODE_7505_length_5687_cov_3.556996 whole genome |
| | shotgun sequence |
| 24792 | human gut metagenome genome assembly contig: |
| | NODE_2656_length_12326_cov_29.433298 whole |
| | genome shotgun sequence |
| 24793 | human gut metagenome genome assembly contig: |
| | NODE_3942_length_8163_cov_2.796374 whole genome |
| | shotgun sequence |
| 24794 | human gut metagenome genome assembly contig: |
| | scaffold76023_1 whole genome shotgun sequence |
| 24795 | metagenome genome assembly contig: |
| | NODE_254_length_46379_cov_9.589155 whole genome |
| | shotgun sequence |
| 24796 | human gut metagenome genome assembly contig: |
| | NODE_17_length_135382_cov_4.966740 whole genome |
| | shotgun sequence |
| 24797 | human gut metagenome genome assembly contig: |
| | NODE_33_length_160484_cov_10.374396 whole |
| | genome shotgun sequence |
| 24798 | human gut metagenome genome assembly contig: |
| | NODE_2130_length_16459_cov_5.207023 whole |
| | genome shotgun sequence |
| 24799 | human gut metagenome genome assembly contig: |
| | NODE_247_length_27496_cov_5.049670 whole genome |
| | shotgun sequence |
| 24800 | human gut metagenome genome assembly contig: |
| | NODE_422_length_30618_cov_7.941432 whole genome |
| | shotgun sequence |
| 24801 | human gut metagenome genome assembly contig: |
| | NODE_1307_length_24371_cov_3.924823 whole |
| | genome shotgun sequence |
| 24802 | Ligilactobacillus salivarius strain KLA005 |
| | NODE_4_length_87167_cov_4.94497_ID_7114 whole |
| | genome shotgun sequence5004 |
| 24803 | Thermoplasmata archaeon isolate B1Sed10_20 B1- |
| | Sed10-C1243 whole genome shotgun sequence23515 |
| 24804 | human gut metagenome genome assembly contig: |
| | NODE_48_length_105873_cov_8.840793 whole genome |
| | shotgun sequence |
| 24805 | Bacillus fastidiosus NBRC 101226 DNA contig: |
| | BFA01S_CON0058_0001 whole genome shotgun |
| | sequence |
| 24806 | Sutterella seckii strain ASD3426 |
| | NODE_33_length_26744_cov_80.268738 whole genome |
| | shotgun sequence5319 |
| 24807 | Chloroflexia bacterium SDU3-3 Scaffold31 whole |
| | genome shotgun sequence7491 |
| 24808 | Thiomonas sp. SCN 64-16 ABT24_C0030 whole genome |
| | shotgun sequence24882 |
| 24809 | human gut metagenome genome assembly contig: |
| | NODE_68_length_103107_cov_8.955362 whole genome |
| | shotgun sequence |
| 24810 | Ligilactobacillus agilis strain UMNLA1 |
| | Lagilis10B1S5LR1contig98 whole genome shotgun |
| | sequence73 |
| 24811 | human gut metagenome genome assembly contig: |
| | NODE_3006_length_5220_cov_4.992256 whole genome |
| | shotgun sequence |
| 24812 | human gut metagenome genome assembly contig: |
| | NODE_1193_length_18178_cov_3.782266 whole |
| | genome shotgun sequence |
| 24813 | gut metagenome genome assembly P19E90-k21-2014-09- |
| | 20 contig contig-5097000070 whole genome shotgun |
| | sequence |
| 24814 | human gut metagenome genome assembly contig: |
| | NODE_401_length_34980_cov_10.235419 whole |
| | genome shotgun sequence |
| 24815 | uncultured Methylococcaceae bacterium isolate |
| | AlinenSedimentsD2_bin-0386 genome assembly contig: |
| | bin-0386:0974/1357 whole genome shotgun sequence |
| 24816 | human gut metagenome genome assembly contig: |
| | NODE_1669_length_9435_cov_3.067484 whole genome |
| | shotgun sequence |
| 24817 | human gut metagenome genome assembly contig: |
| | NODE_50_length_74839_cov_7.960648 whole genome |
| | shotgun sequence |
| 24818 | human gut metagenome genome assembly contig: |
| | NODE_8044_length_3692_cov_3.161122 whole genome |
| | shotgun sequence |
| 24819 | Streptomyces sp. NEAU-C40 Scaffold109 whole genome |
| | shotgun sequence13396 |
| 24820 | Lactobacillus equi DSM 15833 = JCM 10991 strain DSM |
| | 15833 NODE_13 whole genome shotgun sequence58183 |
| 24821 | Lactobacillus salivarius strain KLA005 |
| | NODE_4_length_87167_cov_4.94497_ID_7114 whole |
| | genome shotgun sequence20456 |
| 24822 | human gut metagenome genome assembly contig: |
| | NODE_355_length_38901_cov_9.748082 whole genome |
| | shotgun sequence |
| 24823 | Symploca sp. SIO2E9 2E9_NODE_30 whole genome |
| | shotgun sequence37188 |
| 24824 | human gut metagenome genome assembly contig: |
| | NODE_616_length_17494_cov_3.772636 whole genome |
| | shotgun sequence |
| 24825 | human gut metagenome genome assembly contig: |
| | NODE_1886_length_8274_cov_5.931622 whole genome |
| | shotgun sequence |
| 24826 | human gut metagenome genome assembly contig: |
| | scaffold62670_1 whole genome shotgun sequence |
| 24827 | Ga0315284_10052402 |
| 24828 | human gut metagenome genome assembly contig: |
| | NODE_965_length_27249_cov_3.674597 whole genome |
| | shotgun sequence |
| 24829 | Symploca sp. SIO3C6 3C6_NODE_79 whole genome |
| | shotgun sequence31 |
| 24830 | human gut metagenome genome assembly contig: |
| | NODE_28_length 153384_cov_6.734395 whole genome |
| | shotgun sequence |
| 24831 | human gut metagenome genome assembly contig: |
| | NODE_624_length_12655_cov_5.000952 whole genome |
| | shotgun sequence |
| 24832 | human gut metagenome genome assembly contig: |
| | NODE_5282_length_7223_cov_3.430943 whole genome |
| | shotgun sequence |
| 24833 | Microcoleus sp. FACHB-61 contig11 whole genome |
| | shotgun sequence84092 |
| 24834 | human gut metagenome genome assembly contig: |
| | scaffold23147_10 whole genome shotgun sequence |
| 24835 | human gut metagenome genome assembly contig: |
| | NODE_2760_length_9679_cov_3.283562 whole genome |
| | shotgun sequence |
| 24836 | human gut metagenome genome assembly contig: |
| | NODE_422_length_36799_cov_13.046021 whole |
| | genome shotgun sequence |
| 24837 | human gut metagenome genome assembly contig: |
| | NODE_1181_length_10218_cov_4.995179 whole |
| | genome shotgun sequence |
| 24838 | human gut metagenome genome assembly contig: |
| | NODE_337_length_35809_cov_4.929714 whole genome |
| | shotgun sequence |
| 24839 | human gut metagenome genome assembly contig: |
| | NODE_670_length_22802_cov_3.106871 whole genome |
| | shotgun sequence |
| 24840 | human gut metagenome genome assembly contig: |
| | NODE_2938_length_8516_cov_3.642950 whole genome |
| | shotgun sequence |
| 24841 | Thermoplasmata archaeon isolate TISed10_113R1 T1- |
| | Sed10-C3289 whole genome shotgun sequence896 |
| 24842 | human gut metagenome genome assembly contig: |
| | scaffold125509_1 whole genome shotgun sequence |
| 24843 | bioreactor metagenome genome assembly contig: |
| | 101B_bin72_contig11452 whole genome shotgun |
| | sequence |
| 24844 | human gut metagenome genome assembly contig: |
| | NODE_9564_length_3203_cov_2.167408 whole genome |
| | shotgun sequence |
| 24845 | metagenome genome assembly contig: |
| | NODE_4992_length_7838_cov_3.267121 whole genome |
| | shotgun sequence |
| 24846 | human gut metagenome genome assembly contig: |
| | NODE_3172_length_14488_cov_3.767200 whole |
| | genome shotgun sequence |
| 24847 | human gut metagenome genome assembly contig: |
| | NODE_1544_length_21635_cov_4.305051 whole |
| | genome shotgun sequence |
| 24848 | human gut metagenome genome assembly contig: |
| | NODE_143_length_51406_cov_13.283500 whole |
| | genome shotgun sequence |
| 24849 | uncultured Sutterella sp. isolate UMGS613 genome |
| | assembly contig: |
| | NODE_19_length_111995_cov_8.871020 whole genome |
| | shotgun sequence |
| 24850 | human gut metagenome genome assembly contig: |
| | NODE_133_length_56530_cov_11.029004 whole |
| | genome shotgun sequence |
| 24851 | Scytonema hofmannii PCC 7110 Scaffold1_18 whole |
| | genome shotgun sequence95662 |
| 24852 | human gut metagenome genome assembly contig: |
| | NODE_11492_length_4310_cov_2.688837 whole |
| | genome shotgun sequence |
| 24853 | human gut metagenome genome assembly contig: |
| | NODE_881_length_25202_cov_3.098382 whole genome |
| | shotgun sequence |
| 24854 | metagenome genome assembly contig: |
| | NODE_2384_length_4550_cov_2.149277 whole genome |
| | shotgun sequence |
| 24855 | Lactobacillus salivarius strain KLA002 |
| | NODE_4_length_103341_cov_3.69188_ID_7117 whole |
| | genome shotgun sequence81974 |
| 24856 | human gut metagenome genome assembly contig: |
| | NODE_618_length_6822_cov_3.826215 whole genome |
| | shotgun sequence |
| 24857 | bioreactor metagenome genome assembly contig: |
| | NODE_641_length_34163_cov_4.324235 whole genome |
| | shotgun sequence |
| 24858 | human gut metagenome genome assembly contig: |
| | NODE_582_length_25675_cov_10.102771 whole |
| | genome shotgun sequence |
| 24859 | human gut metagenome genome assembly contig: |
| | NODE_103_length_91848_cov_7.296259 whole genome |
| | shotgun sequence |
| 24860 | Janthinobacterium sp. isolate palsa_998 |
| | 73.20120500_P28.8_contig_1114 whole genome shotgun |
| | sequence8849 |
| 24861 | human gut metagenome genome assembly contig: |
| | NODE_391_length_40914_cov_65.063903 whole |
| | genome shotgun sequence |
| 24862 | human gut metagenome genome assembly contig: |
| | NODE_2804_length_11946_cov_4.639565 whole |
| | genome shotgun sequence |
| 24863 | Alicyclobacillus acidocaldarius LAA1 ctg62 whole |
| | genome shotgun sequence2215 |
| 24864 | human gut metagenome genome assembly contig: |
| | NODE_2023_length_10457_cov_4.656028 whole |
| | genome shotgun sequence |
| 24865 | human gut metagenome genome assembly contig: |
| | NODE_3422_length_12512_cov_6.844425 whole |
| | genome shotgun sequence |
| 24866 | human gut metagenome genome assembly contig: |
| | NODE_6048_length_3602_cov_1.386187 whole genome |
| | shotgun sequence |
| 24867 | human gut metagenome genome assembly contig: |
| | NODE_27_length_179765_cov_15.958701 whole |
| | genome shotgun sequence |
| 24868 | human gut metagenome genome assembly contig: |
| | NODE_719_length_22728_cov_8.490010 whole genome |
| | shotgun sequence |
| 24869 | human gut metagenome genome assembly contig: |
| | NODE_3126_length_9928_cov_5.244708 whole genome |
| | shotgun sequence |
| 24870 | Ligilactobacillus salivarius strain KLA003 |
| | NODE_14_length_41813_cov_3.96675_ID_6619 whole |
| | genome shotgun sequence20446 |
| 24871 | Lactobacillus equi DSM 15833 = JCM 10991 DNA |
| | contig: JCM10991.contig00003 whole genome shotgun |
| | sequence |
| 24872 | Human gut metagenome contig-100_405 whole genome |
| | shotgun sequence227 |
| 24873 | human gut metagenome genome assembly contig: |
| | NODE_55_length_119669_cov_7.099980 whole genome |
| | shotgun sequence |
| 24874 | uncultured Bacteroidia bacterium isolate RUG11943 |
| | genome assembly contig: RUG11943_asm_306 whole |
| | genome shotgun sequence |
| 24875 | Ligilactobacillus agilis strain UMNLA4 contig43 whole |
| | genome shotgun sequence11166 |
| 24876 | human gut metagenome genome assembly contig: |
| | NODE_3700_length_4552_cov_5.99133 whole genome |
| | shotgun sequence |
| 24877 | Streptomyces sp. NEAU-C40 Scaffold109 whole genome |
| | shotgun sequence13396 |
| 24878 | gut metagenome genome assembly P21E90-k21-2014-09- |
| | 20 contig contig-12000101 whole genome shotgun |
| | sequence |
| 24879 | human gut metagenome genome assembly contig: |
| | NODE_863_length_11416_cov_3.715254 whole genome |
| | shotgun sequence |
| 24880 | human gut metagenome genome assembly contig: |
| | NODE_2871_length_11650_cov_4.439759 whole |
| | genome shotgun sequence |
| 24881 | Ga0315284_10065042 |
| 24882 | human gut metagenome genome assembly contig: |
| | NODE_2930_length_13128_cov_3.081925 whole |
| | genome shotgun sequence |
| 24883 | human gut metagenome genome assembly contig: |
| | NODE_635_length_25675_cov_7.059524 whole genome |
| | shotgun sequence |
| 24884 | human gut metagenome genome assembly contig: |
| | NODE_3315_length_7434_cov_4.150020 whole genome |
| | shotgun sequence |
| 24885 | human gut metagenome genome assembly contig: |
| | scaffold60000_1 whole genome shotgun sequence |
| 24886 | human gut metagenome genome assembly contig: |
| | NODE_6200_length_4089_cov_3.638820 whole genome |
| | shotgun sequence |
| 24887 | human gut metagenome genome assembly contig: |
| | scaffold28709_1 whole genome shotgun sequence |
| 24888 | human gut metagenome genome assembly contig: |
| | NODE_486_length_9333_cov_9.0346 whole genome |
| | shotgun sequence |
| 24889 | human gut metagenome genome assembly contig: |
| | NODE_801_length_25265_cov_7.161386 whole genome |
| | shotgun sequence |
| 24890 | Chloroflexales bacterium ZM16-3 Scaffold #19 whole |
| | genome shotgun sequence50446 |
| 24891 | human gut metagenome genome assembly contig: |
| | NODE_128_length_107629_cov_11.605419 whole |
| | genome shotgun sequence |
| 24892 | human gut metagenome genome assembly contig: |
| | NODE_605_length_9164_cov_3.740696 whole genome |
| | shotgun sequence |
| 24893 | human gut metagenome genome assembly contig: |
| | NODE_3471_length_3317_cov_3.051196 whole genome |
| | shotgun sequence |
| 24894 | human gut metagenome genome assembly contig: |
| | NODE_6400_length_5345_cov_14.163629 whole |
| | genome shotgun sequence |
| 24895 | Lactobacillus salivarius strain KLA003 |
| | NODE_14_length_41813_cov_3.96675_ID_6619 whole |
| | genome shotgun sequence20446 |
| 24896 | human gut metagenome genome assembly contig: |
| | NODE_48_length_136203_cov_34.946543 whole |
| | genome shotgun sequence |
| 24897 | Ligilactobacillus salivarius strain KLA003 |
| | NODE_14_length_41813_cov_3.96675_ID_6619 whole |
| | genome shotgun sequence4994 |
| 24898 | human gut metagenome genome assembly contig: |
| | NODE_4203_length_4092_cov_3.384939 whole genome |
| | shotgun sequence |
| 24899 | human gut metagenome genome assembly contig: |
| | NODE_5002_length_3355_cov_3.140909 whole genome |
| | shotgun sequence |
| 24900 | human gut metagenome genome assembly contig: |
| | NODE_3281_length_6332_cov_1.728533 whole genome |
| | shotgun sequence |
| 24901 | human gut metagenome genome assembly contig: |
| | NODE_7322_length_4313_cov_3.482151 whole genome |
| | shotgun sequence |
| 24902 | human gut metagenome genome assembly contig: |
| | NODE_8119_length_5659_cov_2.147617 whole genome |
| | shotgun sequence |
| 24903 | human gut metagenome genome assembly contig: |
| | NODE_1518_length_4774_cov_3.448188 whole genome |
| | shotgun sequence |
| 24904 | human gut metagenome genome assembly contig: |
| | NODE_11764_length_4539_cov_6.995540 whole |
| | genome shotgun sequence |
| 24905 | human gut metagenome genome assembly contig: |
| | NODE_1964_length_9786_cov_4.296064 whole genome |
| | shotgun sequence |
| 24906 | metagenome genome assembly contig: |
| | NODE_8409_length_3687_cov_3.269824 whole genome |
| | shotgun sequence |
| 24907 | human gut metagenome genome assembly contig: |
| | NODE_12767_length_3059_cov_4.034288 whole |
| | genome shotgun sequence |
| 24908 | Ga0315298_1009712 |
| 24909 | human gut metagenome genome assembly contig: |
| | scaffold37469_1 whole genome shotgun sequence |
| 24910 | human gut metagenome genome assembly contig: |
| | NODE_867_length_26093_cov_4.834204 whole genome |
| | shotgun sequence |
| 24911 | human gut metagenome genome assembly contig: |
| | NODE_3093_length_4026_cov_4.739109 whole genome |
| | shotgun sequence |
| 24912 | human gut metagenome genome assembly contig: |
| | NODE_435_length_69800_cov_10.486501 whole |
| | genome shotgun sequence |
| 24913 | human gut metagenome genome assembly contig: |
| | NODE_2693_length_9030_cov_2.914540 whole genome |
| | shotgun sequence |
| 24914 | human gut metagenome genome assembly contig: |
| | NODE_1706_length_4021_cov_3.12027 whole genome |
| | shotgun sequence |
| 24915 | gut metagenome genome assembly P21E0-k21-2014-09- |
| | 20 contig contig-10000089 whole genome shotgun |
| | sequence |
| 24916 | human gut metagenome genome assembly contig: |
| | NODE_13793_length_3520_cov_2.376912 whole |
| | genome shotgun sequence |
| 24917 | Ligilactobacillus agilis strain UMNLA6 |
| | agilis8I2S2LR1contig22 whole genome shotgun |
| | sequence70 |
| 24918 | human gut metagenome genome assembly contig: |
| | NODE_8601_length_3526_cov_4.012100 whole genome |
| | shotgun sequence |
| 24919 | human gut metagenome genome assembly contig: |
| | NODE_698_length_12468_cov_2.419238 whole genome |
| | shotgun sequence |
| 24920 | human gut metagenome genome assembly contig: |
| | NODE_1277_length_10605_cov_4.227204 whole |
| | genome shotgun sequence |
| 24921 | human gut metagenome genome assembly contig: |
| | NODE_13523_length_3512_cov_2.651432 whole |
| | genome shotgun sequence |
| 24922 | human gut metagenome genome assembly contig: |
| | scaffold82_3 whole genome shotgun sequence |
| 24923 | human gut metagenome genome assembly contig: |
| | NODE_4347_length_6650_cov_6.264263 whole genome |
| | shotgun sequence |
| 24924 | metagenome genome assembly contig: |
| | NODE_450_length_37621_cov_9.860619 whole genome |
| | shotgun sequence |
| 24925 | human gut metagenome genome assembly contig: |
| | NODE_557_length_33672_cov_7.683731 whole genome |
| | shotgun sequence |
| 24926 | human gut metagenome genome assembly contig: |
| | NODE_2256_length_11365_cov_3.385853 whole |
| | genome shotgun sequence |
| 24927 | Ligilactobacillus agilis strain SW282 7 whole genome |
| | shotgun sequence16112 |
| 24928 | human gut metagenome genome assembly contig: |
| | NODE_4212_length_11019_cov_7.257753 whole |
| | genome shotgun sequence |
| 24929 | human gut metagenome genome assembly contig: |
| | NODE_10655_length_3126_cov_2.659069 whole |
| | genome shotgun sequence |
| 24930 | gut metagenome genome assembly contig: |
| | NODE_1662_length_5475_cov_3.143016 whole genome |
| | shotgun sequence |
| 24931 | human gut metagenome genome assembly contig: |
| | NODE_268_length_14600_cov_26.203539 whole |
| | genome shotgun sequence |
| 24932 | Candidate divison MSBL1 archaeon SCGC-AAA382N08 |
| | AAA382N08_Contig_0_C whole genome shotgun |
| | sequence34996 |
| 24933 | human gut metagenome genome assembly contig: |
| | NODE_1112_length_16081_cov_5.715400 whole |
| | genome shotgun sequence |
| 24934 | human gut metagenome genome assembly contig: |
| | NODE_2484_length_11059_cov_3.476917 whole |
| | genome shotgun sequence |
| 24935 | Lactobacillus salivarius strain KLA004 |
| | NODE_3_length_99083_cov_5.05067_ID_8131 whole |
| | genome shotgun sequence19305 |
| 24936 | human gut metagenome genome assembly contig: |
| | scaffold3990_25 whole genome shotgun sequence |
| 24937 | human gut metagenome genome assembly contig: |
| | NODE_1083_length_20179_cov_6.482012 whole |
| | genome shotgun sequence |
| 24938 | human gut metagenome genome assembly contig: |
| | NODE_3287_length_7487_cov_3.263563 whole genome |
| | shotgun sequence |
| 24939 | Lactobacillus salivarius strain KLA005 |
| | NODE_4_length_87167_cov_4.94497_ID_7114 whole |
| | genome shotgun sequence5004 |
| 24940 | human gut metagenome genome assembly contig: |
| | NODE_59_length_106360_cov_7.436706 whole genome |
| | shotgun sequence |
| 24941 | Ligilactobacillus salivarius strain KLW001 |
| | NODE_70_length_6520_cov_0.165603_ID_9537 whole |
| | genome shotgun sequence5439 |
| 24942 | Sutterella seckii strain ASD3426 |
| | NODE_33_length_26744_cov_80.268738 whole genome |
| | shotgun sequence5319 |
| 24943 | Lactobacillus equi DSM 15833 = JCM 10991 strain DSM |
| | 15833 NODE_76 whole genome shotgun sequence4345 |
| 24944 | TPA_asm: Gammaproteobacteria bacterium isolate Hy Vt- |
| | 252 Hy Vt-252_k295_50713 whole genome shotgun |
| | sequence903 |
| 24945 | human gut metagenome genome assembly contig: |
| | scaffold105405_6 whole genome shotgun sequence |
| 24946 | human gut metagenome genome assembly contig: |
| | NODE_1291_length_17444_cov_11.393295 whole |
| | genome shotgun sequence |
| 24947 | human gut metagenome genome assembly contig: |
| | NODE_145_length_86100_cov_4.271183 whole genome |
| | shotgun sequence |
| 24948 | human gut metagenome genome assembly contig: |
| | NODE_942_length_6907_cov_7.29656 whole genome |
| | shotgun sequence |
| 24949 | human gut metagenome genome assembly contig: |
| | NODE_567_length_42188_cov_4.569648 whole genome |
| | shotgun sequence |
| 24950 | human gut metagenome genome assembly contig: |
| | NODE_2263_length_16290_cov_2.794363 whole |
| | genome shotgun sequence |
| 24951 | metagenome genome assembly contig: |
| | NODE_3604_length_4164_cov_6.235094 whole genome |
| | shotgun sequence |
| 24952 | human gut metagenome genome assembly contig: |
| | NODE_12316_length_3338_cov_1.900396 whole |
| | genome shotgun sequence |
| 24953 | human gut metagenome genome assembly contig: |
| | NODE_363_length_54948_cov_9.183120 whole genome |
| | shotgun sequence |
| 24954 | human gut metagenome genome assembly contig: |
| | scaffold179636_3 whole genome shotgun sequence |
| 24955 | human gut metagenome genome assembly contig: |
| | NODE_561_length_14648_cov_2.313781 whole genome |
| | shotgun sequence |
| 24956 | human gut metagenome genome assembly contig: |
| | NODE_6535_length_5356_cov_5.132805 whole genome |
| | shotgun sequence |
| 24957 | Symploca sp. SIO3C6 3C6_NODE_7 whole genome |
| | shotgun sequence72670 |
| 24958 | human gut metagenome genome assembly contig: |
| | NODE_6758_length_3173_cov_2.935856 whole genome |
| | shotgun sequence |
| 24959 | human gut metagenome genome assembly contig: |
| | scaffold33309_4 whole genome shotgun sequence |
| 24960 | bioreactor metagenome genome assembly contig: |
| | 105_bin16_contig00441 whole genome shotgun sequence |
| 24961 | human gut metagenome genome assembly contig: |
| | NODE_11633_length_5233_cov_23.049054 whole |
| | genome shotgun sequence |
| 24962 | TPA asm: uncultured Sutterella sp. isolate HGM19488 |
| | genome assembly contig: ERS473251_31_k99_36269 |
| | whole genome shotgun sequence |
| 24963 | Lactobacillus sp. UMNPBX9 |
| | NODE_22_length_31946_cov_152.232 whole genome |
| | shotgun sequence29285 |
| 24964 | Ligilactobacillus salivarius strain KLA004 |
| | NODE_3_length_99083_cov_5.05067_ID_8131 whole |
| | genome shotgun sequence34851 |
| 24965 | human gut metagenome genome assembly contig: |
| | NODE_2430_length_15200_cov_3.520700 whole |
| | genome shotgun sequence |
| 24966 | Chloroflexia bacterium SDU3-3 Scaffold31 whole |
| | genome shotgun sequence7491 |
| 24967 | human gut metagenome genome assembly contig: |
| | NODE_125_length_84480_cov_4.792656 whole genome |
| | shotgun sequence |
| 24968 | Lactobacillus equi DSM 15833 = JCM 10991 strain DSM |
| | 15833 NODE_76 whole genome shotgun sequence4345 |
| 24969 | human gut metagenome genome assembly contig: |
| | NODE_2213_length_11552_cov_2.310690 whole |
| | genome shotgun sequence |
| 24970 | Alicyclobacillus acidocaldarius LAA1 ctg62 whole |
| | genome shotgun sequence2215 |
| 24971 | human gut metagenome genome assembly contig: |
| | NODE_2101_length_16417_cov_4.063684 whole |
| | genome shotgun sequence |
| 24972 | human gut metagenome genome assembly contig: |
| | NODE_5446_length_6825_cov_3.469572 whole genome |
| | shotgun sequence |
| 24973 | human gut metagenome genome assembly contig: |
| | scaffold32196_3 whole genome shotgun sequence |
| 24974 | human gut metagenome genome assembly contig: |
| | NODE_1203_length_24352_cov_3.334568 whole |
| | genome shotgun sequence |
| 24975 | human gut metagenome genome assembly contig: |
| | NODE_1342_length_7620_cov_19.6514 whole genome |
| | shotgun sequence |
| 24976 | human gut metagenome genome assembly contig: |
| | NODE_3014_length_12342_cov_5.885896 whole |
| | genome shotgun sequence |
| 24977 | human gut metagenome genome assembly contig: |
| | NODE_811_length_35443_cov_7.639963 whole genome |
| | shotgun sequence |
| 24978 | human gut metagenome genome assembly contig: |
| | NODE_4922_length_5322_cov_1.305297 whole genome |
| | shotgun sequence |
| 24979 | human gut metagenome genome assembly contig: |
| | NODE_3960_length_8233_cov_3.405234 whole genome |
| | shotgun sequence |
| 24980 | Ligilactobacillus salivarius strain KLA004 |
| | NODE_3_length_99083_cov_5.05067_ID_8131 whole |
| | genome shotgun sequence19305 |
| 24981 | human gut metagenome genome assembly contig: |
| | NODE_2466_length_4064_cov_2.735595 whole genome |
| | shotgun sequence |
| 24982 | human gut metagenome genome assembly contig: |
| | NODE_5809_length_3078_cov_3.754548 whole genome |
| | shotgun sequence |
| 24983 | human gut metagenome genome assembly contig: |
| | NODE_2452_length_9211_cov_2.602010 whole genome |
| | shotgun sequence |
| 24984 | human gut metagenome genome assembly contig: |
| | scaffold151330_1 whole genome shotgun sequence |
| 24985 | human gut metagenome genome assembly contig: |
| | NODE_4946_length_3472_cov_0.804507 whole genome |
| | shotgun sequence |
| 24986 | human gut metagenome genome assembly contig: |
| | NODE_687_length_36042_cov_4.715564 whole genome |
| | shotgun sequence |
| 24987 | human gut metagenome genome assembly contig: |
| | NODE_90_length_94448_cov_4.450055 whole genome |
| | shotgun sequence |
| 24988 | human gut metagenome genome assembly contig: |
| | NODE_799_length_33854_cov_5.959466 whole genome |
| | shotgun sequence |
| 24989 | human gut metagenome genome assembly contig: |
| | NODE_7686_length_3509_cov_2.106254 whole genome |
| | shotgun sequence |
| 24990 | Lactobacillus agilis strain UMNLA4 contig43 whole |
| | genome shotgun sequence11166 |
| 24991 | human gut metagenome genome assembly contig: |
| | scaffold15129_1 whole genome shotgun sequence |
| 24992 | human gut metagenome genome assembly contig: |
| | NODE_1304_length_8632_cov_1.131631 whole genome |
| | shotgun sequence |
| 24993 | human gut metagenome genome assembly contig: |
| | NODE_1275_length_28403_cov_3.570128 whole |
| | genome shotgun sequence |
| 24994 | human gut metagenome genome assembly contig: |
| | NODE_2778_length_7432_cov_2.364408 whole genome |
| | shotgun sequence |
| 24995 | human gut metagenome genome assembly contig: |
| | NODE_699_length_8137_cov_8.03155 whole genome |
| | shotgun sequence |
| 24996 | human gut metagenome genome assembly contig: |
| | NODE_4504_length_3778_cov_1.758528 whole genome |
| | shotgun sequence |
| 24997 | human gut metagenome genome assembly contig: |
| | NODE_5577_length_7209_cov_2.224490 whole genome |
| | shotgun sequence |
| 24998 | human gut metagenome genome assembly contig: |
| | scaffold127396_2 whole genome shotgun sequence |
| 24999 | human gut metagenome genome assembly contig: |
| | NODE_1397_length_19001_cov_5.884092 whole |
| | genome shotgun sequence |
| 25000 | human gut metagenome genome assembly contig: |
| | NODE_95_length_70228_cov_13.062075 whole genome |
| | shotgun sequence |
| 25001 | uncultured Methylococcaceae bacterium isolate MJ- |
| | 2014_bin-1696 genome assembly contig: bin- |
| | 1696:0285/1352 whole genome shotgun sequence |
| 25002 | TPA_asm: uncultured Sutterella sp. isolate HGM19495 |
| | genome assembly contig: SRS049896_48_k99_19412 |
| | whole genome shotgun sequence |
| 25003 | human gut metagenome genome assembly contig: |
| | NODE_2620_length_9787_cov_5.497637 whole genome |
| | shotgun sequence |
| 25004 | human gut metagenome genome assembly contig: |
| | NODE_1268_length_19429_cov_5.980799 whole |
| | genome shotgun sequence |
| 25005 | human gut metagenome genome assembly contig: |
| | NODE_7151_length_3665_cov_2.706648 whole genome |
| | shotgun sequence |
| 25006 | human gut metagenome genome assembly contig: |
| | scaffold15624_1 whole genome shotgun sequence |
| 25007 | human gut metagenome genome assembly contig: |
| | scaffold35798_22 whole genome shotgun sequence |
| 25008 | human gut metagenome genome assembly contig: |
| | scaffold14994_1 whole genome shotgun sequence |
| 25009 | human gut metagenome genome assembly contig: |
| | NODE_5912_length_7180_cov_2.794246 whole genome |
| | shotgun sequence |
| 25010 | human gut metagenome genome assembly contig: |
| | NODE_1411_length_8716_cov_1.568872 whole genome |
| | shotgun sequence |
| 25011 | human gut metagenome genome assembly contig: |
| | NODE_17454_length_3025_cov_4.211448 whole |
| | genome shotgun sequence |
| 25012 | Lactobacillus agilis strain UMNLA6 |
| | agilis8I2S2LR1contig22 whole genome shotgun |
| | sequence70 |
| 25013 | human gut metagenome genome assembly contig: |
| | NODE_4406_length_6489_cov_3.426329 whole genome |
| | shotgun sequence |
| 25014 | human gut metagenome genome assembly contig: |
| | NODE_1336_length_8454_cov_3.427551 whole genome |
| | shotgun sequence |
| 25015 | human gut metagenome genome assembly contig: |
| | NODE_4466_length_6460_cov_1.685246 whole genome |
| | shotgun sequence |
| 25016 | human gut metagenome genome assembly contig: |
| | NODE_4313_length_3390_cov_2.805997 whole genome |
| | shotgun sequence |
| 25017 | metagenome genome assembly contig: |
| | NODE_6738_length_3092_cov_3.433727 whole genome |
| | shotgun sequence |
| 25018 | Viral metagenome |
| | NODE_6850_length_24075_cov_3.11132 whole genome |
| | shotgun sequence21758 |
| 25019 | human gut metagenome genome assembly contig: |
| | NODE_9186_length_4290_cov_6.158678 whole genome |
| | shotgun sequence |
| 25020 | human gut metagenome genome assembly contig: |
| | NODE_3417_length_11990_cov_3.361458 whole |
| | genome shotgun sequence |
| 25021 | Lactobacillus agilis strain UMNLA8 |
| | agilis8I7S4LR1contig104 whole genome shotgun |
| | sequence70 |
| 25022 | human gut metagenome genome assembly contig: |
| | NODE_548_length_33175_cov_3.407941 whole genome |
| | shotgun sequence |
| 25023 | gut metagenome genome assembly P21E7-k21-2014-09- |
| | 20 contig contig-5000047 whole genome shotgun |
| | sequence |
| 25024 | human gut metagenome genome assembly contig: |
| | NODE_787_length_9824_cov_4.670795 whole genome |
| | shotgun sequence |
| 25025 | human gut metagenome genome assembly contig: |
| | NODE_4052_length_5672_cov_2.823393 whole genome |
| | shotgun sequence |
| 25026 | Bacterium isolate NIOZ-UU8 NIOZ- |
| | UU_NODE_4920_length_15122_cov_7.54105 whole |
| | genome shotgun sequence657 |
| 25027 | human gut metagenome genome assembly contig: |
| | NODE_1644_length_19381_cov_4.447480 whole |
| | genome shotgun sequence |
| 25028 | human gut metagenome genome assembly contig: |
| | NODE_3886_length_9683_cov_3.751454 whole genome |
| | shotgun sequence |
| 25029 | Ligilactobacillus salivarius strain KLA006 |
| | NODE_18_length_41119_cov_4.56228_ID_9465 whole |
| | genome shotgun sequence5004 |
| 25030 | human gut metagenome genome assembly contig: |
| | NODE_6319_length_3270_cov_3.822706 whole genome |
| | shotgun sequence |
| 25031 | Chloroflexales bacterium ZM16-3 NODE_109 whole |
| | genome shotgun sequence9490 |
| 25032 | human gut metagenome genome assembly contig: |
| | NODE_3337_length_5281_cov_1.286644 whole genome |
| | shotgun sequence |
| 25033 | Lactobacillus reuteri isolate WIP44.042 Contig12992 |
| | whole genome shotgun sequence2702 |
| 25034 | human gut metagenome genome assembly contig: |
| | scaffold158429_1 whole genome shotgun sequence |
| 25035 | Lactobacillus agilis strain UMNLA3 |
| | Lagilis08E9S1LRIcontig74 whole genome shotgun |
| | sequence70 |
| 25036 | Candidate divison MSBL1 archaeon SCGC-AAA259I09 |
| | AAA259109_Contig_21 whole genome shotgun |
| | sequence4556 |
| 25037 | human gut metagenome genome assembly contig: |
| | NODE_3681_length_6870_cov_2.218782 whole genome |
| | shotgun sequence |
| 25038 | human gut metagenome genome assembly contig: |
| | NODE_3130_length_6517_cov_2.509285 whole genome |
| | shotgun sequence |
| 25039 | human gut metagenome genome assembly contig: |
| | NODE_2301_length_5395_cov_1.170463 whole genome |
| | shotgun sequence |
| 25040 | human gut metagenome genome assembly contig: |
| | scaffold1135_1 whole genome shotgun sequence |
| 25041 | human gut metagenome genome assembly contig: |
| | NODE_2714_length_12855_cov_3.427578 whole |
| | genome shotgun sequence |
| 25042 | human gut metagenome genome assembly contig: |
| | NODE_1441_length_4638_cov_2.769583 whole genome |
| | shotgun sequence |
| 25043 | human gut metagenome genome assembly contig: |
| | NODE_5985_length_3767_cov_2.539601 whole genome |
| | shotgun sequence |
| 25044 | human gut metagenome genome assembly contig: |
| | NODE_4448_length_6931_cov_2.348410 whole genome |
| | shotgun sequence |
| 25045 | human gut metagenome genome assembly contig: |
| | NODE_4504_length_3778_cov_1.758528 whole genome |
| | shotgun sequence |
| 25046 | human gut metagenome genome assembly contig: |
| | NODE_17876_length_2944_cov_3.147110 whole |
| | genome shotgun sequence |
| 25047 | metagenome genome assembly contig: |
| | NODE_3766_length_7875_cov_5.759079 whole genome |
| | shotgun sequence |
| 25048 | human gut metagenome genome assembly contig: |
| | scaffold40615_1 whole genome shotgun sequence |
| 25049 | metagenome genome assembly contig: |
| | NODE_2103_length_11269_cov_3.770376 whole |
| | genome shotgun sequence |
| 25050 | human gut metagenome genome assembly contig: |
| | scaffold165455_1 whole genome shotgun sequence |
| 25051 | human gut metagenome genome assembly contig: |
| | NODE_6676_length_5186_cov_3.617424 whole genome |
| | shotgun sequence |
| 25052 | Streptomyces sp. NEAU-C40 Scaffold109 whole genome |
| | shotgun sequence13101 |
| 25053 | human gut metagenome genome assembly contig: |
| | NODE_8844_length_5338_cov_2.209540 whole genome |
| | shotgun sequence |
| 25054 | human gut metagenome genome assembly contig: |
| | NODE_3129_length_4840_cov_2.254754 whole genome |
| | shotgun sequence |
| 25055 | human gut metagenome genome assembly contig: |
| | NODE_797_length_23813_cov_3.359416 whole genome |
| | shotgun sequence |
| 25056 | human gut metagenome genome assembly contig: |
| | scaffold88873_1 whole genome shotgun sequence |
| 25057 | human gut metagenome genome assembly contig: |
| | scaffold114107_1 whole genome shotgun sequence |
| 25058 | Beggiatoa sp. IS2 Ga0073106_1145 whole genome |
| | shotgun sequence213 |
| 25059 | human gut metagenome genome assembly contig: |
| | scaffold218_1 whole genome shotgun sequence |
| 25060 | human gut metagenome genome assembly contig: |
| | NODE_1981_length_11607_cov_2.384782 whole |
| | genome shotgun sequence |
| 25061 | human gut metagenome genome assembly contig: |
| | scaffold87901_5 whole genome shotgun sequence |
| 25062 | Sutterella sp. KLE1602 Sutterella_spHMPREF3036- |
| | 1.0_Cont405.1 whole genome shotgun sequence2 |

TABLE 1D
IscB polypeptides with inactive HNH domain

| SEQ ID | |
|---|---|
| NO: | Description |
| 2605 | human gut metagenome genome assembly contig: |
| | NODE_8_length_112273_cov_10.402502 whole |
| | genome shotgun sequence |
| 2609 | human gut metagenome genome assembly contig: |
| | NODE_35_length_19601_cov_4.491354 whole |
| | genome shotgun sequence |
| 2636 | human gut metagenome genome assembly contig: |
| | NODE_4724_length_3201_cov_3.220598 whole |
| | genome shotgun sequence |
| 2691 | human gut metagenome genome assembly contig: |
| | NODE_177_length_30556_cov_36.2926 whole |
| | genome shotgun sequence |
| 2815 | human gut metagenome genome assembly contig: |
| | NODE_8744_length_3700_cov_3.643941 whole |
| | genome shotgun sequence |
| 2858 | human gut metagenome genome assembly contig: |
| | NODE_3203_length_11514_cov_3.424034 whole |
| | genome shotgun sequence |
| 2867 | human gut metagenome genome assembly contig: |
| | NODE_482_length_21504_cov_9.946944 whole |
| | genome shotgun sequence |
| 2912 | human gut metagenome genome assembly contig: |
| | NODE_425_length_46949_cov_5.736427 whole |
| | genome shotgun sequence |
| 2944 | human gut metagenome genome assembly contig: |
| | scaffold61509_5 whole genome shotgun sequence |
| 3014 | human gut metagenome genome assembly contig: |
| | NODE_3116_length_7450_cov_4.574491 whole |
| | genome shotgun sequence |
| 3023 | human gut metagenome genome assembly contig: |
| | NODE_2661_length_7551_cov_19.782417 whole |
| | genome shotgun sequence |
| 3084 | human gut metagenome genome assembly contig: |
| | NODE_1_length_405491_cov_11.742439 whole |
| | genome shotgun sequence |
| 3087 | human gut metagenome genome assembly contig: |
| | scaffold88217_2 whole genome shotgun sequence |
| 3119 | human gut metagenome genome assembly contig: |
| | NODE_10473_length_3414_cov_2.099732 whole |
| | genome shotgun sequence |
| 3125 | human gut metagenome genome assembly contig: |
| | NODE_9_length_201065_cov_42.090384 whole |
| | genome shotgun sequence |
| 3155 | human gut metagenome genome assembly contig: |
| | NODE_636_length_40565_cov_5.657097 whole |
| | genome shotgun sequence |
| 3189 | human gut metagenome genome assembly contig: |
| | NODE_11452_length_3173_cov_1.306286 whole |
| | genome shotgun sequence |
| 3220 | human gut metagenome genome assembly contig: |
| | NODE_21_length_144270_cov_7.458163 whole |
| | genome shotgun sequence |
| 3249 | human gut metagenome genome assembly contig: |
| | NODE_37_length_175655_cov_5.887483 whole |
| | genome shotgun sequence |
| 3290 | human gut metagenome genome assembly contig: |
| | NODE_98_length_47776_cov_6.418792 whole |
| | genome shotgun sequence |
| 3295 | human gut metagenome genome assembly contig: |
| | NODE_4013_length_7893_cov_4.114570 whole |
| | genome shotgun sequence |
| 3395 | human gut metagenome genome assembly contig: |
| | NODE_151_length_57604_cov_6.228362 whole |
| | genome shotgun sequence |
| 3447 | human gut metagenome genome assembly contig: |
| | NODE_17_length_239782_cov_6.553513 whole |
| | genome shotgun sequence |
| 3476 | human gut metagenome genome assembly contig: |
| | NODE_62_length_95852_cov_14.374636 whole |
| | genome shotgun sequence |
| 3548 | human gut metagenome genome assembly contig: |
| | NODE_1278_length_3100_cov_1.47947 whole |
| | genome shotgun sequence |
| 3558 | human gut metagenome genome assembly contig: |
| | NODE_49_length_144441_cov_8.740231 whole |
| | genome shotgun sequence |
| 3587 | human gut metagenome genome assembly contig: |
| | NODE_501_length_28551_cov_4.118087 whole |
| | genome shotgun sequence |
| 3609 | human gut metagenome genome assembly contig: |
| | NODE_5699_length_3581_cov_1.103800 whole |
| | genome shotgun sequence |
| 3621 | human gut metagenome genome assembly contig: |
| | NODE_122_length_69864_cov_11.482201 whole |
| | genome shotgun sequence |
| 3635 | human gut metagenome genome assembly contig: |
| | NODE_1254_length_10243_cov_2.718689 whole |
| | genome shotgun sequence |
| 3674 | human gut metagenome genome assembly contig: |
| | scaffold1608_12 whole genome shotgun sequence |
| 3690 | human gut metagenome genome assembly contig: |
| | NODE_303_length_58429_cov_13.131702 whole |
| | genome shotgun sequence |
| 3694 | human gut metagenome genome assembly contig: |
| | NODE_409_length_54079_cov_4.051935 whole |
| | genome shotgun sequence |
| 3695 | human gut metagenome genome assembly contig: |
| | NODE_526_length_16475_cov_2.977345 whole |
| | genome shotgun sequence |
| 3738 | Deinococcus hopiensis KR-140 genome assembly |
| | contig: Deiho_Contig194.5 whole genome shotgun |
| | sequence |
| 3751 | human gut metagenome genome assembly contig: |
| | NODE_6561_length_5351_cov_5.564388 whole |
| | genome shotgun sequence |
| 3792 | human gut metagenome genome assembly contig: |
| | scaffold111745_2 whole genome shotgun sequence |
| 3900 | human gut metagenome genome assembly contig: |
| | NODE_133_length_86820_cov_7.290301 whole |
| | genome shotgun sequence |
| 3950 | human gut metagenome genome assembly contig: |
| | NODE_1524_length_25669_cov_7.216796 whole |
| | genome shotgun sequence |
| 3975 | human gut metagenome genome assembly contig: |
| | NODE_1275_length_16888_cov_5.177627 whole |
| | genome shotgun sequence |
| 3982 | human gut metagenome genome assembly contig: |
| | NODE_923_length_21268_cov_3.623957 whole |
| | genome shotgun sequence |
| 3984 | human gut metagenome genome assembly contig: |
| | NODE_198_length_76924_cov_4.945401 whole |
| | genome shotgun sequence |
| 4011 | human gut metagenome genome assembly contig: |
| | NODE_6427_length_3291_cov_4.716934 whole |
| | genome shotgun sequence |
| 4012 | human gut metagenome genome assembly contig: |
| | NODE_7751_length_3356_cov_2.691 whole |
| | genome shotgun sequence |
| 4026 | human gut metagenome genome assembly contig: |
| | NODE_57_length_160175_cov_12.3826 whole |
| | genome shotgun sequence |
| 4044 | human gut metagenome genome assembly contig: |
| | NODE_1248_length_23479_cov_16.695910 whole |
| | genome shotgun sequence |
| 4088 | human gut metagenome genome assembly contig: |
| | NODE_670_length_28719_cov_14.572181 whole |
| | genome shotgun sequence |
| 4100 | human gut metagenome genome assembly contig: |
| | NODE_14_length_73684_cov_8.134213 whole |
| | genome shotgun sequence |
| 4168 | human gut metagenome genome assembly contig: |
| | NODE_8640_length_3839_cov_1.910677 whole |
| | genome shotgun sequence |
| 4233 | human gut metagenome genome assembly contig: |
| | NODE_5626_length_3593_cov_1.730921 whole |
| | genome shotgun sequence |
| 4270 | human gut metagenome genome assembly contig: |
| | NODE_307_length_16169_cov_5.950105 whole |
| | genome shotgun sequence |
| 4295 | human gut metagenome genome assembly contig: |
| | NODE_776_length_31375_cov_4.464783 whole |
| | genome shotgun sequence |
| 4400 | human gut metagenome genome assembly contig: |
| | NODE_3326_length_3629_cov_1.531411 whole |
| | genome shotgun sequence |
| 4409 | human gut metagenome genome assembly contig: |
| | NODE_1338_length_24687_cov_7.682730 whole |
| | genome shotgun sequence |
| 4496 | human gut metagenome genome assembly contig: |
| | NODE_189_length_39153_cov_3.813980 whole |
| | genome shotgun sequence |
| 4510 | human gut metagenome genome assembly contig: |
| | NODE_60_length_81669_cov_10.071337 whole |
| | genome shotgun sequence |
| 4512 | human gut metagenome genome assembly contig: |
| | NODE_4768_length_5717_cov_2.174673 whole |
| | genome shotgun sequence |
| 4556 | human gut metagenome genome assembly contig: |
| | NODE_5829_length_5498_cov_3.118501 whole |
| | genome shotgun sequence |
| 4589 | human gut metagenome genome assembly contig: |
| | NODE_38_length_143297_cov_4.955041 whole |
| | genome shotgun sequence |
| 4592 | human gut metagenome genome assembly contig: |
| | scaffold965_2 whole genome shotgun sequence |
| 4633 | human gut metagenome genome assembly contig: |
| | scaffold89811_1 whole genome shotgun sequence |
| 4649 | human gut metagenome genome assembly contig: |
| | NODE_9_length_267475_cov_9.212149 whole |
| | genome shotgun sequence |
| 4651 | human gut metagenome genome assembly contig: |
| | NODE_5611_length_3275_cov_1.507764 whole |
| | genome shotgun sequence |
| 4704 | human gut metagenome genome assembly contig: |
| | NODE_272_length_45509_cov_3.108307 whole |
| | genome shotgun sequence |
| 4752 | human gut metagenome genome assembly contig: |
| | NODE_80_length_92129_cov_9.956839 whole |
| | genome shotgun sequence |
| 4790 | human gut metagenome genome assembly contig: |
| | NODE_8691_length_4713_cov_3.100687 whole |
| | genome shotgun sequence |
| 4811 | human gut metagenome genome assembly contig: |
| | NODE_563_length_28933_cov_5.941616 whole |
| | genome shotgun sequence |
| 4821 | human gut metagenome genome assembly contig: |
| | NODE_5404_length_6271_cov_2.816120 whole |
| | genome shotgun sequence |
| 4848 | metagenome genome assembly contig: |
| | NODE_6801_length_4563_cov_2.460293 whole |
| | genome shotgun sequence |
| 4858 | human gut metagenome genome assembly contig: |
| | scaffold603_11 whole genome shotgun sequence |
| 4869 | human gut metagenome genome assembly contig: |
| | NODE_668_length_42666_cov_4.516307 whole |
| | genome shotgun sequence |
| 4937 | human gut metagenome genome assembly contig: |
| | scaffold9883_2 whole genome shotgun sequence |
| 4953 | Sharpea azabuensis isolate RUG14671 genome |
| | assembly contig: RUG14671_asm_27 whole |
| | genome shotgun sequence |
| 4954 | human gut metagenome genome assembly contig: |
| | NODE_36_length_121306_cov_7.378900 whole |
| | genome shotgun sequence |
| 5023 | human gut metagenome genome assembly contig: |
| | NODE_604_length_45444_cov_12.825773 whole |
| | genome shotgun sequence |
| 5028 | human gut metagenome genome assembly contig: |
| | NODE_73_length_87712_cov_11.254503 whole |
| | genome shotgun sequence |
| 5030 | human gut metagenome genome assembly contig: |
| | NODE_422_length_38978_cov_3.819413 whole |
| | genome shotgun sequence |
| 5042 | human gut metagenome genome assembly contig: |
| | NODE_945_length_19005_cov_3.02317 whole |
| | genome shotgun sequence |
| 5053 | human metagenome genome assembly contig: |
| | NODE_10_length_231306_cov_29.2522 whole |
| | genome shotgun sequence |
| 5123 | human gut metagenome genome assembly contig: |
| | NODE_16_length_131354_cov_6.567826 whole |
| | genome shotgun sequence |
| 5139 | human gut metagenome genome assembly contig: |
| | NODE_2063_length_14463_cov_3.445725 whole |
| | genome shotgun sequence |
| 5157 | human gut metagenome genome assembly contig: |
| | NODE_373_length_61714_cov_4.346616 whole |
| | genome shotgun sequence |
| 5199 | human gut metagenome genome assembly contig: |
| | NODE_2782_length_4213_cov_7.450216 whole |
| | genome shotgun sequence |
| 5207 | human gut metagenome genome assembly contig: |
| | NODE_689_length_29569_cov_15.297045 whole |
| | genome shotgun sequence |
| 5215 | human gut metagenome genome assembly contig: |
| | scaffold104827 3 whole genome shotgun sequence |
| 5237 | human gut metagenome genome assembly contig: |
| | NODE_209_length_58561_cov_37.5661 whole |
| | genome shotgun sequence |
| 5263 | human gut metagenome genome assembly contig: |
| | NODE_7841_length_3155_cov_2.927742 whole |
| | genome shotgun sequence |
| 5338 | human gut metagenome genome assembly contig: |
| | NODE_453_length_24222_cov_4.393277 whole |
| | genome shotgun sequence |
| 5343 | human gut metagenome genome assembly contig: |
| | NODE_10313_length_4467_cov_2.956256 whole |
| | genome shotgun sequence |
| 5348 | human gut metagenome genome assembly contig: |
| | NODE_1717_length_11332_cov_4.89359 whole |
| | genome shotgun sequence |
| 5370 | human gut metagenome genome assembly contig: |
| | NODE_19330_length_3105_cov_2.118361 whole |
| | genome shotgun sequence |
| 5372 | human gut metagenome genome assembly contig: |
| | NODE_735_length_36715_cov_8.437943 whole |
| | genome shotgun sequence |
| 5441 | human gut metagenome genome assembly contig: |
| | scaffold298_1 whole genome shotgun sequence |
| 5460 | human gut metagenome genome assembly contig: |
| | NODE_173_length_54484_cov_23.451322 whole |
| | genome shotgun sequence |
| 5477 | human gut metagenome genome assembly contig: |
| | NODE_3722_length_9084_cov_35.979289 whole |
| | genome shotgun sequence |
| 5494 | human gut metagenome genome assembly contig: |
| | scaffold974_6 whole genome shotgun sequence |
| 5527 | human gut metagenome genome assembly contig: |
| | NODE_201_length_32361_cov_2.283489 whole |
| | genome shotgun sequence |
| 5570 | human gut metagenome genome assembly contig: |
| | NODE_2369_length_7527_cov_5.059422 whole |
| | genome shotgun sequence |
| 5581 | human gut metagenome genome assembly contig: |
| | NODE_50_length_138469_cov_13.284321 whole |
| | genome shotgun sequence |
| 5590 | human gut metagenome genome assembly contig: |
| | NODE_294_length_19151_cov_7.255341 whole |
| | genome shotgun sequence |
| 5619 | human gut metagenome genome assembly contig: |
| | NODE_1887_length_13272_cov_2.952258 whole |
| | genome shotgun sequence |
| 5643 | human gut metagenome genome assembly contig: |
| | NODE_12947_length_3012_cov_1.885357 whole |
| | genome shotgun sequence |
| 5669 | human gut metagenome genome assembly contig: |
| | NODE_1625_length_14553_cov_5.136777 whole |
| | genome shotgun sequence |
| 5673 | human gut metagenome genome assembly contig: |
| | NODE_1646_length_4847_cov_1.792571 whole |
| | genome shotgun sequence |
| 5680 | human gut metagenome genome assembly contig: |
| | NODE_205_length_43457_cov_6.934819 whole |
| | genome shotgun sequence |
| 5695 | human gut metagenome genome assembly contig: |
| | scaffold31373_4 whole genome shotgun sequence |
| 5718 | human gut metagenome genome assembly contig: |
| | NODE_9930_length_4844_cov_4.637294 whole |
| | genome shotgun sequence |
| 5733 | metagenome genome assembly contig: |
| | NODE_3031_length_7368_cov_2.373308 whole |
| | genome shotgun sequence |
| 5767 | human gut metagenome genome assembly contig: |
| | NODE_1_length_405539_cov_13.248221 whole |
| | genome shotgun sequence |
| 5821 | human gut metagenome genome assembly contig: |
| | NODE_630_length_36417_cov_10.4457 whole |
| | genome shotgun sequence |
| 5882 | human gut metagenome genome assembly contig: |
| | NODE_336_length_39785_cov_4.293431 whole |
| | genome shotgun sequence |
| 5915 | human gut metagenome genome assembly contig: |
| | NODE_10959_length_4455_cov_3.972590 whole |
| | genome shotgun sequence |
| 5930 | human gut metagenome genome assembly contig: |
| | NODE_73_length_88106_cov_8.969961 whole |
| | genome shotgun sequence |
| 5960 | human gut metagenome genome assembly contig: |
| | NODE_463_length_51579_cov_9.761043 whole |
| | genome shotgun sequence |
| 5965 | human gut metagenome genome assembly contig: |
| | scaffold70714_1 whole genome shotgun sequence |
| 5980 | human oral metagenome genome assembly contig: |
| | NODE_6_length_200032_cov_8.709477 whole |
| | genome shotgun sequence |
| 6044 | human gut metagenome genome assembly contig: |
| | NODE_3884_length_12071_cov_2.666861 whole |
| | genome shotgun sequence |
| 6076 | human gut metagenome genome assembly contig: |
| | NODE_2087_length_10224_cov_13.811879 whole |
| | genome shotgun sequence |
| 6077 | human gut metagenome genome assembly contig: |
| | NODE_2761_length_7688_cov_4.331305 whole |
| | genome shotgun sequence |
| 6188 | human gut metagenome genome assembly contig: |
| | NODE_90_length_97144_cov_18.177342 whole |
| | genome shotgun sequence |
| 6196 | human gut metagenome genome assembly contig: |
| | NODE_613_length_24315_cov_11.216488 whole |
| | genome shotgun sequence |
| 6198 | human gut metagenome genome assembly contig: |
| | NODE_3000_length_12613_cov_5.605988 whole |
| | genome shotgun sequence |
| 6276 | human gut metagenome genome assembly contig: |
| | NODE_4_length_303908_cov_13.301279 whole |
| | genome shotgun sequence |
| 6295 | human gut metagenome genome assembly contig: |
| | NODE_155_length_56816_cov_15.022921 whole |
| | genome shotgun sequence |
| 6368 | human gut metagenome genome assembly contig: |
| | NODE_1607_length_14074_cov_2.472787 whole |
| | genome shotgun sequence |
| 6380 | human gut metagenome genome assembly contig: |
| | NODE_193_length_47859_cov_12.937725 whole |
| | genome shotgun sequence |
| 6421 | human gut metagenome genome assembly contig: |
| | NODE_3868_length_6513_cov_6.6694 whole |
| | genome shotgun sequence |
| 6456 | human gut metagenome genome assembly contig: |
| | NODE_2690_length_5808_cov_2.769685 whole |
| | genome shotgun sequence |
| 6502 | human gut metagenome genome assembly contig: |
| | NODE_536_length_45523_cov_11.016847 whole |
| | genome shotgun sequence |
| 6514 | human gut metagenome genome assembly contig: |
| | NODE_2154_length_10120_cov_3.900050 whole |
| | genome shotgun sequence |
| 6528 | human gut metagenome genome assembly contig: |
| | NODE_3516_length_3861_cov_1.731214 whole |
| | genome shotgun sequence |
| 6529 | human gut metagenome genome assembly contig: |
| | NODE_45_length_159152_cov_41.667568 whole |
| | genome shotgun sequence |
| 6530 | human gut metagenome genome assembly contig: |
| | scaffold40205_6 whole genome shotgun sequence |
| 6550 | human gut metagenome genome assembly contig: |
| | NODE_3825_length_4278_cov_5.539190 whole |
| | genome shotgun sequence |
| 6551 | human gut metagenome genome assembly contig: |
| | NODE_829_length_4628_cov_3.603980 whole |
| | genome shotgun sequence |
| 6605 | human gut metagenome genome assembly contig: |
| | NODE_1759_length_10565_cov_3.283825 whole |
| | genome shotgun sequence |
| 6621 | human gut metagenome genome assembly contig: |
| | NODE_2777_length_3544_cov_1.830897 whole |
| | genome shotgun sequence |
| 6623 | human gut metagenome genome assembly contig: |
| | NODE_211_length_88437_cov_6.049955 whole |
| | genome shotgun sequence |
| 6625 | human gut metagenome genome assembly contig: |
| | NODE_4401_length_5137_cov_4.176702 whole |
| | genome shotgun sequence |
| 6679 | human gut metagenome genome assembly contig: |
| | NODE_142_length_91424_cov_16.078823 whole |
| | genome shotgun sequence |
| 6688 | Sharpea azabuensis strain DSM 20406 genome |
| | assembly contig: Ga0059086_1011 whole genome |
| | shotgun sequence |
| 6753 | human gut metagenome genome assembly contig: |
| | NODE_22_length_114455_cov_17.395909 whole |
| | genome shotgun sequence |
| 6762 | human gut metagenome genome assembly contig: |
| | NODE_55_length_99565_cov_5.298151 whole |
| | genome shotgun sequence |
| 6800 | human gut metagenome genome assembly contig: |
| | NODE_2921_length_6698_cov_3.513925 whole |
| | genome shotgun sequence |
| 6807 | human gut metagenome genome assembly contig: |
| | NODE_2642_length_5749_cov_3.024412 whole |
| | genome shotgun sequence |
| 6892 | human gut metagenome genome assembly contig: |
| | NODE_844_length_34684_cov_4.488290 whole |
| | genome shotgun sequence |
| 6913 | human gut metagenome genome assembly contig: |
| | scaffold11849_2 whole genome shotgun sequence |
| 6923 | human gut metagenome genome assembly contig: |
| | NODE_568_length_41823_cov_7.222754 whole |
| | genome shotgun sequence |
| 6944 | human gut metagenome genome assembly contig: |
| | NODE_1708_length_8840_cov_6.215936 whole |
| | genome shotgun sequence |
| 6963 | human gut metagenome genome assembly contig: |
| | NODE_20_length_143069_cov_29.200428 whole |
| | genome shotgun sequence |
| 7032 | human gut metagenome genome assembly contig: |
| | scaffold33050_2 whole genome shotgun sequence |
| 7099 | human gut metagenome genome assembly contig: |
| | NODE_2_length_653716_cov_25.015034 whole |
| | genome shotgun sequence |
| 7120 | human gut metagenome genome assembly contig: |
| | NODE_780_length_27468_cov_21.571262 whole |
| | genome shotgun sequence |
| 7199 | metagenome genome assembly contig: |
| | NODE_123_length_95531_cov_4.281254 whole |
| | genome shotgun sequence |
| 7238 | human gut metagenome genome assembly contig: |
| | NODE_4131_length_3124_cov_3.517758 whole |
| | genome shotgun sequence |
| 7250 | human gut metagenome genome assembly contig: |
| | NODE_23_length_250288_cov_6.76765 whole |
| | genome shotgun sequence |
| 7256 | human gut metagenome genome assembly contig: |
| | NODE_1797_length_6599_cov_3.744193 whole |
| | genome shotgun sequence |
| 7260 | human gut metagenome genome assembly contig: |
| | NODE_3412_length_10977_cov_4.770921 whole |
| | genome shotgun sequence |
| 7276 | human gut metagenome genome assembly contig: |
| | NODE_2311_length_10992_cov_3.453872 whole |
| | genome shotgun sequence |
| 7293 | human gut metagenome genome assembly contig: |
| | NODE_648_length_29194_cov_4.599334 whole |
| | genome shotgun sequence |
| 7302 | human gut metagenome genome assembly contig: |
| | NODE_6315_length_3125_cov_2.366450 whole |
| | genome shotgun sequence |
| 7348 | human gut metagenome genome assembly contig: |
| | NODE_415_length_13233_cov_5.115116 whole |
| | genome shotgun sequence |
| 7412 | human gut metagenome genome assembly contig: |
| | NODE_115_length_32726_cov_7.932846 whole |
| | genome shotgun sequence |
| 7424 | human gut metagenome genome assembly contig: |
| | NODE_62_length_64318_cov_5.757823 whole |
| | genome shotgun sequence |
| 7452 | human gut metagenome genome assembly contig: |
| | NODE_590_length_10245_cov_4.425613 whole |
| | genome shotgun sequence |
| 7540 | human gut metagenome genome assembly contig: |
| | NODE_7661_length_3755_cov_2.234054 whole |
| | genome shotgun sequence |
| 7541 | human gut metagenome genome assembly contig: |
| | NODE_23_length_187167_cov_31.108064 whole |
| | genome shotgun sequence |
| 7563 | human gut metagenome genome assembly contig: |
| | NODE_1375_length_10207_cov_2.593282 whole |
| | genome shotgun sequence |
| 7565 | human gut metagenome genome assembly contig: |
| | NODE_809_length_41375_cov_4.042811 whole |
| | genome shotgun sequence |
| 7591 | human gut metagenome genome assembly contig: |
| | NODE_2621_length_10226_cov_3.515092 whole |
| | genome shotgun sequence |
| 7597 | human gut metagenome genome assembly contig: |
| | NODE_1493_length_15693_cov_4.201752 whole |
| | genome shotgun sequence |
| 7652 | human gut metagenome genome assembly contig: |
| | NODE_80_length_27560_cov_7.719833 whole |
| | genome shotgun sequence |
| 7746 | human gut metagenome genome assembly contig: |
| | NODE_9626_length_3079_cov_2.186839 whole |
| | genome shotgun sequence |
| 7747 | human gut metagenome genome assembly contig: |
| | NODE_1650_length_31407_cov_12.765310 whole |
| | genome shotgun sequence |
| 7785 | human gut metagenome genome assembly contig: |
| | NODE_60_length_129491_cov_5.283754 whole |
| | genome shotgun sequence |
| 7793 | human gut metagenome genome assembly contig: |
| | NODE_171_length_53546_cov_14.759978 whole |
| | genome shotgun sequence |
| 7841 | mouse gut metagenome genome assembly contig: |
| | NODE_6292_length_3114_cov_3.219026 whole |
| | genome shotgun sequence |
| 7847 | human gut metagenome genome assembly contig: |
| | NODE_558_length_24149_cov_5.848925 whole |
| | genome shotgun sequence |
| 7896 | human gut metagenome genome assembly contig: |
| | NODE_2139_length_5040_cov_4.140421 whole |
| | genome shotgun sequence |
| 7914 | human gut metagenome genome assembly contig: |
| | NODE_1012_length_32048_cov_5.771762 whole |
| | genome shotgun sequence |
| 7928 | metagenome genome assembly contig: |
| | NODE_7838_length_5338_cov_2.692599 whole |
| | genome shotgun sequence |
| 7953 | metagenome genome assembly contig: |
| | NODE_5265_length_3702_cov_2.962238 whole |
| | genome shotgun sequence |
| 7980 | human gut metagenome genome assembly contig: |
| | NODE_11509_length_3623_cov_2.657231 whole |
| | genome shotgun sequence |
| 7995 | human gut metagenome genome assembly contig: |
| | NODE_111_length_63224_cov_6.359638 whole |
| | genome shotgun sequence |
| 8014 | human gut metagenome genome assembly contig: |
| | NODE_34_length_145402_cov_9.038817 whole |
| | genome shotgun sequence |
| 8048 | human gut metagenome genome assembly contig: |
| | NODE_3699_length_7482_cov_3.160765 whole |
| | genome shotgun sequence |
| 8063 | human gut metagenome genome assembly contig: |
| | NODE_1493_length_7916_cov_2.918458 whole |
| | genome shotgun sequence |
| 8073 | metagenome genome assembly contig: |
| | NODE_3031_length_7368_cov_2.373308 whole |
| | genome shotgun sequence |
| 8104 | human gut metagenome genome assembly contig: |
| | NODE_92_length_76094_cov_11.189640 whole |
| | genome shotgun sequence |
| 8122 | human gut metagenome genome assembly contig: |
| | NODE_1187_length_19140_cov_11.392664 whole |
| | genome shotgun sequence |
| 8134 | human gut metagenome genome assembly contig: |
| | NODE_799_length_34209_cov_7.074720 whole |
| | genome shotgun sequence |
| 8144 | human gut metagenome genome assembly contig: |
| | NODE_4691_length_4565_cov_2.357428 whole |
| | genome shotgun sequence |
| 8165 | human gut metagenome genome assembly contig: |
| | NODE_1820_length_20349_cov_5.789217 whole |
| | genome shotgun sequence |
| 8203 | human gut metagenome genome assembly contig: |
| | NODE_1032_length_27514_cov_5.249171 whole |
| | genome shotgun sequence |
| 8212 | human gut metagenome genome assembly contig: |
| | NODE_720_length_17506_cov_3.008366 whole |
| | genome shotgun sequence |
| 8222 | human gut metagenome genome assembly contig: |
| | NODE_3685_length_4040_cov_3.440151 whole |
| | genome shotgun sequence |
| 8236 | human gut metagenome genome assembly contig: |
| | NODE_2861_length_16344_cov_21.600098 whole |
| | genome shotgun sequence |
| 8255 | human gut metagenome genome assembly contig: |
| | NODE_17270_length_2723_cov_2.178786 whole |
| | genome shotgun sequence |
| 8260 | human gut metagenome genome assembly contig: |
| | NODE_365_length_57138_cov_7.486064 whole |
| | genome shotgun sequence |
| 8289 | human gut metagenome genome assembly contig: |
| | NODE_5446_length_4856_cov_73.618829 whole |
| | genome shotgun sequence |
| 8295 | human gut metagenome genome assembly contig: |
| | NODE_368_length_23639_cov_6.729350 whole |
| | genome shotgun sequence |
| 8318 | human gut metagenome genome assembly contig: |
| | NODE_430_length_33544_cov_11.146615 whole |
| | genome shotgun sequence |
| 8338 | Fusicatenibacter saccharivorans strain |
| | 2789STDY5834923 genome assembly contig: |
| | SCcontig000009 whole genome shotgun sequence |
| 8345 | human gut metagenome genome assembly contig: |
| | NODE_1430_length_6839_cov_5.32238 whole |
| | genome shotgun sequence |
| 8349 | human gut metagenome genome assembly contig: |
| | NODE_131_length_87097_cov_7.516785 whole |
| | genome shotgun sequence |
| 8367 | human gut metagenome genome assembly contig: |
| | NODE_198_length_52988_cov_5.601912 whole |
| | genome shotgun sequence |
| 8373 | human gut metagenome genome assembly contig: |
| | NODE_1099_length_16359_cov_4.35599 whole |
| | genome shotgun sequence |
| 8383 | human gut metagenome genome assembly contig: |
| | NODE_7986_length_3250_cov_1.594679 whole |
| | genome shotgun sequence |
| 8396 | human gut metagenome genome assembly contig: |
| | NODE_423_length_46051_cov_5.562853 whole |
| | genome shotgun sequence |
| 8418 | human gut metagenome genome assembly contig: |
| | scaffold6165_1 whole genome shotgun sequence |
| 8426 | human gut metagenome genome assembly contig: |
| | NODE_770_length_35588_cov_10.753440 whole |
| | genome shotgun sequence |
| 8455 | human gut metagenome genome assembly contig: |
| | NODE_14286_length_3423_cov_10.009204 whole |
| | genome shotgun sequence |
| 8494 | human gut metagenome genome assembly contig: |
| | NODE_147_length_40177_cov_9.273142 whole |
| | genome shotgun sequence |
| 8514 | human gut metagenome genome assembly contig: |
| | NODE_849_length_21711_cov_5.729451 whole |
| | genome shotgun sequence |
| 8517 | human gut metagenome genome assembly contig: |
| | NODE_692_length_38629_cov_179.993830 whole |
| | genome shotgun sequence |
| 8525 | human gut metagenome genome assembly contig: |
| | NODE_1_length_192028_cov_7.543415 whole |
| | genome shotgun sequence |
| 8529 | human gut metagenome genome assembly contig: |
| | scaffold185255_1 whole genome shotgun sequence |
| 8531 | human gut metagenome genome assembly contig: |
| | scaffold16001_6 whole genome shotgun sequence |
| 8540 | human gut metagenome genome assembly contig: |
| | NODE_102_length_90614_cov_8.666505 whole |
| | genome shotgun sequence |
| 8543 | human gut metagenome genome assembly contig: |
| | NODE_1451_length_13549_cov_3.7258 whole |
| | genome shotgun sequence |
| 8553 | human gut metagenome genome assembly contig: |
| | NODE_5621_length_3743_cov_1.698753 whole |
| | genome shotgun sequence |
| 8577 | human gut metagenome genome assembly contig: |
| | NODE_5_length_389405_cov_14.085805 whole |
| | genome shotgun sequence |
| 8585 | human gut metagenome genome assembly contig: |
| | NODE_4364_length_10841_cov_3.064992 whole |
| | genome shotgun sequence |
| 8670 | human gut metagenome genome assembly contig: |
| | NODE_113_length_92528_cov_4.742952 whole |
| | genome shotgun sequence |
| 8695 | human gut metagenome genome assembly contig: |
| | NODE_1619_length_18823_cov_4.566603 whole |
| | genome shotgun sequence |
| 8733 | human gut metagenome genome assembly contig: |
| | NODE_27_length_187129_cov_12.7707 whole |
| | genome shotgun sequence |
| 8775 | uncultured Clostridiales bacterium isolate RUG296 |
| | genome assembly contig: k87_14279786 whole |
| | genome shotgun sequence |
| 8803 | human gut metagenome genome assembly contig: |
| | NODE_103_length_100392_cov_5.727867 whole |
| | genome shotgun sequence |
| 8805 | human gut metagenome genome assembly contig: |
| | NODE_6183_length_3373_cov_2.085292 whole |
| | genome shotgun sequence |
| 8811 | human gut metagenome genome assembly contig: |
| | NODE_2016_length_4420_cov_1.664605 whole |
| | genome shotgun sequence |
| 8824 | human gut metagenome genome assembly contig: |
| | NODE_250_length_64363_cov_18.5579 whole |
| | genome shotgun sequence |
| 8842 | human gut metagenome genome assembly contig: |
| | NODE_36_length_101251_cov_7.561307 whole |
| | genome shotgun sequence |
| 8886 | human gut metagenome genome assembly contig: |
| | NODE_2025_length_35282_cov_5.075870 whole |
| | genome shotgun sequence |
| 8913 | human gut metagenome genome assembly contig: |
| | NODE_6276_length_5740_cov_2.292524 whole |
| | genome shotgun sequence |
| 8921 | human gut metagenome genome assembly contig: |
| | NODE_1672_length_19890_cov_3.944542 whole |
| | genome shotgun sequence |
| 8929 | human gut metagenome genome assembly contig: |
| | NODE_650_length_18310_cov_6.670282 whole |
| | genome shotgun sequence |
| 8974 | human gut metagenome genome assembly contig: |
| | NODE_201_length_78216_cov_8.277658 whole |
| | genome shotgun sequence |
| 8976 | human gut metagenome genome assembly contig: |
| | NODE_18_length_161738_cov_15.861989 whole |
| | genome shotgun sequence |
| 8977 | uncultured Lachnospiraceae bacterium isolate |
| | RUG14296 genome assembly contig: |
| | RUG14296_asm_139 whole genome shotgun |
| | sequence |
| 8978 | human gut metagenome genome assembly contig: |
| | NODE_1776_length_6864_cov_5.169335 whole |
| | genome shotgun sequence |
| 9007 | human gut metagenome genome assembly contig: |
| | NODE_8677_length_4921_cov_3.111796 whole |
| | genome shotgun sequence |
| 9028 | human gut metagenome genome assembly contig: |
| | NODE_83_length_63076_cov_9.027975 whole |
| | genome shotgun sequence |
| 9047 | human gut metagenome genome assembly contig: |
| | NODE_9012_length_4883_cov_3.181856 whole |
| | genome shotgun sequence |
| 9072 | human gut metagenome genome assembly contig: |
| | NODE_137_length_75514_cov_5.058495 whole |
| | genome shotgun sequence |
| 9075 | human gut metagenome genome assembly contig: |
| | scaffold8585_2 whole genome shotgun sequence |
| 9090 | human gut metagenome genome assembly contig: |
| | NODE_226_length_88106_cov_9.679175 whole |
| | genome shotgun sequence |
| 9101 | human gut metagenome genome assembly contig: |
| | NODE_8239_length_3867_cov_2.188090 whole |
| | genome shotgun sequence |
| 9102 | human gut metagenome genome assembly contig: |
| | NODE_297_length_58107_cov_4.80714 whole |
| | genome shotgun sequence |
| 9208 | human gut metagenome genome assembly contig: |
| | NODE_848_length_19379_cov_6.833524 whole |
| | genome shotgun sequence |
| 9225 | human gut metagenome genome assembly contig: |
| | NODE_23_length_68431_cov_11.256691 whole |
| | genome shotgun sequence |
| 9267 | human gut metagenome genome assembly contig: |
| | NODE_1671_length_7882_cov_4.051744 whole |
| | genome shotgun sequence |
| 9279 | metagenome genome assembly contig: |
| | NODE_54_length_99787_cov_20.987607 whole |
| | genome shotgun sequence |
| 9349 | human gut metagenome genome assembly contig: |
| | NODE_6216_length_3511_cov_4.736111 whole |
| | genome shotgun sequence |
| 9379 | human gut metagenome genome assembly contig: |
| | NODE_265_length_30224_cov_6.320859 whole |
| | genome shotgun sequence |
| 9404 | human gut metagenome genome assembly contig: |
| | NODE_123_length_95766_cov_9.81079 whole |
| | genome shotgun sequence |
| 9418 | human gut metagenome genome assembly contig: |
| | NODE_16_length_139817_cov_4.832544 whole |
| | genome shotgun sequence |
| 9422 | human gut metagenome genome assembly contig: |
| | scaffold31638_8 whole genome shotgun sequence |
| 9435 | human gut metagenome genome assembly contig: |
| | NODE_2721_length_9228_cov_8.070533 whole |
| | genome shotgun sequence |
| 9454 | human gut metagenome genome assembly contig: |
| | NODE_71_length_70811_cov_2.450562 whole |
| | genome shotgun sequence |
| 9476 | human gut metagenome genome assembly contig: |
| | NODE_726_length_16725_cov_3.077624 whole |
| | genome shotgun sequence |
| 9498 | human gut metagenome genome assembly contig: |
| | NODE_1283_length_3092_cov_1.301613 whole |
| | genome shotgun sequence |
| 9509 | human gut metagenome genome assembly contig: |
| | NODE_11045_length_4628_cov_2.732779 whole |
| | genome shotgun sequence |
| 9512 | human gut metagenome genome assembly contig: |
| | scaffold30537_2 whole genome shotgun sequence |
| 9517 | human gut metagenome genome assembly contig: |
| | NODE_173_length_51345_cov_7.769000 whole |
| | genome shotgun sequence |
| 9525 | human gut metagenome genome assembly contig: |
| | NODE_2974_length_4489_cov_4.370320 whole |
| | genome shotgun sequence |
| 9534 | human gut metagenome genome assembly contig: |
| | NODE_70_length_150486_cov_11.168403 whole |
| | genome shotgun sequence |
| 9537 | human gut metagenome genome assembly contig: |
| | NODE_5_length_150013_cov_15.841079 whole |
| | genome shotgun sequence |
| 9544 | human gut metagenome genome assembly contig: |
| | NODE_4394_length_4512_cov_4.121606 whole |
| | genome shotgun sequence |
| 9546 | human gut metagenome genome assembly contig: |
| | NODE_10703_length_4951_cov_4.909926 whole |
| | genome shotgun sequence |
| 9548 | human gut metagenome genome assembly contig: |
| | NODE_28_length_160452_cov_25.355437 whole |
| | genome shotgun sequence |
| 9566 | human gut metagenome genome assembly contig: |
| | NODE_528_length_45206_cov_5.496379 whole |
| | genome shotgun sequence |
| 9577 | human gut metagenome genome assembly contig: |
| | NODE_557_length_30804_cov_4.622687 whole |
| | genome shotgun sequence |
| 9591 | human gut metagenome genome assembly contig: |
| | NODE_92_length_103398_cov_8.27352 whole |
| | genome shotgun sequence |
| 9603 | human gut metagenome genome assembly contig: |
| | NODE_235_length_62149_cov_5.608455 whole |
| | genome shotgun sequence |
| 9619 | human gut metagenome genome assembly contig: |
| | NODE_6_length_247883_cov_5.834425 whole |
| | genome shotgun sequence |
| 9623 | human gut metagenome genome assembly contig: |
| | NODE_19_length_201456_cov_23.415718 whole |
| | genome shotgun sequence |
| 9631 | human gut metagenome genome assembly contig: |
| | NODE_36_length_124873_cov_12.7279 whole |
| | genome shotgun sequence |
| 9638 | human gut metagenome genome assembly contig: |
| | NODE_79_length_124372_cov_19.772002 whole |
| | genome shotgun sequence |
| 9687 | human gut metagenome genome assembly contig: |
| | NODE_54_length_51943_cov_6.456792 whole |
| | genome shotgun sequence |
| 9691 | human gut metagenome genome assembly contig: |
| | NODE_213_length_78732_cov_4.358529 whole |
| | genome shotgun sequence |
| 9700 | human gut metagenome genome assembly contig: |
| | NODE_7488_length_4410_cov_3.645006 whole |
| | genome shotgun sequence |
| 9710 | human gut metagenome genome assembly contig: |
| | NODE_18_length_136044_cov_5.817029 whole |
| | genome shotgun sequence |
| 9717 | human gut metagenome genome assembly contig: |
| | NODE_2292_length_15083_cov_2.561818 whole |
| | genome shotgun sequence |
| 9776 | human gut metagenome genome assembly contig: |
| | NODE_1347_length_24507_cov_10.762146 whole |
| | genome shotgun sequence |
| 9801 | human gut metagenome genome assembly contig: |
| | NODE_39_length_160391_cov_23.397153 whole |
| | genome shotgun sequence |
| 9826 | human gut metagenome genome assembly contig: |
| | NODE_2960_length_4434_cov_5.373830 whole |
| | genome shotgun sequence |
| 9837 | human gut metagenome genome assembly contig: |
| | NODE_3861_length_6344_cov_3.048827 whole |
| | genome shotgun sequence |
| 9854 | human gut metagenome genome assembly contig: |
| | NODE_4901_length_8604_cov_6.141654 whole |
| | genome shotgun sequence |
| 9864 | human gut metagenome genome assembly contig: |
| | NODE_25_length_111189_cov_10.317302 whole |
| | genome shotgun sequence |
| 9873 | human gut metagenome genome assembly contig: |
| | NODE_495_length_42562_cov_23.046886 whole |
| | genome shotgun sequence |
| 9883 | human gut metagenome genome assembly contig: |
| | NODE_705_length_15377_cov_5.26857 whole |
| | genome shotgun sequence |
| 9915 | human gut metagenome genome assembly contig: |
| | NODE_1506_length_11827_cov_118.697106 |
| | whole genome shotgun sequence |
| 9928 | human gut metagenome genome assembly contig: |
| | NODE_203_length_72360_cov_7.10208 whole |
| | genome shotgun sequence |
| 9941 | human gut metagenome genome assembly contig: |
| | NODE_1319_length_10488_cov_3.126617 whole |
| | genome shotgun sequence |
| 9946 | human gut metagenome genome assembly contig: |
| | scaffold49497_3 whole genome shotgun sequence |
| 9950 | human gut metagenome genome assembly contig: |
| | NODE_3579_length_3471_cov_2.974532 whole |
| | genome shotgun sequence |
| 9969 | human gut metagenome genome assembly contig: |
| | NODE_10206_length_3106_cov_1.987545 whole |
| | genome shotgun sequence |
| 9977 | human gut metagenome genome assembly contig: |
| | NODE_8_length_166859_cov_4.377803 whole |
| | genome shotgun sequence |
| 10013 | human gut metagenome genome assembly contig: |
| | NODE_3702_length_4616_cov_4.006358 whole |
| | genome shotgun sequence |
| 10015 | human gut metagenome genome assembly contig: |
| | scaffold53824_1 whole genome shotgun sequence |
| 10050 | human gut metagenome genome assembly contig: |
| | NODE_222_length_38379_cov_8.330185 whole |
| | genome shotgun sequence |
| 10057 | human gut metagenome genome assembly contig: |
| | NODE_2074_length_16404_cov_3.839562 whole |
| | genome shotgun sequence |
| 10085 | human gut metagenome genome assembly contig: |
| | NODE_2193_length_14132_cov_3.971585 whole |
| | genome shotgun sequence |
| 10100 | human gut metagenome genome assembly contig: |
| | NODE_243_length_78405_cov_4.847211 whole |
| | genome shotgun sequence |
| 10113 | Fusicatenibacter saccharivorans strain |
| | 2789STDY5834923 genome assembly contig: |
| | SCcontig000009 whole genome shotgun sequence |
| 10144 | human gut metagenome genome assembly contig: |
| | NODE_726_length_23822_cov_2.648799 whole |
| | genome shotgun sequence |
| 10248 | human gut metagenome genome assembly contig: |
| | NODE_6136_length_7041_cov_3.399370 whole |
| | genome shotgun sequence |
| 10292 | human gut metagenome genome assembly contig: |
| | scaffold74551_1 whole genome shotgun sequence |
| 10293 | human gut metagenome genome assembly contig: |
| | NODE_713_length_17889_cov_5.160760 whole |
| | genome shotgun sequence |
| 10318 | human gut metagenome genome assembly contig: |
| | scaffold115147_1 whole genome shotgun sequence |
| 10338 | human gut metagenome genome assembly contig: |
| | NODE_830_length_23610_cov_6.693016 whole |
| | genome shotgun sequence |
| 10376 | human gut metagenome genome assembly contig: |
| | NODE_84_length_123301_cov_9.010134 whole |
| | genome shotgun sequence |
| 10403 | human gut metagenome genome assembly contig: |
| | NODE_274_length_30766_cov_6.685748 whole |
| | genome shotgun sequence |
| 10421 | human gut metagenome genome assembly contig: |
| | NODE_123_length_18254_cov_0.925801 whole |
| | genome shotgun sequence |
| 10438 | human gut metagenome genome assembly contig: |
| | scaffold3408_5 whole genome shotgun sequence |
| 10449 | human gut metagenome genome assembly contig: |
| | NODE_2878_length_11622_cov_10.222097 whole |
| | genome shotgun sequence |
| 10467 | human gut metagenome genome assembly contig: |
| | NODE_3325_length_9423_cov_3.162850 whole |
| | genome shotgun sequence |
| 10475 | human gut metagenome genome assembly contig: |
| | NODE_5504_length_8766_cov_3.150385 whole |
| | genome shotgun sequence |
| 10488 | human gut metagenome genome assembly contig: |
| | NODE_2952_length_4094_cov_2.555335 whole |
| | genome shotgun sequence |
| 10502 | metagenome genome assembly contig: |
| | NODE_38_length_153474_cov_1.920727 whole |
| | genome shotgun sequence |
| 10534 | human metagenome genome assembly contig: |
| | NODE_9_length_231189_cov_22.7928 whole |
| | genome shotgun sequence |
| 10543 | uncultured Clostridium sp. isolate UMGS1619 |
| | genome assembly contig: |
| | NODE_3395_length_11283_cov_5.144015 whole |
| | genome shotgun sequence |
| 10547 | human gut metagenome genome assembly contig: |
| | scaffold16804_5 whole genome shotgun sequence |
| 10554 | human gut metagenome genome assembly contig: |
| | NODE_192_length_98617_cov_6.579744 whole |
| | genome shotgun sequence |
| 10574 | human gut metagenome genome assembly contig: |
| | NODE_8_length_183296_cov_7.262518 whole |
| | genome shotgun sequence |
| 10578 | metagenome genome assembly contig: |
| | NODE_348_length_68049_cov_18.157323 whole |
| | genome shotgun sequence |
| 10579 | human gut metagenome genome assembly contig: |
| | NODE_2882_length_10398_cov_5.717566 whole |
| | genome shotgun sequence |
| 10583 | human gut metagenome genome assembly contig: |
| | NODE_1511_length_10554_cov_4.127917 whole |
| | genome shotgun sequence |
| 10588 | human gut metagenome genome assembly contig: |
| | NODE_778_length_36716_cov_5.802870 whole |
| | genome shotgun sequence |
| 10591 | human gut metagenome genome assembly contig: |
| | NODE_485_length_52682_cov_8.819617 whole |
| | genome shotgun sequence |
| 10628 | human gut metagenome genome assembly contig: |
| | NODE_797_length_22095_cov_5.005944 whole |
| | genome shotgun sequence |
| 10634 | human gut metagenome genome assembly contig: |
| | NODE_340_length_39626_cov_7.8161 whole |
| | genome shotgun sequence |
| 10655 | human gut metagenome genome assembly contig: |
| | NODE_126_length_54640_cov_2.204580 whole |
| | genome shotgun sequence |
| 10681 | human gut metagenome genome assembly contig: |
| | scaffold12674_17 whole genome shotgun sequence |
| 10682 | human gut metagenome genome assembly contig: |
| | NODE_9711_length_3525_cov_2.563112 whole |
| | genome shotgun sequence |
| 10731 | human gut metagenome genome assembly contig: |
| | scaffold5182_18 whole genome shotgun sequence |
| 10739 | human gut metagenome genome assembly contig: |
| | NODE_489_length_14757_cov_12.349272 whole |
| | genome shotgun sequence |
| 10749 | human gut metagenome genome assembly contig: |
| | NODE_746_length_42012_cov_5.592583 whole |
| | genome shotgun sequence |
| 10767 | human gut metagenome genome assembly contig: |
| | NODE_53_length_94641_cov_6.785539 whole |
| | genome shotgun sequence |
| 10770 | human gut metagenome genome assembly contig: |
| | scaffold104374 2 whole genome shotgun sequence |
| 10778 | human gut metagenome genome assembly contig: |
| | NODE_18_length_136044_cov_5.817029 whole |
| | genome shotgun sequence |
| 10785 | human gut metagenome genome assembly contig: |
| | NODE_3904_length_9377_cov_2.775370 whole |
| | genome shotgun sequence |
| 10843 | human gut metagenome genome assembly contig: |
| | NODE_1453_length_14990_cov_6.436224 whole |
| | genome shotgun sequence |
| 10847 | human gut metagenome genome assembly contig: |
| | NODE_526_length_22956_cov_5.428235 whole |
| | genome shotgun sequence |
| 10851 | human gut metagenome genome assembly contig: |
| | scaffold491_12 whole genome shotgun sequence |
| 10896 | human gut metagenome genome assembly contig: |
| | NODE_1003_length_14370_cov_2.654768 whole |
| | genome shotgun sequence |
| 10950 | metagenome genome assembly contig: |
| | NODE_3656_length_4993_cov_2.771770 whole |
| | genome shotgun sequence |
| 10984 | human gut metagenome genome assembly contig: |
| | NODE_58_length_94063_cov_16.914051 whole |
| | genome shotgun sequence |
| 11000 | human gut metagenome genome assembly contig: |
| | scaffold102627_1 whole genome shotgun sequence |
| 11045 | human gut metagenome genome assembly contig: |
| | NODE_104_length_87711_cov_16.178379 whole |
| | genome shotgun sequence |
| 11048 | human gut metagenome genome assembly contig: |
| | NODE_2620_length_19856_cov_4.277259 whole |
| | genome shotgun sequence |
| 11067 | human gut metagenome genome assembly contig: |
| | NODE_164_length_47982_cov_14.278653 whole |
| | genome shotgun sequence |
| 11074 | human gut metagenome genome assembly contig: |
| | scaffold83667_1 whole genome shotgun sequence |
| 11100 | human gut metagenome genome assembly contig: |
| | NODE_11588_length_3963_cov_4.068833 whole |
| | genome shotgun sequence |
| 11107 | human gut metagenome genome assembly contig: |
| | scaffold35326_1 whole genome shotgun sequence |
| 11221 | human gut metagenome genome assembly contig: |
| | NODE_90_length_81310_cov_11.864476 whole |
| | genome shotgun sequence |
| 11229 | human gut metagenome genome assembly contig: |
| | NODE_3307_length_4536_cov_3.923008 whole |
| | genome shotgun sequence |
| 11236 | human gut metagenome genome assembly contig: |
| | NODE_103_length_56026_cov_7.024155 whole |
| | genome shotgun sequence |
| 11238 | human gut metagenome genome assembly contig: |
| | NODE_272_length_54543_cov_6.371256 whole |
| | genome shotgun sequence |
| 11242 | human gut metagenome genome assembly contig: |
| | NODE_11_length_176622_cov_4.531169 whole |
| | genome shotgun sequence |
| 11250 | human gut metagenome genome assembly contig: |
| | NODE_42_length_112302_cov_6.386300 whole |
| | genome shotgun sequence |
| 11254 | human gut metagenome genome assembly contig: |
| | NODE_112_length_68928_cov_3.552582 whole |
| | genome shotgun sequence |
| 11294 | human gut metagenome genome assembly contig: |
| | NODE_7_length_132131_cov_5.158265 whole |
| | genome shotgun sequence |
| 11349 | human gut metagenome genome assembly contig: |
| | NODE_6257_length_7742_cov_3.578509 whole |
| | genome shotgun sequence |
| 11383 | human gut metagenome genome assembly contig: |
| | NODE_502_length_35380_cov_2.916433 whole |
| | genome shotgun sequence |
| 11424 | human gut metagenome genome assembly contig: |
| | NODE_116_length_81298_cov_9.175892 whole |
| | genome shotgun sequence |
| 11449 | human gut metagenome genome assembly contig: |
| | NODE_515_length_30010_cov_4.418261 whole |
| | genome shotgun sequence |
| 11477 | human gut metagenome genome assembly contig: |
| | NODE_69_length_126489_cov_10.543058 whole |
| | genome shotgun sequence |
| 11502 | human gut metagenome genome assembly contig: |
| | NODE_415_length_67126_cov_8.106603 whole |
| | genome shotgun sequence |
| 11515 | human gut metagenome genome assembly contig: |
| | NODE_168_length_57121_cov_5.699453 whole |
| | genome shotgun sequence |
| 11527 | human gut metagenome genome assembly contig: |
| | NODE_8943_length_4033_cov_2.123680 whole |
| | genome shotgun sequence |
| 11546 | human gut metagenome genome assembly contig: |
| | NODE_1160_length_4737_cov_3.758437 whole |
| | genome shotgun sequence |
| 11547 | human gut metagenome genome assembly contig: |
| | NODE_3472_length_11568_cov_3.484756 whole |
| | genome shotgun sequence |
| 11565 | human gut metagenome genome assembly contig: |
| | NODE_1269_length_26567_cov_5.017879 whole |
| | genome shotgun sequence |
| 11569 | human gut metagenome genome assembly contig: |
| | NODE_518_length_13788_cov_5.297095 whole |
| | genome shotgun sequence |
| 11584 | human oral metagenome genome assembly |
| | contig: NODE_68_length_55922_cov_3.620098 |
| | whole genome shotgun sequence |
| 11612 | human gut metagenome genome assembly contig: |
| | NODE_8209_length_3708_cov_26.714208 whole |
| | genome shotgun sequence |
| 11647 | human gut metagenome genome assembly contig: |
| | NODE_6343_length_4121_cov_2.097639 whole |
| | genome shotgun sequence |
| 11656 | human gut metagenome genome assembly contig: |
| | NODE_50_length_89680_cov_2.617294 whole |
| | genome shotgun sequence |
| 11697 | human gut metagenome genome assembly contig: |
| | NODE_1474_length_22703_cov_4.161692 whole |
| | genome shotgun sequence |
| 11717 | human gut metagenome genome assembly contig: |
| | NODE_625_length_24458_cov_3.132033 whole |
| | genome shotgun sequence |
| 11728 | human gut metagenome genome assembly contig: |
| | NODE_13_length_244052_cov_24.307438 whole |
| | genome shotgun sequence |
| 11757 | human gut metagenome genome assembly contig: |
| | NODE_3443_length_11734_cov_3.615892 whole |
| | genome shotgun sequence |
| 11784 | human gut metagenome genome assembly contig: |
| | NODE_2370_length_6284_cov_3.312891 whole |
| | genome shotgun sequence |
| 11787 | human gut metagenome genome assembly contig: |
| | NODE_83_length_88288_cov_6.646300 whole |
| | genome shotgun sequence |
| 11796 | human gut metagenome genome assembly contig: |
| | NODE_37_length_94233_cov_5.631995 whole |
| | genome shotgun sequence |
| 11801 | human gut metagenome genome assembly contig: |
| | NODE_5611_length_3275_cov_1.507764 whole |
| | genome shotgun sequence |
| 11813 | metagenome genome assembly contig: |
| | NODE_111_length_98452_cov_11.846774 whole |
| | genome shotgun sequence |
| 11818 | human gut metagenome genome assembly contig: |
| | NODE_688_length_27805_cov_7.76966 whole |
| | genome shotgun sequence |
| 11848 | human gut metagenome genome assembly contig: |
| | NODE_97_length_98134_cov_9.126143 whole |
| | genome shotgun sequence |
| 11864 | human gut metagenome genome assembly contig: |
| | scaffold63605_1 whole genome shotgun sequence |
| 11876 | human gut metagenome genome assembly contig: |
| | NODE_22_length_69289_cov_3.636927 whole |
| | genome shotgun sequence |
| 11879 | human gut metagenome genome assembly contig: |
| | NODE_3111_length_4611_cov_3.907155 whole |
| | genome shotgun sequence |
| 11919 | human gut metagenome genome assembly contig: |
| | NODE_11771_length_4367_cov_41.626855 |
| | whole genome shotgun sequence |
| 11932 | human oral metagenome genome assembly |
| | contig: NODE_3_length_120996_cov_24.674684 |
| | whole genome shotgun sequence |
| 11940 | human gut metagenome genome assembly contig: |
| | NODE_2584_length_4178_cov_1.855930 whole |
| | genome shotgun sequence |
| 11966 | human gut metagenome genome assembly contig: |
| | NODE_762_length_17112_cov_5.862344 whole |
| | genome shotgun sequence |
| 11973 | human metagenome genome assembly contig: |
| | NODE_308_length_27077_cov_155.029 whole |
| | genome shotgun sequence |
| 11978 | human gut metagenome genome assembly contig: |
| | NODE_105_length_48625_cov_6.554043 whole |
| | genome shotgun sequence |
| 12033 | human gut metagenome genome assembly contig: |
| | NODE_1_length_211545_cov_8.670600 whole |
| | genome shotgun sequence |
| 12039 | human gut metagenome genome assembly contig: |
| | NODE_10499_length_3384_cov_2.124061 whole |
| | genome shotgun sequence |
| 12114 | human gut metagenome genome assembly contig: |
| | NODE_124_length_51788_cov_3.880251 whole |
| | genome shotgun sequence |
| 12150 | human gut metagenome genome assembly contig: |
| | NODE_1513_length_11782_cov_47.633490 |
| | whole genome shotgun sequence |
| 12151 | human gut metagenome genome assembly contig: |
| | NODE_124_length_84963_cov_76.186531 whole |
| | genome shotgun sequence |
| 12184 | human gut metagenome genome assembly contig: |
| | NODE_72_length_78736_cov_14.461207 whole |
| | genome shotgun sequence |
| 12220 | human gut metagenome genome assembly contig: |
| | NODE_654_length_35442_cov_4.669766 whole |
| | genome shotgun sequence |
| 12221 | human gut metagenome genome assembly contig: |
| | scaffold73133_4 whole genome shotgun sequence |
| 12223 | human gut metagenome genome assembly contig: |
| | scaffold77156_3 whole genome shotgun sequence |
| 12225 | human gut metagenome genome assembly contig: |
| | NODE_740_length_24278_cov_7.434752 whole |
| | genome shotgun sequence |
| 12273 | human gut metagenome genome assembly contig: |
| | NODE_8819_length_5317_cov_4.395667 whole |
| | genome shotgun sequence |
| 12274 | human gut metagenome genome assembly contig: |
| | NODE_11_length_101860_cov_15.47 whole |
| | genome shotgun sequence |
| 12286 | human gut metagenome genome assembly contig: |
| | NODE_543_length_32683_cov_3.615606 whole |
| | genome shotgun sequence |
| 12331 | human gut metagenome genome assembly contig: |
| | NODE_4166_length_6624_cov_3.133810 whole |
| | genome shotgun sequence |
| 12361 | human gut metagenome genome assembly contig: |
| | scaffold19987_1 whole genome shotgun sequence |
| 12384 | human gut metagenome genome assembly contig: |
| | NODE_1857_length_30065_cov_7.588104 whole |
| | genome shotgun sequence |
| 12390 | human gut metagenome genome assembly contig: |
| | NODE_51_length_142303_cov_9.395591 whole |
| | genome shotgun sequence |
| 12401 | human gut metagenome genome assembly contig: |
| | NODE_377_length_53615_cov_5.449496 whole |
| | genome shotgun sequence |
| 12426 | human gut metagenome genome assembly contig: |
| | NODE_337_length_43860_cov_5.659422 whole |
| | genome shotgun sequence |
| 12452 | human gut metagenome genome assembly contig: |
| | NODE_295_length_45009_cov_9.87656 whole |
| | genome shotgun sequence |
| 12507 | human gut metagenome genome assembly contig: |
| | NODE_1900_length_9481_cov_2.742415 whole |
| | genome shotgun sequence |
| 12513 | human gut metagenome genome assembly contig: |
| | NODE_1315_length_17593_cov_8.375599 whole |
| | genome shotgun sequence |
| 12517 | human gut metagenome genome assembly contig: |
| | NODE_3931_length_3164_cov_2.426182 whole |
| | genome shotgun sequence |
| 12549 | human gut metagenome genome assembly contig: |
| | NODE_560_length_32301_cov_4.909074 whole |
| | genome shotgun sequence |
| 12574 | human gut metagenome genome assembly contig: |
| | NODE_7195_length_5553_cov_2.902874 whole |
| | genome shotgun sequence |
| 12595 | Deinococcus hopiensis KR-140 genome |
| | assembly contig: Deiho_Contig194.5 whole |
| | genome shotgun sequence |
| 12598 | human gut metagenome genome assembly contig: |
| | NODE_3713_length_12808_cov_2.303301 whole |
| | genome shotgun sequence |
| 12608 | Sharpea azabuensis isolate RUG13132 genome |
| | assembly contig: RUG13132_asm_6 whole |
| | genome shotgun sequence |
| 12627 | human gut metagenome genome assembly contig: |
| | NODE_160_length_18366_cov_4.960352 whole |
| | genome shotgun sequence |
| 12646 | human gut metagenome genome assembly contig: |
| | NODE_3488_length_2784_cov_2.981312 whole |
| | genome shotgun sequence |
| 12647 | human gut metagenome genome assembly contig: |
| | NODE_22_length_209882_cov_7.654496 whole |
| | genome shotgun sequence |
| 12689 | human gut metagenome genome assembly contig: |
| | NODE_146_length_50752_cov_18.557568 whole |
| | genome shotgun sequence |
| 12742 | human gut metagenome genome assembly contig: |
| | NODE_1016_length_25974_cov_53.510398 |
| | whole genome shotgun sequence |
| 12748 | human gut metagenome genome assembly contig: |
| | NODE_7219_length_3140_cov_4.445057 whole |
| | genome shotgun sequence |
| 12796 | human gut metagenome genome assembly contig: |
| | NODE_898_length_13692_cov_6.94911 whole |
| | genome shotgun sequence |
| 12802 | human gut metagenome genome assembly contig: |
| | NODE_1307_length_26784_cov_7.354521 whole |
| | genome shotgun sequence |
| 12805 | human gut metagenome genome assembly contig: |
| | NODE_296_length_67909_cov_3.647851 whole |
| | genome shotgun sequence |
| 12823 | human gut metagenome genome assembly contig: |
| | NODE_5585_length_3301_cov_3.461183 whole |
| | genome shotgun sequence |
| 12836 | human gut metagenome genome assembly contig: |
| | scaffold123345_1 whole genome shotgun |
| | sequence |
| 12851 | human gut metagenome genome assembly contig: |
| | NODE_15246_length_3725_cov_18.696458 |
| | whole genome shotgun sequence |
| 12857 | human gut metagenome genome assembly contig: |
| | NODE_7_length_165347_cov_4.574033 whole |
| | genome shotgun sequence |
| 12877 | human gut metagenome genome assembly contig: |
| | NODE_1580_length_17622_cov_4.142312 whole |
| | genome shotgun sequence |
| 12884 | human gut metagenome genome assembly contig: |
| | NODE_65_length_73678_cov_5.980957 whole |
| | genome shotgun sequence |
| 12901 | metagenome genome assembly contig: |
| | NODE_426_length_44854_cov_16.250586 whole |
| | genome shotgun sequence |
| 12903 | human gut metagenome genome assembly contig: |
| | NODE_459_length_21435_cov_9.796866 whole |
| | genome shotgun sequence |
| 12915 | TPA_asm: Lachnospiraceae bacterium isolate |
| | HGM12019 genome assembly contig: |
| | SRS475658_63_k119_110161 whole genome |
| | shotgun sequence |
| 12933 | human gut metagenome genome assembly contig: |
| | NODE_348_length_42344_cov_33.1139 whole |
| | genome shotgun sequence |
| 12957 | human gut metagenome genome assembly contig: |
| | NODE_17_length_83984_cov_31.4205 whole |
| | genome shotgun sequence |
| 12974 | human gut metagenome genome assembly contig: |
| | scaffold47524_6 whole genome shotgun sequence |
| 12992 | human gut metagenome genome assembly contig: |
| | NODE_8662_length_4526_cov_8.656453 whole |
| | genome shotgun sequence |
| 12996 | human gut metagenome genome assembly contig: |
| | NODE_7426_length_6325_cov_2.513876 whole |
| | genome shotgun sequence |
| 13146 | TPA_asm: uncultured Robinsoniella sp. isolate |
| | HGM12461 genome assembly contig: |
| | ERS473049_12_k99_25329 whole genome |
| | shotgun sequence |
| 13166 | human gut metagenome genome assembly contig: |
| | NODE_5700_length_4226_cov_3.391753 whole |
| | genome shotgun sequence |
| 13176 | human gut metagenome genome assembly contig: |
| | NODE_1447_length_20184_cov_2.944607 whole |
| | genome shotgun sequence |
| 13239 | human gut metagenome genome assembly contig: |
| | NODE_1435_length_10468_cov_4.257947 whole |
| | genome shotgun sequence |
| 13291 | human gut metagenome genome assembly contig: |
| | NODE_1567_length_17568_cov_6.033632 whole |
| | genome shotgun sequence |
| 13315 | human gut metagenome genome assembly contig: |
| | NODE_293_length_57750_cov_4.640055 whole |
| | genome shotgun sequence |
| 13350 | human gut metagenome genome assembly contig: |
| | scaffold32017_3 whole genome shotgun sequence |
| 13401 | human gut metagenome genome assembly contig: |
| | NODE_1634_length_32537_cov_11.264695 |
| | whole genome shotgun sequence |
| 13422 | human gut metagenome genome assembly contig: |
| | NODE_102_length_53446_cov_4.501976 whole |
| | genome shotgun sequence |
| 13427 | human gut metagenome genome assembly contig: |
| | NODE_13997_length_2795_cov_2.688686 whole |
| | genome shotgun sequence |
| 13480 | human gut metagenome genome assembly contig: |
| | NODE_4140_length_3416_cov_2.146385 whole |
| | genome shotgun sequence |
| 13512 | human gut metagenome genome assembly contig: |
| | NODE_185_length_93613_cov_6.154941 whole |
| | genome shotgun sequence |
| 13517 | human gut metagenome genome assembly contig: |
| | NODE_6971_length_3132_cov_1.950276 whole |
| | genome shotgun sequence |
| 13561 | human gut metagenome genome assembly contig: |
| | NODE_1518_length_21052_cov_7.205267 whole |
| | genome shotgun sequence |
| 13590 | human gut metagenome genome assembly contig: |
| | NODE_548_length_38903_cov_3.36661 whole |
| | genome shotgun sequence |
| 13623 | human gut metagenome genome assembly contig: |
| | NODE_453_length_68668_cov_24.718668 whole |
| | genome shotgun sequence |
| 13657 | human gut metagenome genome assembly contig: |
| | NODE_1462_length_16604_cov_2.720889 whole |
| | genome shotgun sequence |
| 13738 | human gut metagenome genome assembly contig: |
| | NODE_97_length_26435_cov_4.335898 whole |
| | genome shotgun sequence |
| 13747 | human gut metagenome genome assembly contig: |
| | scaffold5681_26 whole genome shotgun sequence |
| 13786 | human gut metagenome genome assembly contig: |
| | NODE_5092_length_8351_cov_3.321480 whole |
| | genome shotgun sequence |
| 13853 | metagenome genome assembly contig: |
| | NODE_557_length_15656_cov_3.468239 whole |
| | genome shotgun sequence |
| 13883 | human gut metagenome genome assembly contig: |
| | NODE_840_length_34256_cov_7.800386 whole |
| | genome shotgun sequence |
| 13890 | human metagenome genome assembly contig: |
| | NODE_308_length_52918_cov_15.0986 whole |
| | genome shotgun sequence |
| 13902 | human gut metagenome genome assembly contig: |
| | NODE_7657_length_6834_cov_3.023602 whole |
| | genome shotgun sequence |
| 13920 | human gut metagenome genome assembly contig: |
| | NODE_744_length_28742_cov_4.682713 whole |
| | genome shotgun sequence |
| 13928 | human gut metagenome genome assembly contig: |
| | NODE_2145_length_4847_cov_4.726628 whole |
| | genome shotgun sequence |
| 13966 | human gut metagenome genome assembly contig: |
| | NODE_5_length_151367_cov_21.324178 whole |
| | genome shotgun sequence |
| 14027 | human gut metagenome genome assembly contig: |
| | NODE_8076_length_4214_cov_2.226978 whole |
| | genome shotgun sequence |
| 14036 | human gut metagenome genome assembly contig: |
| | scaffold9343_7 whole genome shotgun sequence |
| 14052 | human gut metagenome genome assembly contig: |
| | NODE_3181_length_5004_cov_3.697515 whole |
| | genome shotgun sequence |
| 14059 | human gut metagenome genome assembly contig: |
| | NODE_1485_length_3301_cov_2.287739 whole |
| | genome shotgun sequence |
| 14097 | human gut metagenome genome assembly contig: |
| | NODE_14186_length_2872_cov_2.167554 whole |
| | genome shotgun sequence |
| 14141 | human gut metagenome genome assembly contig: |
| | NODE_970_length_14475_cov_5.46699 whole |
| | genome shotgun sequence |
| 14152 | human gut metagenome genome assembly contig: |
| | NODE_7063_length_4279_cov_78.828835 whole |
| | genome shotgun sequence |
| 14156 | human gut metagenome genome assembly contig: |
| | NODE_501_length_34970_cov_14.928082 whole |
| | genome shotgun sequence |
| 14161 | human gut metagenome genome assembly contig: |
| | NODE_865_length_9124_cov_5.015658 whole |
| | genome shotgun sequence |
| 14184 | human gut metagenome genome assembly contig: |
| | NODE_1902_length_24670_cov_4.556937 whole |
| | genome shotgun sequence |
| 14224 | human gut metagenome genome assembly contig: |
| | NODE_263_length_77906_cov_15.788481 whole |
| | genome shotgun sequence |
| 14237 | human gut metagenome genome assembly contig: |
| | NODE_14120_length_3826_cov_7.593742 whole |
| | genome shotgun sequence |
| 14255 | human gut metagenome genome assembly contig: |
| | NODE_3976_length_3081_cov_2.534699 whole |
| | genome shotgun sequence |
| 14282 | human gut metagenome genome assembly contig: |
| | NODE_260_length_55752_cov_11.983626 whole |
| | genome shotgun sequence |
| 14316 | human gut metagenome genome assembly contig: |
| | NODE_13_length_139515_cov_24.1853 whole |
| | genome shotgun sequence |
| 14330 | human gut metagenome genome assembly contig: |
| | NODE_5865_length_9001_cov_2.812765 whole |
| | genome shotgun sequence |
| 14367 | human gut metagenome genome assembly contig: |
| | NODE_135_length_37122_cov_30.3304 whole |
| | genome shotgun sequence |
| 14457 | human gut metagenome genome assembly contig: |
| | NODE_139_length_50169_cov_3.738476 whole |
| | genome shotgun sequence |
| 14620 | human gut metagenome genome assembly contig: |
| | scaffold72034_2 whole genome shotgun sequence |
| 14647 | metagenome genome assembly contig: |
| | NODE_5042_length_11680_cov_4.747527 whole |
| | genome shotgun sequence |
| 14648 | human gut metagenome genome assembly contig: |
| | NODE_1519_length_16211_cov_4.665635 whole |
| | genome shotgun sequence |
| 14689 | human gut metagenome genome assembly contig: |
| | scaffold26832_4 whole genome shotgun sequence |
| 14713 | human gut metagenome genome assembly contig: |
| | NODE_3689_length_5305_cov_5.37981 whole |
| | genome shotgun sequence |
| 14762 | human gut metagenome genome assembly contig: |
| | scaffold56983_3 whole genome shotgun sequence |
| 14794 | human gut metagenome genome assembly contig: |
| | NODE_1113_length_8212_cov_3.013118 whole |
| | genome shotgun sequence |
| 14835 | human gut metagenome genome assembly contig: |
| | NODE_497_length_6015_cov_3.436913 whole |
| | genome shotgun sequence |
| 14876 | human gut metagenome genome assembly contig: |
| | NODE_421_length_47772_cov_7.45663 whole |
| | genome shotgun sequence |
| 14924 | human gut metagenome genome assembly contig: |
| | NODE_8464_length_4121_cov_19.992376 whole |
| | genome shotgun sequence |
| 14975 | human gut metagenome genome assembly contig: |
| | NODE_377_length_39678_cov_5.602428 whole |
| | genome shotgun sequence |
| 15079 | human gut metagenome genome assembly contig: |
| | NODE_44_length_162238_cov_6.280826 whole |
| | genome shotgun sequence |
| 15088 | human gut metagenome genome assembly contig: |
| | NODE_185_length_71929_cov_55.756193 whole |
| | genome shotgun sequence |
| 15151 | human gut metagenome genome assembly contig: |
| | NODE_1605_length_13737_cov_2.253545 whole |
| | genome shotgun sequence |
| 15155 | human metagenome genome assembly contig: |
| | NODE_9_length_213346_cov_164.722 whole |
| | genome shotgun sequence |
| 15158 | human gut metagenome genome assembly contig: |
| | NODE_1374_length_14372_cov_3.22547 whole |
| | genome shotgun sequence |
| 15218 | human gut metagenome genome assembly contig: |
| | NODE_310_length_44854_cov_5.212639 whole |
| | genome shotgun sequence |
| 15240 | metagenome genome assembly contig: |
| | NODE_5433_length_5708_cov_4.035910 whole |
| | genome shotgun sequence |
| 15243 | human gut metagenome genome assembly contig: |
| | NODE_5531_length_3072_cov_4.331787 whole |
| | genome shotgun sequence |
| 15272 | human gut metagenome genome assembly contig: |
| | NODE_6361_length_7418_cov_16.477794 whole |
| | genome shotgun sequence |
| 15316 | human gut metagenome genome assembly contig: |
| | NODE_3955_length_3000_cov_3.095756 whole |
| | genome shotgun sequence |
| 15366 | human gut metagenome genome assembly contig: |
| | NODE_6175_length_5317_cov_1.521855 whole |
| | genome shotgun sequence |
| 15464 | human gut metagenome genome assembly contig: |
| | NODE_477_length_21504_cov_10.190452 whole |
| | genome shotgun sequence |
| 15506 | human gut metagenome genome assembly contig: |
| | NODE_490_length_35958_cov_12.099992 whole |
| | genome shotgun sequence |
| 15509 | human gut metagenome genome assembly contig: |
| | NODE_4801_length_3496_cov_2.370241 whole |
| | genome shotgun sequence |
| 15510 | human gut metagenome genome assembly contig: |
| | NODE_4244_length_8957_cov_4.316895 whole |
| | genome shotgun sequence |
| 15546 | human gut metagenome genome assembly contig: |
| | NODE_3601_length_6296_cov_2.321423 whole |
| | genome shotgun sequence |
| 15553 | human gut metagenome genome assembly contig: |
| | NODE_311_length_71521_cov_7.988134 whole |
| | genome shotgun sequence |
| 15599 | human gut metagenome genome assembly contig: |
| | NODE_1956_length_6342_cov_4.165739 whole |
| | genome shotgun sequence |
| 15765 | human gut metagenome genome assembly contig: |
| | NODE_1661_length_15449_cov_4.410744 whole |
| | genome shotgun sequence |
| 15854 | human gut metagenome genome assembly contig: |
| | NODE_1913_length_10307_cov_19.482442 |
| | whole genome shotgun sequence |
| 15886 | human gut metagenome genome assembly contig: |
| | NODE_420_length_29480_cov_3.83483 whole |
| | genome shotgun sequence |
| 15924 | human gut metagenome genome assembly contig: |
| | NODE_77_length_55150_cov_2.348725 whole |
| | genome shotgun sequence |
| 15940 | human gut metagenome genome assembly contig: |
| | NODE_140_length_27464_cov_5.38502 whole |
| | genome shotgun sequence |
| 16039 | human gut metagenome genome assembly contig: |
| | NODE_782_length_40800_cov_6.080323 whole |
| | genome shotgun sequence |
| 16077 | human gut metagenome genome assembly contig: |
| | NODE_11310_length_3995_cov_4.223350 whole |
| | genome shotgun sequence |
| 16081 | fermentation metagenome genome assembly |
| | contig: |
| | NODE_15718_length_3766_cov_3.881164 whole |
| | genome shotgun sequence |
| 16172 | human gut metagenome genome assembly contig: |
| | NODE_65_length_113004_cov_11.016724 whole |
| | genome shotgun sequence |
| 16252 | human gut metagenome genome assembly contig: |
| | NODE_3405_length_4825_cov_3.107757 whole |
| | genome shotgun sequence |
| 16315 | human gut metagenome genome assembly contig: |
| | NODE_2883_length_3627_cov_4.004479 whole |
| | genome shotgun sequence |
| 16324 | human gut metagenome genome assembly contig: |
| | NODE_4172_length_7404_cov_24.920533 whole |
| | genome shotgun sequence |
| 16342 | human gut metagenome genome assembly contig: |
| | NODE_285_length_40776_cov_8.972348 whole |
| | genome shotgun sequence |
| 16377 | human gut metagenome genome assembly contig: |
| | NODE_5520_length_7712_cov_2.506726 whole |
| | genome shotgun sequence |
| 16378 | human gut metagenome genome assembly contig: |
| | NODE_353_length_31886_cov_3.229807 whole |
| | genome shotgun sequence |
| 16419 | human gut metagenome genome assembly contig: |
| | NODE_70_length_56448_cov_3.841133 whole |
| | genome shotgun sequence |
| 16508 | human gut metagenome genome assembly contig: |
| | NODE_1565_length_10271_cov_7.971222 whole |
| | genome shotgun sequence |
| 16542 | human gut metagenome genome assembly contig: |
| | NODE_3336_length_12682_cov_3.287004 whole |
| | genome shotgun sequence |
| 16549 | human gut metagenome genome assembly contig: |
| | scaffold32781_1 whole genome shotgun sequence |
| 16738 | human gut metagenome genome assembly contig: |
| | NODE_65_length_89509_cov_2.84665 whole |
| | genome shotgun sequence |
| 16779 | human gut metagenome genome assembly contig: |
| | NODE_2296_length_10312_cov_3.504533 whole |
| | genome shotgun sequence |
| 16780 | human gut metagenome genome assembly contig: |
| | NODE_2766_length_9242_cov_2.200827 whole |
| | genome shotgun sequence |
| 16919 | human gut metagenome genome assembly contig: |
| | NODE_762_length_37090_cov_3.931497 whole |
| | genome shotgun sequence |
| 16926 | human gut metagenome genome assembly contig: |
| | NODE_731_length_28466_cov_4.111330 whole |
| | genome shotgun sequence |
| 16948 | human gut metagenome genome assembly contig: |
| | NODE_3013_length_8213_cov_25.445428 whole |
| | genome shotgun sequence |
| 16977 | human gut metagenome genome assembly contig: |
| | NODE_575_length_32915_cov_4.152891 whole |
| | genome shotgun sequence |
| 17000 | human gut metagenome genome assembly contig: |
| | NODE_14951_length_3070_cov_1.736982 whole |
| | genome shotgun sequence |
| 17022 | human gut metagenome genome assembly contig: |
| | NODE_9136_length_4870_cov_2.201246 whole |
| | genome shotgun sequence |
| 17026 | human gut metagenome genome assembly contig: |
| | NODE_1729_length_16231_cov_3.093534 whole |
| | genome shotgun sequence |
| 17062 | human gut metagenome genome assembly contig: |
| | scaffold103745_2 whole genome shotgun |
| | sequence |
| 17095 | metagenome genome assembly contig: |
| | NODE_4269_length_3971_cov_2.140960 whole |
| | genome shotgun sequence |
| 17114 | human gut metagenome genome assembly contig: |
| | NODE_724_length_29775_cov_3.105518 whole |
| | genome shotgun sequence |
| 17143 | human gut metagenome genome assembly contig: |
| | NODE_280_length_21536_cov_4.870630 whole |
| | genome shotgun sequence |
| 17228 | human gut metagenome genome assembly contig: |
| | NODE_638_length_14846_cov_4.50274 whole |
| | genome shotgun sequence |
| 17234 | human gut metagenome genome assembly contig: |
| | scaffold13543_9 whole genome shotgun sequence |
| 17283 | human gut metagenome genome assembly contig: |
| | NODE_2551_length_5305_cov_4.459619 whole |
| | genome shotgun sequence |
| 17335 | human gut metagenome genome assembly contig: |
| | NODE_2434_length_5337_cov_2.732298 whole |
| | genome shotgun sequence |
| 17344 | human gut metagenome genome assembly contig: |
| | NODE_16532_length_3315_cov_2.548160 whole |
| | genome shotgun sequence |
| 17402 | human gut metagenome genome assembly contig: |
| | scaffold13865_7 whole genome shotgun sequence |
| 17433 | Sharpea azabuensis strain DSM 20406 genome |
| | assembly contig: Ga0059086_1011 whole genome |
| | shotgun sequence |
| 17492 | human gut metagenome genome assembly contig: |
| | scaffold8150_2 whole genome shotgun sequence |
| 17543 | human gut metagenome genome assembly contig: |
| | NODE_398_length_29344_cov_3.555669 whole |
| | genome shotgun sequence |
| 17558 | human gut metagenome genome assembly contig: |
| | NODE_5721_length_6721_cov_3.127513 whole |
| | genome shotgun sequence |
| 17606 | human gut metagenome genome assembly contig: |
| | NODE_29_length_93901_cov_4.539916 whole |
| | genome shotgun sequence |
| 17626 | human gut metagenome genome assembly contig: |
| | NODE_2900_length_4661_cov_2.176292 whole |
| | genome shotgun sequence |
| 17701 | wastewater metagenome genome assembly |
| | MBR_assembly scaffold 60651 whole genome |
| | shotgun sequence |
| 17733 | human gut metagenome genome assembly contig: |
| | NODE_1001_length_30639_cov_5.524032 whole |
| | genome shotgun sequence |
| 17835 | human gut metagenome genome assembly contig: |
| | scaffold88548_2 whole genome shotgun sequence |
| 17845 | human oral metagenome genome assembly |
| | contig: NODE_6_length_236114_cov_29.555696 |
| | whole genome shotgun sequence |
| 17869 | human gut metagenome genome assembly contig: |
| | NODE_4429_length_6776_cov_2.34786 whole |
| | genome shotgun sequence |
| 17877 | human gut metagenome genome assembly contig: |
| | NODE_2953_length_11333_cov_6.326210 whole |
| | genome shotgun sequence |
| 17898 | human gut metagenome genome assembly contig: |
| | NODE_1990_length_4760_cov_6.540914 whole |
| | genome shotgun sequence |
| 17899 | human gut metagenome genome assembly contig: |
| | NODE_2190_length_6674_cov_2.158181 whole |
| | genome shotgun sequence |
| 17903 | human gut metagenome genome assembly contig: |
| | NODE_5735_length_6301_cov_3.038745 whole |
| | genome shotgun sequence |
| 17955 | human gut metagenome genome assembly contig: |
| | NODE_6568_length_3759_cov_2.900918 whole |
| | genome shotgun sequence |
| 17973 | human gut metagenome genome assembly contig: |
| | NODE_5666_length_3219_cov_3.931732 whole |
| | genome shotgun sequence |
| 18018 | human gut metagenome genome assembly contig: |
| | NODE_60_length_57853_cov_3.842001 whole |
| | genome shotgun sequence |
| 18030 | human gut metagenome genome assembly contig: |
| | scaffold33307_16 whole genome shotgun |
| | sequence |
| 18088 | human metagenome genome assembly contig: |
| | NODE_7_length_210989_cov_18.077 whole |
| | genome shotgun sequence |
| 18097 | human gut metagenome genome assembly contig: |
| | NODE_593_length_40884_cov_32.550004 whole |
| | genome shotgun sequence |
| 18113 | human gut metagenome genome assembly contig: |
| | NODE_116_length_108405_cov_9.450974 whole |
| | genome shotgun sequence |
| 18162 | human gut metagenome genome assembly contig: |
| | NODE_19_length_91078_cov_9.213994 whole |
| | genome shotgun sequence |
| 18211 | human gut metagenome genome assembly contig: |
| | NODE_4171_length_3954_cov_2.172352 whole |
| | genome shotgun sequence |
| 18256 | human gut metagenome genome assembly contig: |
| | NODE_1903_length_4745_cov_6.196588 whole |
| | genome shotgun sequence |
| 18265 | human gut metagenome genome assembly contig: |
| | NODE_4442_length_6833_cov_3.740083 whole |
| | genome shotgun sequence |
| 18303 | human gut metagenome genome assembly contig: |
| | NODE_1350_length_22305_cov_3.000449 whole |
| | genome shotgun sequence |
| 18334 | human gut metagenome genome assembly contig: |
| | NODE_3497_length_8728_cov_2.565894 whole |
| | genome shotgun sequence |
| 18343 | human gut metagenome genome assembly contig: |
| | NODE_2275_length_11774_cov_2.979776 whole |
| | genome shotgun sequence |
| 18361 | human gut metagenome genome assembly contig: |
| | scaffold133683_1 whole genome shotgun |
| | sequence |
| 18405 | human gut metagenome genome assembly contig: |
| | NODE_687_length_23777_cov_20.782902 whole |
| | genome shotgun sequence |
| 18453 | human gut metagenome genome assembly contig: |
| | NODE_206_length_87601_cov_4.214870 whole |
| | genome shotgun sequence |
| 18455 | metagenome genome assembly contig: |
| | NODE_457_length_46112_cov_5.278307 whole |
| | genome shotgun sequence |
| 18463 | human oral metagenome genome assembly |
| | contig: NODE_592_length_18021_cov_3.823890 |
| | whole genome shotgun sequence |
| 18497 | human gut metagenome genome assembly contig: |
| | NODE_21_length_171848_cov_25.7091 whole |
| | genome shotgun sequence |
| 18499 | human gut metagenome genome assembly contig: |
| | scaffold62862_1 whole genome shotgun sequence |
| 18576 | human gut metagenome genome assembly contig: |
| | NODE_180_length_55190_cov_6.990460 whole |
| | genome shotgun sequence |
| 18609 | human gut metagenome genome assembly contig: |
| | NODE_11034_length_4566_cov_1.812015 whole |
| | genome shotgun sequence |
| 18648 | human oral metagenome genome assembly |
| | contig: |
| | NODE_29_length_105453_cov_67.546955 whole |
| | genome shotgun sequence |
| 18670 | human gut metagenome genome assembly contig: |
| | NODE_1517_length_10736_cov_2.430859 whole |
| | genome shotgun sequence |
| 18693 | human gut metagenome genome assembly contig: |
| | NODE_3829_length_7098_cov_5.600028 whole |
| | genome shotgun sequence |
| 18719 | human gut metagenome genome assembly contig: |
| | NODE_1631_length_5674_cov_3.549386 whole |
| | genome shotgun sequence |
| 18735 | human gut metagenome genome assembly contig: |
| | NODE_1134_length_21140_cov_5.909130 whole |
| | genome shotgun sequence |
| 18750 | human gut metagenome genome assembly contig: |
| | scaffold33029_2 whole genome shotgun sequence |
| 18779 | human gut metagenome genome assembly contig: |
| | NODE_2024_length_16090_cov_3.681384 whole |
| | genome shotgun sequence |
| 18797 | metagenome genome assembly contig: |
| | NODE_426_length_44854_cov_16.250586 whole |
| | genome shotgun sequence |
| 18842 | human gut metagenome genome assembly contig: |
| | NODE_1633_length_15584_cov_10.807393 |
| | whole genome shotgun sequence |
| 18870 | human gut metagenome genome assembly contig: |
| | NODE_3552_length_7154_cov_3.844908 whole |
| | genome shotgun sequence |
| 18883 | human gut metagenome genome assembly contig: |
| | NODE_2382_length_13294_cov_1.599592 whole |
| | genome shotgun sequence |
| 18886 | human gut metagenome genome assembly contig: |
| | NODE_284_length_27198_cov_7.130273 whole |
| | genome shotgun sequence |
| 19021 | human gut metagenome genome assembly contig: |
| | NODE_257_length_66674_cov_4.857023 whole |
| | genome shotgun sequence |
| 19039 | human gut metagenome genome assembly contig: |
| | NODE_2556_length_14881_cov_4.244166 whole |
| | genome shotgun sequence |
| 19147 | human gut metagenome genome assembly contig: |
| | NODE_71_length_93980_cov_21.079627 whole |
| | genome shotgun sequence |
| 19201 | human gut metagenome genome assembly contig: |
| | NODE_6119_length_7251_cov_3.216092 whole |
| | genome shotgun sequence |
| 19203 | human gut metagenome genome assembly contig: |
| | NODE_302_length_32713_cov_3.806142 whole |
| | genome shotgun sequence |
| 19306 | human gut metagenome genome assembly contig: |
| | NODE_70_length_70810_cov_4.756724 whole |
| | genome shotgun sequence |
| 19308 | human gut metagenome genome assembly contig: |
| | NODE_287_length_51430_cov_3.627780 whole |
| | genome shotgun sequence |
| 19373 | human gut metagenome genome assembly contig: |
| | NODE_62_length_68544_cov_10.373126 whole |
| | genome shotgun sequence |
| 19374 | human gut metagenome genome assembly contig: |
| | NODE_835_length_10133_cov_3.424787 whole |
| | genome shotgun sequence |
| 19379 | human gut metagenome genome assembly contig: |
| | scaffold67533_1 whole genome shotgun sequence |
| 19419 | viral metagenome genome assembly contig: |
| | NODE_9_length_14941_cov_5.789861 whole |
| | genome shotgun sequence |
| 19426 | human gut metagenome genome assembly contig: |
| | NODE_9208_length_3026_cov_2.755638 whole |
| | genome shotgun sequence |
| 19460 | human gut metagenome genome assembly contig: |
| | NODE_451_length_47288_cov_16.712108 whole |
| | genome shotgun sequence |
| 19526 | human gut metagenome genome assembly contig: |
| | NODE_363_length_25446_cov_3.489347 whole |
| | genome shotgun sequence |
| 19565 | human gut metagenome genome assembly contig: |
| | NODE_6892_length_3025_cov_2.701347 whole |
| | genome shotgun sequence |
| 19635 | human gut metagenome genome assembly contig: |
| | NODE_5529_length_6709_cov_1.925158 whole |
| | genome shotgun sequence |
| 19639 | human gut metagenome genome assembly contig: |
| | NODE_1029_length_14320_cov_7.744970 whole |
| | genome shotgun sequence |
| 19643 | human gut metagenome genome assembly contig: |
| | NODE_2198_length_9110_cov_2.208393 whole |
| | genome shotgun sequence |
| 19702 | human gut metagenome genome assembly contig: |
| | NODE_282_length_20602_cov_4.948411 whole |
| | genome shotgun sequence |
| 19731 | human gut metagenome genome assembly contig: |
| | NODE_96_length_93831_cov_9.222680 whole |
| | genome shotgun sequence |
| 19734 | human oral metagenome genome assembly |
| | contig: NODE_38_length_87294_cov_30.648838 |
| | whole genome shotgun sequence |
| 19766 | human gut metagenome genome assembly contig: |
| | NODE_99_length_47846_cov_10.644431 whole |
| | genome shotgun sequence |
| 19789 | human gut metagenome genome assembly contig: |
| | NODE_218_length_63788_cov_4.710841 whole |
| | genome shotgun sequence |
| 19947 | human gut metagenome genome assembly contig: |
| | NODE_1068_length_26798_cov_28.052126 |
| | whole genome shotgun sequence |
| 19993 | human gut metagenome genome assembly contig: |
| | NODE_10737_length_3878_cov_2.162438 whole |
| | genome shotgun sequence |
| 20091 | human gut metagenome genome assembly contig: |
| | NODE_14993_length_2696_cov_5.210526 whole |
| | genome shotgun sequence |
| 20112 | human gut metagenome genome assembly contig: |
| | NODE_742_length_23742_cov_6.230675 whole |
| | genome shotgun sequence |
| 20158 | human gut metagenome genome assembly contig: |
| | NODE_304_length_45727_cov_4.204129 whole |
| | genome shotgun sequence |
| 20165 | human gut metagenome genome assembly contig: |
| | NODE_66_length_70534_cov_14.129372 whole |
| | genome shotgun sequence |
| 20241 | human gut metagenome genome assembly contig: |
| | scaffold13261_7 whole genome shotgun sequence |
| 20287 | human gut metagenome genome assembly contig: |
| | NODE_410_length_63201_cov_9.686188 whole |
| | genome shotgun sequence |
| 20367 | human gut metagenome genome assembly contig: |
| | NODE_3787_length_8113_cov_3.004468 whole |
| | genome shotgun sequence |
| 20410 | human gut metagenome genome assembly contig: |
| | scaffold36111_3 whole genome shotgun sequence |
| 20441 | human gut metagenome genome assembly contig: |
| | NODE_667_length_17874_cov_3.623267 whole |
| | genome shotgun sequence |
| 20523 | human gut metagenome genome assembly contig: |
| | scaffold113742_2 whole genome shotgun |
| | sequence |
| 20547 | human gut metagenome genome assembly contig: |
| | NODE_1888_length_20938_cov_6.933630 whole |
| | genome shotgun sequence |
| 20548 | human gut metagenome genome assembly contig: |
| | scaffold25018_3 whole genome shotgun sequence |
| 20616 | human gut metagenome genome assembly contig: |
| | NODE_372_length_75726_cov_6.787329 whole |
| | genome shotgun sequence |
| 20630 | human gut metagenome genome assembly contig: |
| | NODE_652_length_29343_cov_3.795957 whole |
| | genome shotgun sequence |
| 20658 | human gut metagenome genome assembly contig: |
| | NODE_300_length_34420_cov_26.365517 whole |
| | genome shotgun sequence |
| 20661 | human gut metagenome genome assembly contig: |
| | NODE_83_length_79859_cov_15.517192 whole |
| | genome shotgun sequence |
| 20670 | human gut metagenome genome assembly contig: |
| | scaffold62687_1 whole genome shotgun sequence |
| 20725 | human gut metagenome genome assembly contig: |
| | NODE_1340_length_3320_cov_1.55773 whole |
| | genome shotgun sequence |
| 20754 | human gut metagenome genome assembly contig: |
| | NODE_272_length_41485_cov_20.594086 whole |
| | genome shotgun sequence |
| 20791 | human oral metagenome genome assembly |
| | contig: NODE_5077_length_3579_cov_2.491203 |
| | whole genome shotgun sequence |
| 20866 | human gut metagenome genome assembly contig: |
| | NODE_3839_length_4716_cov_2.274134 whole |
| | genome shotgun sequence |
| 20895 | human gut metagenome genome assembly contig: |
| | NODE_1142_length_16160_cov_3.233654 whole |
| | genome shotgun sequence |
| 20961 | human gut metagenome genome assembly contig: |
| | NODE_5601_length_3149_cov_1.990627 whole |
| | genome shotgun sequence |
| 20967 | human gut metagenome genome assembly contig: |
| | NODE_3838_length_6042_cov_2.466344 whole |
| | genome shotgun sequence |
| 20979 | human gut metagenome genome assembly contig: |
| | NODE_4713_length_4944_cov_3.714256 whole |
| | genome shotgun sequence |
| 20992 | human gut metagenome genome assembly contig: |
| | NODE_184_length_77687_cov_15.498815 whole |
| | genome shotgun sequence |
| 21028 | human gut metagenome genome assembly contig: |
| | NODE_237_length_47982_cov_13.487804 whole |
| | genome shotgun sequence |
| 21034 | human gut metagenome genome assembly contig: |
| | NODE_2796_length_10467_cov_4.493085 whole |
| | genome shotgun sequence |
| 21058 | metagenome genome assembly contig: |
| | NODE_4598_length_11460_cov_4.417361 whole |
| | genome shotgun sequence |
| 21063 | human gut metagenome genome assembly contig: |
| | NODE_6_length_207837_cov_11.559789 whole |
| | genome shotgun sequence |
| 21114 | human gut metagenome genome assembly contig: |
| | NODE_218_length_21201_cov_3.921971 whole |
| | genome shotgun sequence |
| 21121 | human gut metagenome genome assembly contig: |
| | NODE_5458_length_6668_cov_3.776803 whole |
| | genome shotgun sequence |
| 21136 | human gut metagenome genome assembly contig: |
| | NODE_9556_length_3136_cov_1.481013 whole |
| | genome shotgun sequence |
| 21272 | human gut metagenome genome assembly contig: |
| | NODE_1094_length_3905_cov_2.872987 whole |
| | genome shotgun sequence |
| 21278 | human gut metagenome genome assembly contig: |
| | NODE_984_length_16891_cov_3.157817 whole |
| | genome shotgun sequence |
| 21311 | human gut metagenome genome assembly contig: |
| | scaffold144703_1 whole genome shotgun |
| | sequence |
| 21401 | human gut metagenome genome assembly contig: |
| | NODE_535_length_27426_cov_17.040225 whole |
| | genome shotgun sequence |
| 21435 | human gut metagenome genome assembly contig: |
| | NODE_4758_length_6856_cov_3.920894 whole |
| | genome shotgun sequence |
| 21527 | gut metagenome genome assembly P3E90-k21- |
| | 2014-09-20 contig contig-2058000018 whole |
| | genome shotgun sequence |
| 21582 | human gut metagenome genome assembly contig: |
| | NODE_551_length_43599_cov_3.580401 whole |
| | genome shotgun sequence |
| 21592 | human gut metagenome genome assembly contig: |
| | NODE_1443_length_4479_cov_3.321881 whole |
| | genome shotgun sequence |
| 21641 | human gut metagenome genome assembly contig: |
| | NODE_350_length_28851_cov_11.678948 whole |
| | genome shotgun sequence |
| 21746 | human gut metagenome genome assembly contig: |
| | NODE_415_length_21504_cov_8.649121 whole |
| | genome shotgun sequence |
| 21775 | human gut metagenome genome assembly contig: |
| | NODE_8698_length_3017_cov_2.073599 whole |
| | genome shotgun sequence |
| 21825 | human gut metagenome genome assembly contig: |
| | NODE_13122_length_3082_cov_2.638935 whole |
| | genome shotgun sequence |
| 21888 | human gut metagenome genome assembly contig: |
| | NODE_297_length_17681_cov_1.711336 whole |
| | genome shotgun sequence |
| 21890 | human gut metagenome genome assembly contig: |
| | NODE_1304_length_12112_cov_4.310110 whole |
| | genome shotgun sequence |
| 21950 | human gut metagenome genome assembly contig: |
| | NODE_7743_length_3755_cov_2.280000 whole |
| | genome shotgun sequence |
| 21974 | human gut metagenome genome assembly contig: |
| | NODE_3594_length_8143_cov_2.822082 whole |
| | genome shotgun sequence |
| 21990 | human gut metagenome genome assembly contig: |
| | NODE_6922_length_5480_cov_1.899355 whole |
| | genome shotgun sequence |
| 21996 | human gut metagenome genome assembly contig: |
| | NODE_1062_length_11570_cov_3.195832 whole |
| | genome shotgun sequence |
| 22007 | human gut metagenome genome assembly contig: |
| | NODE_3482_length_8854_cov_2.681100 whole |
| | genome shotgun sequence |
| 22026 | human gut metagenome genome assembly contig: |
| | NODE_747_length_23354_cov_5.645435 whole |
| | genome shotgun sequence |
| 22070 | human gut metagenome genome assembly contig: |
| | NODE_48_length_79920_cov_3.609516 whole |
| | genome shotgun sequence |
| 22072 | human gut metagenome genome assembly contig: |
| | NODE_4456_length_10083_cov_2.911348 whole |
| | genome shotgun sequence |
| 22166 | human gut metagenome genome assembly contig: |
| | NODE_390_length_20758_cov_2.461624 whole |
| | genome shotgun sequence |
| 22266 | human gut metagenome genome assembly contig: |
| | NODE_152_length_110264_cov_13.200691 |
| | whole genome shotgun sequence |
| 22414 | human gut metagenome genome assembly contig: |
| | NODE_1917_length_18536_cov_3.246199 whole |
| | genome shotgun sequence |
| 22453 | human gut metagenome genome assembly contig: |
| | NODE_11820_length_3832_cov_26.280911 |
| | whole genome shotgun sequence |
| 22494 | mouse gut metagenome genome assembly contig: |
| | NODE_5065_length_4405_cov_2.577701 whole |
| | genome shotgun sequence |
| 22515 | human gut metagenome genome assembly contig: |
| | NODE_7382_length_3724_cov_4.787408 whole |
| | genome shotgun sequence |
| 22531 | human gut metagenome genome assembly contig: |
| | NODE_5326_length_6107_cov_3.625578 whole |
| | genome shotgun sequence |
| 22566 | human gut metagenome genome assembly contig: |
| | NODE_2093_length_12012_cov_3.885339 whole |
| | genome shotgun sequence |
| 22579 | human gut metagenome genome assembly contig: |
| | NODE_899_length_27302_cov_7.332881 whole |
| | genome shotgun sequence |
| 22589 | human gut metagenome genome assembly contig: |
| | NODE_6671_length_4754_cov_6.829113 whole |
| | genome shotgun sequence |
| 22611 | human gut metagenome genome assembly contig: |
| | NODE_534_length_28069_cov_3.488577 whole |
| | genome shotgun sequence |
| 22614 | human gut metagenome genome assembly contig: |
| | NODE_2569_length_4613_cov_3.502852 whole |
| | genome shotgun sequence |
| 22654 | human gut metagenome genome assembly contig: |
| | scaffold55858_14 whole genome shotgun |
| | sequence |
| 22668 | human gut metagenome genome assembly contig: |
| | NODE_2822_length_9913_cov_3.171029 whole |
| | genome shotgun sequence |
| 22708 | human gut metagenome genome assembly contig: |
| | NODE_3946_length_3677_cov_2.410823 whole |
| | genome shotgun sequence |
| 22727 | human gut metagenome genome assembly contig: |
| | NODE_2191_length_6679_cov_2.726449 whole |
| | genome shotgun sequence |
| 22735 | uncultured Clostridium sp. isolate RUG10509 |
| | genome assembly contig: RUG10509_asm_134 |
| | whole genome shotgun sequence |
| 22779 | human gut metagenome genome assembly contig: |
| | NODE_8372_length_4399_cov_3.024171 whole |
| | genome shotgun sequence |
| 22807 | human gut metagenome genome assembly contig: |
| | NODE_5722_length_4952_cov_2.804983 whole |
| | genome shotgun sequence |
| 22829 | human gut metagenome genome assembly contig: |
| | NODE_3459_length_12637_cov_4.857654 whole |
| | genome shotgun sequence |
| 22890 | human gut metagenome genome assembly contig: |
| | C1561321_1 whole genome shotgun sequence |
| 22925 | human gut metagenome genome assembly contig: |
| | NODE_7592_length_4462_cov_2.675485 whole |
| | genome shotgun sequence |
| 22933 | human gut metagenome genome assembly contig: |
| | scaffold118987_1 whole genome shotgun |
| | sequence |
| 22942 | human gut metagenome genome assembly contig: |
| | NODE_9026_length_5363_cov_2.165411 whole |
| | genome shotgun sequence |
| 22962 | human gut metagenome genome assembly contig: |
| | NODE_3897_length_11278_cov_3.228014 whole |
| | genome shotgun sequence |
| 22992 | mouse gut metagenome genome assembly contig: |
| | NODE_1005_length_17693_cov_3.049665 whole |
| | genome shotgun sequence |
| 23035 | human gut metagenome genome assembly contig: |
| | NODE_238_length_72066_cov_4.918985 whole |
| | genome shotgun sequence |
| 23051 | human gut metagenome genome assembly contig: |
| | scaffold71003_2 whole genome shotgun sequence |
| 23093 | human gut metagenome genome assembly contig: |
| | NODE_1481_length_29227_cov_6.385455 whole |
| | genome shotgun sequence |
| 23199 | human gut metagenome genome assembly contig: |
| | NODE_347_length_45292_cov_4.141256 whole |
| | genome shotgun sequence |
| 23202 | human gut metagenome genome assembly contig: |
| | NODE_196_length_21435_cov_4.047661 whole |
| | genome shotgun sequence |
| 23204 | human gut metagenome genome assembly contig: |
| | NODE_6508_length_5100_cov_3.195045 whole |
| | genome shotgun sequence |
| 23214 | human gut metagenome genome assembly contig: |
| | NODE_1335_length_14728_cov_4.27056 whole |
| | genome shotgun sequence |
| 23409 | human gut metagenome genome assembly contig: |
| | NODE_921_length_8050_cov_7.367230 whole |
| | genome shotgun sequence |
| 23484 | human gut metagenome genome assembly contig: |
| | NODE_2084_length_4448_cov_1.750057 whole |
| | genome shotgun sequence |
| 23534 | human gut metagenome genome assembly contig: |
| | NODE_1246_length_15407_cov_45.255016 |
| | whole genome shotgun sequence |
| 23591 | human gut metagenome genome assembly contig: |
| | NODE_5365_length_3047_cov_4.156751 whole |
| | genome shotgun sequence |
| 23600 | mouse gut metagenome genome assembly contig: |
| | NODE_2722_length_7825_cov_2.841956 whole |
| | genome shotgun sequence |
| 23606 | human gut metagenome genome assembly contig: |
| | NODE_4323_length_6231_cov_1.934424 whole |
| | genome shotgun sequence |
| 23612 | human gut metagenome genome assembly contig: |
| | NODE_5165_length_8286_cov_3.119305 whole |
| | genome shotgun sequence |
| 23641 | human gut metagenome genome assembly contig: |
| | NODE_3072_length_12201_cov_4.136588 whole |
| | genome shotgun sequence |
| 23665 | human gut metagenome genome assembly contig: |
| | NODE_3084_length_9783_cov_1.990748 whole |
| | genome shotgun sequence |
| 23701 | human metagenome genome assembly contig: |
| | NODE_1810_length_8391_cov_3.4417 whole |
| | genome shotgun sequence |
| 23711 | human gut metagenome genome assembly contig: |
| | NODE_1621_length_10224_cov_7.765759 whole |
| | genome shotgun sequence |

TABLE 1E
IscB polypeptides with inactive RuvC and inactive HNH domain

| SEQ | |
|---|---|
| ID NO: | Description |
| 25063 | human gut metagenome genome assembly contig: |
| | NODE_1726_length_12197_cov_4.883133 whole |
| | genome shotgun sequence |
| 25064 | human gut metagenome genome assembly contig: |
| | scaffold85419_3 whole genome shotgun sequence |
| 25065 | Paraburkholderia sp. Msb3 isolate PDMSB31 genome |
| | assembly plasmid: pII73292 |
| 25066 | uncultured Roseburia sp. isolate UMGS2025 genome |
| | assembly contig: NODE_85_length_109015_cov_{—} |
| | 32.350597 whole genome shotgun sequence |
| 25067 | Methylacidiphilum fumariolicum strain Fdl contig_9 |
| | whole genome shotgun sequence44975 |
| 25068 | Methylacidiphilum fumariolicum strain Rib contig_36 |
| | whole genome shotgun sequence44791 |
| 25069 | Methylacidiphilum fumariolicum SolV genome assembly |
| | MfumSolVChr1 chromosome: Strain_SolV_genome_{—} |
| | (final)1752013 |
| 25070 | Marine metagenome k99_11089298 whole genome |
| | shotgun sequence 146 |
| 25071 | human gut metagenome genome assembly contig: |
| | NODE_93_length_99482_cov_4.963672 whole |
| | genome shotgun sequence |
| 25072 | human gut metagenome genome assembly contig: |
| | scaffold5153_13 whole genome shotgun sequence |
| 25073 | Ga0099850_1002913 |
| 25074 | Freshwater metagenome L227-2013-6m_8133 whole |
| | genome shotgun sequence 1239 |
| 25075 | human gut metagenome genome assembly contig: |
| | NODE_5910_length_3787_cov_2.933816 whole |
| | genome shotgun sequence |
| 25076 | Methylacidiphilum fumariolicum strain Ice contig_20 |
| | whole genome shotgun sequence79222 |
| 25077 | Streptomyces sp. NL15-2K DNA Scaffold125 whole |
| | genome shotgun sequence |
| 25078 | uncultured SAR324 cluster bacterium isolate AG-919-L13 |
| | genome assembly contig: AG-919-L13_NODE_2 whole |
| | genome shotgun sequence |
| 25079 | Freshwater metagenome CA-L227-2014_13427 whole |
| | genome shotgun sequence3215 |
| 25080 | human gut metagenome genome assembly contig: |
| | NODE_5557_length_7516_cov_3.331189 whole |
| | genome shotgun sequence |
| 25081 | human gut metagenome genome assembly contig: |
| | NODE_134_length_77050_cov_6.500864 whole |
| | genome shotgun sequence |
| 25082 | Freshwater metagenome CA-L227-2013_264905 whole |
| | genome shotgun sequence1072 |
| 25083 | human gut metagenome genome assembly contig: |
| | NODE_655_length_39372_cov_5.607651 whole |
| | genome shotgun sequence |
| 25084 | Methylacidiphilum fumariolicum strain Fdl contig_9 |
| | whole genome shotgun sequence44975 |
| 25085 | human gut metagenome genome assembly contig: |
| | NODE_10772_length_5342_cov_2.562323 whole |
| | genome shotgun sequence |
| 25086 | human gut metagenome genome assembly contig: |
| | NODE_6479_length_5145_cov_1.962279 whole |
| | genome shotgun sequence |
| 25087 | human gut metagenome genome assembly contig: |
| | NODE_108_length_100093_cov_6.973140 whole |
| | genome shotgun sequence |
| 25088 | Acidimicrobiaceae bacterium isolate MAG 3 k99_90135 |
| | whole genome shotgun sequence3795 |
| 25089 | Methylacidiphilum fumariolicum strain Ice contig_20 |
| | whole genome shotgun sequence79222 |
| 25090 | Acidimicrobiaceae bacterium isolate MAG 3 k99_22866 |
| | whole genome shotgun sequence14452 |
| 25091 | uncultured Clostridium sp. isolate 2789STDY5834874 |
| | genome assembly contig: SCcontig000002 whole |
| | genome shotgun sequence |
| 25092 | Burkholderia sp. WP9 genome assembly contig: |
| | Ga0008007_13 whole genome shotgun sequence |
| 25093 | Clostridiaceae bacterium isolate MGYG-HGUT-00051 |
| | genome assembly contig: .13470_2_93.2 whole |
| | genome shotgun sequence |
| 25094 | human gut metagenome genome assembly contig: |
| | NODE_1322_length_13760_cov_3.796279 whole |
| | genome shotgun sequence |
| 25095 | Methylacidiphilum fumariolicum strain Fur contig_29 |
| | whole genome shotgun sequence44618 |
| 25096 | Methylacidiphilum fumariolicum SolV WGS project |
| | CAHT00000000 data contig 59-2114 whole genome |
| | shotgun sequence |
| 25097 | Streptomyces sp. NL15-2K DNA Scaffold125 whole |
| | genome shotgun sequence |
| 25098 | Ga0129342_1006080 |
| 25099 | Acidimicrobiaceae bacterium isolate MAG 3 k99_90135 |
| | whole genome shotgun sequence3832 |
| 25100 | Methylacidiphilum fumariolicum strain Fur contig_29 |
| | whole genome shotgun sequence44618 |
| 25101 | uncultured SAR324 cluster bacterium isolate AG-891-L09 |
| | genome assembly contig: AG-891-L09_NODE_5 whole |
| | genome shotgun sequence |
| 25102 | SAR324 cluster bacterium JCVI-SC AAA005 ctg_101 |
| | whole genome shotgun sequence24485 |
| 25103 | SAR324 cluster bacterium isolate MED745 70478 whole |
| | genome shotgun sequence1528 |
| 25104 | Freshwater metagenome L227-2014-6m_1329 whole |
| | genome shotgun sequence3009 |
| 25105 | human gut metagenome genome assembly contig: |
| | NODE_4400_length_7380_cov_2.293379 whole |
| | genome shotgun sequence |
| 25106 | Methylacidiphilum fumariolicum SolV WGS project |
| | CAHT00000000 data contig 59-2114 whole |
| | genome shotgun sequence |
| 25107 | Burkholderia sp. WP9 genome assembly contig: |
| | Ga0008007_13 whole genome shotgun sequence |
| 25108 | human gut metagenome genome assembly contig: |
| | NODE_13660_length_3420_cov_3.088559 whole |
| | genome shotgun sequence |
| 25109 | human gut metagenome genome assembly contig: |
| | NODE_6654_length_3221_cov_3.590019 whole |
| | genome shotgun sequence |
| 25110 | Methylacidiphilum fumariolicum strain Rib contig_36 |
| | whole genome shotgun sequence44791 |
| 25111 | Methylacidiphilum fumariolicum SolV WGS project |
| | CAHT00000000 data contig 59-2114 whole |
| | genome shotgun sequence |
| 25112 | Methylacidiphilum fumariolicum SolV WGS project |
| | CAHT00000000 data contig 59-2114 whole |
| | genome shotgun sequence |
| 25113 | Acidimicrobiaceae bacterium isolate MAG 3 k99_270957 |
| | whole genome shotgun sequence1720 |
| 25114 | human gut metagenome genome assembly contig: |
| | NODE_4598_length_8704_cov_2.858828 whole |
| | genome shotgun sequence |
| 25115 | human gut metagenome genome assembly contig: |
| | NODE_3516_length_11923_cov_4.939838 whole |
| | genome shotgun sequence |
| 25116 | human gut metagenome genome assembly contig: |
| | NODE_5826_length_6011_cov_2.511081 whole |
| | genome shotgun sequence |
| 25117 | human gut metagenome genome assembly contig: |
| | NODE_11447_length_3950_cov_1.957125 whole |
| | genome shotgun sequence |
| 25118 | Flavobacteriaceae bacterium isolate NP987 38724 |
| | whole genome shotgun sequence6707 |

TABLE 2
CRISPR Array Associated IscBs.

| No. | Proteins | Sequences | |
|---|---|---|---|
| 1 | IscB(-HNH) | 1 | mstdatlirt tpshaeadat dtlvatplmp prrvispwpg pgegqslmri pvvdirgmal |
| SEQ ID | EFH81386 | 61 | mpctpakarh llksgnarpk rnklglfyvq lsyeqepdnq slvagvdpgs kfeglsvvgt |
| NO: | | 121 | kdtvlnlmve apdhvkgavq trrtmrrarr qrkwrrpkrf hnrlnrmqri ppstrsrwea |
| 2041 | | 181 | karivahlrt ilpftdvvve dvqavtrkgk ggtwngsfsp vqvgkehlyr llramgltlh |
| | | 241 | lregwqtkel reqhglkktk skskqsfesh avdswvlaas isgaehptct rlwymvpail |
| | | 301 | hrrqlhrlqa skggvrkpyg gtrslgvkrg tlvehkkygr ctvggvdrkr ntislheyrt |
| | | 361 | ntrltqaakv etcrvltwls wrswllrgkr tsskgkgshs s |
| 2 | IscB(+HNH) | 1 | mqpakqqnwv fqingdkqpl dminpgrcre lqnrgklasf rrfpyvviqq qtienpqtke |
| SEQ ID | TAE54104.1 | 61 | yilkidpgsq wtgfaiqcgn dilfraelnh rgeaikfdlv krawfrrgrr srnlryrkkr |
| NO: | | 121 | lnrakpegwl apsirhrvlt vetwikrfmr ycpiawieie qvrfdtqkla npeidgveyq |
| 2042 | | 181 | qgelqgyevr eyllqkwgrk caycgtenvp levehiqsks kggssrignl tlachvcnvk |
| | | 241 | kgnldvrdfl akspdilnqv lenstkplkd aaavnstrya ivkmaksice nvkcssgart |
| | | 301 | kmnrvrqgle kthsldaacv gesgasirvl tdrpllitck ghgsrqsirv nasgfpavkn |
| | | 361 | aktvfthiaa gdvvrftigk drkkaqagty tarvktptpk gfevlidgar islstmsnvv |
| | | 421 | fvhrsdgygy el |
| 3 | IscB(+HNH) | 1 | mavfvidkhk rplmpcsekr arlllergra vvhrqvpfvi rlkdrtvqhs avqplrvald |
| SEQ ID | WP_ | 61 | pgsratgmal vrekntvdtg tgevyreria lnlfelvhrg hrireqldqr rnfrrrrrga |
| NO: | 038093640.1 | 121 | nlryraprfd nrrrppgwla pslqhrvdtt mawvrrlerw apasaigiet vrfdtqrlqn |
| 2043 | | 181 | peisgveyqq galagcevre yllekwgrkc aycgaenvpl eiehivpksr ggsdrvsnla |
| | | 241 | lacracnqak gnrdvrafla dqperlaril aqakaplkda aavnatrwal yralvdtglp |
| | | 301 | veagtggrtk wnrtrlglpk thaldalcvg qvdqvrhwrv pvlgircagr gsyrrtrltr |
| | | 361 | hgfprgyltr nksafgfqtg dliravvtkg kkagtylgri airasgsfni qtpmgvvqgi |
| | | 421 | hhrfctllqr adgygyfvqp kpteaalssp rlkagvssag n |
| 4 | IscB(+HNH) | 1 | mttnvvfvid tnqkplqpcs aavarklllr gkaamfrryp aviilkkevd svgkpkielr |
| SEQ ID | WP_ | 61 | idpgskytgf alvdskdnad fiiwgteleh rgaaickelt krsairrsrr nrktryrkkr |
| NO: | 052490348.1 | 121 | ferrkpegwl apslqhrvdt tltwvkrick fvpimsisve qvkfdlqkle nsdiqgieyq |
| 2044 | | 181 | qgtlagytlr eallehwgrk caycdvenvf leiehiypks kggsdkfsnl tlachkcnin |
| | | 241 | kgnksidefl lsdhkrleqi klhqkktlkd aaavnatrkk lvttlqektf lnvlvsdgas |
| | | 301 | tkmtrlsssl akrhwidagc vnttlivilk tlqplqvkcn ghgnkqfvtm daygfprksy |
| | | 361 | epkkvrkdwk agdiirvtkk dgtmlmgrvk kaakklvyip fggkeasfss enakaihrsd |
| | | 421 | gyrysfaaid sellqkmat |
| 5 | IscB(+HNH) | 1 | mpnkyafvld skgklldptk skkawylirk gkaslveeyp liiklkrevp kdqvnsdkli |
| SEQ ID | WP_ | 61 | lgiddgtkkv gfalvakcqt knkvlfkavm eqrqdvskkm eerrgyrryr rshkryrpar |
| NO: | 015325818.1 | 121 | fdnrssskrk grippsilqk kqailrvvnk lkkyiridki vledvsidir kltegrelyn |
| 2045 | | 181 | weyqesnrld enlrkatlyr ddctcqlegt tetmlhahhi mprrdggads iynlitlcka |
| | | 241 | chkdkvdnne yqykdqflai idskelsdlk sashvmqgkt wlrdklskia qleitsggnt |
| | | 301 | ankridyeie kshsndaict tgllpvdnid dikeyyikpl rkkskakike lkcfrqrdlv |
| | | 361 | kytkrngety tgyitslrik nnkynskven fstlkgkifr gygfrnltll nrpkglmiv |
| 6 | sp\|G3ECR1\| | 1 | mlfnkciiis inldfsnkek cmtkpysigl digtnsvgwa vitdnykvps kkmkvlgnts |
| SEQ ID | CAS9_STRTR | 61 | kkyikknllg vllfdsgita egrrlkrtar rrytrrrnri lylqeifste matlddaffq |
| NO: | | 121 | rlddsflvpd dkrdskypif gnlveekvyh defptiyhlr kyladstkka dlrlvylala |
| 2046 | | 181 | hmikyrghfl iegefnsknn diqknfqdfl dtynaifesd lslenskqle eivkdkiskl |
| | | 241 | ekkdrilklf pgeknsgifs eflklivgnq adfrkcfnld ekaslhfske sydedletll |
| | | 301 | gyigddysdv flkakklyda illsgfltvt dneteaplss amikrynehk edlallkeyi |
| | | 361 | rnislktyne vfkddtkngy agyidgktnq edfyvylknl laefegadyf lekidredfl |
| | | 421 | rkqrtfdngs ipyqihlqem raildkqakf ypflaknker iekiltfrip yyvgplargn |
| | | 481 | sdfawsirkr nekitpwnfe dvidkessae afinrmtsfd lylpeekvlp khsllyetfn |
| | | 541 | vyneltkvrf iaesmrdyqf ldskqkkdiv rlyfkdkrkv tdkdiieylh aiygydgiel |
| | | 601 | kgiekqfnss lstyhdllni indkefldds sneaiieeii htltifedre mikqrlskfe |
| | | 661 | nifdksvlkk lsrrhytgwg klsaklingi rdeksgntil dyliddgisn rnfmqlihdd |
| | | 721 | alsfkkkiqk aqiigdedkg nikevvkslp gspaikkgil qsikivdelv kvmggrkpes |
| | | 781 | ivvemarenq ytnqgksnsq qrlkrleksl kelgskilke nipaklskid nnalqndrly |
| | | 841 | lyylqngkdm ytgddldidr lsnydidhii pqaflkdnsi dnkvlvssas nrgksddfps |
| | | 901 | levvkkrktf wyqllkskli sqrkfdnltk aerggllped kagfiqrqlv etrqitkhva |
| | | 961 | rlldekfnnk kdennravrt vkiitlkstl vsqfrkdfel ykvreindfh hahdaylnav |
| | | 1021 | iasallkkyp klepefvygd ypkynsfrer ksatekvyfy snimnifkks isladgrvie |
| | | 1081 | rplievneet gesvwnkesd latvrrvlsy pqvnvvkkve eqnhgldrgk pkglfnanls |
| | | 1141 | skpkpnsnen lvgakeyldp kkyggyagis nsfavlvkgt iekgakkkit nvlefqgisi |
| | | 1201 | ldrinyrkdk lnfllekgyk dieliielpk yslfelsdgs rrmlasilst nnkrgeihkg |
| | | 1261 | nqiflsqkfv kllyhakris ntinenhrky venhkkefee lfyyilefne nyvgakkngk |
| | | 1321 | llnsafqswq nhsidelcss figptgserk glfeltsrgs aadfeflgvk ipryrdytps |
| | | 1381 | slikdatlih qsvtglyetr idlaklgeg |
| 7 | sp\|J7RUA5\| | 1 | mkrnyilgld igitsvgygi idyetrdvid agvrlfkean vennegrrsk rgarrlkrrr |
| SEQ ID | CAS9_STAAU | 61 | rhriqrvkkl lfdynlltdh selsginpye arvkglsqkl seeefsaall hlakrrgvhn |
| NO: | | 121 | vneveedtgn elstkeqisr nskaleekyv aelqlerlkk dgevrgsinr fktsdyvkea |
| 2047 | | 181 | kqllkvqkay hqldqsfidt yidlletrrt yyegpgegsp fgwkdikewy emlmghctyf |
| | | 241 | peelrsvkya ynadlynaln dlnnlvitrd enekleyyek fqiienvfkq kkkptlkqia |
| | | 301 | keilvneedi kgyrvtstgk peftnlkvyh dikditarke iienaelldq iakiltiyqs |
| | | 361 | sediqeeltn lnseltqeei eqisnlkgyt gthnlslkai nlildelwht ndnqiaifnr |
| | | 421 | lklvpkkvdl sqqkeipttl vddfilspvv krsfiqsikv inaiikkygl pndiiielar |
| | | 481 | eknskdaqkm inemqkrnrq tnerieeiir ttgkenakyl iekiklhdmq egkclyslea |
| | | 541 | ipledllnnp fnyevdhiip rsvsfdnsfn nkvlvkqeen skkgnrtpfq ylsssdskis |
| | | 601 | yetfkkhiln lakgkgrisk tkkeylleer dinrfsvqkd finrnlvdtr yatrglmnll |
| | | 661 | rsyfrvnnld vkvksinggf tsflrrkwkf kkernkgykh haedaliian adfifkewkk |
| | | 721 | ldkakkvmen qmfeekqaes mpeieteqey keifitphqi khikdfkdyk yshrvdkkpn |
| | | 781 | relindtlys trkddkgntl ivnnlnglyd kdndklkkli nkspekllmy hhdpqtyqkl |
| | | 841 | klimeqygde knplykyyee tgnyltkysk kdngpvikki kyygnklnah lditddypns |
| | | 901 | rnkvvklslk pyrfdvyldn gvykfvtvkn ldvikkenyy evnskcyeea kklkkisnqa |
| | | 961 | efiasfynnd likingelyr vigvnndlln rievnmidit yreylenmnd krppriikti |
| | | 1021 | asktqsikky stdilgnlye vkskkhpgii kkg |
| 8 | Strepto- | 1 | kysigldigt nsvgwavitd eykvpskkfk vlgntdrhsi kknligallf dsgetaeatr |
| SEQ ID | coccus | 61 | lkrtarrryt rrknricylq eifsnemakv ddsffhrlee sflveedkkh erhpifgniv |
| NO: | pyogenes_ | 121 | devayhekyp tiyhlrkklv dstdkadlrl iylalahmik frghfliegd lnpdnsdvdk |
| 2048 | SF370 | 181 | lfiqlvqtyn qlfeenpina sgvdakails arlsksrrle nliaqlpgek knglfgnlia |
| | | 241 | lslgltpnfk snfdlaedak lqlskdtydd dldnllaqig dqyadlflaa knlsdaills |
| | | 301 | dilrvnteit kaplsasmik rydehhqdlt llkalvrqql pekykeiffd qskngyagyi |
| | | 361 | dggasqeefy kfikpilekm dgteellvkl nredllrkqr tfdngsiphq ihlgelhail |
| | | 421 | rrqedfypfl kdnrekieki ltfripyyvg plargnsrfa wmtrkseeti tpwnfeevvd |
| | | 481 | kgasaqsfie rmtnfdknlp nekvlpkhsl lyeyftvyne ltkvkyvteg mrkpaflsge |
| | | 541 | qkkaivdllf ktnrkvtvkq lkedyfkkie cfdsveisgv edrfnaslgt yhdllkiikd |
| | | 601 | kdfldneene diledivltl tlfedremie erlktyahlf ddkvmkqlkr rrytgwgrls |
| | | 661 | rklingirdk qsgktildfl ksdgfanrnf mqlihddslt fkediqkaqv sgqgdslheh |
| | | 721 | ianlagspai kkgilqtvkv vdelvkvmgr hkpeniviem arenqttqkg qknsrermkr |
| | | 781 | ieegikelgs qilkehpven tqlqneklyl yylqngrdmy vdqeldinrl sdydvdhivp |
| | | 841 | qsflkddsid nkvltrsdkn rgksdnvpse evvkkmknyw rqllnaklit qrkfdnltka |
| | | 901 | ergglseldk agfikrqlve trqitkhvaq ildsrmntky dendklirev kvitlksklv |
| | | 961 | sdfrkdfqfy kvreinnyhh ahdaylnavv gtalikkypk lesefvygdy kvydvrkmia |
| | | 1021 | kseqeigkat akyffysnim nffkteitla ngeirkrpli etngetgeiv wdkgrdfatv |
| | | 1081 | rkvlsmpqvn ivkktevqtg gfskesilpk rnsdkliark kdwdpkkygg fdsptvaysv |
| | | 1141 | lvvakvekgk skklksvkel lgitimerss feknpidfle akgykevkkd liiklpkysl |
| | | 1201 | felengrkrm lasagelqkg nelalpskyv nflylashye klkgspedne qkqlfveqhk |
| | | 1261 | hyldeiieqi sefskrvila danldkvlsa ynkhrdkpir eqaeniihlf tltnlgapaa |
| | | 1321 | fkyfdttidr krytstkevl datlihqsit glyetridls qlggd |

| No. | Proteins | Domains and amino acid positions |
|---|---|---|
| 1 | IscB(−HNH) | X domain: 51-97 |
| | EFH81386 | RuvC-I: 104-118 |
| | | Bridge Helix: 140-160 |
| | | RuvC-II: 169-212 |
| | | RuvC-III: 226-278 |
| 2 | IscB(+HNH) | X domain: 11-56 |
| | TAE54104.1 | RuvC-I: 63-77 |
| | | Bridge Helix: 100-121 |
| | | RuvC-II: 129-172 |
| | | HNH: 211-243 |
| | | RuvC-III: 279-321 |
| 3 | IscB(+HNH) | X domain: 4-50 |
| | WP_038093640.1 | RuvC-I: 57-71 |
| | | Bridge Helix: 108-129 |
| | | RuvC-II: 138-181 |
| | | HNH: 220-252 |
| | | RuvC-III: 288-330 |
| 4 | IscB(+HNH) | X domain: 7-52 |
| | WP_052490348.1 | RuvC-I: 59-73 |
| | | Bridge Helix: 100-121 |
| | | RuvC-II: 129-172 |
| | | HNH: 211-243 |
| | | RuvC-III: 279-322 |
| 5 | IscB(+HNH) | X domain: 7-52 |
| | WP_015325818.1 | RuvC-I: 61-75 |
| | | Bridge Helix: 101-121 |
| | | RuvC-II: 132-175 |
| | | HNH: 215-247 |
| | | RuvC-III: 284-327 |
| 6 | sp\|G3ECR1\| | RuvC-I: 28-42 |
| | CAS9_STRTR | Bridge Helix: 85-108 |
| | | Rec: 118-736 |
| | | RuvC-II: 750-799 |
| | | HNH: 864-896 |
| | | RuvC-III: 957-1019 |
| | | PAM Interaction (PI): 1119-1409 |
| 7 | sp\|J7RUA5\| | RuvC-I: 7-21 |
| | CAS9_STAAU | Bridge Helix: 49-72 |
| | | Rec: 80-433 |
| | | RuvC-II: 445-493 |
| | | HNH: 553-585 |
| | | RuvC-III: 654-709 |
| | | PAM Interaction (PI): 789-1053 |
| 8 | Streptococcus_ | RuvC-I: 4-18 |
| | pyogenes_ | Bridge Helix: 61-84 |
| | SF370 | Rec: 94-718 |
| | | RuvC-II: 725-774 |
| | | HNH: 833-865 |
| | | RuvC-III: 926-988 |
| | | PAM Interaction (PI): 1099-1365 |

TABLE 3
Some other examples of the nucleic acid-guided nucleases are provided.

| ID | Sequences |
|---|---|
| 0181581_ | MSRVLVVDADRRVLAPCTARRARLLLSGGKAAVLRRYPFTIILKQSYPTASPRPVRLKLDPGSKTT |
| 10042345_ | GIAVVTEATGEVVWAAELQHRGQLIKDALESRRSLRSSRRNRKTRYRPPRWRNRKRTGPPVLSSA |
| organized_ | GEVNQLGKWLAPSLQHRIEVIMTWVHRLRRYLPITAISQEIVRFDMQKMQNPEISGVEYQQGTLFG |
| organized_-_- | FEVREYLLDKWHRRCGYCGAQNTRLEVDHIVPRSHGGSDRVSNLTLSCEPCNKKKSNRPAALFLA |
| >_IscB(0.prot | KKPEVLQKLQRQAKAPLKDAAAVNSTRYALLERLKATGLPVEIASGGRTKFNRFERQIPKTHWLD |
| SEQ ID | AACVGASTPEVLQWEAVRPLAIKAMGHGKRQVTNVDAYGFPKGKPKGIPVHPFRTGDVIRAEVP |
| NO: 2049 | VGKFAGNYVDRIVAIRTDQTRVSLPLRSQEKGKKKVPFLFQTKYITAKLFSADGYDYGFLQPPEPR |
| | TQRTES* |
| 0181587_ | MSRVLVVDADRRVLAPCTARRARLLLSGGKAAVLRRYPFTIILKQSYPTASPRPVRLKLDPGSKTT |
| 10052842_ | GIAVVTEATGEVVWAAELQHRGQLIKDALESRRSLRSSRRNRKTRYRPPRWRNRKRTGPPVLSSA |
| organized_ | GEVNQLGKWLAPSLQHRIEVIMTWVHRLRRYLPITAISQEIVRFDMQKMQNPEISGVEYQQGTLFG |
| organized_-_- | FEVREYLLDKWHRRCGYCGAQNTRLEVDHIVPRSHGGSDRVSNLTLSCEPCNKKKSNRPAALFLA |
| >_IscB(0.prot | KKPEVLQKLQRQAKAPLKDAAAVNSTRYALLERLKATGLPVEIASGGRTKFNRFERQIPKTHWLD |
| SEQ ID | AACVGASTPEVLQWEAVRPLAIKAMGHGKRQVTNVDAYGFPKGKPKGIPVHPFRTGDVVRAEVP |
| NO: 2050 | VGKFAGNYVDRIVAIRTDQTRVSLPLRSQEKGKKKVPFLFQTKYITAKLFSADGYDYGFLQPPEPR |
| | TQRTES* |
| 0211577_ | MSKVFVVDKERRPLAPCTPRRARLLLSECKASVLRQYPFTIILKESHATATPRPLRLKIYPASKTTGL |
| 10007484_ | AVINESTAEVVWAAELKHRGHLIKKALESRRSLRRGRRSRKTRYRPARWLNRVRKPPVFTNTEGV |
| organized_ | VVTGKWLPPSLQHRIEVVMTWVERLQHYLQITAISQEVMRFDTQKLQNPELSGVEYQQGTLHGYE |
| organized_-_- | VREYLLEKWSRKCAYCGARDTRLEISHLIARSRGGSDQVSNLTLACKACRDQKGDSNLEKFLATK |
| >_IscB(0.prot | PKILKKLQSQARVSLKDVAAINSTRLALLERLKATGLPVEVSSGGETKYNRNQQQIPKSHWLDAV |
| SEQ ID | CVGASTPENLEWQQVKPLAIKAMGHGKRQMVNVDAFGFPRGKPKGIPVHPFRTGDIVRVTIPKGK |
| NO: 2051 | YAGEYEERISSIKTSETRVGIPNKKEKGTIYLQTKYITAKIFSSDGYDYDYL* |
| 0211577_ | MSQVFVVDKERRPLAPCTPRRARLLLSECKASVFRRYPFTIILKESHATATPRPLRLKIYPASKTTGL |
| 10055383_ | AVINESTAEVVWAAELKHRSQLIKKALESRRSLRSGRRSRKTRYRPARWLNRVRNNPVFTNTEGA |
| organized_ | VITGKWLPPSLQHRVEVVMTWVERLQRYLPITALSQEIMRFDTQKLQNPEISGVEYQQGTLHGYE |
| organized_-_- | VREYLLEKWSRKCAYCGARDTRLEINHIVARSRGGSDRVSNLTLACRSCREQRGASNLEEFLATRP |
| >_IscB(0.prot | ALLMKLQSQAQVSLRDVAAINSTRFVLLERLKARGLPVEVSSGGETKFNRNQQQIPRSHWLNAVC |
| SEQ ID | IGPNTPENLKWDQVQPLAIKAMGHGKRQMVNVDAFGFPRGKPKGTPVHPFRTGDVVRAAIPKGK |
| NO: 2052 | YVGEYEERISSIKTSETRVGIPNKKGQGTIYLQTKYITTKIFSSDGFDYEFLTSES* |
| 0211577_ | MSQVFVVDKERRPLAPCTPRRARLLLSECKASVFRRYPFTIILKESHATATPRPLRLKIYPASKTTGL |
| 10064440_ | AVINESTAEVVWAAELKHRSQLIKKALESRRSLRSGRRSRKTRYRPARWLNRVRNNPVFTNTEGA |
| organized_ | VITGKWLPPSLQHRVEVVMTWVERLQRYLPITALSQEIMRFDTQKLQNPEISGVEYQQGTLHGYE |
| organized_-_- | VREYLLEKWSRKCAYCGARDTRLEINHIVARSRGGSDRVSNLTLACRSCREQRGASNLEEFLATRP |
| >_IscB(0.prot | ALLMKLQSQAQVSLRDVAAINSTRFVLLERLKARGLPVEVSSGGETKFNRNQQQIPRSHWLNAVC |
| SEQ ID | IGPNTPENLKWDQVQPLAIKAMGHGKRQMVNVDAFGFPRGKPKGTPVHPFRTGDVVRAAIPKGK |
| NO: 2053 | YVGEYEERISSIKTSETRVGIPNKKGQGTIYLQTKYITTKIFSSDGFDYEFLTSES* |
| a0099850_ | MSRVLVVDANRCPLAPCTPRRARLLLNSGKAAVLRRYPFTIILKQSYPTANPRPVRLKLDPGSKTT |
| 1002913_ | GIAVVTEATGEVVWAAELQHRGQLIKNALESRRSLRRGRRNRKTRYRPARWLNRKRTGPPVLSSA |
| organized_ | DTVSTLGKWLAPSLQHRIEVIMTWVHRLRRYLPITAISQEIVRFDMQKMQNPEISGVEYQQGTLFG |
| organized_-_- | YEVREYLLDKWQRQCGYCGAKDKRLEVDHIVPRSHGGSDRVSNLTLSCEPCNKRKNQRPAAVFL |
| >_cas9(209.prot | AKKPEVLQKLQRQAKAPLKDAAAVNSTRYALLERLKATGLPVEIASGGRTKFNRSERQIPKTHWL |
| SEQ ID | DAACVGASTPEVLQWKAVKPLAIKAMGHGKRQVVNVDAYGFPRGKAKGIPVHPFRTGDIVRAEI |
| NO: 2054 | PKGKYVGTYVSRIAETTTSKPLAGFKSKTGKRIQCHTKHMTKLFNSDGYGYGFLKAPEPRQTVISE |
| | S* |
| a0208542_ | MSRVLVVDADRCPLAPCTPRRARLLLNSGKAAVLRRYPFTIILKQSYPTASPRPVRLKLDPGSKTT |
| 1002724_ | GIAVVTEATGEVVWAAELQHRGQLIKNALESRRSLRRGRRNRKTRYRPARWLNRKRTGPPLLSSA |
| organized_ | DTVSTLGKWLAPSLQHRIEVIMTWVHRLRRYLPITAISQEIVRFDMQKMQNPEISGVEYQQGTLFG |
| organized_-_- | YEVREYLLDKWRRQCGYCGAKDKRLEVDHIVPRSHGGSDRVSNLTLSCEPCNKRKNQRPAAVFL |
| >_IscB(0.prot | AKKPEVLQKLQRQAKAPLKDAAAVNSTRYALLERLKATGLPVEVASGGRTKFNRSERQIPKTHW |
| SEQ ID | LDAACVGASTPEVLQWEAVRPLAIKAMGHGKRQVVNVDAYGFPRGKAKGIPVHPFRTGDIVRAEI |
| NO: 2055 | PKGKYVGTYVSRIAETTTSKPLAGFKSKTGKRIQCHTKHMTKLFNSDGYGYGFLKAPEPRQTVISE |
| | S* |
| AGAU01000046.1_ | MSKVFVVDKERRPLAPCTPRRARLLLSECKASVLRQYPFTIILKESHATATPRPLRLKIYPASKTTGL |
| organized_ | AVINESTAEVVWAAELKHRGHLIKKALESRRSLRRGRRSRKTRYRPARWLNRVRKPPVLTNTEGV |
| organized_-_- | VVTGKWLPPSLQHRIKVVMTWVERLQHYLQITALSQEVMRFDTQKLQNPEISGVWYQQGTLHGY |
| >_IscB(26.prot | EVREYLLEKWSRKCAYCGARDTRLEISHLIARSRGGSDQVSNLTLACKACRDQKGDSNLEKFLAT |
| SEQ ID | KPKILKKLQSQARVSLKDVAAINSTRLALLERLKATGLPVEVSSGGETKYNRNQQQIPKSHWLDA |
| NO: 2056 | VCVGASTPENLEWQQVNPLAIKAMGHGKRQMVNVDAFGFPRGKPKGIPVHPFRTGDIVRVTIPKG |
| | KYAGEYEERISSIKTSETRVGIPNKKEKGTIYLQTKYITAKIFSSDGYEYYFYPNK* |
| Ga0348337_ | MSRVLVVDADRCPLAPCTPRRARLLLNSGKAAVLRRYPFTIILKQSYPTASPRPVRLKLDPGSKTT |
| 018242_ | GIAVVTEATGEVVWAAELQHRGQLIKNALESRRSLRRGRRNRKTRYRPARWLNRKRTGPPLLSSA |
| organized_ | DTVSTLGKWLAPSLQHRIEVIMTWVHRLRRYLPITAISQEIVRFDMQKMQNPEISGVEYQQGTLFG |
| organized_-_- | YEVREYLLDKWRRQCGYCGAKDKRLEVDHIVPRSHGGSDRVSNLTLSCEPCNKRKNQRPAAVFL |
| >_IscB(0.prot | AKKPEVLQKLQRQAKAPLKDAAAVNSTRYALLERLKATGLPVEVASGGRTKFNRSERQIPKTHW |
| SEQ ID | LDAACVGASTPEVLQWEAVRPLAIKAMGHGKRQVVNVDAYGFPRGKAKGIPVHPFRTGDIVRAEI |
| NO: 2057 | PKGKYVGTYVSRIAETTTSKPLAGFKSKTGKRIQCHTKHMTKLFNSDGYGYGFLKAPEPRQTVISE |
| | S* |

[0145] In some examples, the IscB protein shares at least 80%, at least 85%, at least 90%, at least 95%, at least 99%, or 100% sequence identity with an IscB protein selected from Tables 1A-1E and 2.

[0146] In one embodiment, the nucleic acid-guided nucleases that comprise an X domain and a Y domain are IscB proteins. The IscB protein may be homolog or ortholog of IscB proteins described in Kapitonov V V et al., ISC, a Novel Group of Bacterial and Archaeal DNA Transposons That Encode Cas9 Homologs, J Bacteriol. 2015 Dec. 28; 198(5): 797-807. doi: 10.1128/JB.00783-15, which is incorporated by reference herein in its entirety.

[0147] In one embodiment, the nucleic acid-guided nucleases are smaller compared to previously identified Cas proteins. The nucleic acid-guided nucleases and related systems described herein may allow an increased access to the site of target polynucleotide binding, which has several advantages. For example, they can allow easier access to the target polynucleotide for functional domains fused to the nucleic acid-guided nucleases or provided in trans. In an embodiment, the RNA: DNA duplex formed by guide molecules that form complex with the nucleic acid-guided nucleases is substantially more exposed to the environment and/or functional domains present in proximity of the DNA: RNA complex than the duplexes formed by Cas proteins known in the art. In an embodiment, the nucleic acid-guided nucleases confer a different degree of stability of the RNA: DNA duplex. In an embodiment, the nucleic acid-guided nucleases enable direct targeting of the DNA: RNA complex by one or more functional domains.

[0148] In an embodiment, the nucleic acid-guided nucleases and related compositions have no or limited target specificity. For example, a target polynucleotide does not need to have a specific sequence to be targeted by the nucleic acid-guided nucleases and related compositions. In an embodiment, the nucleic acid-guided nucleases and related compositions do not have a PAM requirement, in that there is no sequence requirement outside of the target sequence which defines target specificity. In some cases, the target specificity of the nucleic acid-guided nucleases and related compositions may be determined by the sequence of the guide molecule only, not any sequence within the target polynucleotide. In alternative embodiments, the nucleic acid-guided nucleases and related compositions has a target specificity, more particularly the binding of the nucleic acid-guided nucleases-guide complex is PAM-dependent. The nucleic acid-guided nucleases and related systems may be modified to include PAM specificity (as described in Kleinstiver et al. 2015; Hirano et al. Mol. Cell 2016).

[0149] In an embodiment, the nucleic acid-guided nucleases correspond to a naturally occurring protein, a modified naturally occurring protein, functional fragment or truncated version thereof, or a non-naturally occurring protein. In an embodiment, the nucleic acid-guided nucleases comprise one or more domains originating from other nucleic acid-guided nucleases, more particularly originating from different organisms. In an embodiment, the nucleic acid-guided nucleases may be designed by in silico approaches. Examples of in silico protein design have been described in the art and are therefore known to a skilled person.

[0150] In embodiments, the nucleic acid-guided nucleases also encompass homologs or orthologs of nucleic acid-guided nucleases whose sequences are specifically described herein. The terms “ortholog” and “homolog” are well known in the art. By means of further guidance, a “homolog” of a protein as used herein is a protein of the same species which performs the same or a similar function as the protein it is a homolog of. Homologous proteins may but need not be structurally related, or are only partially structurally related. An “ortholog” of a protein as used herein is a protein of a different species which performs the same or a similar function as the protein it is an orthologue of. Orthologous proteins may but need not be structurally related, or are only partially structurally related. In one embodiment, the homolog or ortholog of a nucleic acid-guided nucleases such as referred to herein has a sequence homology or identity of at least 80%, at least 85%, at least 90%, at least 95% with a nucleic acid-guided nuclease. In further embodiments, the homolog or ortholog of a nucleic acid-guided nuclease has a sequence identity of at least 80%, at least 85%, at least 90%, or at least 95% with a wildtype nucleic acid-guided nuclease.

[0151] Further orthologs of known nucleic acid-guided nuclease may be identified. Some methods of identifying orthologs of nucleic acid-guided nucleases may involve identifying tracr sequences in genomes of interest. Identification of tracr sequences may relate to the following steps: Search for the direct repeats or tracr mate sequences in a database to identify a region comprising a nucleic acid-guided nuclease. Search for homologous sequences in the region flanking the nucleic acid-guided nuclease in both the sense and antisense directions. Look for transcriptional terminators and secondary structures. Identify any sequence that is not a direct repeat or a tracr mate sequence but has more than 50% identity to the direct repeat or tracr mate sequence as a potential tracr sequence. Take the potential tracr sequence and analyze for transcriptional terminator sequences associated therewith.

[0152] A chimeric enzyme can comprise a first fragment and a second fragment, and the fragments can be of nucleic acid-guided nuclease orthologs of organisms of genera or of species, e.g., the fragments are from nucleic acid-guided nuclease orthologs of different species.

### Protein Modifications

[0153] The IscB polypeptide nucleases may comprise one or more modifications. As used herein, the term “modified” with regard to an IscB polypeptide nuclease generally refers to a IscB polypeptide nuclease having one or more modifications or mutations (including point mutations, truncations, insertions, deletions, chimeras, fusion proteins, etc.) compared to the wild type counterpart from which it is derived. By derived is meant that the derived enzyme is largely based, in the sense of having a high degree of sequence homology with, a wildtype enzyme, but that it has been mutated (modified) in some way as known in the art or as described herein.

[0154] The modified proteins, e.g., modified IscB polypeptide nuclease may be catalytically inactive (also referred as dead). As used herein, a catalytically inactive or dead nuclease may have reduced or no nuclease activity compared to a wildtype counterpart nuclease. In some cases, a catalytically inactive or dead nuclease may have nickase activity. In some cases, a catalytically inactive or dead nuclease may not have nickase activity. Such a catalytically inactive or dead nuclease may not make either double-strand or single-strand break on a target polynucleotide, but may still bind or otherwise form complex with the target polynucleotide.

[0155] In an embodiment, the IscB comprises one or more mutation in the HNH domain of the polypeptide, or in the RuvC-II of the polypeptide. In an embodiment, the IscB polypeptide comprises a mutation of the catalytic RuvC-II residue corresponding to E157 to alanine (E157A) in A. warmingii. In an aspect, the mutation of a catalytic RuvC-II residue abolishes the nucleolytic activity on the non-target DNA strand. In an embodiment, the IscB polypeptide comprises a mutation of the catalytic HNH residue corresponding to H212 to alanine (H212A) in A. warmingii. In one embodiment, the mutation of the catalytic HNH residue abolishes nucleolytic activity on the target DNA strand. In an aspect, the IscB comprises a mutation corresponding to both E157A and H212A of A. warmingii, or corresponding to the positions according to consensus sequence numbering relative to A. warmingii. In an embodiment, mutation at both an HNH domain and RuvC abolishes all dsDNA nucleolytic activity, providing a dead IscB polypeptide (dIscB).

[0156] In one embodiment, the modifications of the IscB polypeptide may or may not cause an altered functionality. By means of example, modifications which do not result in an altered functionality include for instance codon optimization for expression into a particular host, or providing the nuclease with a particular marker (e.g., for visualization). Modifications which may result in altered functionality may also include mutations, including point mutations, insertions, deletions, truncations (including split nucleases), etc., as well as chimeric nucleases (e.g., comprising domains from different orthologues or homologues) or fusion proteins. A chimeric enzyme can comprise a first fragment and a second fragment, and the fragments can be of IscB polypeptide nuclease orthologs of organisms of a genus or of a species, e.g., the fragments are from IscB polypeptide nuclease orthologs of different species. Fusion proteins may without limitation include, for instance, fusions with heterologous domains or functional domains (e.g., localization signals, catalytic domains, etc.). In an embodiment, various different modifications may be combined (e.g., a mutated nuclease which is catalytically inactive and which further is fused to a functional domain, such as for instance to induce DNA methylation or another nucleic acid modification, such as including without limitation, a break (e.g. by a different nuclease (domain)), a mutation, a deletion, an insertion, a replacement, a ligation, a digestion, a break or a recombination). As used herein, “altered functionality” includes without limitation an altered specificity (e.g., altered target recognition, increased (e.g., “enhanced” IscB polypeptide nuclease) or decreased specificity, or altered TAM recognition), altered activity (e.g., increased or decreased catalytic activity, including catalytically inactive nucleases or nickases), and/or altered stability (e.g., fusions with destabilization domains). Examples of all these modifications are known in the art. It will be understood that a “modified” nuclease as referred to herein, and in particular a “modified” IscB polypeptide nuclease or system or complex preferably still has the capacity to interact with or bind to the polynucleic acid (e.g., in complex with the ωRNA molecule). Such modified IscB polypeptide nuclease can be combined with the deaminase protein or active domain thereof as described herein.

[0157] In one embodiment, unmodified IscB polypeptide nucleases may have cleavage activity. In one embodiment, the IscB polypeptide nucleases may direct cleavage of one or both DNA strands at the location of or near a target sequence, such as within the target sequence and/or within the complement of the target sequence or at sequences associated with the target sequence. In one embodiment, the IscB polypeptide nucleases may direct cleavage of one or both strands within about 1, 2, 3, 4, 5, 6, 7, 8, 9, 10, 15, 20, 25, 50, 100, 200, 500, or more base pairs or nucleotides from the first or last nucleotide of a target sequence. In one embodiment, the cleavage may be staggered, i.e., generating sticky ends. In one embodiment, the cleavage is a staggered cut with a 5′ overhang. In one embodiment, the cleavage is a staggered cut with a 5′ overhang of 1 to 15 nucleotides, preferably of 4 or 9 nucleotides.

[0158] In one embodiment, the cleavage site is distant from the Target Adjacent Motif (TAM), which is used interchangeably with the term PAM herein, e.g., the cleavage occurs after the nth nucleotide on the non-target strand and after the nucleotide on the targeted strand. In one embodiment, the cleavage site occurs after an identified nucleotide (counted from the TAM) on the non-target strand and after the further identified nucleotide (counted from the TAM) on the targeted strand. In one embodiment, a vector encodes a nucleic acid-targeting effector protein that may be mutated with respect to a corresponding wild-type enzyme such that the mutated nucleic acid-targeting effector protein lacks the ability to cleave one or both DNA and RNA strands of a target polynucleotide containing a target sequence. As a further example, two or more catalytic domains of a IscB polypeptide nuclease (e.g., RuvC I, RuvC II, and RuvC III or the HNH domain) may be mutated to produce a mutated IscB polypeptide nuclease substantially lacking all DNA cleavage activity. As described herein, corresponding catalytic domains of a IscB polypeptide nuclease may also be mutated to produce a mutated IscB polypeptide nuclease lacking all DNA cleavage activity or having substantially reduced DNA cleavage activity. In one embodiment, an IscB polypeptide nuclease may be considered to substantially lack all polynucleotide cleavage activity when the polynucleotide cleavage activity of the mutated enzyme is no more than 25%, no more than 10%, no more than 5%, no more than 1%, no more than 0.1%, no more than 0.01% of the nucleic acid cleavage activity of the non-mutated form of the enzyme; an example can be when the nucleic acid cleavage activity of the mutated form is nil or negligible as compared with the non-mutated form. An IscB polypeptide nuclease may be identified with reference to the general class of enzymes that share homology to the biggest nuclease with multiple nuclease domains from the Type I, II, III, IV, V, or VI CRISPR systems.

[0159] TAM identification and specificity may be identified, for example, using the methods disclosed in the Examples section below.

[0160] In an embodiment, the nuclease domains of the IscB polypeptide nuclease are catalytically inactive, or modified to be catalytically inactive, or when the protein is a nickase. In an embodiment, both nuclease domains are catalytically inactive.

[0161] In an embodiment, the IscB polypeptide nuclease may comprise one or more modifications resulting in enhanced activity and/or specificity, such as including mutating residues that stabilize the targeted or non-targeted strand. In an embodiment, the altered or modified activity of the engineered IscB polypeptide nuclease comprises increased targeting efficiency or decreased off-target binding. In an embodiment, the altered activity of the engineered IscB polypeptide nuclease comprises modified cleavage activity. In an embodiment, the altered activity comprises increased cleavage activity as to the target polynucleotide loci. In an embodiment, the altered activity comprises decreased cleavage activity as to the target polynucleotide loci. In an embodiment, the altered activity comprises decreased cleavage activity as to off-target polynucleotide loci. In an embodiment, the altered or modified activity of the modified nuclease comprises altered helicase kinetics. In an embodiment, the modified nuclease comprises a modification that alters association of the protein with the nucleic acid molecule comprising RNA, or a strand of the target polynucleotide loci, or a strand of off-target polynucleotide loci. In an aspect of the invention, the engineered IscB polypeptide nuclease comprises a modification that alters formation of the IscB polypeptide nuclease and related complex. In an embodiment, the altered activity comprises increased cleavage activity as to off-target polynucleotide loci. Accordingly, in an embodiment, there is increased specificity for target polynucleotide loci as compared to off-target polynucleotide loci. In other embodiments, there is reduced specificity for target polynucleotide loci as compared to off-target polynucleotide loci. In an embodiment, the mutations result in decreased off-target effects (e.g., cleavage or binding properties, activity, or kinetics), such as in case for IscB polypeptide nuclease for instance resulting in a lower tolerance for mismatches between target and ωRNA. Other mutations may lead to increased off-target effects (e.g., cleavage or binding properties, activity, or kinetics). Other mutations may lead to increased or decreased on-target effects (e.g., cleavage or binding properties, activity, or kinetics). In an embodiment, the mutations result in altered (e.g., increased or decreased) helicase activity, association or formation of the functional nuclease complex. In an embodiment, the mutations result in an altered TAM recognition, i.e., a different TAM may be (in addition or in the alternative) be recognized, compared to the unmodified IscB polypeptide nuclease. Examples mutations include positively charged residues and/or (evolutionary) conserved residues, such as conserved positively charged residues, in order to enhance specificity. In an embodiment, such residues may be mutated to uncharged residues, such as alanine.

### Functional Domains Modifications

[0162] The IscB polypeptide (including variants such as a catalytically inactive form) may be associated with one or more functional domains (e.g., via fusion protein or suitable linkers). In an embodiment, the IscB polypeptide nuclease, or an ortholog or homolog thereof, may be used as a generic nucleic acid binding protein with fusion to or being operably linked to one or more functional domains. In one example, the functional domain is a deaminase. In another example, the functional domain is a transposase. In another example, the functional domain is a reverse transcriptase. In some cases, a functional domain may be associate with (e.g., fuse to) the IscB polypeptide nuclease. In some cases, a functional domain may be a protein different from the IscB polypeptide nuclease. In such cases, a functional domain and the IscB polypeptide nuclease may form a protein complex.

[0163] It is also envisaged that the IscB polypeptide nuclease-hRNA molecule complex or Cas IscB polypeptide nuclease-guide RNA molecule complex, as a whole, may be associated with two or more functional domains. For example, there may be two or more functional domains associated with the IscB polypeptide nuclease, or there may be two or more functional domains associated with the hRNA (via one or more adaptor proteins), or there may be one or more functional domains associated with the RNA-targeting effector protein and one or more functional domains associated with the hRNA (via one or more adaptor proteins) or one or more functional domains associated with the guide RNA molecule (via one or more adaptor proteins).

[0164] In one embodiment, the IscB polypeptide nuclease is associated with one or more functional domains. The association can be by direct linkage of the effector protein to the functional domain, or by association with the crRNA. In a non-limiting example, the crRNA comprises an added or inserted sequence that can be associated with a functional domain of interest, including, for example, an aptamer or a nucleotide that binds to a nucleic acid binding adapter protein. The functional domain may be a functional heterologous domain.

[0165] In one embodiment, the invention also provides for the one or more heterologous functional domains to have one or more of the following activities: methylase activity, demethylase activity, transcription activation activity, transcription repression activity, transcription release factor activity, histone modification activity, nuclease activity, single-strand RNA cleavage activity, double-strand RNA cleavage activity, single-strand DNA cleavage activity, double-strand DNA cleavage activity and nucleic acid binding activity. At least one or more heterologous functional domains may be at or near the amino-terminus of the effector protein and/or wherein at least one or more heterologous functional domains is at or near the carboxy-terminus of the effector protein. The one or more heterologous functional domains may be fused to the effector protein. The one or more heterologous functional domains may be tethered to the effector protein. The one or more heterologous functional domains may be linked to the effector protein by a linker moiety.

[0166] In an embodiment, the IscB polypeptide nuclease or an ortholog or homolog thereof, may be used as a generic nucleic acid binding protein with fusion to or being operably linked to a functional domain. Exemplary functional domains may include but are not limited to translational initiator, translational activator, translational repressor, nucleases, in particular ribonucleases, a spliceosome, beads, a light inducible/controllable domain or a chemically inducible/controllable domain. In an embodiment, the one or more functional domains are controllable, e.g., inducible.

[0167] In one embodiment, one or more functional domains are associated with an IscB polypeptide nuclease via an adaptor protein, for example as used with the modified guides of Konnerman et al. (Nature 517, 583-588, 29 Jan. 2015).

[0168] In one embodiment, the one or more functional domains is attached to the adaptor protein so that upon binding of the IscB polypeptide nuclease to the hRNA molecule and target, the functional domain is in a spatial orientation allowing for the functional domain to function in its attributed function.

[0169] In one embodiment, the one or more functional domains is attached to the adaptor protein so that upon binding of the Cas IscB polypeptide nuclease to the guide RNA molecule and target, the functional domain is in a spatial orientation allowing for the functional domain to function in its attributed function.

[0170] In one embodiment, one or more functional domains are associated with a dead hRNA molecule. In one embodiment, a hRNA complex with active IscB polypeptide nuclease directs gene regulation by a functional domain at on gene locus while an hRNA directs DNA cleavage by the active IscB polypeptide nuclease at another locus, for example as described analogously in CRISPR-Cas systems by Dahlman et al., ‘Orthogonal gene control with a catalytically active Cas9 nuclease’. In one embodiment, hRNAs are selected to maximize selectivity of regulation for a gene locus of interest compared to off-target regulation. In one embodiment, hRNAs are selected to maximize target gene regulation and minimize target cleavage.

[0171] In one embodiment, one or more functional domains are associated with a dead guide RNA molecule. In one embodiment, a guide RNA complex with active Cas IscB polypeptide nuclease directs gene regulation by a functional domain at one gene locus while an hRNA directs DNA cleavage by the active IscB polypeptide nuclease at another locus, for example as described analogously in CRISPR-Cas systems by Dahlman et al., ‘Orthogonal gene control with a catalytically active Cas9 nuclease’. In one embodiment, hRNAs are selected to maximize selectivity of regulation for a gene locus of interest compared to off-target regulation. In one embodiment, hRNAs are selected to maximize target gene regulation and minimize target cleavage

[0172] For the purposes of the following discussion, reference to a functional domain could be a functional domain associated with the IscB polypeptide nuclease or a functional domain associated with the adaptor protein. In one embodiment, the one or more functional domains is attached to the adaptor protein so that upon binding of the IscB polypeptide nuclease to the hRNA molecule and target, the functional domain is in a spatial orientation allowing for the functional domain to function in its attributed function.

[0173] In the practice of the invention, loops of the hRNA may be extended, without colliding with the IscB polypeptide nuclease by the insertion of distinct RNA loop(s) or distinct sequence(s) that may recruit adaptor proteins that can bind to the distinct RNA loop(s) or distinct sequence(s). The adaptor proteins may include but are not limited to orthogonal RNA-binding protein/aptamer combinations that exist within the diversity of bacteriophage coat proteins. A list of such coat proteins includes, but is not limited to: Qβ, F2, GA, fr, JP501, M12, R17, BZ13, JP34, JP500, KU1, M11, MX1, TW18, VK, SP, FI, ID2, NL95, TW19, AP205, φCb5, φCb8r, φCb12r, φCb23r, 7s and PRR1. These adaptor proteins or orthogonal RNA binding proteins can further recruit effector proteins or fusions which comprise one or more functional domains.

[0174] Examples of functional domains include deaminase domain, transposase domain (e.g., helitron), reverse transcriptase domain, integrase domain, recombinase domain, resolvase domain, invertase domain, protease domain, DNA methyltransferase domain, DNA hydroxylmethylase domain, RNA polymerase domains, DNA demethylase domain, histone acetylase domain, histone deacetylases domain, nuclease domain (e.g. VirD2 domain), repressor domain, activator domain, nuclear-localization signal domains, transcription-regulatory protein (or transcription complex recruiting) domain, cellular uptake activity associated domain, nucleic acid binding domain, antibody presentation domain, histone modifying enzymes, recruiter of histone modifying enzymes; inhibitor of histone modifying enzymes, histone methyltransferase, histone demethylase, histone kinase, histone phosphatase, histone ribosylase, histone deribosylase, histone ubiquitinase, histone deubiquitinase, histone biotinase and histone tail protease. In some preferred embodiments, the functional domain is a transcriptional activation domain, such as, without limitation, VP64, p65, MyoD1, HSF1, RTA, SET7/9 or a histone acetyltransferase. In one embodiment, the functional domain is a transcription repression domain, preferably KRAB. In one embodiment, the transcription repression domain is SID, or concatemers of SID (e.g., SID4X). In one embodiment, the functional domain is an epigenetic modifying domain, such that an epigenetic modifying enzyme is provided. In one embodiment, the functional domain is an activation domain, which may be the P65 activation domain.

[0175] In some examples, the IscB polypeptide nuclease is associated with a ligase or functional fragment thereof. The ligase may ligate a single-strand break (a nick) generated by the IscB polypeptide nuclease. In certain cases, the ligase may ligate a double-strand break generated by the IscB polypeptide nuclease. In certain examples, the IscB polypeptide nuclease is associated with a reverse transcriptase or functional fragment thereof.

[0176] In one embodiment, the one or more functional domains is a transcriptional repressor domain. In one embodiment, the transcriptional repressor domain is a KRAB domain. In one embodiment, the transcriptional repressor domain is a NuE domain, NcoR domain, SID domain or a SID4X domain.

[0177] In one embodiment, the one or more functional domains have one or more activities, e.g., one or more of transposase activity, methylase activity, demethylase activity, translation activation activity, translation repression activity, transcription activation activity, transcription repression activity, transcription release factor activity, chromatin modifying or remodeling activity, histone modification activity, nuclease activity, single-strand RNA cleavage activity, double-strand RNA cleavage activity, single-strand DNA cleavage activity, double-strand DNA cleavage activity, nucleic acid binding activity, and detectable activity.

[0178] Histone modifying domains are also preferred in one embodiment. Exemplary histone modifying domains are discussed below. Transposase domains, HR (Homologous Recombination) machinery domains, recombinase domains, and/or integrase domains are also preferred as the present functional domains. In one embodiment, DNA integration activity includes HR machinery domains, integrase domains, recombinase domains and/or transposase domains.

[0179] In one embodiment, the DNA cleavage activity is due to a nuclease. In one embodiment, the nuclease comprises a Fok1 nuclease. See, “Dimeric CRISPR RNA-guided FokI nucleases for highly specific genome editing”, Shengdar Q. Tsai, Nicolas Wyvekens, Cyd Khayter, Jennifer A. Foden, Vishal Thapar, Deepak Reyon, Mathew J. Goodwin, Martin J. Aryee, J. Keith Joung Nature Biotechnology 32(6): 569-77(2014), relates to dimeric RNA-guided FokI Nucleases that recognize extended sequences and can edit endogenous genes with high efficiencies in human cells.

[0180] In one embodiment, the one or more functional domains is attached to the IscB polypeptide nuclease so that upon binding to the sgRNA and target the functional domain is in a spatial orientation allowing for the functional domain to function in its attributed function.

[0181] In one embodiment, the IscB polypeptide nuclease comprises one or more heterologous functional domains. As used herein, a heterologous functional domain is a polypeptide that is not derived from the same species as the IscB polypeptide nuclease. For example, a heterologous functional domain of an IscB polypeptide nuclease derived from species A is a polypeptide derived from a species different from species A, or an artificial polypeptide. The one or more heterologous functional domains may comprise one or more nuclear localization signal (NLS) domains. The one or more heterologous functional domains may comprise at least two or more NLSs. The one or more heterologous functional domains may comprise one or more transcriptional activation domains. A transcriptional activation domain may comprise VP64. The one or more heterologous functional domains may comprise one or more transcriptional repression domains. A transcriptional repression domain may comprise a KRAB domain or a SID domain. The one or more heterologous functional domain may comprise one or more nuclease domains. The one or more nuclease domains may comprise Fok 1.

[0182] Functional domains may be used to regulate transcription, e.g., transcriptional repression. Transcriptional repression is often mediated by chromatin modifying enzymes such as histone methyltransferases (HMTs) and deacetylases (HDACs). Repressive histone effector domains are known and an exemplary list is provided below. In the exemplary table, preference was given to proteins and functional truncations of small size to facilitate efficient viral packaging (for instance via AAV). In general, however, the domains may include HDACs, histone methyltransferases (HMTs), and histone acetyltransferase (HAT) inhibitors, as well as HDAC and HMT recruiting proteins. The functional domain may be or include, In one embodiment, HDAC Effector Domains, HDAC Recruiter Effector Domains, Histone Methyltransferase (HMT) Effector Domains, Histone Methyltransferase (HMT) Recruiter Effector Domains, or Histone Acetyltransferase Inhibitor Effector Domains.

[0183] In one embodiment, the functional domain may be a Methyltransferase (HMT) Effector Domain. Preferred examples include NUE, vSET, EHMT2/G9A, SUV39H1, dim-5, KYP, SUVR4, SET4, SET1, SETD8, and TgSET8. NUE is exemplified in the present Examples and, although preferred, it is envisaged that others in the class will also be useful.

[0184] In one embodiment, the functional domain may be a Histone Methyltransferase (HMT) Recruiter Effector Domain. Preferred examples include Hp1a, PHF 19, and NIPP1.

[0185] In one embodiment, the functional domain may be Histone Acetyltransferase Inhibitor Effector Domain. Preferred examples include SET/TAF-1β.

[0186] In some cases, the target endogenous (regulatory) control elements (such as enhancers and silencers) in addition to a promoter or promoter-proximal elements. Thus, the invention can also be used to target endogenous control elements (including enhancers and silencers) in addition to targeting of the promoter. These control elements can be located upstream and downstream of the transcriptional start site (TSS), starting from 200 bp from the TSS to 100 kb away. Targeting of known control elements can be used to activate or repress the gene of interest. In some cases, a single control element can influence the transcription of multiple target genes. Targeting of a single control element could therefore be used to control the transcription of multiple genes simultaneously.

[0187] Targeting of putative control elements on the other hand (e.g., by tiling the region of the putative control element as well as 200 bp up to 100 kB around the element) can be used as a means to verify such elements (by measuring the transcription of the gene of interest) or to detect novel control elements (e.g., by tiling 100 kb upstream and downstream of the TSS of the gene of interest). In addition, targeting of putative control elements can be useful in the context of understanding genetic causes of disease. Many mutations and common SNP variants associated with disease phenotypes are located outside coding regions. Targeting of such regions with either the activation or repression systems described herein can be followed by readout of transcription of either a) a set of putative targets (e.g., a set of genes located in closest proximity to the control element) or b) whole-transcriptome readout by e.g., RNAseq or microarray. This would allow for the identification of likely candidate genes involved in the disease phenotype. Such candidate genes could be useful as novel drug targets.

[0188] In one embodiment is for the one or more functional domains to comprise an acetyltransferase, preferably a histone acetyltransferase. These are useful in the field of epigenomics, for example in methods of interrogating the epigenome. Methods of interrogating the epigenome may include, for example, targeting epigenomic sequences. Targeting epigenomic sequences may include the hRNA being directed to an epigenomic target sequence. Epigenomic target sequence may include, in one embodiment, a promoter, silencer or an enhancer sequence.

[0189] The functional domains may be acetyltransferases domains. Examples of acetyltransferases are known but may include, In one embodiment, histone acetyltransferases. In one embodiment, the histone acetyltransferase may comprise the catalytic core of the human acetyltransferase p300 (Gerbasch & Reddy, Nature Biotech 6 Apr. 2015).

### ωRNA Molecules

[0190] The systems herein may further comprise one or more ωRNA molecules, which are referred to herein interchangeably as ωRNA. The ωRNA complex can comprise a guide sequence and a scaffold that interacts with the IscB polypeptide. An ωRNA molecule may form a complex with an IscB polypeptide nuclease or an IscB polypeptide, and direct the complex to bind with a target sequence. In certain example embodiments, the ωRNA molecule is a single molecule comprising a scaffold sequence and a spacer sequence. In certain example embodiments, the spacer is 5′ of the scaffold sequence. In certain example embodiments, the ωRNA molecule may further comprise a conserved nucleic acid sequence between the scaffold and spacer portions.

[0191] In certain example embodiments, the ωRNA scaffold comprises a spacer sequence and a conserved nucleotide sequence. The ωRNA scaffold typically comprises conserved regions, with the scaffold comprising 30, 31, 32, 33, 34, 35, 36, 37, 38, 39 40, 41, 42, 43, 44, 45, 46, 47 48, 49, 50, 51, 52, 53, 54, 55, 56, 57, 58, 59, 60, 61, 62, 63, 64, 65, 66, 67, 68, 69, 70, 71, 72, 73, 74, 75, 76, 77, 78, 79, 80, 81, 82, 83, 84, 85, 86, 87, 88, 89, 90, 91, 92, 93, 94, 95, 96, 97, 98, 99, 100, 105, 115, 125, 135, 145, 155, 165, 175, 185, 195, 205, 215, 225, 235, 245, 255, 265, 275, 285, 295, 305, 315, 325, 335, 345, or 355 or more nt. In an aspect, the ωRNA scaffold comprises one conserved nucleotide sequence. In embodiments, the conserved nucleotide sequence is on or near a 5′ end of the scaffold. In embodiments, the scaffold may comprise a short 3-4 base pairnexus, a conserved nexus hairpin and a large multi-stem loop region that may consist of two interconnected multi-stem loops. In an aspect, an IscrB associated scaffold may comprise a spacer, which can be re-programmed to direct site-specific binding to a target sequence of a target polynucleotide. The spacer may also be referred to herein as part of the ωRNA scaffold or as gRNA, and may comprise an engineered heterologous sequence. In an embodiment the scaffold may comprise a sequence from Table 1.

[0192] In an embodiment, the spacer length of the ωRNA is from 10 to 150 nt. In an embodiment, the spacer length of the guide RNA is at least 15 nucleotides. In an embodiment, the spacer length is from 15 to 17 nt, e.g., 15, 16, or 17 nt, from 17 to 20 nt, e.g., 17, 18, 19, or 20 nt, from 20 to 24 nt, e.g., 20, 21, 22, 23, or 24 nt, from 23 to 25 nt, e.g., 23, 24, or 25 nt, from 24 to 27 nt, e.g., 24, 25, 26, or 27 nt, from 27 to 30 nt, e.g., 27, 28, 29, or 30 nt, from 30 to 35 nt, e.g., 30, 31, 32, 33, 34, or 35 nt, or 35 nt or longer. In certain example embodiments, the guide sequence is 15, 16, 17,18, 19, 20, 21, 22, 23, 24, 25, 26, 27, 28, 29, 30, 31, 32, 33, 34, 35, 36, 37, 38, 39 40, 41, 42, 43, 44, 45, 46, 47 48, 49, 50, 51, 52, 53, 54, 55, 56, 57, 58, 59, 60, 61, 62, 63, 64, 65, 66, 67, 68, 69, 70, 71, 72, 73, 74, 75, 76, 77, 78, 79, 80, 81, 82, 83, 84, 85, 86, 87, 88, 89, 90, 91, 92, 93, 94, 95, 96, 97, 98, 99, 100, 101, 102, 103, 104, 105, 106, 107, 108, 109, 110, 111, 112, 113, 114, 115, 116, 117, 118, 119, 120, 121, 122, 123, 124, 125, 126, 127, 128, 129, 130, 131, 132, 133, 134, 135, 136, 17, 138, 19, 140, 141, 142, 143, 144, 145, 146, 147, 148, 149 or 150 nt.

[0193] In an embodiment, the ωRNA spacer length is from 15 to 50 nt. In an embodiment, the spacer length of the ωRNA is at least 15 nucleotides. In an embodiment, the spacer length is from 15 to 50 nt, e.g., 15, 16, or 17 nt, from 17 to 20 nt, e.g., 17, 18, 19, or 20 nt, from 20 to 24 nt, e.g., 20, 21, 22, 23, or 24 nt, from 23 to 25 nt, e.g., 23, 24, or 25 nt, from 24 to 27 nt, e.g., 24, 25, 26, or 27 nt, from 27 to 30 nt, e.g., 27, 28, 29, or 30 nt, from 30 to 35 nt, e.g., 30, 31, 32, 33, 34, or 35 nt, or 35 nt, from 34 to 40 nt, e.g., 34, 35, 36, 37, 38, 39, 40, from 35 to 39, from 36 to 38 nt long, about 37 nt, or longer.

[0194] In one embodiment, the sequence of the ωRNA molecule is selected to reduce the degree secondary structure within the ωRNA molecule. In one embodiment, about or less than about 75%, 50%, 40%, 30%, 25%, 20%, 15%, 10%, 5%, 1%, or fewer of the nucleotides of the nucleic acid-targeting ωRNA participate in self-complementary base pairing when optimally folded. Optimal folding may be determined by any suitable polynucleotide folding algorithm. Some programs are based on calculating the minimal Gibbs free energy. An example of one such algorithm is mFold, as described by Zuker and Stiegler (Nucleic Acids Res. 9(1981), 133-148). Another example of a folding algorithm is the online webserver RNAfold, developed at Institute for Theoretical Chemistry at the University of Vienna, using the centroid structure prediction algorithm (see e.g., A. R. Gruber et al., 2008, Cell 106(1): 23-24; and PA Carr and GM Church, 2009, Nature Biotechnology 27(12): 1151-62).

[0195] As used herein, a heterologous ωRNA molecule is an ωRNA molecule that is not derived from the same species as the IscB polypeptide nuclease, or comprises a portion of the molecule, e.g., spacer, that is not derived from the same species as the IscB polypeptide nuclease, e.g., IscB protein. For example, a heterologous ωRNA molecule of an IscB polypeptide nuclease derived from species A comprises a polynucleotide derived from a species different from species A, or an artificial polynucleotide.

[0196] In a particular embodiment, the ωRNA comprises a guide sequence linked to a conserved nucleotide sequence, wherein the conserved nucleotide sequence may comprise one or more stem loops or optimized secondary structures. In an embodiment, the conserved nucleotide sequence has a minimum length of 16 nts and a single stem loop. In further embodiments the conserved nucleotide sequence has a length longer than 16 nts, preferably more than 17 nts, and has more than one stem loops or optimized secondary structures. In one embodiment, the guide sequence may be linked to all or part of the natural conserved nucleotide sequence. In one embodiment, certain aspects of the guide architecture can be modified, for example by addition, subtraction, or substitution of features, whereas certain other aspects of guide architecture are maintained. Preferred locations for engineered guide modifications, including but not limited to insertions, deletions, and substitutions include guide termini and regions of the guide that are exposed when complexed with IscB polypeptide nuclease and/or target, for example the tetraloop and/or loop2.

[0197] In one embodiment, a loop in the guide RNA is provided. This may be a stem loop or a tetra loop. The loop is preferably GAAA, but it is not limited to this sequence or indeed to being only 4 bp in length. Indeed, preferred loop forming sequences for use in hairpin structures are four nucleotides in length, and most preferably have the sequence GAAA. However, longer or shorter loop sequences may be used, as may alternative sequences. The sequences preferably include a nucleotide triplet (for example, AAA), and an additional nucleotide (for example C or G). Examples of loop forming sequences include CAAA and AAAG.

[0198] In one embodiment, the ωRNA forms a stemloop with a separate non-covalently linked sequence, which can be DNA or RNA. In an embodiment, the sequences forming the guide are first synthesized using the standard phosphoramidite synthetic protocol (Herdewijn, P., ed., Methods in Molecular Biology Col 288, Oligonucleotide Synthesis: Methods and Applications, Humana Press, New Jersey (2012)). In one embodiment, these sequences can be functionalized to contain an appropriate functional group for ligation using the standard protocol known in the art (Hermanson, G. T., Bioconjugate Techniques, Academic Press (2013)). Examples of functional groups include, but are not limited to, hydroxyl, amine, carboxylic acid, carboxylic acid halide, carboxylic acid active ester, aldehyde, carbonyl, chlorocarbonyl, imidazolylcarbonyl, hydrozide, semicarbazide, thio semicarbazide, thiol, maleimide, haloalkyl, sufonyl, ally, propargyl, diene, alkyne, and azide. Once this sequence is functionalized, a covalent chemical bond or linkage can be formed between this sequence and the conserved nucleotide sequence. Examples of chemical bonds include, but are not limited to, those based on carbamates, ethers, esters, amides, imines, amidines, aminotrizines, hydrozone, disulfides, thioethers, thioesters, phosphorothioates, phosphorodithioates, sulfonamides, sulfonates, fulfones, sulfoxides, ureas, thioureas, hydrazide, oxime, triazole, photolabile linkages, C—C bond forming groups such as Diels-Alder cyclo-addition pairs or ring-closing metathesis pairs, and Michael reaction pairs.

[0199] In one embodiment, these stem-loop forming sequences can be chemically synthesized. In one embodiment, the chemical synthesis uses automated, solid-phase oligonucleotide synthesis machines with 2′-acetoxyethyl orthoester (2′-ACE) (Scaringe et al., J. Am. Chem. Soc. (1998) 120:11820-11821; Scaringe, Methods Enzymol. (2000) 317:3-18) or 2′-thionocarbamate (2′-TC) chemistry (Dellinger et al., J. Am. Chem. Soc. (2011) 133:11540-11546; Hendel et al., Nat. Biotechnol. (2015) 33:985-989).

[0200] The repeat:anti repeat duplex will be apparent from the secondary structure of the ωRNA. It may be typically a first complimentary stretch after (in 5′ to 3′ direction) the poly U tract and before the tetraloop; and a second complimentary stretch after (in 5′ to 3′ direction) the tetraloop and before the poly A tract. The first complimentary stretch (the “repeat”) is complimentary to the second complimentary stretch (the “anti-repeat”). As such, they Watson-Crick base pair to form a duplex of dsRNA when folded back on one another. As such, the anti-repeat sequence is the complimentary sequence of the repeat and in terms to A-U or C-G base pairing, but also in terms of the fact that the anti-repeat is in the reverse orientation due to the tetraloop.

[0201] In an embodiment of the invention, modification of guide architecture comprises replacing bases in stemloop 2. For example, in one embodiment, “actt” (“acuu” in RNA) and “aagt” (“aagu” in RNA) bases in stemloop2 are replaced with “cgcc” and “gcgg”. In one embodiment, “actt” and “aagt” bases in stemloop2 are replaced with complimentary GC-rich regions of 4 nucleotides. In one embodiment, the complimentary GC-rich regions of 4 nucleotides are “cgcc” and “gcgg” (both in 5′ to 3′ direction). In one embodiment, the complimentary GC-rich regions of 4 nucleotides are “gcgg” and “cgcc” (both in 5′ to 3′ direction). Other combination of C and G in the complimentary GC-rich regions of 4 nucleotides will be apparent including CCCC and GGGG.

[0202] In one aspect, the stemloop 2, e.g., “ACTTgtttAAGT” (SEQ ID NO: 1) can be replaced by any “XXXXgtttYYYY”, e.g., where XXXX and YYYY represent any complementary sets of nucleotides that together will base pair to each other to create a stem.

[0203] As used herein, the term “spacer” may also be referred to as a “guide sequence.” In one embodiment, the degree of complementarity of the guide sequence to a given target sequence, when optimally aligned using a suitable alignment algorithm, is about or more than 50%, 60%, 75%, 80%, 85%, 90%, 95%, 97.5%, 99%, or more. In certain example embodiments, the ωRNA molecule comprises a guide sequence that may be designed to have at least one mismatch with the target sequence, such that a RNA duplex is formed between the sequence and the target sequence. Accordingly, the degree of complementarity is less than 99%. For instance, where the guide sequence consists of 24 nucleotides, the degree of complementarity is more particularly about 96% or less. In one embodiment, the guide sequence is designed to have a stretch of two or more adjacent mismatching nucleotides, such that the degree of complementarity over the entire sequence is further reduced. For instance, where the guide sequence consists of 24 nucleotides, the degree of complementarity is more particularly about 96% or less, more particularly, about 92% or less, more particularly about 88% or less, more particularly about 84% or less, more particularly about 80% or less, more particularly about 76% or less, more particularly about 72% or less, depending on whether the stretch of two or more mismatching nucleotides encompasses 2, 3, 4, 5, 6 or 7 nucleotides, etc. In one embodiment, aside from the stretch of one or more mismatching nucleotides, the degree of complementarity, when optimally aligned using a suitable alignment algorithm, is about or more than about 50%, 60%, 75%, 80%, 85%, 90%, 95%, 97.5%, 99%, or more. Optimal alignment may be determined with the use of any suitable algorithm for aligning sequences, non-limiting example of which include the Smith-Waterman algorithm, the Needleman-Wunsch algorithm, algorithms based on the Burrows-Wheeler Transform (e.g., the Burrows Wheeler Aligner), ClustalW, Clustal X, BLAT, Novoalign (Novocraft Technologies; available at novocraft.com), ELAND (Illumina, San Diego, CA), SOAP (available at soap.genomics.org.cn), and Maq (available at maq.sourceforge.net). The ability of a sequence (within a nucleic acid-targeting guide sequence) to direct sequence-specific binding of a nucleic acid-targeting complex to a target nucleic acid sequence may be assessed by any suitable assay. For example, the components of a ωRNA system sufficient to form a nucleic acid-targeting complex, including the guide sequence to be tested, may be provided to a host cell having the corresponding target nucleic acid sequence, such as by transfection with vectors encoding the components of the nucleic acid-targeting complex, followed by an assessment of preferential targeting (e.g., cleavage) within the target nucleic acid sequence, such as by Surveyor assay as described herein. Similarly, cleavage of a target nucleic acid sequence (or a sequence in the vicinity thereof) may be evaluated in a test tube by providing the target nucleic acid sequence, components of a nucleic acid-targeting complex, including the sequence to be tested and a control sequence different from the test guide sequence, and comparing binding or rate of cleavage at or in the vicinity of the target sequence between the test and control guide sequence reactions. Other assays are possible, and will occur to those skilled in the art. A guide sequence, and hence a nucleic acid-targeting ωRNA may be selected to target any target nucleic acid sequence.

[0204] A ωRNA sequence, and hence a nucleic acid-targeting guide, may be selected to target any target nucleic acid sequence. The target sequence may be DNA. The target sequence may be any RNA sequence. In one embodiment, the target sequence may be a sequence within a RNA molecule selected from the group consisting of messenger RNA (mRNA), pre-mRNA, ribosomal RNA (rRNA), transfer RNA (tRNA), micro-RNA (miRNA), small interfering RNA (siRNA), small nuclear RNA (snRNA), small nucleolar RNA (snoRNA), double stranded RNA (dsRNA), non-coding RNA (ncRNA), long non-coding RNA (lncRNA), and small cytoplasmatic RNA (scRNA). In some preferred embodiments, the target sequence may be a sequence within a RNA molecule selected from the group consisting of mRNA, pre-mRNA, and rRNA. In some preferred embodiments, the target sequence may be a sequence within a RNA molecule selected from the group consisting of ncRNA, and lncRNA. In some more preferred embodiments, the target sequence may be a sequence within an mRNA molecule or a pre-mRNA molecule.

[0205] In one embodiment, the ωRNA molecule forms a stem-loop with a separate non-covalently linked sequence, which can be DNA or RNA. In one embodiment, the sequences forming the ωRNA are first synthesized using the standard phosphoramidite synthetic protocol (Herdewijn, P., ed., Methods in Molecular Biology Col 288, Oligonucleotide Synthesis: Methods and Applications, Humana Press, New Jersey (2012)). In one embodiment, these sequences can be functionalized to contain an appropriate functional group for ligation using the standard protocol known in the art (Hermanson, G. T., Bioconjugate Techniques, Academic Press (2013)). Examples of functional groups include, but are not limited to, hydroxyl, amine, carboxylic acid, carboxylic acid halide, carboxylic acid active ester, aldehyde, carbonyl, chlorocarbonyl, imidazolylcarbonyl, hydrozide, semicarbazide, thio semicarbazide, thiol, maleimide, haloalkyl, sufonyl, ally, propargyl, diene, alkyne, and azide. Once this sequence is functionalized, a covalent chemical bond or linkage can be formed between this sequence and the conserved nucleotide sequence. Examples of chemical bonds include, but are not limited to, those based on carbamates, ethers, esters, amides, imines, amidines, aminotrizines, hydrozone, disulfides, thioethers, thioesters, phosphorothioates, phosphorodithioates, sulfonamides, sulfonates, fulfones, sulfoxides, ureas, thioureas, hydrazide, oxime, triazole, photolabile linkages, C—C bond forming groups such as Diels-Alder cyclo-addition pairs or ring-closing metathesis pairs, and Michael reaction pairs.

[0206] In one embodiment, these stem-loop forming sequences can be chemically synthesized. In one embodiment, the chemical synthesis uses automated, solid-phase oligonucleotide synthesis machines with 2′-acetoxyethyl orthoester (2′-ACE) (Scaringe et al., J. Am. Chem. Soc. (1998) 120:11820-11821; Scaringe, Methods Enzymol. (2000) 317:3-18) or 2′-thionocarbamate (2′-TC) chemistry (Dellinger et al., J. Am. Chem. Soc. (2011) 133:11540-11546; Hendel et al., Nat. Biotechnol. (2015) 33:985-989).

### Chemical Modifications

[0207] In an embodiment, the ωRNA molecule comprises non-naturally occurring nucleic acids and/or non-naturally occurring nucleotides and/or nucleotide analogs, and/or chemically modifications. Preferably, these non-naturally occurring nucleic acids and non-naturally occurring nucleotides are located outside the ωRNA sequence. Non-naturally occurring nucleic acids can include, for example, mixtures of naturally and non-naturally occurring nucleotides. Non-naturally occurring nucleotides and/or nucleotide analogs may be modified at the ribose, phosphate, and/or base moiety. In an embodiment of the invention, a ωRNA nucleic acid comprises ribonucleotides and non-ribonucleotides. In one such embodiment, a ωRNA comprises one or more ribonucleotides and one or more deoxyribonucleotides. In an embodiment of the invention, the ωRNA comprises one or more non-naturally occurring nucleotide or nucleotide analog such as a nucleotide with phosphorothioate linkage, locked nucleic acid (LNA) nucleotides comprising a methylene bridge between the 2′ and 4′ carbons of the ribose ring, or bridged nucleic acids (BNA). Other examples of modified nucleotides include 2′-O-methyl analogs, 2′-deoxy analogs, or 2′-fluoro analogs. Further examples of modified bases include, but are not limited to, 2-aminopurine, 5-bromo-uridine, pseudouridine, inosine, 7-methylguanosine. Examples of ωRNA chemical modifications include, without limitation, incorporation of 2′-O-methyl(M), 2′-O-methyl 3′phosphorothioate (MS), S-constrained ethyl(cEt), or 2′-O-methyl 3′thioPACE (MSP) at one or more terminal nucleotides. Such chemically modified ωRNA can comprise increased stability and increased activity as compared to unmodified ωRNA, though on-target vs. off-target specificity is not predictable. (See, Hendel, 2015, Nat Biotechnol. 33(9): 985-9, doi: 10.1038/nbt.3290, published online 29 Jun. 2015 Ragdarm et al., 0215, PNAS, E7110-E7111; Allerson et al., J. Med. Chem. 2005, 48:901-904; Bramsen et al., Front. Genet., 2012, 3:154; Deng et al., PNAS, 2015, 112:11870-11875; Sharma et al., MedChemComm., 2014, 5:1454-1471; Hendel et al., Nat. Biotechnol. (2015) 33(9): 985-989; Li et al., Nature Biomedical Engineering, 2017, 1, 0066 DOI: 10.1038/s41551-017-0066). In one embodiment, the 5′ and/or 3′ end of a ωRNA is modified by a variety of functional moieties including fluorescent dyes, polyethylene glycol, cholesterol, proteins, or detection tags. (See Kelly et al., 2016, J. Biotech. 233:74-83). In an embodiment, a ωRNA comprises ribonucleotides in a region that binds to a target sequence and one or more deoxyribonucletides and/or nucleotide analogs in a region that binds to the IscB polypeptide nuclease. In an embodiment, deoxyribonucleotides and/or nucleotide analogs are incorporated in engineered hRNA structures. In one embodiment, 3-5 nucleotides at either the 3′ or the 5′ end of a hRNA is chemically modified. In one embodiment, only minor modifications are introduced in the seed region, such as 2′-F modifications. In one embodiment, 2′-F modification is introduced at the 3′ end of a hRNA. In an embodiment, three to five nucleotides at the 5′ and/or the 3′ end of the hRNA are chemically modified with 2′-O-methyl(M), 2′-O-methyl 3′ phosphorothioate (MS), S-constrained ethyl(cEt), or 2′-O-methyl 3′ thioPACE (MSP). Such modification can enhance genome editing efficiency (see Hendel et al., Nat. Biotechnol. (2015) 33(9): 985-989). In an embodiment, all of the phosphodiester bonds of a hRNA are substituted with phosphorothioates (PS) for enhancing levels of gene disruption. In an embodiment, more than five nucleotides at the 5′ and/or the 3′ end of the hRNA are chemically modified with 2′-O-Me, 2′-F or S-constrained ethyl(cEt). Such chemically modified hRNA can mediate enhanced levels of gene disruption (see Ragdarm et al., 0215, PNAS, E7110-E7111). In an embodiment of the invention, a hRNA is modified to comprise a chemical moiety at its 3′ and/or 5′ end. Such moieties include, but are not limited to amine, azide, alkyne, thio, dibenzocyclooctyne (DBCO), or Rhodamine. In certain embodiment, the chemical moiety is conjugated to the hRNA by a linker, such as an alkyl chain. In an embodiment, the chemical moiety of the modified hRNA can be used to attach the hRNA to another molecule, such as DNA, RNA, protein, or nanoparticles. Such chemically modified hRNA can be used to identify or enrich cells generically edited by an IscB polypeptide nuclease and related systems (see Lee et al., eLife, 2017, 6: e25312, DOI: 10.7554).

[0208] In a particular embodiment, the conserved nucleotide sequence may be modified to comprise one or more protein-binding RNA aptamers. In a particular embodiment, one or more aptamers may be included such as part of optimized secondary structure. Such aptamers may be capable of binding a bacteriophage coat protein as detailed further herein.

[0209] In embodiments, the IscB polypeptide utilizes the hRNA scaffold comprising a polynucleotide sequence that facilitates the interaction with the IscB protein, allowing for sequence specific binding and/or targeting of the guide sequence with the target polynucleotide. Chemical synthesis of the hRNA scaffold is contemplated, using covalent linkage using various bioconjugation reactions, loops, bridges, and non-nucleotide links via modifications of sugar, internucleotide phosphodiester bonds, purine and pyrimidine residues. Sletten et al., Angew. Chem. Int. Ed. (2009)48:6974-6998; Manoharan, M. Curr. Opin. Chem. Biol. (2004)8:570-9; Behlke et al., Oligonucleotides (2008)18:305-19; Watts, et al., Drug. Discov. Today (2008)13:842-55; Shukla, et al., ChemMedChem (2010)5:328-49; chemical synthesis using automated, solid-phase oligonucleotide synthesis machines with 2′-acetoxyethyl orthoester (2′-ACE) (Scaringe et al., J. Am. Chem. Soc. (1998)120:11820-11821; Scaringe, Methods Enzymol. (2000)317:3-18) or 2′-thionocarbamate (2′-TC) chemistry (Dellinger et al., J. Am. Chem. Soc. (2011)133:11540-11546; Hendel et al., Nat. Biotechnol. (2015)33:985-989).

[0210] In certain example embodiments, the scaffold and spacer may be designed as two separate molecules that can hybridize or covalently joined into a single molecule. Covalent linkage can be via a linker (e.g., a non-nucleotide loop) that comprises a moiety such as spacers, attachments, bioconjugates, chromophores, reporter groups, dye labeled RNAs, and non-naturally occurring nucleotide analogues. More specifically, suitable spacers for purposes of this invention include, but are not limited to, polyethers (e.g., polyethylene glycols, polyalcohols, polypropylene glycol or mixtures of ethylene and propylene glycols), polyamines group (e.g., spennine, spermidine and polymeric derivatives thereof), polyesters (e.g., poly(ethyl acrylate)), polyphosphodiesters, alkylenes, and combinations thereof. Suitable attachments include any moiety that can be added to the linker to add additional properties to the linker, such as but not limited to, fluorescent labels. Suitable bioconjugates include, but are not limited to, peptides, glycosides, lipids, cholesterol, phospholipids, diacyl glycerols and dialkyl glycerols, fatty acids, hydrocarbons, enzyme substrates, steroids, biotin, digoxigenin, carbohydrates, polysaccharides. Suitable chromophores, reporter groups, and dye-labeled RNAs include, but are not limited to, fluorescent dyes such as fluorescein and rhodamine, chemiluminescent, electrochemiluminescent, and bioluminescent marker compounds. The design of example linkers conjugating two RNA components are also described in WO 2004/015075.

[0211] The linker (e.g., a non-nucleotide loop) can be of any length. In one embodiment, the linker has a length equivalent to about 0-16 nucleotides. In one embodiment, the linker has a length equivalent to about 0-8 nucleotides. In one embodiment, the linker has a length equivalent to about 0-4 nucleotides. In one embodiment, the linker has a length equivalent to about 2 nucleotides. Example linker design is also described in International Patent Publication No. WO 2011/008730.

### Escorted ωRNA Molecules

[0212] In one embodiment, the compositions or complexes have a hRNA molecule with a functional structure designed to improve hRNA molecule structure, architecture, stability, genetic expression, or any combination thereof. Such a structure can include an aptamer.

[0213] Aptamers are biomolecules that can be designed or selected to bind tightly to other ligands, for example using a technique called systematic evolution of ligands by exponential enrichment (SELEX; Tuerk C, Gold L: “Systematic evolution of ligands by exponential enrichment: RNA ligands to bacteriophage T4 DNA polymerase.” Science 1990, 249:505-510). Nucleic acid aptamers can for example be selected from pools of random-sequence oligonucleotides, with high binding affinities and specificities for a wide range of biomedically relevant targets, suggesting a wide range of therapeutic utilities for aptamers (Keefe, Anthony D., Supriya Pai, and Andrew Ellington. “Aptamers as therapeutics.” Nature Reviews Drug Discovery 9.7(2010): 537-550). These characteristics also suggest a wide range of uses for aptamers as drug delivery vehicles (Levy-Nissenbaum, Etgar, et al. “Nanotechnology and aptamers: applications in drug delivery.” Trends in biotechnology 26.8(2008): 442-449; and Hicke B J, Stephens A W. “Escort aptamers: a delivery service for diagnosis and therapy.” J Clin Invest 2000, 106:923-928.). Aptamers may also be constructed that function as molecular switches, responding to a que by changing properties, such as RNA aptamers that bind fluorophores to mimic the activity of green fluorescent protein (Paige, Jeremy S., Karen Y. Wu, and Samie R. Jaffrey. “RNA mimics of green fluorescent protein.” Science 333.6042 (2011): 642-646). It has also been suggested that aptamers may be used as components of targeted siRNA therapeutic delivery systems, for example targeting cell surface proteins (Zhou, Jiehua, and John J. Rossi. “Aptamer-targeted cell-specific RNA interference.” Silence 1.1 (2010): 4).

[0214] Accordingly, in one embodiment, the hRNA molecule is modified, e.g., by one or more aptamer(s) designed to improve hRNA molecule delivery, including delivery across the cellular membrane, to intracellular compartments, or into the nucleus. Such a structure can include, either in addition to the one or more aptamer(s) or without such one or more aptamer(s), moiety(ies) so as to render the hRNA molecule deliverable, inducible or responsive to a selected effector. The invention accordingly comprehends a hRNA molecule that responds to normal or pathological physiological conditions, including without limitation pH, hypoxia, O2 concentration, temperature, protein concentration, enzymatic concentration, lipid structure, light exposure, mechanical disruption (e.g., ultrasound waves), magnetic fields, electric fields, or electromagnetic radiation.

[0215] Light responsiveness of an inducible system may be achieved via the activation and binding of cryptochrome-2 and CIB1. Blue light stimulation induces an activating conformational change in cryptochrome-2, resulting in recruitment of its binding partner CIB1. This binding is fast and reversible, achieving saturation in <15 sec following pulsed stimulation and returning to baseline <15 min after the end of stimulation. These rapid binding kinetics result in a system temporally bound only by the speed of transcription/translation and transcript/protein degradation, rather than uptake and clearance of inducing agents. Crytochrome-2 activation is also highly sensitive, allowing for the use of low light intensity stimulation and mitigating the risks of phototoxicity. Further, in a context such as the intact mammalian brain, variable light intensity may be used to control the size of a stimulated region, allowing for greater precision than vector delivery alone may offer.

[0216] Energy sources such as electromagnetic radiation, sound energy or thermal energy may induce the guide. Advantageously, the electromagnetic radiation is a component of visible light. In a preferred embodiment, the light is a blue light with a wavelength of about 450 to about 495 nm. In an especially preferred embodiment, the wavelength is about 488 nm. In another preferred embodiment, the light stimulation is via pulses. The light power may range from about 0-9 mW/cm2. In a preferred embodiment, a stimulation paradigm of as low as 0.25 sec every 15 sec should result in maximal activation.

[0217] The chemical or energy sensitive hRNA may undergo a conformational change upon induction by the binding of a chemical source or by the energy allowing it act as a hRNA and have the IscB polypeptide nuclease system or complex function. The invention can involve applying the chemical source or energy so as to have the hRNA function and the IscB polypeptide nuclease system or complex function; and optionally further determining that the expression of the genomic locus is altered.

[0218] There are several different designs of this chemical inducible system: 1. ABI-PYL based system inducible by Abscisic Acid (ABA) (see, e.g., stke.sciencemag.org/cgi/content/abstract/sigtrans;4/164/rs2), 2. FKBP-FRB based system inducible by rapamycin (or related chemicals based on rapamycin) (see, e.g., www.nature.com/nmeth/journal/v2/n6/full/nmeth763.html), 3. GID1-GAI based system inducible by Gibberellin (GA) (see, e.g., www.nature.com/nchembio/journal/v8/n5/full/nchembio.922.html).

[0219] A chemical inducible system can be an estrogen receptor (ER) based system inducible by 4-hydroxytamoxifen (40HT) (see, e.g., www.pnas.org/content/1Apr. 3, 1027.abstract). A mutated ligand-binding domain of the estrogen receptor called ERT2 translocates into the nucleus of cells upon binding of 4-hydroxytamoxifen. In further embodiments of the invention, any naturally occurring or engineered derivative of any nuclear receptor, thyroid hormone receptor, retinoic acid receptor, estrogen receptor, estrogen-related receptor, glucocorticoid receptor, progesterone receptor, androgen receptor may be used in inducible systems analogous to the ER based inducible system.

[0220] Another inducible system is based on the design using Transient receptor potential (TRP) ion channel-based system inducible by energy, heat or radio-wave (see, e.g., www.sciencemag.org/content/336/6081/604). These TRP family proteins respond to different stimuli, including light and heat. When this protein is activated by light or heat, the ion channel will open and allow the entering of ions such as calcium into the plasma membrane. This influx of ions will bind to intracellular ion interacting partners linked to a polypeptide including the hRNA and the other components of the IscB polypeptide nuclease/hRNA molecule complex or system, and the binding will induce the change of sub-cellular localization of the polypeptide, leading to the entire polypeptide entering the nucleus of cells. Once inside the nucleus, the hRNA protein and the other components of the IscB polypeptide nuclease/hRNA molecule complex will be active and modulating target gene expression in cells.

[0221] While light activation may be an advantageous embodiment, sometimes it may be disadvantageous especially for in vivo applications in which the light may not penetrate the skin or other organs. In this instance, other methods of energy activation are contemplated, in particular, electric field energy and/or ultrasound which have a similar effect.

[0222] Electric field energy is preferably administered substantially as described in the art, using one or more electric pulses of from about 1 Volt/cm to about 10 k Volts/cm under in vivo conditions. Instead of or in addition to the pulses, the electric field may be delivered in a continuous manner. The electric pulse may be applied for between 1 μs and 500 milliseconds, preferably between 1 μs and 100 milliseconds. The electric field may be applied continuously or in a pulsed manner for 5 about minutes.

[0223] As used herein, ‘electric field energy’ is the electrical energy to which a cell is exposed. Preferably the electric field has a strength of from about 1 Volt/cm to about 10 k Volts/cm or more under in vivo conditions (see WO97/49450).

[0224] As used herein, the term “electric field” includes one or more pulses at variable capacitance and voltage and including exponential and/or square wave and/or modulated wave and/or modulated square wave forms. References to electric fields and electricity should be taken to include reference the presence of an electric potential difference in the environment of a cell. Such an environment may be set up by way of static electricity, alternating current (AC), direct current (DC), etc., as known in the art. The electric field may be uniform, non-uniform or otherwise, and may vary in strength and/or direction in a time dependent manner.

[0225] Single or multiple applications of electric field, as well as single or multiple applications of ultrasound are also possible, in any order and in any combination. The ultrasound and/or the electric field may be delivered as single or multiple continuous applications, or as pulses (pulsatile delivery).

[0226] Electroporation has been used in both in vitro and in vivo procedures to introduce foreign material into living cells. With in vitro applications, a sample of live cells is first mixed with the agent of interest and placed between electrodes such as parallel plates. Then, the electrodes apply an electrical field to the cell/implant mixture. Examples of systems that perform in vitro electroporation include the Electro Cell Manipulator ECM600 product, and the Electro Square Porator T820, both made by the BTX Division of Genetronics, Inc (see U.S. Pat. No. 5,869,326).

[0227] The known electroporation techniques (both in vitro and in vivo) function by applying a brief high voltage pulse to electrodes positioned around the treatment region. The electric field generated between the electrodes causes the cell membranes to temporarily become porous, whereupon molecules of the agent of interest enter the cells. In known electroporation applications, this electric field comprises a single square wave pulse on the order of 1000 V/cm, of about 100 mus duration. Such a pulse may be generated, for example, in known applications of the Electro Square Porator T820.

[0228] Preferably, the electric field has a strength of from about 1 V/cm to about 10 kV/cm under in vitro conditions. Thus, the electric field may have a strength of 1 V/cm, 2 V/cm, 3 V/cm, 4 V/cm, 5 V/cm, 6 V/cm, 7 V/cm, 8 V/cm, 9 V/cm, 10 V/cm, 20 V/cm, 50 V/cm, 100 V/cm, 200 V/cm, 300 V/cm, 400 V/cm, 500 V/cm, 600 V/cm, 700 V/cm, 800 V/cm, 900 V/cm, 1 kV/cm, 2 kV/cm, 5 kV/cm, 10 kV/cm, 20 kV/cm, 50 kV/cm or more. More preferably from about 0.5 kV/cm to about 4.0 kV/cm under in vitro conditions. Preferably the electric field has a strength of from about 1 V/cm to about 10 kV/cm under in vivo conditions. However, the electric field strengths may be lowered where the number of pulses delivered to the target site are increased. Thus, pulsatile delivery of electric fields at lower field strengths is envisaged.

[0229] Preferably, the application of the electric field is in the form of multiple pulses such as double pulses of the same strength and capacitance or sequential pulses of varying strength and/or capacitance. As used herein, the term “pulse” includes one or more electric pulses at variable capacitance and voltage and including exponential and/or square wave and/or modulated wave/square wave forms.

[0230] Preferably, the electric pulse is delivered as a waveform selected from an exponential wave form, a square wave form, a modulated wave form and a modulated square wave form.

[0231] A preferred embodiment employs direct current at low voltage. Thus, Applicants disclose the use of an electric field which is applied to the cell, tissue, or tissue mass at a field strength of between 1V/cm and 20V/cm, for a period of 100 milliseconds or more, preferably 15 minutes or more.

[0232] Ultrasound is advantageously administered at a power level of from about 0.05 W/cm2 to about 100 W/cm2. Diagnostic or therapeutic ultrasound may be used, or combinations thereof.

[0233] As used herein, the term “ultrasound” refers to a form of energy which consists of mechanical vibrations the frequencies of which are so high they are above the range of human hearing. Lower frequency limit of the ultrasonic spectrum may generally be taken as about 20 kHz. Most diagnostic applications of ultrasound employ frequencies in the range 1 and 15 MHz′ (From Ultrasonics in Clinical Diagnosis, P. N. T. Wells, ed., 2nd. Edition, Publ. Churchill Livingstone [Edinburgh, London & NY, 1977]).

[0234] Ultrasound has been used in both diagnostic and therapeutic applications. When used as a diagnostic tool (“diagnostic ultrasound”), ultrasound is typically used in an energy density range of up to about 100 mW/cm2 (FDA recommendation), although energy densities of up to 750 mW/cm2 have been used. In physiotherapy, ultrasound is typically used as an energy source in a range up to about 3 to 4 W/cm2 (WHO recommendation). In other therapeutic applications, higher intensities of ultrasound may be employed, for example, HIFU at 100 W/cm up to 1 kW/cm2 (or even higher) for short periods of time. The term “ultrasound” as used in this specification is intended to encompass diagnostic, therapeutic, and focused ultrasound.

[0235] Focused ultrasound (FUS) allows thermal energy to be delivered without an invasive probe (see Morocz et al 1998 Journal of Magnetic Resonance Imaging Vol. 8, No. 1, pp. 136-142. Another form of focused ultrasound is high intensity focused ultrasound (HIFU) which is reviewed by Moussatov et al in Ultrasonics (1998) Vol. 36, No. 8, pp. 893-900 and TranHuuHue et al in Acustica (1997) Vol. 83, No. 6, pp. 1103-1106.

[0236] Preferably, a combination of diagnostic ultrasound and a therapeutic ultrasound is employed. This combination is not intended to be limiting, however, and the skilled reader will appreciate that any variety of combinations of ultrasound may be used. Additionally, the energy density, frequency of ultrasound, and period of exposure may be varied.

[0237] Preferably, the exposure to an ultrasound energy source is at a power density of from about 0.05 to about 100 Wcm-2. Even more preferably, the exposure to an ultrasound energy source is at a power density of from about 1 to about 15 Wcm-2.

[0238] Preferably, the exposure to an ultrasound energy source is at a frequency of from about 0.015 to about 10.0 MHz. More preferably the exposure to an ultrasound energy source is at a frequency of from about 0.02 to about 5.0 MHz or about 6.0 MHz. Most preferably, the ultrasound is applied at a frequency of 3 MHz.

[0239] Preferably the exposure is for periods of from about 10 milliseconds to about 60 minutes. Preferably the exposure is for periods of from about 1 second to about 5 minutes. More preferably, the ultrasound is applied for about 2 minutes. Depending on the particular target cell to be disrupted, however, the exposure may be for a longer duration, for example, for 15 minutes.

[0240] Advantageously, the target tissue is exposed to an ultrasound energy source at an acoustic power density of from about 0.05 Wcm-2 to about 10 Wcm-2 with a frequency ranging from about 0.015 to about 10 MHz (see WO 98/52609). However, alternatives are also possible, for example, exposure to an ultrasound energy source at an acoustic power density of above 100 Wcm-2, but for reduced periods of time, for example, 1000 Wcm-2 for periods in the millisecond range or less.

[0241] Preferably, the application of the ultrasound is in the form of multiple pulses; thus, both continuous wave and pulsed wave (pulsatile delivery of ultrasound) may be employed in any combination. For example, continuous wave ultrasound may be applied, followed by pulsed wave ultrasound, or vice versa. This may be repeated any number of times, in any order and combination. The pulsed wave ultrasound may be applied against a background of continuous wave ultrasound, and any number of pulses may be used in any number of groups.

[0242] Preferably, the ultrasound may comprise pulsed wave ultrasound. In a highly preferred embodiment, the ultrasound is applied at a power density of 0.7 Wcm-2 or 1.25 Wcm-2 as a continuous wave. Higher power densities may be employed if pulsed wave ultrasound is used.

[0243] Use of ultrasound is advantageous as, like light, it may be focused accurately on a target. Moreover, ultrasound is advantageous as it may be focused more deeply into tissues unlike light. It is therefore better suited to whole-tissue penetration (such as but not limited to a lobe of the liver) or whole organ (such as but not limited to the entire liver or an entire muscle, such as the heart) therapy. Another important advantage is that ultrasound is a non-invasive stimulus which is used in a wide variety of diagnostic and therapeutic applications. By way of example, ultrasound is well known in medical imaging techniques and, additionally, in orthopedic therapy. Furthermore, instruments suitable for the application of ultrasound to a subject vertebrate are widely available and their use is well known in the art.

[0244] In one embodiment, the hRNA molecule is modified by a secondary structure to increase the specificity of the IscB polypeptide nuclease and related system and the secondary structure can protect against exonuclease activity and allow for 5′ additions to the hRNA sequence also referred to herein as a protected hRNA molecule.

[0245] In one aspect, the invention provides for hybridizing a “protector RNA” to a sequence of the hRNA molecule, wherein the “protector RNA” is an RNA strand complementary to the 3′ end of the hRNA molecule to thereby generate a partially double-stranded hRNA. In an embodiment of the invention, protecting mismatched bases (i.e., the bases of the hRNA molecule which do not form part of the hRNA sequence) with a perfectly complementary protector sequence decreases the likelihood of target DNA binding to the mismatched basepairs at the 3′ end. In one embodiment of the invention, additional sequences comprising an extended length may also be present within the hRNA molecule such that the hRNA comprises a protector sequence within the hRNA molecule. This “protector sequence” ensures that the hRNA molecule comprises a “protected sequence” in addition to an “exposed sequence” (comprising the part of the hRNA sequence hybridizing to the target sequence). In one embodiment, the hRNA molecule is modified by the presence of the protector hRNA to comprise a secondary structure such as a hairpin. Advantageously there are three or four to thirty or more, e.g., about 10 or more, contiguous base pairs having complementarity to the protected sequence, the hRNA sequence or both. It is advantageous that the protected portion does not impede thermodynamics of the IscB polypeptide nuclease and related system interacting with its target. By providing such an extension including a partially double stranded hRNA molecule, the hRNA molecule is considered protected and results in improved specific binding of the IscB polypeptide nuclease/hRNA molecule complex, while maintaining specific activity.

[0246] In one embodiment, use is made of a truncated hRNA (tru-hRNA), i.e., a hRNA molecule which comprises a hRNA sequence which is truncated in length with respect to the canonical hRNA sequence length. As described by Nowak et al. (Nucleic Acids Res (2016)44 (20): 9555-9564), such guides may allow catalytically active IscB polypeptide nuclease to bind its target without cleaving the target DNA. In one embodiment, a truncated hRNA is used which allows the binding of the target but retains only nickase activity of the IscB polypeptide nuclease.

[0247] In one embodiment, conjugation of triantennary N-acetyl galactosamine (GalNAc) to oligonucleotide components may be used to improve delivery, for example delivery to select cell types, for example hepatocytes (see International Patent Publication No. WO 2014/118272 incorporated herein by reference; Nair, J K et al., 2014, Journal of the American Chemical Society 136(49), 16958-16961). This is considered to be a sugar-based particle and further details on other particle delivery systems and/or formulations are provided herein. GalNAc can therefore be considered to be a particle in the sense of the other particles described herein, such that general uses and other considerations, for instance delivery of said particles, apply to GalNAc particles as well. A solution-phase conjugation strategy may for example be used to attach triantennary GalNAc clusters (mol. wt. ˜2000) activated as PFP (pentafluorophenyl) esters onto 5′-hexylamino modified oligonucleotides (5′-HA ASOs, mol. wt. ˜8000 Da; Østergaard et al., Bioconjugate Chem., 2015, 26(8), pp 1451-1455). Similarly, poly(acrylate) polymers have been described for in vivo nucleic acid delivery (see WO2013158141 incorporated herein by reference). In further alternative embodiments, pre-mixing IscB polypeptide nuclease nanoparticles (or protein complexes) with naturally occurring serum proteins may be used in order to improve delivery (Akinc A et al, 2010, Molecular Therapy vol. 18 no. 7, 1357-1364).

[0248] Screening techniques are available to identify delivery enhancers, for example by screening chemical libraries (Gilleron J. et al., 2015, Nucl. Acids Res. 43(16): 7984-8001). Approaches have also been described for assessing the efficiency of delivery vehicles, such as lipid nanoparticles, which may be employed to identify effective delivery vehicles for components (see Sahay G. et al., 2013, Nature Biotechnology 31, 653-658).

### Target Adjacent Motifs

[0249] The IscB systems disclosed may recognize a target adjacent motif (TAM) in order to recognize and bind a target sequence on a target polynucleotide. In one embodiment, the nucleic acid-guided nucleases and related compositions do not contain a TAM requirement. The precise sequence and length requirements for the TAM will differ depending on the nucleic acid-guided nucleases used. In some examples, TAMs are typically 2-5 base pair sequences adjacent the protospacer (that is, the target sequence). In one example embodiment, the TAM is 3′ adjacent to the target polynucleotide. In another example embodiment, the TAM is 5′ adjacent to the target sequence of the target polynucleotide.

[0250] In one embodiment, the cleavage site is distant from the Target Adjacent Motif (TAM), e.g., the cleavage occurs after the nth nucleotide on the non-target strand and after the nucleotide on the targeted strand. In one embodiment, the cleavage site occurs after an identified nucleotide (counted from the TAM) on the non-target strand and after the further identified nucleotide (counted from the TAM) on the targeted strand. In one embodiment, a vector encodes a nucleic acid-targeting effector protein that may be mutated with respect to a corresponding wild-type enzyme such that the mutated nucleic acid-targeting effector protein lacks the ability to cleave one or both DNA and RNA strands of a target polynucleotide containing a target sequence.

[0251] TAM identification and specificity may be identified, for example, using the methods disclosed in the Examples section below.

### HDR Donor Templates

[0252] In one embodiment, the compositions and systems herein may further comprise one or more nucleic acid templates. In some cases, the nucleic acid template may comprise one or more polynucleotides. In certain cases, the nucleic acid template may comprise coding sequences for one or more polynucleotides. The nucleic acid template may be a DNA template.

[0253] The donor polynucleotide may be used for editing the target polynucleotide. In some cases, the donor polynucleotide comprises one or more mutations to be introduced into the target polynucleotide. Examples of such mutations include substitutions, deletions, insertions, or a combination thereof. The mutations may cause a shift in an open reading frame on the target polynucleotide. In some cases, the donor polynucleotide alters a stop codon in the target polynucleotide. For example, the donor polynucleotide may correct a premature stop codon. The correction may be achieved by deleting the stop codon or introduces one or more mutations to the stop codon. In other example embodiments, the donor polynucleotide addresses loss of function mutations, deletions, or translocations that may occur, for example, in certain disease contexts by inserting or restoring a functional copy of a gene, or functional fragment thereof, or a functional regulatory sequence or functional fragment of a regulatory sequence. A functional fragment refers to less than the entire copy of a gene by providing sufficient nucleotide sequence to restore the functionality of a wild type gene or non-coding regulatory sequence (e.g., sequences encoding long non-coding RNA). In certain example embodiments, the systems disclosed herein may be used to replace a single allele of a defective gene or defective fragment thereof. In another example embodiment, the systems disclosed herein may be used to replace both alleles of a defective gene or defective gene fragment. A “defective gene” or “defective gene fragment” is a gene or portion of a gene that when expressed fails to generate a functioning protein or non-coding RNA with functionality of the corresponding wild-type gene. In certain example embodiments, these defective genes may be associated with one or more disease phenotypes. In certain example embodiments, the defective gene or gene fragment is not replaced but the systems described herein are used to insert donor polynucleotides that encode gene or gene fragments that compensate for or override defective gene expression such that cell phenotypes associated with defective gene expression are eliminated or changed to a different or desired cellular phenotype.

[0254] In an embodiment of the invention, the donor polynucleotide may include, but not be limited to, genes or gene fragments, encoding proteins or RNA transcripts to be expressed, regulatory elements, repair templates, and the like. According to the invention, the donor polynucleotides may comprise left end and right end sequence elements that function with transposition components that mediate insertion.

[0255] In certain cases, the donor polynucleotide manipulates a splicing site on the target polynucleotide. In some examples, the donor polynucleotide disrupts a splicing site. The disruption may be achieved by inserting the polynucleotide to a splicing site and/or introducing one or more mutations to the splicing site. In certain examples, the donor polynucleotide may restore a splicing site. For example, the polynucleotide may comprise a splicing site sequence.

[0256] The donor polynucleotide to be inserted may has a size from 10 base pair or nucleotides to 50 kb in length, e.g., from 50 to 40k, from 100 and 30 k, from 100 to 10000, from 100 to 300, from 200 to 400, from 300 to 500, from 400 to 600, from 500 to 700, from 600 to 800, from 700 to 900, from 800 to 1000, from 900 to from 1100, from 1000 to 1200, from 1100 to 1300, from 1200 to 1400, from 1300 to 1500, from 1400 to 1600, from 1500 to 1700, from 600 to 1800, from 1700 to 1900, from 1800 to 2000 base pairs (bp) or nucleotides in length.

### Crispr-Associated IscB Compositions

[0257] In addition to the ωRNA associated IscB's disclosed above, certain embodiments may also include a CRISPR-associated IscB. These CRISPR-associated IscB's are typically larger than their ωRNA associated IscBs and are located proximate to a CRISPR-array. In one embodiment, the CRISPR-array may comprise a direct repeat-spacer configuration similar to CRISPR-Cas systems. In another example embodiment, the CRISPR-array may comprise a hybrid array that includes elements of a standard CRISPR-array and a partial ωRNA. In another embodiment, the array may comprise multiple repeated ωRNAs.

### CRISPR-Associated IscB Polypeptides

[0258] In one example embodiment, an IscB may comprise a bridge helix domain that is split in two by REC-like insertions. The REC-like insertions can be inserted between the RuvC-I and RuvC-II domains. Such IscB polypeptides are referred to herein as large IscB polypeptides and or CRISPR-associated IscB polypeptides which contain a hybrid CRISPR omega RNA that consists of a CRISPR array preceding a partial ωRNA. Such large IscB polypeptides can generate insertions/deletions (indels) in the eukaryotic genome (See, e.g., FIGS. 31A, 39A, G, 40A-C and Table 11).

### CRISPR-Associated IscB Domains

[0259] In some examples, the nucleic-acid guided nuclease, e.g., CRISPR-associated IscB, comprises an N-terminal X domain, a RuvC domain (e.g., including a RuvC-I, RuvC-II, and RuvC-III subdomains), a Bridge Helix domain, and a C-terminal Y domain. In some examples, the nucleic-acid guided nuclease comprises an N-terminal X domain, a RuvC domain (e.g., including a RuvC-I, RuvC-II, and RuvC-III subdomains), a Bridge Helix domain, an HNH domain, and a C-terminal Y domain.

### X Domain

[0260] The Cas IscB nucleic-acid guided nuclease comprises an X domain, e.g., at its N-terminal. In an embodiment, the X domain include the X domains in Table 2. Examples of the X domains also include any polypeptides a structural similarity and/or sequence similarity to a X domain described in the art. In some examples, the X domain may have an amino acid sequence that share at least 50%, at least 55%, at least 60%, at least 5%, at least 70%, at least 75%, at least 80%, at least 85%, at least 90%, at least 95%, at least 99%, or 100% sequence identity with X domains in Table 2.

[0261] In some examples, the X domain may be no more than 10, no more than 20, no more than 30, no more than 40, no more than 50, no more than 60, no more than 70, no more than 80, no more than 90, or no more than 100 amino acids in length. For example, the X domain may be no more than 50 amino acids in length, such as comprising 2 3, 4, 5, 6, 7, 8, 9, 10, 11, 12, 13, 14, 15, 16, 17, 18, 19, 20, 21, 22, 23, 24, 25, 26, 27, 28, 29, 30, 31, 32, 33, 34, 35, 36, 37, 38, 39, 40, 41, 42, 43, 44, 45, 46, 47, 48, 49, or 50 amino acids in length.

### Y Domain

[0262] The Cas IscB nucleic-acid guided nuclease comprises an Y domain, e.g., at its C-terminal.

[0263] In an embodiment, the X domain include Y domains in Table 2. Examples of the Y domain also include any polypeptides a structural similarity and/or sequence similarity to a Y domain described in the art. In some examples, the Y domain may have an amino acid sequence that share at least 50%, at least 55%, at least 60%, at least 5%, at least 70%, at least 75%, at least 80%, at least 85%, at least 90%, at least 95%, at least 99%, or 100% sequence identity with Y domains in Table 2.

### RuvC Domain

[0264] In one embodiment, the nucleic acid-guided nuclease comprises at least one nuclease domain. In an embodiment, the nucleic acid-guided nuclease protein comprises at least two nuclease domains. In an embodiment, the one or more nuclease domains are only active upon presence of a cofactor. In an embodiment, the cofactor is Magnesium (Mg). In embodiments where more than one nuclease domain is present and the substrate is a double-strand polynucleotide, the nuclease domains each cleave a different strand of the double-strand polynucleotide. In an embodiment, the nuclease domain is a RuvC domain.

[0265] The nucleic-acid guided nuclease comprises a RuvC domain. The RuvC domain may comprise multiple subdomains, e.g., RuvC-I, RuvC-II and RuvC-III. The subdomains may be separated by interval sequences on the amino acid sequence of the protein.

[0266] In an embodiment, examples of the RuvC domain include those in Table 2. Examples of the RuvC domain also include any polypeptides with a structural similarity and/or sequence similarity to a RuvC domain described in the art. For example, the RuvC domain may share a structural similarity and/or sequence similarity to a RuvC of Cas9. In some examples, the RuvC domain may have an amino acid sequence that share at least 50%, at least 55%, at least 60%, at least 65%, at least 70%, at least 75%, at least 80%, at least 85%, at least 90%, at least 95%, at least 99%, or 100% sequence identity with RuvC domains in Table 2.

[0267] In some examples, the RuvC domain comprises RuvC-I polypeptide, RuvC-II polypeptide, and RuvC-III polypeptide. Examples of the RuvC-I domain also include any polypeptides with a structural similarity and/or sequence similarity to a RuvC-I domain described in the art. For example, the RuvC-I domain may share a structural similarity and/or sequence similarity to a RuvC-I of Cas9. In some examples, the RuvC domain may have an amino acid sequence that share at least 50%, at least 55%, at least 60%, at least 65%, at least 70%, at least 75%, at least 80%, at least 85%, at least 90%, at least 95%, at least 99%, or 100% sequence identity with RuvC-I domain in Table 3. The RuvC-II domain also include any polypeptides with a structural similarity and/or sequence similarity to a RuvC-II domain described in the art. For example, the RuvC-II domain may share a structural similarity and/or sequence similarity to a RuvC-II of Cas9. In some examples, the RuvC domain may have an amino acid sequence that share at least 50%, at least 55%, at least 60%, at least 65%, at least 70%, at least 75%, at least 80%, at least 85%, at least 90%, at least 95%, at least 99%, or 100% sequence identity with RuvC-II domains in Table 2. The RuvC-III domain also include any polypeptides with a structural similarity and/or sequence similarity to a RuvC-III domain described in the art. For example, the RuvC-III domains may share a structural similarity and/or sequence similarity to a RuvC-III of Cas9. In some examples, the RuvC domain may have an amino acid sequence that share at least 50%, at least 55%, at least 60%, at least 65%, at least 70%, at least 75%, at least 80%, at least 85%, at least 90%, at least 95%, at least 99%, or 100% sequence identity with RuvC-III domains in Table 2.

[0268] For example, and as described in the art (e.g., Crystal structure of Cas9 in complex with guide RNA and target DNA, Nishimasu et al. Cell, 2014) the RuvC domain of Cas9 consists of a six-stranded mixed β-sheet (β1, β2, β5, β11, β14 and β17) flanked by α-helices (α33, α34 and α39-α45) and two additional two-stranded antiparallel β-sheets (β3/β4 and β15/β16). It has been described that the RuvC domain of Cas9 shares structural similarity with the retroviral integrase superfamily members characterized by an RNase H fold, such as Escherichia coli RuvC (PDB code 1HJR, 14% identity, root-mean-square deviation (rmsd) of 3.6 Å for 126 equivalent Cα atoms) and Thermus thermophilus RuvC (PDB code 4LD0, 12% identity, rmsd of 3.4 Å for 131 equivalent Cα atoms). RuvC nucleases have four catalytic residues (e.g., Asp7, Glu70, His143 and Asp146 in T. thermophilus RuvC), and cleave Holliday junctions through a two-metal mechanism. Asp10 (Ala), Glu762, His983 and Asp986 of the Cas9 RuvC domain are located at positions similar to those of the catalytic residues of T. thermophilus RuvC. There are key structural discrepancies between the Cas9 RuvC domain and the RuvC nucleases, which explain their functional differences. Unlike the Cas9 RuvC domain, the RuvC nucleases form dimers and recognize Holliday junctions. In addition to the conserved RNase H fold, the Cas9 RuvC domain has other structural elements involved in interactions with the guide: target heteroduplex (an end-capping loop between α42 and α43) and the PI domain/stem loop 3 (β-hairpin formed by β3 and β4).

### HNH Domain

[0269] The nucleic-acid guided nuclease comprises a HNH domain. In an embodiment, at least one nuclease domain shares a substantial structural similarity or sequence similarity to a HNH domain described in the art.

[0270] In some examples, the nucleic acid-guided nuclease comprises a HNH domain and a RuvC domain. In the cases where the RuvC domain comprises RuvC-I, RuvC-II, and RuvC-III domain, the HNH domain may be located between the Ruv C II and RuvC III subdomains of the RuvC domain.

[0271] In an embodiment, examples of the HNH domain include those in Table 2. Examples of the HNH domain also include any polypeptides a structural similarity and/or sequence similarity to a HNH domain described in the art. For example, the HNH domain may share a structural similarity and/or sequence similarity to a HNH domain of Cas9. In some examples, the HNH domain may have an amino acid sequence that share at least 50%, at least 55%, at least 60%, at least 65%, at least 70%, at least 75%, at least 80%, at least 85%, at least 90%, at least 95%, at least 99%, or 100% sequence identity with HNH domains in Table 2.

[0272] For example, the HNH domain of Cas9 as described in the art (e.g., Crystal structure of Cas9 in complex with guide RNA and target DNA, Nishimasu et al. Cell, 2014) comprises a two-stranded antiparallel β-sheet (β12 and β13) flanked by four α-helices (α35-α38). It shares structural similarity with the HNH endonucleases characterized by a ββα-metal fold, such as phage T4 endonuclease VII (Endo VII) (PDB code 2QNC, 20% identity, rmsd of 2.7 Å for 61 equivalent Cα atoms) and Vibrio vulnificus nuclease (PDB code 1OUP, 8% identity, rmsd of 2.7 Å for 77 equivalent Cα atoms). HNH nucleases have three catalytic residues (e.g., Asp40, His41, and Asn62 in Endo VII), and cleave nucleic acid substrates through a single-metal mechanism. In the structure of the Endo VII N62D mutant in complex with a Holliday junction, a Mg2+ ion is coordinated by Asp40, Asp62, and the oxygen atoms of the scissile phosphate group of the substrate, while His41 acts as a general base to activate a water molecule for catalysis. Asp839, His840, and Asn863 of the Cas9 HNH domain correspond to Asp40, His41, and Asn62 of Endo VII, respectively, consistent with the observation that His840 is critical for the cleavage of the complementary DNA strand. The N863A mutant functions as a nickase, indicating that Asn863 participates in catalysis. The Cas9 HNH domain may cleave the complementary strand of the target DNA through a single-metal mechanism, as observed for other HNH superfamily nucleases. Although the Cas9 HNH domain shares a ββα-metal fold with other HNH endonucleases, their overall structures are distinct, consistent with the differences in their substrate specificities.

[0273] In an embodiment, the nucleic-acid guided nuclease comprises at least a HNH or RuvC nuclease domain. In an embodiment, the nucleic-acid guided nuclease comprises at least one reduced or minimal HNH or RuvC nuclease domain. In one embodiment, the nucleic-acid guided nuclease comprises two nuclease domains. In an embodiment, the two nuclease domains are a HNH and a RuvC domain. In an embodiment, the nucleic-acid guided nuclease comprises at least one nuclease domain substantially similar to a HNH or RuvC domain by sequence similarity. In an embodiment, the nucleic-acid guided nuclease comprises at least one nuclease domain substantially similar to a HNH or RuvC domain by structural similarity.

[0274] In one embodiment, the nucleic acid-guided nucleases are in part characterizable by the nature of the guide molecule that ensures formation of the nucleic acid-guided nuclease complex and binding to the target sequence. The guide molecule envisaged for use with a nucleic acid-guided nucleases capable of specifically hybridizing to a target sequence, directing binding of the complex formed by said nucleic acid-guided nucleases and guide sequence to said target sequence. In an embodiment, the target sequence is a coding sequence. In an embodiment, the target sequence is a noncoding sequence. By means of example, noncoding sequences include noncoding functional RNA, cis- and trans-regulatory elements, introns, pseudogenes, repeat sequences, transposons, viral elements, and telomeres. Examples of noncoding functional RNA include ribosomal RNA, transfer RNA, piwi-interacting RNA and microRNA. In an embodiment, the target sequence may be a regulatory DNA sequence. Non-limiting examples of regulatory DNA sequences are transcription factors, operators, enhancers, silencers, promoters, and insulators.

[0275] In one embodiment, where the nucleic acid-guided nucleases is a reduced version of a nucleic acid-guided nuclease, the guide molecule envisaged for use can be the guide RNA which is known to function with the corresponding full length nucleic acid-guided nucleases. Features of the guide molecules are detailed herein below.

[0276] In one embodiment, the compositions and systems are characterized by elements that promote the formation of a complex at the site of a target sequence (also referred to as a protospacer in the context of an endogenous system). In the context of formation of a complex, “target sequence” refers to a sequence to which a guide sequence is designed to target, e.g., have complementarity, where hybridization between a target sequence and a guide sequence promotes the formation of a complex. The section of the guide sequence through which complementarity to the target sequence is important for cleavage activity is referred to herein as the seed sequence. A target sequence may comprise any polynucleotide, such as DNA or RNA polynucleotides and is comprised within a target locus of interest. In one embodiment, a target sequence is located in the nucleus or cytoplasm of a cell.

### PAM Specificity

[0277] In one example embodiment, the CRISPR-associated IscBs lack or substantially lack a PAM interacting (PI) domain. In an embodiment, the CRISPR-associated IscBs may have a PI domain or a functional fragment of a PI domain. In an embodiment, the CRISPR-associated IscBs may achieve a target specificity by a non-protein domain. In an embodiment, the nucleic acid-guided nucleases may have helicase activity. In an embodiment, the nucleic acid-guided nucleases may have reduced helicase activity compared to Cas proteins known in the art. In an embodiment, the nucleic acid-guided nucleases may comprise additional components that contribute in mediating target recognition. In an embodiment, targeting specificity is obtained by a central hairpin structure in a guide molecule.

[0278] Examples of PAM sequences for the CRISPR-associated IscBs herein include NGG and NAC. For example, the nucleic acid-guided nucleases may recognize PAM sequence NAC.

[0279] The PAM interaction domain or PI domain as referred to herein is reported to be responsible for determining PAM specificity of CRISPR-associated IscB. By means of example, the PI domain is contained in the NUC lobe and forms an elongated structure comprising seven α-helices, a three-stranded antiparallel β-sheet, a five-stranded antiparallel β-sheet, and a two-stranded antiparallel β-sheet.

[0280] In some cases, where the nucleic acid-guided nucleases do have a PAM requirement, the precise sequence and length requirements for the PAM will differ depending on the nucleic acid-guided nucleases used. In some examples, PAMs are typically 2-5 base pair sequences adjacent the protospacer (that is, the target sequence). Examples of the natural PAM sequences for different nucleic acid-guided nucleases orthologs have been identified and the skilled person will be able to identify further PAM sequences for use with a given nucleic acid-guided nucleases.

[0281] Further, associating a PAM Interacting (PI) domain (e.g., attaching or fusing) to a nucleic acid-guided nuclease may allow programing of PAM specificity, improve target site recognition fidelity, and increase the versatility of the IscB, genome engineering platform. nucleic acid-guided nucleases may be engineered to alter their PAM specificity, for example as described in Kleinstiver B P et al. Engineered CRISPR-Cas9 nucleases with altered PAM specificities. Nature. 2015 Jul. 23; 523(7561): 481-5. doi: 10.1038/nature14592. The skilled person will understand that other IscB proteins may be modified analogously.

[0282] The crystal structure information (described in U.S. Provisional Patent Application Nos. 61/915,251 filed Dec. 12, 2013, 61/930,214 filed on Jan. 22, 2014, 61/980,012 filed Apr. 15, 2014; and Nishimasu et al, “Crystal Structure of Cas9 in Complex with Guide RNA and Target DNA,” Cell 156(5): 935-949, DOI: dx.doi.org/10.1016/j.cell.2014.02.001 (2014), each and all of which are incorporated herein by reference) provides structural information to truncate and create modular or multi-part CRISPR enzymes which may be incorporated into inducible composition. In particular, structural information is provided for S. pyogenes Cas9 (SpCas9), and this may be extrapolated to other Cas9 orthologs or IscB proteins (as well as homologs and orthologs thereof) or other nucleic acid-guided nucleases. In one embodiment, the conformational variations in the crystal structures of the CRISPR-Cas9 system or of components of the CRISPR-Cas9 provide important and critical information about the flexibility or movement of protein structure regions relative to nucleotide (RNA or DNA) structure regions that may be important for the function of other nucleic acid-guided nucleases and related systems. The structural information provided for Cas9 (e.g., S. pyogenes Cas9) as the nucleic acid-guided nuclease in the present application may be used to further engineer and optimize the other nucleic acid-guided nucleases and related system and this may be extrapolated to interrogate structure-function relationships in other nucleic acid-guided nucleases and related systems.

### Protein Modifications

[0283] The nucleic acid-guided nucleases may comprise one or more modifications. As used herein, the term “modified” with regard to a nucleic acid-guided nuclease generally refers to a nucleic acid-guided nuclease having one or more modifications or mutations (including point mutations, truncations, insertions, deletions, chimeras, fusion proteins, etc.) compared to the wild type counterpart from which it is derived. By derived is meant that the derived enzyme is largely based, in the sense of having a high degree of sequence homology with, a wildtype enzyme, but that it has been mutated (modified) in some way as known in the art or as described herein.

[0284] The modified proteins, e.g., modified nucleic acid-guided nuclease may be catalytically inactive (also referred as dead). As used herein, a catalytically inactive or dead nuclease may have reduced or no nuclease activity compared to a wildtype counterpart nuclease. In some cases, a catalytically inactive or dead nuclease may have nickase activity. In some cases, a catalytically inactive or dead nuclease may not have nickase. Such a catalytically inactive or dead nuclease may not make either double-strand or single-strand break on a target polynucleotide, but may still bind or otherwise form complex with the target polynucleotide.

[0285] In one embodiment, the modifications of the nucleic acid-guided nuclease may or may not cause an altered functionality. By means of example, modifications which do not result in an altered functionality include for instance codon optimization for expression into a particular host, or providing the nuclease with a particular marker (e.g., for visualization). Modifications with may result in altered functionality may also include mutations, including point mutations, insertions, deletions, truncations (including split nucleases), etc., as well as chimeric nucleases (e.g., comprising domains from different orthologues or homologues) or fusion proteins. Fusion proteins may without limitation include, for instance, fusions with heterologous domains or functional domains (e.g., localization signals, catalytic domains, etc.). In an embodiment, various different modifications may be combined (e.g., a mutated nuclease which is catalytically inactive and which further is fused to a functional domain, such as for instance to induce DNA methylation or another nucleic acid modification, such as including without limitation, a break (e.g., by a different nuclease (domain)), a mutation, a deletion, an insertion, a replacement, a ligation, a digestion, a break or a recombination). As used herein, “altered functionality” includes without limitation an altered specificity (e.g., altered target recognition, increased (e.g., “enhanced” nucleic acid-guided nuclease) or decreased specificity, or altered PAM recognition), altered activity (e.g., increased or decreased catalytic activity, including catalytically inactive nucleases or nickases), and/or altered stability (e.g., fusions with destabilization domains). Examples of all these modifications are known in the art. It will be understood that a “modified” nuclease as referred to herein, and in particular a “modified” nucleic acid-guided nuclease or system or complex preferably still has the capacity to interact with or bind to the polynucleic acid (e.g., in complex with the guide molecule). Such modified nucleic acid-guided nuclease can be combined with the deaminase protein or active domain thereof as described herein.

[0286] In one embodiment, an unmodified nucleic acid-guided nucleases may have cleavage activity. In one embodiment, the nucleic acid-guided nucleases may direct cleavage of one or both nucleic acid (DNA or RNA) strands at the location of or near a target sequence, such as within the target sequence and/or within the complement of the target sequence or at sequences associated with the target sequence. In one embodiment, the nucleic acid-guided nucleases may direct cleavage of one or both DNA or RNA strands within about 1, 2, 3, 4, 5, 6, 7, 8, 9, 10, 15, 20, 25, 50, 100, 200, 500, or more base pairs or nucleotides from the first or last nucleotide of a target sequence. In one embodiment, the cleavage may be staggered, i.e., generating sticky ends. In one embodiment, the cleavage is a staggered cut with a 5′ overhang. In one embodiment, the cleavage is a staggered cut with a 5′ overhang of 1 to 5 nucleotides, preferably of 4 or 5 nucleotides.

[0287] In one embodiment, the cleavage site is distant from the PAM, e.g., the cleavage occurs after the 18th nucleotide on the non-target strand and after the 23rd nucleotide on the targeted strand. In one embodiment, the cleavage site occurs after the 18th nucleotide (counted from the PAM) on the non-target strand and after the 23rd nucleotide (counted from the PAM) on the targeted strand. In one embodiment, a vector encodes a nucleic acid-targeting effector protein that may be mutated with respect to a corresponding wild-type enzyme such that the mutated nucleic acid-targeting effector protein lacks the ability to cleave one or both DNA and RNA strands of a target polynucleotide containing a target sequence. As a further example, two or more catalytic domains of a nucleic acid-guided nuclease (e.g., RuvC I, RuvC II, and RuvC III or the HNH domain) may be mutated to produce a mutated nucleic acid-guided nuclease substantially lacking all DNA cleavage activity. As described herein, corresponding catalytic domains of a nucleic acid-guided nuclease may also be mutated to produce a mutated nucleic acid-guided nuclease lacking all DNA cleavage activity or having substantially reduced DNA cleavage activity. In one embodiment, a nucleic acid-guided nuclease may be considered to substantially lack all polynucleotide cleavage activity when the polynucleotide cleavage activity of the mutated enzyme is no more than 25%, no more than 10%, no more than 5%, no more than 1%, no more than 0.1%, no more than 0.01% of the nucleic acid cleavage activity of the non-mutated form of the enzyme; an example can be when the nucleic acid cleavage activity of the mutated form is nil or negligible as compared with the non-mutated form. A nucleic acid-guided nuclease may be identified with reference to the general class of enzymes that share homology to the biggest nuclease with multiple nuclease domains from the Type I, II, III, IV, V, or VI CRISPR systems.

[0288] In an embodiment, the nuclease domains of the nucleic acid-guided nuclease are catalytically inactive, or modified to be catalytically inactive, or when the protein is a nickase. In an embodiment, both nuclease domains are catalytically inactive.

[0289] In an embodiment, the nucleic acid-guided nuclease may comprise one or more modifications resulting in enhanced activity and/or specificity, such as including mutating residues that stabilize the targeted or non-targeted strand (e.g., eCas9; “Rationally engineered Cas9 nucleases with improved specificity”, Slaymaker et al. (2016), Science, 351(6268): 84-88, incorporated herewith in its entirety by reference). In an embodiment, the altered or modified activity of the engineered nucleic acid-guided nuclease comprises increased targeting efficiency or decreased off-target binding. In an embodiment, the altered activity of the engineered nucleic acid-guided nuclease comprises modified cleavage activity. In an embodiment, the altered activity comprises increased cleavage activity as to the target polynucleotide loci. In an embodiment, the altered activity comprises decreased cleavage activity as to the target polynucleotide loci. In an embodiment, the altered activity comprises decreased cleavage activity as to off-target polynucleotide loci. In an embodiment, the altered or modified activity of the modified nuclease comprises altered helicase kinetics. In an embodiment, the modified nuclease comprises a modification that alters association of the protein with the nucleic acid molecule comprising RNA, or a strand of the target polynucleotide loci, or a strand of off-target polynucleotide loci. In an aspect of the invention, the engineered nucleic acid-guided nuclease comprises a modification that alters formation of the nucleic acid-guided nuclease and related complex. In an embodiment, the altered activity comprises increased cleavage activity as to off-target polynucleotide loci. Accordingly, in an embodiment, there is increased specificity for target polynucleotide loci as compared to off-target polynucleotide loci. In other embodiments, there is reduced specificity for target polynucleotide loci as compared to off-target polynucleotide loci. In an embodiment, the mutations result in decreased off-target effects (e.g., cleavage or binding properties, activity, or kinetics), such as in case for nucleic acid-guided nuclease for instance resulting in a lower tolerance for mismatches between target and guide RNA. Other mutations may lead to increased off-target effects (e.g., cleavage or binding properties, activity, or kinetics). Other mutations may lead to increased or decreased on-target effects (e.g., cleavage or binding properties, activity, or kinetics). In an embodiment, the mutations result in altered (e.g., increased or decreased) helicase activity, association or formation of the functional nuclease complex. In an embodiment, the mutations result in an altered PAM recognition, i.e., a different PAM may be (in addition or in the alternative) be recognized, compared to the unmodified nucleic acid-guided nuclease. Examples mutations include positively charged residues and/or (evolutionary) conserved residues, such as conserved positively charged residues, in order to enhance specificity. In an embodiment, such residues may be mutated to uncharged residues, such as alanine.

### Functional Domains

[0290] CRISPR-associated IscBs may also be associated with functional domains as discussed above regarding Omega IscBs.

### Nuclear Localization Sequences

[0291] In one embodiment, the nucleic acid-guided nuclease is fused to one or more nuclear localization sequences (NLSs), such as about or more than about 1, 2, 3, 4, 5, 6, 7, 8, 9, 10, or more NLSs. In one embodiment, the nucleic acid-guided nuclease comprises about or more than about 1, 2, 3, 4, 5, 6, 7, 8, 9, 10, or more NLSs at or near the amino-terminus, about or more than about 1, 2, 3, 4, 5, 6, 7, 8, 9, 10, or more NLSs at or near the carboxy-terminus, or a combination of these (e.g., zero or at least one or more NLS at the amino-terminus and zero or at one or more NLS at the carboxy terminus).

[0292] In one embodiment, the IscB polypeptide nuclease is fused to one or more nuclear localization sequences (NLSs), such as about or more than about 1, 2, 3, 4, 5, 6, 7, 8, 9, 10, or more NLSs. In one embodiment, the IscB polypeptide nuclease comprises about or more than about 1, 2, 3, 4, 5, 6, 7, 8, 9, 10, or more NLSs at or near the amino-terminus, about or more than about 1, 2, 3, 4, 5, 6, 7, 8, 9, 10, or more NLSs at or near the carboxy-terminus, or a combination of these (e.g., zero or at least one or more NLS at the amino-terminus and zero or at one or more NLS at the carboxy terminus).

[0293] When more than one NLS is present, each may be selected independently of the others, such that a single NLS may be present in more than one copy and/or in combination with one or more other NLSs present in one or more copies. In a preferred embodiment of the invention, the nucleic acid-guided nuclease comprises at most 6 NLSs. In a preferred embodiment of the invention, the IscB polypeptide nuclease comprises at most 6 NLSs.

[0294] In one embodiment, an NLS is considered near the N- or C-terminus when the nearest amino acid of the NLS is within about 1, 2, 3, 4, 5, 10, 15, 20, 25, 30, 40, 50, or more amino acids along the polypeptide chain from the N- or C-terminus. Non-limiting examples of NLSs include an NLS sequence derived from: the NLS of the SV40 virus large T-antigen, having the amino acid sequence PKKKRKV (SEQ ID NO: 2002); the NLS from nucleoplasmin (e.g., the nucleoplasmin bipartite NLS with the sequence KRPAATKKAGQAKKKK (SEQ ID NO: 2003); the c-myc NLS having the amino acid sequence PAAKRVKLD (SEQ ID NO: 2004) or RQRRNELKRSP (SEQ ID NO: 2005); the hRNPA1 M9 NLS having the sequence NQSSNFGPMKGGNFGGRSSGPYGGGGQYFAKPRNQGGY (SEQ ID NO: 2006); the sequence RMRIZFKNKGKDTAELRRRRVEVSVELRKAKKDEQILKRRNV (SEQ ID NO: 2007) of the IBB domain from importin-alpha; the sequences VSRKRPRP (SEQ ID NO: 2008) and PPKKARED (SEQ ID NO: 2009) of the myoma T protein; the sequence PQPKKKPL (SEQ ID NO: 2010) of human p53; the sequence SALIKKKKKMAP (SEQ ID NO: 2011) of mouse c-abl IV; the sequences DRLRR (SEQ ID NO: 2012) and PKQKKRK (SEQ ID NO: 2013) of the influenza virus NS1; the sequence RKLKKKIKKL (SEQ ID NO: 2014) of the Hepatitis virus delta antigen; the sequence REKKKFLKRR (SEQ ID NO: 2015) of the mouse Mx1 protein; the sequence KRKGDEVDGVDEVAKKKSKK (SEQ ID NO: 2016) of the human poly(ADP-ribose) polymerase; and the sequence RKCLQAGMNLEARKTKK (SEQ ID NO: 2017) of the steroid hormone receptors (human) glucocorticoid.

[0295] In general, the one or more NLSs are of sufficient strength to drive accumulation of the nucleic acid-guided nuclease in a detectable amount in the nucleus of a eukaryotic cell. In general, strength of nuclear localization activity may derive from the number of NLSs in the nucleic acid-guided nuclease, the particular NLS(s) used, or a combination of these factors. Detection of accumulation in the nucleus may be performed by any suitable technique. For example, a detectable marker may be fused to the nucleic acid-guided nuclease, such that location within a cell may be visualized, such as in combination with a means for detecting the location of the nucleus (e.g., a stain specific for the nucleus such as DAPI). Cell nuclei may also be isolated from cells, the contents of which may then be analyzed by any suitable process for detecting protein, such as immunohistochemistry, Western blot, or enzyme activity assay. Accumulation in the nucleus may also be determined indirectly, such as by an assay for the effect of complex formation (e.g., assay for DNA cleavage or mutation at the target sequence, or assay for altered gene expression activity affected by complex formation and/or nucleic acid-guided nuclease activity), as compared to a control no exposed to the nucleic acid-guided nuclease or complex, or exposed to a nucleic acid-guided nuclease lacking the one or more NLSs. In an embodiment of the herein described nucleic acid-guided nuclease protein complexes and systems, the codon optimized nucleic acid-guided nuclease proteins comprise an NLS attached to the C-terminal of the protein. In an embodiment, other localization tags may be fused to the nucleic acid-guided nuclease, such as without limitation for localizing the nucleic acid-guided nuclease to particular sites in a cell, such as organelles, such as mitochondria, plastids, chloroplast, vesicles, golgi, (nuclear or cellular) membranes, ribosomes, nucleolus, ER, cytoskeleton, vacuoles, centrosome, nucleosome, granules, centrioles, etc.

[0296] In general, the one or more NLSs are of sufficient strength to drive accumulation of the IscB polypeptide nuclease in a detectable amount in the nucleus of a eukaryotic cell. In general, strength of nuclear localization activity may derive from the number of NLSs in the IscB polypeptide nuclease, the particular NLS(s) used, or a combination of these factors. Detection of accumulation in the nucleus may be performed by any suitable technique. For example, a detectable marker may be fused to the IscB polypeptide nuclease, such that location within a cell may be visualized, such as in combination with a means for detecting the location of the nucleus (e.g., a stain specific for the nucleus such as DAPI). Cell nuclei may also be isolated from cells, the contents of which may then be analyzed by any suitable process for detecting protein, such as immunohistochemistry, Western blot, or enzyme activity assay. Accumulation in the nucleus may also be determined indirectly, such as by an assay for the effect of complex formation (e.g., assay for DNA cleavage or mutation at the target sequence, or assay for altered gene expression activity affected by complex formation and/or IscB polypeptide nuclease activity), as compared to a control not exposed to the IscB polypeptide nuclease or complex, or exposed to an IscB polypeptide nuclease lacking the one or more NLSs. In an embodiment of the herein described IscB polypeptide nuclease protein complexes and systems, the codon optimized IscB polypeptide nuclease proteins comprise an NLS attached to the C-terminal of the protein. In an embodiment, other localization tags may be fused to the IscB polypeptide nuclease, such as without limitation for localizing the IscB polypeptide nuclease to particular sites in a cell, such as organelles, such as mitochondria, plastids, chloroplast, vesicles, golgi, (nuclear or cellular) membranes, ribosomes, nucleolus, ER, cytoskeleton, vacuoles, centrosome, nucleosome, granules, centrioles, etc.

[0297] In an embodiment of the invention, at least one nuclear localization signal (NLS) is attached to the nucleic acid sequences encoding the IscB polypeptide nuclease. In preferred embodiments at least one or more C-terminal or N-terminal NLSs are attached (and hence nucleic acid molecule(s) coding for the IscB polypeptide nuclease can include coding for NLS(s) so that the expressed product has the NLS(s) attached or connected). In a preferred embodiment a C-terminal NLS is attached for optimal expression and nuclear targeting in eukaryotic cells, preferably human cells. The invention also encompasses methods for delivering multiple nucleic acid components, wherein each nucleic acid component is specific for a different target locus of interest thereby modifying multiple target loci of interest. The nucleic acid component of the complex may comprise one or more protein-binding RNA aptamers. The one or more aptamers may be capable of binding a bacteriophage coat protein.

### Linkers

[0298] In an embodiment of the invention, at least one nuclear localization signal (NLS) is attached to the nucleic acid sequences encoding the nucleic acid-guided nuclease or the IscB polypeptide nuclease. In preferred embodiments, at least one or more C-terminal or N-terminal NLSs are attached (and hence nucleic acid molecule(s) coding for the nucleic acid-guided nuclease or IscB polypeptide nuclease can include coding for NLS(s) so that the expressed product has the NLS(s) attached or connected). In a preferred embodiment, a C-terminal NLS is attached for optimal expression and nuclear targeting in eukaryotic cells, preferably human cells. The invention also encompasses methods for delivering multiple nucleic acid components, wherein each nucleic acid component is specific for a different target locus of interest thereby modifying multiple target loci of interest. The nucleic acid component of the complex may comprise one or more protein-binding RNA aptamers. The one or more aptamers may be capable of binding a bacteriophage coat protein.

[0299] In some preferred embodiments, the functional domain is linked to a nucleic acid-guided nuclease (e.g., an active or a dead nucleic acid-guided nuclease) to target and activate epigenomic sequences such as promoters or enhancers. One or more guides directed to such promoters or enhancers may also be provided to direct the binding of the nucleic acid-guided nuclease to such promoters or enhancers.

[0300] In some preferred embodiments, the functional domain is linked to an IscB polypeptide nuclease (e.g., an active or a dead IscB polypeptide nuclease) to target and activate epigenomic sequences such as promoters or enhancers. One or more guides directed to such promoters or enhancers may also be provided to direct the binding of the IscB polypeptide nuclease to such promoters or enhancers.

[0301] The term “associated with” is used here in relation to the association of the functional domain to the IscB polypeptide nuclease protein, nucleic acid-guided nuclease, or the adaptor protein. It is used in respect of how one molecule ‘associates’ with respect to another, for example between an adaptor protein and a functional domain, between the IscB polypeptide nuclease protein and a functional domain, or between the nucleic acid guided nuclease protein and a functional domain. In the case of such protein-protein interactions, this association may be viewed in terms of recognition in the way an antibody recognizes an epitope. Alternatively, one protein may be associated with another protein via a fusion of the two, for instance one subunit being fused to another subunit. Fusion typically occurs by addition of the amino acid sequence of one to that of the other, for instance via splicing together of the nucleotide sequences that encode each protein or subunit. Alternatively, this may essentially be viewed as binding between two molecules or direct linkage, such as a fusion protein. In any event, the fusion protein may include a linker between the two subunits of interest (i.e., between the enzyme and the functional domain or between the adaptor protein and the functional domain). Thus, in one embodiment, the IscB polypeptide nuclease protein, nucleic acid-guided nuclease, or adaptor protein is associated with a functional domain by binding thereto. In other embodiments, the IscB polypeptide nuclease, nucleic acid-guided nuclease, or adaptor protein is associated with a functional domain because the two are fused together, optionally via an intermediate linker.

[0302] The term “linker,” as used in reference to a fusion protein, refers to a molecule which joins the proteins to form a fusion protein. Generally, such molecules have no specific biological activity other than to join or to preserve some minimum distance or other spatial relationship between the proteins. However, in an embodiment, the linker may be selected to influence some property of the linker and/or the fusion protein such as the folding, net charge, or hydrophobicity of the linker.

[0303] Suitable linkers for use in the methods of the present invention are well known to those of skill in the art and include, but are not limited to, straight or branched-chain carbon linkers, heterocyclic carbon linkers, or peptide linkers. However, as used herein the linker may also be a covalent bond (carbon-carbon bond or carbon-heteroatom bond).

[0304] In one embodiment, the linker is used to separate the IscB polypeptide nuclease and the nucleotide deaminase by a distance sufficient to ensure that each protein retains its required functional property. In one embodiment, the linker is used to separate the nucleic acid-guided nuclease and the nucleotide deaminase by a distance sufficient to ensure that each protein retains its required functional property.

[0305] Preferred peptide linker sequences adopt a flexible extended conformation and do not exhibit a propensity for developing an ordered secondary structure. In an embodiment, the linker can be a chemical moiety which can be monomeric, dimeric, multimeric or polymeric. Preferably, the linker comprises amino acids. Typical amino acids in flexible linkers include Gly, Asn and Ser. Accordingly, in one embodiment, the linker comprises a combination of one or more of Gly, Asn and Ser amino acids. Other near neutral amino acids, such as Thr and Ala, also may be used in the linker sequence. Exemplary linkers are disclosed in Maratea et al. (1985), Gene 40:39-46; Murphy et al. (1986) Proc. Nat'l. Acad. Sci. USA 83:8258-62; U.S. Pat. No. 4,935,233; and 4,751,180. For example, GlySer linkers GGS, GGGS (SEQ ID NO: 2018) or GSG can be used. GGS, GSG, GGGS (SEQ ID NO: 2018) or GGGGS (SEQ ID NO: 2019) linkers can be used in repeats of 3 (such as (GGS)₃, (SEQ ID NO: 2020) (GGGGS)₃) (SEQ ID NO: 2021) or 5, 6, 7, 9 or even 12 or more, to provide suitable lengths. In some cases, the linker may be (GGGGS)₃₋₁₅ (SEQ ID NO: 2021, 2024-2032, 25195-25197), for example, in some cases, the linker may be (GGGGS)₃₋₁₁ (SEQ ID NO: 2021, 2024-2031), e.g., GGGGS (SEQ ID NO: 2022), (GGGGS)₂ (SEQ ID NO: 2023), (GGGGS)₃ (SEQ ID NO: 2021), (GGGGS)₄ (SEQ ID NO: 2024), (GGGGS)₅ (SEQ ID NO: 2025), (GGGGS)₆ (SEQ ID NO: 2026), (GGGGS)₇ (SEQ ID NO: 2027), (GGGGS)₈ (SEQ ID NO: 2028), (GGGGS)₉ (SEQ ID NO: 2029), (GGGGS)₁₀ (SEQ ID NO: 2030), or (GGGGS)₁₁ (SEQ ID NO: 2031).

[0306] In one embodiment, linkers such as (GGGGS)₃ (SEQ ID NO: 2021) are preferably used herein. (GGGGS)₆ (SEQ ID NO: 2026), (GGGGS)₉ (SEQ ID NO: 2029) or (GGGGS)₁₂ (SEQ ID NO: 2032) may preferably be used as alternatives. Other preferred alternatives are (GGGGS)₁ (SEQ ID NO:2022), (GGGGS)₂ (SEQ ID NO: 2023), (GGGGS)₄ (SEQ ID NO: 2024), (GGGGS)₅ (SEQ ID NO: 2025), (GGGGS)₇ (SEQ ID NO: 2027), (GGGGS)₈ (SEQ ID NO: 2028), (GGGGS)₁₀ (SEQ ID NO: 2030), or (GGGGS)₁₁ (SEQ ID NO: 2031). In yet a further embodiment, LEPGEKPYKCPECGKSFSQSGALTRHQRTHTR (SEQ ID NO: 2033) is used as a linker. In yet an additional embodiment, the linker is an XTEN linker. In one embodiment, the IscB polypeptide nuclease or the nucleic acid-guided nuclease is linked to the deaminase protein or catalytic by its domain means of an LEPGEKPYKCPECGKSFSQSGALTRHQRTHTR (SEQ ID NO: 2033) linker. In further one embodiment, IscB polypeptide nuclease is linked C-terminally to the N-terminus of a deaminase protein or its domain catalytic by means of an LEPGEKPYKCPECGKSFSQSGALTRHQRTHTR (SEQ ID NO: 2033) linker. In addition, N- and C-terminal NLSs can also function as linker (e.g., PKKKRKVEASSPKKRKVEAS (SEQ ID NO: 2034)).

TABLE 4
Examples of linkers used in the invention are shown.

| | |
|---|---|
| GGS | GGTGGTAGT |
| GGSx3 (9) | GGTGGTAGTGGAGGGAGCGGCGGTTCA (SEQ ID NO: 2036) |
| (SEQ ID NO: | |
| 2020) | |
| GGSx7 (21) | ggtggaggaggctctggtggaggcggtagcggaggcggagggtcgGGTGGTAGTGGAGGGAGCG |
| (SEQ ID NO: | GCGGTTCA (SEQ ID NO: 2037) |
| 2035) | |
| XTEN | TCGGGATCTGAGACGCCTGGGACCTCGGAATCGGCTACGCCCGAAAGT |
| | (SEQ ID NO: 2038) |
| Z-EGFR Short | Gtggataacaaatttaacaaagaaatgtgggcggcgtgggaagaaattcgtaacctgccgaacctgaacggctgg |
| | cagatgaccgcgtttattgcgagcctggtggatgatccgagccagagcgcgaacctgctggcggaagcgaaaaaa |
| | ctgaacgatgcgcaggcgccgaaaaccggcggtggttctggt (SEQ ID NO: 2039) |
| GSAT | Ggtggttctgccggtggctccggttctggctccagcggtggcagctctggtgcgtccggcacgggtactgcgggg |
| | gcactggcagcggttccggtactggctctggc (SEQ ID NO: 2040) |

[0307] Linkers may be used between the hRNA molecules and the functional domain (activator or repressor), or between the IscB polypeptide nuclease and the functional domain. In an embodiment, linkers may be used between the guide molecules and the functional domain (e.g., activator or repressor), or between the Cas IscB polypeptide nuclease and the functional domain. The linkers may be used to engineer appropriate amounts of “mechanical flexibility”.

[0308] In an embodiment, the one or more functional domains are controllable, e.g., inducible.

### Guide Sequences

[0309] The systems herein may further comprise one or more CRISPR-associated guide molecules. A CRISPR-associated guide molecule may form a complex with a nucleic acid-guided nuclease, and direct the complex to bind with a target sequence. In some examples, the CRISPR-associated guide molecule may comprise a first and second nucleic acid molecules, the first and second nucleic acid molecules capable of forming a duplex, the duplex capable of forming a complex with the nucleic acid-guided nuclease, wherein the second nucleic acid molecule is a recombinant molecule comprising a heterologous CRISPR-associated guide sequence capable of directing site-specific binding of the complex to a target sequence of a target polynucleotide. In some examples, the single CRISPR-associated guide molecule capable of forming a complex with the nucleic acid-guided nuclease and directing site-specific binding of the complex to a target sequence of a target polynucleotide.

[0310] As used herein, a heterologous CRISPR-associated guide molecule is a CRISPR-associated guide molecule that is not derived from the same species as the nucleic acid-guided nuclease. For example, a heterologous CRISPR-associated guide molecule of a nucleic acid-guided nuclease derived from species A is a polynucleotide derived from a species different from species A, or an artificial polynucleotide.

[0311] As used herein, the term “CRISPR-associated guide sequence” or “CRISPR-associated guide molecules” has the meaning as used herein elsewhere and comprises any polynucleotide sequence having sufficient complementarity with a target nucleic acid sequence to hybridize with the target nucleic acid sequence and direct sequence-specific binding of a nucleic acid-targeting complex to the target nucleic acid sequence. In one embodiment, the degree of complementarity of the CRISPR-associated guide sequence to a given target sequence, when optimally aligned using a suitable alignment algorithm, is about or more than 50%, 60%, 75%, 80%, 85%, 90%, 95%, 97.5%, 99%, or more. In certain example embodiments, the CRISPR-associated guide molecule comprises a CRISPR-associated guide sequence that may be designed to have at least one mismatch with the target sequence, such that a RNA duplex formed between the CRISPR-associated guide sequence and the target sequence. Accordingly, the degree of complementarity is less than 99%. For instance, where the CRISPR-associated guide sequence consists of 24 nucleotides, the degree of complementarity is more particularly about 96% or less. In one embodiment, the CRISPR-associated guide sequence is designed to have a stretch of two or more adjacent mismatching nucleotides, such that the degree of complementarity over the entire CRISPR-associated guide sequence is further reduced. For instance, where the CRISPR-associated guide sequence consists of 24 nucleotides, the degree of complementarity is more particularly about 96% or less, more particularly, about 92% or less, more particularly about 88% or less, more particularly about 84% or less, more particularly about 80% or less, more particularly about 76% or less, more particularly about 72% or less, depending on whether the stretch of two or more mismatching nucleotides encompasses 2, 3, 4, 5, 6 or 7 nucleotides, etc. In one embodiment, aside from the stretch of one or more mismatching nucleotides, the degree of complementarity, when optimally aligned using a suitable alignment algorithm, is about or more than about 50%, 60%, 75%, 80%, 85%, 90%, 95%, 97.5%, 99%, or more. Optimal alignment may be determined with the use of any suitable algorithm for aligning sequences, non-limiting example of which include the Smith-Waterman algorithm, the Needleman-Wunsch algorithm, algorithms based on the Burrows-Wheeler Transform (e.g., the Burrows Wheeler Aligner), ClustalW, Clustal X, BLAT, Novoalign (Novocraft Technologies; available at www.novocraft.com), ELAND (Illumina, San Diego, CA), SOAP (available at soap.genomics.org.cn), and Maq (available at maq.sourceforge.net). The ability of a CRISPR-associated guide sequence (within a nucleic acid-targeting guide RNA) to direct sequence-specific binding of a nucleic acid-targeting complex to a target nucleic acid sequence may be assessed by any suitable assay. For example, the components of a nucleic acid-guided nuclease-guide system sufficient to form a nucleic acid-targeting complex, including the CRISPR-associated guide sequence to be tested, may be provided to a host cell having the corresponding target nucleic acid sequence, such as by transfection with vectors encoding the components of the nucleic acid-targeting complex, followed by an assessment of preferential targeting (e.g., cleavage) within the target nucleic acid sequence, such as by Surveyor assay as described herein. Similarly, cleavage of a target nucleic acid sequence (or a sequence in the vicinity thereof) may be evaluated in a test tube by providing the target nucleic acid sequence, components of a nucleic acid-targeting complex, including the CRISPR-associated guide sequence to be tested and a control guide sequence different from the test CRISPR-associated guide sequence, and comparing binding or rate of cleavage at or in the vicinity of the target sequence between the test CRISPR-associated and control guide sequence reactions. Other assays are possible, and will occur to those skilled in the art. A CRISPR-associated guide sequence, and hence a nucleic acid-targeting guide RNA may be selected to target any target nucleic acid sequence.

[0312] A CRISPR-associated guide sequence, and hence a nucleic acid-targeting guide, may be selected to target any target nucleic acid sequence. The target sequence may be DNA. The target sequence may be any RNA sequence. In one embodiment, the target sequence may be a sequence within a RNA molecule selected from the group consisting of messenger RNA (mRNA), pre-mRNA, ribosomal RNA (rRNA), transfer RNA (tRNA), micro-RNA (miRNA), small interfering RNA (siRNA), small nuclear RNA (snRNA), small nucleolar RNA (snoRNA), double stranded RNA (dsRNA), non-coding RNA (ncRNA), long non-coding RNA (lncRNA), and small cytoplasmatic RNA (scRNA). In some preferred embodiments, the target sequence may be a sequence within a RNA molecule selected from the group consisting of mRNA, pre-mRNA, and rRNA. In some preferred embodiments, the target sequence may be a sequence within a RNA molecule selected from the group consisting of ncRNA, and lncRNA. In some more preferred embodiments, the target sequence may be a sequence within an mRNA molecule or a pre-mRNA molecule.

[0313] In an embodiment, the CRISPR-associated guide sequence or spacer length of the CRISPR-associated guide molecules is from 15 to 50 nt. In an embodiment, the spacer length of the CRISPR-associated guide RNA is at least 15 nucleotides. In an embodiment, the spacer length is from 15 to 17 nt, e.g., 15, 16, or 17 nt, from 17 to 20 nt, e.g., 17, 18, 19, or 20 nt, from 20 to 24 nt, e.g., 20, 21, 22, 23, or 24 nt, from 23 to 25 nt, e.g., 23, 24, or 25 nt, from 24 to 27 nt, e.g., 24, 25, 26, or 27 nt, from 27 to 30 nt, e.g., 27, 28, 29, or 30 nt, from 30 to 35 nt, e.g., 30, 31, 32, 33, 34, or 35 nt, or 35 nt or longer. In certain example embodiment, the CRISPR-associated guide sequence is 15, 16, 17,18, 19, 20, 21, 22, 23, 24, 25, 26, 27, 28, 29, 30, 31, 32, 33, 34, 35, 36, 37, 38, 39 40, 41, 42, 43, 44, 45, 46, 47 48, 49, 50, 51, 52, 53, 54, 55, 56, 57, 58, 59, 60, 61, 62, 63, 64, 65, 66, 67, 68, 69, 70, 71, 72, 73, 74, 75, 76, 77, 78, 79, 80, 81, 82, 83, 84, 85, 86, 87, 88, 89, 90, 91, 92, 93, 94, 95, 96, 97, 98, 99, or 100 nt.

[0314] In one embodiment, the sequence of the CRISPR-associated guide molecule (direct repeat and/or spacer) is selected to reduce the degree secondary structure within the guide molecule. In one embodiment, about or less than about 75%, 50%, 40%, 30%, 25%, 20%, 15%, 10%, 5%, 1%, or fewer of the nucleotides of the nucleic acid-targeting guide RNA participate in self-complementary base pairing when optimally folded. Optimal folding may be determined by any suitable polynucleotide folding algorithm. Some programs are based on calculating the minimal Gibbs free energy. An example of one such algorithm is mFold, as described by Zuker and Stiegler (Nucleic Acids Res. 9(1981), 133-148). Another example of a folding algorithm is the online webserver RNAfold, developed at Institute for Theoretical Chemistry at the University of Vienna, using the centroid structure prediction algorithm (see e.g., A.R. Gruber et al., 2008, Cell 106(1): 23-24; and PA Carr and GM Church, 2009, Nature Biotechnology 27(12): 1151-62). Further algorithms may be found in U.S. application Ser. No. TBA (attorney docket 44790.11.2022; Broad Reference BI-2013/004A); incorporated herein by reference.

[0315] In a particular embodiment, the CRISPR-associated guide molecule comprises a guide sequence linked to a direct repeat sequence, wherein the direct repeat sequence comprises one or more stem loops or optimized secondary structures. In one embodiment, the direct repeat has a minimum length of 16 nts and a single stem loop. In further embodiments the direct repeat has a length longer than 16 nts, preferably more than 17 nts, and has more than one stem loops or optimized secondary structures. In one embodiment, the CRISPR-associated guide molecule comprises or consists of the guide sequence linked to all or part of the natural direct repeat sequence. In one embodiment, certain aspects of the CRISPR-associated guide architecture can be modified, for example by addition, subtraction, or substitution of features, whereas certain other aspects of CRISPR-associated guide architecture are maintained. Preferred locations for engineered CRISPR-associated guide molecule modifications, including but not limited to insertions, deletions, and substitutions include CRISPR-associated guide termini and regions of the CRISPR-associated guide molecule that are exposed when complexed with nucleic acid-guided nuclease and/or target, for example the tetraloop and/or loop2.

[0316] In one embodiment, a loop in the CRISPR-associated guide RNA is provided. This may be a stem loop or a tetra loop. The loop is preferably GAAA, but it is not limited to this sequence or indeed to being only 4 bp in length. Indeed, preferred loop forming sequences for use in hairpin structures are four nucleotides in length, and most preferably have the sequence GAAA. However, longer or shorter loop sequences may be used, as may alternative sequences. The sequences preferably include a nucleotide triplet (for example, AAA), and an additional nucleotide (for example C or G). Examples of loop forming sequences include CAAA and AAAG.

[0317] In one embodiment, the CRISPR-associated guide molecule forms a stemloop with a separate non-covalently linked sequence, which can be DNA or RNA. In one embodiment, the sequences forming the CRISPR-associated guide are first synthesized using the standard phosphoramidite synthetic protocol (Herdewijn, P., ed., Methods in Molecular Biology Col 288, Oligonucleotide Synthesis: Methods and Applications, Humana Press, New Jersey (2012)). In one embodiment, these sequences can be functionalized to contain an appropriate functional group for ligation using the standard protocol known in the art (Hermanson, G. T., Bioconjugate Techniques, Academic Press (2013)). Examples of functional groups include, but are not limited to, hydroxyl, amine, carboxylic acid, carboxylic acid halide, carboxylic acid active ester, aldehyde, carbonyl, chlorocarbonyl, imidazolylcarbonyl, hydrozide, semicarbazide, thio semicarbazide, thiol, maleimide, haloalkyl, sufonyl, ally, propargyl, diene, alkyne, and azide. Once this sequence is functionalized, a covalent chemical bond or linkage can be formed between this sequence and the direct repeat sequence. Examples of chemical bonds include, but are not limited to, those based on carbamates, ethers, esters, amides, imines, amidines, aminotrizines, hydrozone, disulfides, thioethers, thioesters, phosphorothioates, phosphorodithioates, sulfonamides, sulfonates, fulfones, sulfoxides, ureas, thioureas, hydrazide, oxime, triazole, photolabile linkages, C—C bond forming groups such as Diels-Alder cyclo-addition pairs or ring-closing metathesis pairs, and Michael reaction pairs.

[0318] In one embodiment, these stem-loop forming sequences can be chemically synthesized. In one embodiment, the chemical synthesis uses automated, solid-phase oligonucleotide synthesis machines with 2′-acetoxyethyl orthoester (2′-ACE) (Scaringe et al., J. Am. Chem. Soc. (1998) 120:11820-11821; Scaringe, Methods Enzymol. (2000) 317:3-18) or 2′-thionocarbamate (2′-TC) chemistry (Dellinger et al., J. Am. Chem. Soc. (2011) 133:11540-11546; Hendel et al., Nat. Biotechnol. (2015) 33:985-989).

[0319] The repeat:anti repeat duplex will be apparent from the secondary structure of the sgRNA. It may be typically a first complimentary stretch after (in 5′ to 3′ direction) the poly U tract and before the tetraloop; and a second complimentary stretch after (in 5′ to 3′ direction) the tetraloop and before the poly A tract. The first complimentary stretch (the “repeat”) is complimentary to the second complimentary stretch (the “anti-repeat”). As such, they Watson-Crick base pair to form a duplex of dsRNA when folded back on one another. As such, the anti-repeat sequence is the complimentary sequence of the repeat and in terms to A-U or C-G base pairing, but also in terms of the fact that the anti-repeat is in the reverse orientation due to the tetraloop.

[0320] In an embodiment of the invention, modification of CRISPR-associated guide architecture comprises replacing bases in stemloop 2. For example, in one embodiment, “actt” (“acuu” in RNA) and “aagt” (“aagu” in RNA) bases in stemloop2 are replaced with “cgcc” and “gcgg”. In one embodiment, “actt” and “aagt” bases in stemloop2 are replaced with complimentary GC-rich regions of 4 nucleotides. In one embodiment, the complimentary GC-rich regions of 4 nucleotides are “cgcc” and “gcgg” (both in 5′ to 3′ direction). In one embodiment, the complimentary GC-rich regions of 4 nucleotides are “gcgg” and “cgcc” (both in 5′ to 3′ direction). Other combination of C and G in the complimentary GC-rich regions of 4 nucleotides will be apparent including CCCC and GGGG.

[0321] In one aspect, the stemloop 2, e.g., “ACTTgtttAAGT” (SEQ ID NO: 1) can be replaced by any “XXXXgtttYYYY”, e.g., where XXXX and YYYY represent any complementary sets of nucleotides that together will base pair to each other to create a stem.

[0322] In one aspect, the stem comprises at least about 4 bp comprising complementary X and Y sequences, although stems of more, e.g., 5, 6, 7, 8, 9, 10, 11 or 12 or fewer, e.g., 3, 2, base pairs are also contemplated. Thus, for example X2-12 and Y2-12 (wherein X and Y represent any complementary set of nucleotides) may be contemplated. In one aspect, the stem made of the X and Y nucleotides, together with the “gttt,” will form a complete hairpin in the overall secondary structure; and this may be advantageous and the amount of base pairs can be any amount that forms a complete hairpin. In one aspect, any complementary X:Y base pairing sequence (e.g., as to length) is tolerated, so long as the secondary structure of the entire CRISPR-associated sgRNA is preserved. In one aspect, the stem can be a form of X:Y base pairing that does not disrupt the secondary structure of the whole CRISPR-associated sgRNA in that it has a DR:tracr duplex, and 3 stemloops. In one aspect, the “gttt” tetraloop that connects ACTT and AAGT (or any alternative stem made of X:Y base pairs) can be any sequence of the same length (e.g., 4 basepair) or longer that does not interrupt the overall secondary structure of the sgRNA. In one aspect, the stemloop can be something that further lengthens stemloop2, e.g., can be MS2 aptamer. In one aspect, the stemloop3 “GGCACCGagtCGGTGC” (SEQ ID NO: 25198) can likewise take on a “XXXXXXXagtYYYYYYY” form, e.g., wherein X7 and Y7 represent any complementary sets of nucleotides that together will base pair to each other to create a stem. In one aspect, the stem comprises about 7 bp comprising complementary X and Y sequences, although stems of more or fewer base pairs are also contemplated. In one aspect, the stem made of the X and Y nucleotides, together with the “agt”, will form a complete hairpin in the overall secondary structure. In one aspect, any complementary X:Y base pairing sequence is tolerated, so long as the secondary structure of the entire sgRNA is preserved. In one aspect, the stem can be a form of X:Y base pairing that doesn't disrupt the secondary structure of the whole sgRNA in that it has a DR:tracr duplex, and 3 stemloops. In one aspect, the “agt” sequence of the stemloop 3 can be extended or be replaced by an aptamer, e.g., a MS2 aptamer or sequence that otherwise generally preserves the architecture of stemloop3. In one aspect for alternative Stemloops 2 and/or 3, each X and Y pair can refer to any base-pair. In one aspect, non-Watson Crick base-pairing is contemplated, where such pairing otherwise generally preserves the architecture of the stem-loop at that position.

[0323] In one aspect, the DR:tracrRNA duplex can be replaced with the form: gYYYYag(N)NNNNxxxxNNNN(AAN)uuRRRRu (SEQ ID NO: 25199) (using standard IUPAC nomenclature for nucleotides), wherein (N) and (AAN) represent part of the bulge in the duplex, and “xxxx” represents a linker sequence. NNNN on the direct repeat can be anything so long as it base pairs with the corresponding NNNN portion of the tracrRNA. In one aspect, the DR:tracrRNA duplex can be connected by a linker of any length, any base composition, as long as it doesn't alter the overall structure.

[0324] In one embodiment, the natural hairpin or stem-loop structure of the CRISPR-associated guide molecule is extended or replaced by an extended stem-loop. Extension of the stem can enhance the assembly of the CRISPR-associated guide molecule with the nucleic acid-guided nuclease. In one embodiment the stem of the stem-loop is extended by at least 1, 2, 3, 4, 5 or more complementary base pairs (i.e., corresponding to the addition of 2,4, 6, 8, 10 or more nucleotides in the CRISPR-associated guide molecule). In one embodiment these are located at the end of the stem, adjacent to the loop of the stem-loop.

[0325] In one embodiment, the susceptibility of the CRISPR-associated guide molecule to RNases or to decreased expression can be reduced by slight modifications of the sequence of the CRISPR-associated guide molecule which do not affect its function. For instance, in one embodiment, premature termination of transcription, such as premature transcription of U6 Pol-III, can be removed by modifying a putative Pol-III terminator (4 consecutive U's) in the CRISPR-associated guide molecules sequence. Where such sequence modification is required in the stem-loop of the CRISPR-associated guide molecule, it is preferably ensured by a base pair flip.

[0326] In an embodiment, the CRISPR-associated guide molecule comprises non-naturally occurring nucleic acids and/or non-naturally occurring nucleotides and/or nucleotide analogs, and/or chemically modifications. Preferably, these non-naturally occurring nucleic acids and non-naturally occurring nucleotides are located outside the CRISPR-associated guide sequence. Non-naturally occurring nucleic acids can include, for example, mixtures of naturally and non-naturally occurring nucleotides. Non-naturally occurring nucleotides and/or nucleotide analogs may be modified at the ribose, phosphate, and/or base moiety. In an embodiment of the invention, a CRISPR-associated guide nucleic acid comprises ribonucleotides and non-ribonucleotides. In one such embodiment, a CRISPR-associated guide comprises one or more ribonucleotides and one or more deoxyribonucleotides. In an embodiment of the invention, the CRISPR-associated guide comprises one or more non-naturally occurring nucleotide or nucleotide analog such as a nucleotide with phosphorothioate linkage, locked nucleic acid (LNA) nucleotides comprising a methylene bridge between the 2′ and 4′ carbons of the ribose ring, or bridged nucleic acids (BNA). Other examples of modified nucleotides include 2′-O-methyl analogs, 2′-deoxy analogs, or 2′-fluoro analogs. Further examples of modified bases include, but are not limited to, 2-aminopurine, 5-bromo-uridine, pseudouridine, inosine, 7-methylguanosine. Examples of guide RNA chemical modifications include, without limitation, incorporation of 2′-O-methyl (M), 2′-O-methyl 3′phosphorothioate (MS), S-constrained ethyl(cEt), or 2′-O-methyl 3′thioPACE (MSP) at one or more terminal nucleotides. Such chemically modified CRISPR-associated guides can comprise increased stability and increased activity as compared to unmodified CRISPR-associated guides, though on-target vs. off-target specificity is not predictable. (See, Hendel, 2015, Nat Biotechnol. 33(9): 985-9, doi: 10.1038/nbt.3290, published online 29 Jun. 2015 Ragdarm et al., 0215, PNAS, E7110-E7111; Allerson et al., J. Med. Chem. 2005, 48:901-904; Bramsen et al., Front. Genet., 2012, 3:154; Deng et al., PNAS, 2015, 112:11870-11875; Sharma et al., MedChemComm., 2014, 5:1454-1471; Hendel et al., Nat. Biotechnol. (2015) 33(9): 985-989; Li et al., Nature Biomedical Engineering, 2017, 1, 0066 DOI: 10.1038/s41551-017-0066). In one embodiment, the 5′ and/or 3′ end of a CRISPR-associated guide RNA is modified by a variety of functional moieties including fluorescent dyes, polyethylene glycol, cholesterol, proteins, or detection tags. (See Kelly et al., 2016, J. Biotech. 233:74-83). In an embodiment, a CRISPR-associated guide comprises ribonucleotides in a region that binds to a target sequence and one or more deoxyribonucletides and/or nucleotide analogs in a region that binds to the nucleic acid-guided nuclease. In an embodiment, deoxyribonucleotides and/or nucleotide analogs are incorporated in engineered guide structures, such as, without limitation, stem-loop regions, and the seed region. In one embodiment, 3-5 nucleotides at either the 3′ or the 5′ end of a guide is chemically modified. In one embodiment, only minor modifications are introduced in the seed region, such as 2′-F modifications. In one embodiment, 2′-F modification is introduced at the 3′ end of a guide. In an embodiment, three to five nucleotides at the 5′ and/or the 3′ end of the CRISPR-associated guide are chemically modified with 2′-O-methyl(M), 2′-O-methyl 3′ phosphorothioate (MS), S-constrained ethyl(cEt), or 2′-O-methyl 3′ thioPACE (MSP). Such modification can enhance genome editing efficiency (see Hendel et al., Nat. Biotechnol. (2015) 33(9): 985-989). In an embodiment, all of the phosphodiester bonds of a CRISPR-associated guide are substituted with phosphorothioates (PS) for enhancing levels of gene disruption. In an embodiment, more than five nucleotides at the 5′ and/or the 3′ end of the CRISPR-associated guide are chemically modified with 2′-O-Me, 2′-F or S-constrained ethyl(cEt). Such chemically modified CRISPR-associated guide can mediate enhanced levels of gene disruption (see Ragdarm et al., 0215, PNAS, E7110-E7111). In an embodiment of the invention, a CRISPR-associated guide is modified to comprise a chemical moiety at its 3′ and/or 5′ end. Such moieties include, but are not limited to amine, azide, alkyne, thio, dibenzocyclooctyne (DBCO), or Rhodamine. In certain embodiment, the chemical moiety is conjugated to the CRISPR-associated guide by a linker, such as an alkyl chain. In an embodiment, the chemical moiety of the modified CRISPR-associated guide can be used to attach the CRISPR-associated guide to another molecule, such as DNA, RNA, protein, or nanoparticles. Such chemically modified CRISPR-associated guide can be used to identify or enrich cells generically edited by a nucleic acid-guided nuclease and related systems (see Lee et al., eLife, 2017, 6: e25312, DOI: 10.7554).

[0327] In a particular embodiment, the direct repeat may be modified to comprise one or more protein-binding RNA aptamers. In a particular embodiment, one or more aptamers may be included such as part of optimized secondary structure. Such aptamers may be capable of binding a bacteriophage coat protein as detailed further herein.

[0328] In one embodiment, the nucleic acid-guided nuclease may need a tracr sequence. The “tracrRNA” sequence or analogous terms includes any polynucleotide sequence that has sufficient complementarity with a crRNA sequence to hybridize. In one embodiment, the degree of complementarity between the tracrRNA sequence and crRNA sequence along the length of the shorter of the two when optimally aligned is about or more than about 25%, 30%, 40%, 50%, 60%, 70%, 80%, 90%, 95%, 97.5%, 99%, or higher. In one embodiment, the tracr sequence is about or more than about 5, 6, 7, 8, 9, 10, 11, 12, 13, 14, 15, 16, 17, 18, 19, 20, 25, 30, 40, 50, or more nucleotides in length. In one embodiment, the tracr sequence and CRISPR-associated guide sequence are contained within a single transcript, such that hybridization between the two produces a transcript having a secondary structure, such as a hairpin. In an embodiment of the invention, the transcript or transcribed polynucleotide sequence has at least two or more hairpins. In preferred embodiments, the transcript has two, three, four or five hairpins. In a further embodiment of the invention, the transcript has at most five hairpins. In a hairpin structure the portion of the sequence 5′ of the final “N” and upstream of the loop may correspond to the tracr mate sequence, and the portion of the sequence 3′ of the loop then corresponds to the tracr sequence. In a hairpin structure the portion of the sequence 5′ of the final “N” and upstream of the loop may alternatively correspond to the tracr sequence, and the portion of the sequence 3′ of the loop corresponds to the tracr mate sequence.

[0329] In one embodiment, the tracr and tracr mate sequences can be chemically synthesized. In one embodiment, the chemical synthesis uses automated, solid-phase oligonucleotide synthesis machines with 2′-acetoxyethyl orthoester (2′-ACE) (Scaringe et al., J. Am. Chem. Soc. (1998) 120:11820-11821; Scaringe, Methods Enzymol. (2000) 317:3-18) or 2′-thionocarbamate (2′-TC) chemistry (Dellinger et al., J. Am. Chem. Soc. (2011) 133:11540-11546; Hendel et al., Nat. Biotechnol. (2015) 33:985-989).

[0330] In one embodiment, the tracr and tracr mate sequences can be covalently linked using various bioconjugation reactions, loops, bridges, and non-nucleotide links via modifications of sugar, internucleotide phosphodiester bonds, purine and pyrimidine residues. Sletten et al., Angew. Chem. Int. Ed. (2009) 48:6974-6998; Manoharan, M. Curr. Opin. Chem. Biol. (2004) 8:570-9; Behlke et al., Oligonucleotides (2008) 18:305-19; Watts, et al., Drug. Discov. Today (2008) 13:842-55; Shukla, et al., ChemMedChem (2010) 5:328-49.

[0331] In one embodiment, the tracr and tracr mate sequences can be covalently linked using click chemistry. In one embodiment, the tracr and tracr mate sequences can be covalently linked using a triazole linker. In one embodiment, the tracr and tracr mate sequences can be covalently linked using Huisgen 1,3-dipolar cycloaddition reaction involving an alkyne and azide to yield a highly stable triazole linker (He et al., ChemBioChem (2015) 17:1809-1812; WO 2016/186745). In one embodiment, the tracr and tracr mate sequences are covalently linked by ligating a 5′-hexyne tracrRNA and a 3′-azide crRNA. In one embodiment, either or both of the 5′-hexyne tracrRNA and a 3′-azide crRNA can be protected with 2′-acetoxyethl orthoester (2′-ACE) group, which can be subsequently removed using Dharmacon protocol (Scaringe et al., J. Am. Chem. Soc. (1998) 120:11820-11821; Scaringe, Methods Enzymol. (2000) 317:3-18).

[0332] In one embodiment, the tracr and tracr mate sequences can be covalently linked via a linker (e.g., a non-nucleotide loop) that comprises a moiety such as spacers, attachments, bioconjugates, chromophores, reporter groups, dye labeled RNAs, and non-naturally occurring nucleotide analogues. More specifically, suitable spacers for purposes of this invention include, but are not limited to, polyethers (e.g., polyethylene glycols, polyalcohols, polypropylene glycol or mixtures of efhylene and propylene glycols), polyamines group (e.g., spennine, spermidine and polymeric derivatives thereof), polyesters (e.g., poly(ethyl acrylate)), polyphosphodiesters, alkylenes, and combinations thereof. Suitable attachments include any moiety that can be added to the linker to add additional properties to the linker, such as but not limited to, fluorescent labels. Suitable bioconjugates include, but are not limited to, peptides, glycosides, lipids, cholesterol, phospholipids, diacyl glycerols and dialkyl glycerols, fatty acids, hydrocarbons, enzyme substrates, steroids, biotin, digoxigenin, carbohydrates, polysaccharides. Suitable chromophores, reporter groups, and dye-labeled RNAs include, but are not limited to, fluorescent dyes such as fluorescein and rhodamine, chemiluminescent, electrochemiluminescent, and bioluminescent marker compounds. The design of example linkers conjugating two RNA components are also described in WO 2004/015075.

[0333] The linker (e.g., a non-nucleotide loop) can be of any length. In one embodiment, the linker has a length equivalent to about 0-16 nucleotides. In one embodiment, the linker has a length equivalent to about 0-8 nucleotides. In one embodiment, the linker has a length equivalent to about 0-4 nucleotides. In one embodiment, the linker has a length equivalent to about 2 nucleotides. Example linker design is also described in International Patent Publication No. WO 2011/008730.

[0334] In an embodiment, the nucleic acid-guided nuclease uses of a tracrRNA, the CRISPR-associated guide sequence, tracr mate, and tracr sequence may reside in a single RNA, i.e., an sgRNA (arranged in a 5′ to 3′ orientation or alternatively arranged in a 3′ to 5′ orientation), or the tracr RNA may be a different RNA than the RNA containing the CRISPR-associated guide and tracr mate sequence. In these embodiments, the tracr hybridizes to the tracr mate sequence and directs the nucleic acid-guided nuclease-guide molecule complex to the target sequence. In some examples, a CRISPR-associated sgRNA comprises (in 5′ to 3′ direction): a CRISPR-associated guide sequence, a poly U tract, a first complimentary stretch (the “repeat”), a loop (tetraloop), a second complimentary stretch (the “anti-repeat” being complimentary to the repeat), a stem, and further stem loops and stems and a poly A (often poly U in RNA) tail (terminator). In preferred embodiments, certain aspects of CRISPR-associated guide architecture are retained, certain aspect of CRISPR-associated guide architecture cam be modified, for example by addition, subtraction, or substitution of features, whereas certain other aspects of CRISPR-associated guide architecture are maintained. Preferred locations for engineered CRISPR-associated sgRNA modifications, including but not limited to insertions, deletions, and substitutions include CRISPR-associated guide termini and regions of the CRISPR-associated sgRNA that are exposed when complexed with nucleic acid-guided nuclease and/or target, for example the tetraloop and/or loop2.

[0335] In one embodiment, the CRISPR-associated guide molecule comprises, in addition the CRISPR-associated guide sequence, a sequence corresponding to a direct repeat in the CRISPR locus. In one embodiment, this sequence comprises at least one hairpin, i.e., a region of self-complementarity. In one embodiment, the CRISPR-associated guide sequence is 3′ of the direct repeat comprising at least one hairpin. In further embodiments, the CRISPR-associated guide sequence is 5′ of the direct repeat comprising at least one hairpin. In one embodiment, a hairpin is located in the middle of the CRISPR-associated guide sequence, i.e., the CRISPR-associated guide sequence is in part 5′ and in part 3′ of the direct repeat. The hairpin in the middle of the CRISPR-associated guide sequence may be involved in recognition or processing of the guide molecule. In one embodiment, the hairpin structure comprises at least 5, preferably 7-20 nucleotides.

### Escorted Guides

[0336] In one embodiment, the compositions or complexes have a CRISPR-associated guide molecule with a functional structure designed to improve CRISPR-associated guide molecule structure, architecture, stability, genetic expression, or any combination thereof. Such a structure can include an aptamer.

[0337] Aptamers are biomolecules that can be designed or selected to bind tightly to other ligands, for example using a technique called systematic evolution of ligands by exponential enrichment (SELEX; Tuerk C, Gold L: “Systematic evolution of ligands by exponential enrichment: RNA ligands to bacteriophage T4 DNA polymerase.” Science 1990, 249:505-510). Nucleic acid aptamers can for example be selected from pools of random-sequence oligonucleotides, with high binding affinities and specificities for a wide range of biomedically relevant targets, suggesting a wide range of therapeutic utilities for aptamers (Keefe, Anthony D., Supriya Pai, and Andrew Ellington. “Aptamers as therapeutics.” Nature Reviews Drug Discovery 9.7(2010): 537-550). These characteristics also suggest a wide range of uses for aptamers as drug delivery vehicles (Levy-Nissenbaum, Etgar, et al. “Nanotechnology and aptamers: applications in drug delivery.” Trends in biotechnology 26.8(2008): 442-449; and, Hicke B J, Stephens A W. “Escort aptamers: a delivery service for diagnosis and therapy.” J Clin Invest 2000, 106:923-928.). Aptamers may also be constructed that function as molecular switches, responding to a que by changing properties, such as RNA aptamers that bind fluorophores to mimic the activity of green fluorescent protein (Paige, Jeremy S., Karen Y. Wu, and Samie R. Jaffrey. “RNA mimics of green fluorescent protein.” Science 333.6042 (2011): 642-646). It has also been suggested that aptamers may be used as components of targeted siRNA therapeutic delivery systems, for example targeting cell surface proteins (Zhou, Jiehua, and John J. Rossi. “Aptamer-targeted cell-specific RNA interference.” Silence 1.1 (2010): 4).

[0338] Accordingly, in one embodiment, the CRISPR-associated guide molecule is modified, e.g., by one or more aptamer(s) designed to improve CRISPR-associated guide molecule delivery, including delivery across the cellular membrane, to intracellular compartments, or into the nucleus. Such a structure can include, either in addition to the one or more aptamer(s) or without such one or more aptamer(s), moiety (ies) so as to render the CRISPR-associated guide molecule deliverable, inducible or responsive to a selected effector. The invention accordingly comprehends a CRISPR-associated guide molecule that responds to normal or pathological physiological conditions, including without limitation pH, hypoxia, O2 concentration, temperature, protein concentration, enzymatic concentration, lipid structure, light exposure, mechanical disruption (e.g., ultrasound waves), magnetic fields, electric fields, or electromagnetic radiation.

[0339] Light responsiveness of an inducible system may be achieved via the activation and binding of cryptochrome-2 and CIB1. Blue light stimulation induces an activating conformational change in cryptochrome-2, resulting in recruitment of its binding partner CIB1. This binding is fast and reversible, achieving saturation in <15 sec following pulsed stimulation and returning to baseline <15 min after the end of stimulation. These rapid binding kinetics result in a system temporally bound only by the speed of transcription/translation and transcript/protein degradation, rather than uptake and clearance of inducing agents. Crytochrome-2 activation is also highly sensitive, allowing for the use of low light intensity stimulation and mitigating the risks of phototoxicity. Further, in a context such as the intact mammalian brain, variable light intensity may be used to control the size of a stimulated region, allowing for greater precision than vector delivery alone may offer.

[0340] Energy sources such as electromagnetic radiation, sound energy or thermal energy may induce the CRISPR-associated guide. Advantageously, the electromagnetic radiation is a component of visible light. In a preferred embodiment, the light is a blue light with a wavelength of about 450 to about 495 nm. In an especially preferred embodiment, the wavelength is about 488 nm. In another preferred embodiment, the light stimulation is via pulses. The light power may range from about 0-9 mW/cm2. In a preferred embodiment, a stimulation paradigm of as low as 0.25 sec every 15 sec should result in maximal activation.

[0341] The chemical or energy sensitive CRISPR-associated guide may undergo a conformational change upon induction by the binding of a chemical source or by the energy allowing it act as a CRISPR-associated guide and have the nucleic acid-guided nuclease system or complex function. The invention can involve applying the chemical source or energy so as to have the CRISPR-associated guide function and the nucleic acid-guided nuclease system or complex function; and optionally further determining that the expression of the genomic locus is altered.

[0342] There are several different designs of this chemical inducible system: 1. ABI-PYL based system inducible by Abscisic Acid (ABA) (see, e.g., stke.sciencemag.org/cgi/content/abstract/sigtrans;4/164/rs2), 2. FKBP-FRB based system inducible by rapamycin (or related chemicals based on rapamycin) (see, e.g., www.nature.com/nmeth/journal/v2/n6/full/nmeth763.html), 3. GID1-GAI based system inducible by Gibberellin (GA) (see, e.g., www.nature.com/nchembio/journal/v8/n5/full/nchembio.922.html).

[0343] A chemical inducible system can be an estrogen receptor (ER) based system inducible by 4-hydroxytamoxifen (4OHT) (see, e.g., www.pnas.org/content/104/3/1027.abstract). A mutated ligand-binding domain of the estrogen receptor called ERT2 translocates into the nucleus of cells upon binding of 4-hydroxytamoxifen. In further embodiments of the invention any naturally occurring or engineered derivative of any nuclear receptor, thyroid hormone receptor, retinoic acid receptor, estrogen receptor, estrogen-related receptor, glucocorticoid receptor, progesterone receptor, androgen receptor may be used in inducible systems analogous to the ER based inducible system.

[0344] Another inducible system is based on the design using Transient receptor potential (TRP) ion channel-based system inducible by energy, heat or radio-wave (see, e.g., www.sciencemag.org/content/336/6081/604). These TRP family proteins respond to different stimuli, including light and heat. When this protein is activated by light or heat, the ion channel will open and allow the entering of ions such as calcium into the plasma membrane. This influx of ions will bind to intracellular ion interacting partners linked to a polypeptide including the guide and the other components of the nucleic acid-guided nuclease/CRISPR-associated guide molecule complex or system, and the binding will induce the change of sub-cellular localization of the polypeptide, leading to the entire polypeptide entering the nucleus of cells. Once inside the nucleus, the guide protein and the other components of the nucleic acid-guided nuclease/CRISPR-associated guide molecule complex will be active and modulating target gene expression in cells.

[0345] While light activation may be an advantageous embodiment, sometimes it may be disadvantageous especially for in vivo applications in which the light may not penetrate the skin or other organs. In this instance, other methods of energy activation are contemplated, in particular, electric field energy and/or ultrasound which have a similar effect.

[0346] Electric field energy is preferably administered substantially as described in the art, using one or more electric pulses of from about 1 Volt/cm to about 10 k Volts/cm under in vivo conditions. Instead of or in addition to the pulses, the electric field may be delivered in a continuous manner. The electric pulse may be applied for between 1 μs and 500 milliseconds, preferably between 1 μs and 100 milliseconds. The electric field may be applied continuously or in a pulsed manner for 5 about minutes.

[0347] As used herein, ‘electric field energy’ is the electrical energy to which a cell is exposed. Preferably the electric field has a strength of from about 1 Volt/cm to about 10 k Volts/cm or more under in vivo conditions (see WO97/49450).

[0348] As used herein, the term “electric field” includes one or more pulses at variable capacitance and voltage and including exponential and/or square wave and/or modulated wave and/or modulated square wave forms. References to electric fields and electricity should be taken to include reference the presence of an electric potential difference in the environment of a cell. Such an environment may be set up by way of static electricity, alternating current (AC), direct current (DC), etc., as known in the art. The electric field may be uniform, non-uniform or otherwise, and may vary in strength and/or direction in a time dependent manner.

[0349] Single or multiple applications of electric field, as well as single or multiple applications of ultrasound are also possible, in any order and in any combination. The ultrasound and/or the electric field may be delivered as single or multiple continuous applications, or as pulses (pulsatile delivery).

[0350] Electroporation has been used in both in vitro and in vivo procedures to introduce foreign material into living cells. With in vitro applications, a sample of live cells is first mixed with the agent of interest and placed between electrodes such as parallel plates. Then, the electrodes apply an electrical field to the cell/implant mixture. Examples of systems that perform in vitro electroporation include the Electro Cell Manipulator ECM600 product, and the Electro Square Porator T820, both made by the BTX Division of Genetronics, Inc (see U.S. Pat. No. 5,869,326).

[0351] The known electroporation techniques (both in vitro and in vivo) function by applying a brief high voltage pulse to electrodes positioned around the treatment region. The electric field generated between the electrodes causes the cell membranes to temporarily become porous, whereupon molecules of the agent of interest enter the cells. In known electroporation applications, this electric field comprises a single square wave pulse on the order of 1000 V/cm, of about 100 mus duration. Such a pulse may be generated, for example, in known applications of the Electro Square Porator T820.

[0352] Preferably, the electric field has a strength of from about 1 V/cm to about 10 kV/cm under in vitro conditions. Thus, the electric field may have a strength of 1 V/cm, 2 V/cm, 3 V/cm, 4 V/cm, 5 V/cm, 6 V/cm, 7 V/cm, 8 V/cm, 9 V/cm, 10 V/cm, 20 V/cm, 50 V/cm, 100 V/cm, 200 V/cm, 300 V/cm, 400 V/cm, 500 V/cm, 600 V/cm, 700 V/cm, 800 V/cm, 900 V/cm, 1 kV/cm, 2 kV/cm, 5 kV/cm, 10 kV/cm, 20 kV/cm, 50 kV/cm or more. More preferably from about 0.5 kV/cm to about 4.0 kV/cm under in vitro conditions. Preferably the electric field has a strength of from about 1 V/cm to about 10 kV/cm under in vivo conditions. However, the electric field strengths may be lowered where the number of pulses delivered to the target site are increased. Thus, pulsatile delivery of electric fields at lower field strengths is envisaged.

[0353] Preferably, the application of the electric field is in the form of multiple pulses such as double pulses of the same strength and capacitance or sequential pulses of varying strength and/or capacitance. As used herein, the term “pulse” includes one or more electric pulses at variable capacitance and voltage and including exponential and/or square wave and/or modulated wave/square wave forms.

[0354] Preferably, the electric pulse is delivered as a waveform selected from an exponential wave form, a square wave form, a modulated wave form and a modulated square wave form.

[0355] A preferred embodiment employs direct current at low voltage. Thus, Applicants disclose the use of an electric field which is applied to the cell, tissue or tissue mass at a field strength of between 1V/cm and 20V/cm, for a period of 100 milliseconds or more, preferably 15 minutes or more.

[0356] Ultrasound is advantageously administered at a power level of from about 0.05 W/cm2 to about 100 W/cm2. Diagnostic or therapeutic ultrasound may be used, or combinations thereof.

[0357] As used herein, the term “ultrasound” refers to a form of energy which consists of mechanical vibrations the frequencies of which are so high they are above the range of human hearing. Lower frequency limit of the ultrasonic spectrum may generally be taken as about 20 kHz. Most diagnostic applications of ultrasound employ frequencies in the range 1 and 15 MHz′ (From Ultrasonics in Clinical Diagnosis, P. N. T. Wells, ed., 2nd. Edition, Publ. Churchill Livingstone [Edinburgh, London & NY, 1977]).

[0358] Ultrasound has been used in both diagnostic and therapeutic applications. When used as a diagnostic tool (“diagnostic ultrasound”), ultrasound is typically used in an energy density range of up to about 100 mW/cm2 (FDA recommendation), although energy densities of up to 750 mW/cm2 have been used. In physiotherapy, ultrasound is typically used as an energy source in a range up to about 3 to 4 W/cm2 (WHO recommendation). In other therapeutic applications, higher intensities of ultrasound may be employed, for example, HIFU at 100 W/cm up to 1 kW/cm2 (or even higher) for short periods of time. The term “ultrasound” as used in this specification is intended to encompass diagnostic, therapeutic and focused ultrasound.

[0359] Focused ultrasound (FUS) allows thermal energy to be delivered without an invasive probe (see Morocz et al 1998 Journal of Magnetic Resonance Imaging Vol. 8, No. 1, pp. 136-142. Another form of focused ultrasound is high intensity focused ultrasound (HIFU) which is reviewed by Moussatov et al in Ultrasonics (1998) Vol. 36, No. 8, pp. 893-900 and TranHuuHue et al in Acustica (1997) Vol. 83, No. 6, pp. 1103-1106.

[0360] Preferably, a combination of diagnostic ultrasound and a therapeutic ultrasound is employed. This combination is not intended to be limiting, however, and the skilled reader will appreciate that any variety of combinations of ultrasound may be used. Additionally, the energy density, frequency of ultrasound, and period of exposure may be varied.

[0361] Preferably, the exposure to an ultrasound energy source is at a power density of from about 0.05 to about 100 Wcm-2. Even more preferably, the exposure to an ultrasound energy source is at a power density of from about 1 to about 15 Wcm-2.

[0362] Preferably, the exposure to an ultrasound energy source is at a frequency of from about 0.015 to about 10.0 MHz. More preferably the exposure to an ultrasound energy source is at a frequency of from about 0.02 to about 5.0 MHz or about 6.0 MHz. Most preferably, the ultrasound is applied at a frequency of 3 MHz.

[0363] Preferably the exposure is for periods of from about 10 milliseconds to about 60 minutes. Preferably the exposure is for periods of from about 1 second to about 5 minutes. More preferably, the ultrasound is applied for about 2 minutes. Depending on the particular target cell to be disrupted, however, the exposure may be for a longer duration, for example, for 15 minutes.

[0364] Advantageously, the target tissue is exposed to an ultrasound energy source at an acoustic power density of from about 0.05 Wcm-2 to about 10 Wcm-2 with a frequency ranging from about 0.015 to about 10 MHz (see WO 98/52609). However, alternatives are also possible, for example, exposure to an ultrasound energy source at an acoustic power density of above 100 Wcm-2, but for reduced periods of time, for example, 1000 Wcm-2 for periods in the millisecond range or less.

[0365] Preferably, the application of the ultrasound is in the form of multiple pulses; thus, both continuous wave and pulsed wave (pulsatile delivery of ultrasound) may be employed in any combination. For example, continuous wave ultrasound may be applied, followed by pulsed wave ultrasound, or vice versa. This may be repeated any number of times, in any order and combination. The pulsed wave ultrasound may be applied against a background of continuous wave ultrasound, and any number of pulses may be used in any number of groups.

[0366] Preferably, the ultrasound may comprise pulsed wave ultrasound. In a highly preferred embodiment, the ultrasound is applied at a power density of 0.7 Wcm-2 or 1.25 Wcm-2 as a continuous wave. Higher power densities may be employed if pulsed wave ultrasound is used.

[0367] Use of ultrasound is advantageous as, like light, it may be focused accurately on a target. Moreover, ultrasound is advantageous as it may be focused more deeply into tissues unlike light. It is therefore better suited to whole-tissue penetration (such as but not limited to a lobe of the liver) or whole organ (such as but not limited to the entire liver or an entire muscle, such as the heart) therapy. Another important advantage is that ultrasound is a non-invasive stimulus which is used in a wide variety of diagnostic and therapeutic applications. By way of example, ultrasound is well known in medical imaging techniques and, additionally, in orthopedic therapy. Furthermore, instruments suitable for the application of ultrasound to a subject vertebrate are widely available and their use is well known in the art.

[0368] In one embodiment, the CRISPR-associated guide molecule is modified by a secondary structure to increase the specificity of the nucleic acid-guided nuclease and related system and the secondary structure can protect against exonuclease activity and allow for 5′ additions to the guide sequence also referred to herein as a protected CRISPR-associated guide molecule.

[0369] In one aspect, the invention provides for hybridizing a “protector RNA” to a sequence of the CRISPR-associated guide molecule, wherein the “protector RNA” is an RNA strand complementary to the 3′ end of the guide molecule to thereby generate a partially double-stranded CRISPR-associated guide RNA. In an embodiment of the invention, protecting mismatched bases (i.e., the bases of the guide molecule which do not form part of the guide sequence) with a perfectly complementary protector sequence decreases the likelihood of target DNA binding to the mismatched base pairs at the 3′ end. In one embodiment of the invention, additional sequences comprising an extended length may also be present within the CRISPR-associated guide molecule such that the CRISPR-associated guide comprises a protector sequence within the CRISPR-associated guide molecule. This “protector sequence” ensures that the CRISPR-associated guide molecule comprises a “protected sequence” in addition to an “exposed sequence” (comprising the part of the CRISPR-associated guide sequence hybridizing to the target sequence). In one embodiment, the CRISPR-associated guide molecule is modified by the presence of the protector guide to comprise a secondary structure such as a hairpin. Advantageously, there are three or four to thirty or more, e.g., about 10 or more, contiguous base pairs having complementarity to the protected sequence, the CRISPR-associated guide sequence or both. It is advantageous that the protected portion does not impede thermodynamics of the nucleic acid-guided nuclease and related system interacting with its target. By providing such an extension including a partially double stranded CRISPR-associated guide molecule, the CRISPR-associated guide molecule is considered protected and results in improved specific binding of the nucleic acid-guided nuclease/CRISPR-associated guide molecule complex, while maintaining specific activity.

[0370] In one embodiment, use is made of a truncated CRISPR-associated guide (tru-CRISPR-associated guide), i.e., a CRISPR-associated guide molecule which comprises a CRISPR-associated guide sequence which is truncated in length with respect to the canonical CRISPR-associated guide sequence length. As described by Nowak et al. (Nucleic Acids Res (2016) 44(20): 9555-9564), such guides may allow catalytically active nucleic acid-guided nuclease to bind its target without cleaving the target DNA. In one embodiment, a truncated CRISPR-associated guide is used which allows the binding of the target but retains only nickase activity of the nucleic acid-guided nuclease.

[0371] In one embodiment, conjugation of triantennary N-acetyl galactosamine (GalNAc) to oligonucleotide components may be used to improve delivery, for example delivery to select cell types, for example hepatocytes (see International Patent Publication No. WO 2014/118272 incorporated herein by reference; Nair, J K et al., 2014, Journal of the American Chemical Society 136(49), 16958-16961). This is considered to be a sugar-based particle and further details on other particle delivery systems and/or formulations are provided herein. GalNAc can therefore be considered to be a particle in the sense of the other particles described herein, such that general uses and other considerations, for instance delivery of said particles, apply to GalNAc particles as well. A solution-phase conjugation strategy may for example be used to attach triantennary GalNAc clusters (mol. wt. ˜2000) activated as PFP (pentafluorophenyl) esters onto 5′-hexylamino modified oligonucleotides (5′-HA ASOs, mol. wt. ˜8000 Da; Østergaard et al., Bioconjugate Chem., 2015, 26(8), pp 1451-1455). Similarly, poly(acrylate) polymers have been described for in vivo nucleic acid delivery (see WO2013158141 incorporated herein by reference). In further alternative embodiments, pre-mixing nucleic acid-guided nuclease nanoparticles (or protein complexes) with naturally occurring serum proteins may be used in order to improve delivery (Akinc A et al, 2010, Molecular Therapy vol. 18 no. 7, 1357-1364).

[0372] Screening techniques are available to identify delivery enhancers, for example by screening chemical libraries (Gilleron J. et al., 2015, Nucl. Acids Res. 43(16): 7984-8001). Approaches have also been described for assessing the efficiency of delivery vehicles, such as lipid nanoparticles, which may be employed to identify effective delivery vehicles for components (see Sahay G. et al., 2013, Nature Biotechnology 31, 653-658).

### Systems and Complexes

[0373] In one aspect, the present disclosure provides nucleic acid-targeting systems. Such systems may be used to target, modify, and otherwise manipulate a nucleic acid. In one embodiment, the systems comprise the IscB polypeptide or CRISPR-associated IscB polypeptide nuclease and one or more ωRNAs or guide RNAs. The IscB polypeptide or CRISPR-associated IscB polypeptide nuclease may have nuclease activity, e.g., capable of cleaving DNA or RNA. The IscB polypeptide or CRISPR-associated IscB polypeptide nuclease may have nickase activity, e.g., capable of generating a single-strand break on a double-strand nucleic acid such as dsDNA or dsRNA.

[0374] In some examples, two or more of the components in a system herein may form a complex. For example, the components are separate molecules but interact with each other directly or indirectly. In certain two or more of the components in a system herein may be comprised in a fusion protein.

[0375] As used herein, “target sequence” refers to a sequence to which a guide sequence is designed to have complementarity, where hybridization between a target sequence and a guide RNA promotes the formation of a DNA or RNA-targeting complex. Full complementarity is not necessarily required, provided there is sufficient complementarity to cause hybridization and promote formation of a nucleic acid-targeting complex. A target sequence may comprise RNA polynucleotides. In one embodiment, a target sequence is located in the nucleus or cytoplasm of a cell. In one embodiment, the target sequence may be within an organelle of a eukaryotic cell, for example, mitochondrion or chloroplast. A sequence or template that may be used for recombination into the targeted locus comprising the target sequences is referred to as an “editing template” or “editing sequence”. In aspects of the invention, an exogenous template may be referred to as an editing template. In an aspect the recombination is homologous recombination.

[0376] In one embodiment, formation of a nucleic acid-targeting complex (comprising a guide RNA hybridized to a target sequence and complexed with one or more nucleic acid-targeting effector proteins) results in cleavage of one or both nucleic acid strands in or near (e.g., within 1, 2, 3, 4, 5, 6, 7, 8, 9, 10, 20, 50, or more base pairs from) the target sequence. In one embodiment, one or more vectors driving expression of one or more elements of a nucleic acid-targeting system are introduced into a host cell such that expression of the elements of the nucleic acid-targeting system direct formation of a nucleic acid-targeting complex at one or more target sites. For example, a nucleic acid-targeting effector protein and a ωRNA or guide RNA could each be operably linked to separate regulatory elements on separate vectors. Alternatively, two or more of the elements expressed from the same or different regulatory elements, may be combined in a single vector, with one or more additional vectors providing any components of the nucleic acid-targeting system not included in the first vector. nucleic acid-targeting system elements that are combined in a single vector may be arranged in any suitable orientation, such as one element located 5′ with respect to (“upstream” of) or 3′ with respect to (“downstream” of) a second element. The coding sequence of one element may be located on the same or opposite strand of the coding sequence of a second element, and oriented in the same or opposite direction. In one embodiment, a single promoter drives expression of a transcript encoding a nucleic acid-targeting effector protein and a guide RNA embedded within one or more intron sequences (e.g., each in a different intron, two or more in at least one intron, or all in a single intron). In one embodiment, the nucleic acid-targeting effector protein and guide RNA are operably linked to and expressed from the same promoter.

[0377] The present disclosure encompasses computational methods and algorithms to predict new IscB polypeptide or CRISPR-associated IscB polypeptide nuclease, identify the components, and new nucleic acid-targeting systems therein. In some examples, a computational method of identifying novel IscB polypeptide or CRISPR-associated IscB polypeptide nuclease loci analysis of the candidates may be conducted by searching metagenomics databases for additional homologs.

[0378] In one aspect, the identifying all predicted protein coding genes is carried out by comparing the identified genes with IscB polypeptide or CRISPR-associated IscB polypeptide-specific profiles and annotating them according to NCBI Conserved Domain Database (CDD) which is a protein annotation resource that consists of a collection of well-annotated multiple sequence alignment models for ancient domains and full-length proteins. These are available as position-specific score matrices (PSSMs) for fast identification of conserved domains in protein sequences via RPS-BLAST. CDD content includes NCBI-curated domains, which use 3D-structure information to explicitly define domain boundaries and provide insights into sequence/structure/function relationships, as well as domain models imported from a number of external source databases (Pfam, SMART, COG, PRK, TIGRFAM).

[0379] In a further aspect, the case-by-case analysis is performed using PSI-BLAST (Position-Specific Iterative Basic Local Alignment Search Tool). PSI-BLAST derives a position-specific scoring matrix (PSSM) or profile from the multiple sequence alignment of sequences detected above a given score threshold using protein-protein BLAST. This PSSM is used to further search the database for new matches, and is updated for subsequent iterations with these newly detected sequences. Thus, PSI-BLAST provides a means of detecting distant relationships between proteins.

[0380] In another aspect, the case-by-case analysis is performed using HHpred, a method for sequence database searching and structure prediction that is as easy to use as BLAST or PSI-BLAST and that is at the same time much more sensitive in finding remote homologs. In fact, HHpred's sensitivity is competitive with the most powerful servers for structure prediction currently available. HHpred is the first server that is based on the pairwise comparison of profile hidden Markov models (HMMs). Whereas most conventional sequence search methods search sequence databases such as UniProt or the NR, HHpred searches alignment databases, like Pfam or SMART. This greatly simplifies the list of hits to a number of sequence families instead of a clutter of single sequences. All major publicly available profile and alignment databases are available through HHpred. HHpred accepts a single query sequence or a multiple alignment as input. Within only a few minutes it returns the search results in an easy-to-read format similar to that of PSI-BLAST. Search options include local or global alignment and scoring secondary structure similarity. HHpred can produce pairwise query-template sequence alignments, merged query-template multiple alignments (e.g., for transitive searches), as well as 3D structural models calculated by the MODELLER software from HHpred alignments.

### Specialized Systems

[0381] The IscB polypeptide or CRISPR-associated IscB polypeptide nuclease may be in a dead form, e.g., has nickase activity, or does not have nuclease or nickase activity. In one embodiment, the systems further comprising one or more functional domains, e.g., nucleotide deaminase, reverse transcriptase, non-LTR retrotransposon (and protein encoded), polymerase, diversity generating element (and protein encoded). In some examples, the systems further comprise one or more donor polynucleotides. The donor polynucleotides may be inserted to a target polynucleotide by the systems. The donor polynucleotide may be comprised in or coded by a nucleic acid template.

### IscB Base Editing Systems

[0382] The present disclosure also provides for base editing systems. In general, such a system may comprise a deaminase (e.g., an adenosine deaminase or cytidine deaminase) associated (e.g., fused) with a IscB polypeptide nuclease, e.g., IscB protein. The IscB polypeptide nuclease may be a dead IscB polypeptide nuclease (such as a IscB polypeptide nickase, e.g., engineered from a IscB polypeptide nuclease). In certain examples, the nucleotide deaminase is a mutated form of an adenosine deaminase. The mutated form of the adenosine deaminase may have both adenosine deaminase and cytidine deaminase activities.

[0383] In some examples, the present disclosure provides an engineered, non-naturally occurring composition comprising: the nucleic acid-guided nuclease that is catalytically inactive, a nucleotide deaminase associated with or otherwise capable of forming a complex with the IscB protein, and a single hRNA molecule or single guide RNA molecule capable of forming a complex with the IscB protein and directing site-specific binding at a target sequence.

[0384] In one aspect, the present disclosure provides an engineered adenosine deaminase. The engineered adenosine deaminase may comprise one or more mutations herein. In one embodiment, the engineered adenosine deaminase has cytidine deaminase activity. In certain examples, the engineered adenosine deaminase has both cytidine deaminase activity and adenosine deaminase. In some cases, the modifications by base editors herein may be used for targeting post-translational signaling or catalysis. In one embodiment, compositions herein comprise nucleotide sequence comprising encoding sequences for one or more components of a base editing system. A base-editing system may comprise a deaminase (e.g., an adenosine deaminase or cytidine deaminase) fused with a IscB polypeptide nuclease or a variant thereof.

[0385] In some cases, the target polynucleotide is edited at one or more bases to introduce a G→A or C→T mutation.

[0386] In some cases, the adenosine deaminase is double-stranded RNA-specific adenosine deaminase (ADAR). Examples of ADARs include those described Yiannis A Savva et al., The ADAR protein family, Genome Biol. 2012; 13(12): 252, which is incorporated by reference in its entirety. In some examples, the ADAR may be hADAR1. In certain examples, the ADAR may be hADAR2. The sequence of hADAR2 may be that described under Accession No. AF525422.1.

[0387] In some cases, the deaminase may be a deaminase domain, e.g., a deaminase domain of ADAR (“ADAR-D”). In one example, the deaminase may be the deaminase domain of hADAR2 (“hADAR2-D), e.g., as described in Phelps K J et al., Recognition of duplex RNA by the deaminase domain of the RNA editing enzyme ADAR2. Nucleic Acids Res. 2015 January; 43(2): 1123-32, which is incorporated by reference herein in its entirety. In a particular example, the hADAR2-D has a sequence comprising amino acid 299-701 of hADAR2-D, e.g., amino acid 299-701 of the sequence under Accession No. AF525422.1.

[0388] In certain examples, the system comprises a mutated form of an adenosine deaminase fused with a dead IscB polypeptide nuclease (e.g., a IscB polypeptide nickase). The mutated form of the adenosine deaminase may have both adenosine deaminase and cytidine deaminase activities. In one embodiment, the adenosine deaminase may comprise one or more of the mutations: E488Q based on amino acid sequence positions of hADAR2-D, and mutations in a homologous ADAR protein corresponding to the above. In one embodiment, the adenosine deaminase may comprise one or more of the mutations: E488Q, V351G, based on amino acid sequence positions of hADAR2-D, and mutations in a homologous ADAR protein corresponding to the above. In one embodiment, the adenosine deaminase may comprise one or more of the mutations: E488Q, V351G, S486A, based on amino acid sequence positions of hADAR2-D, and mutations in a homologous ADAR protein corresponding to the above. In one embodiment, the adenosine deaminase may comprise one or more of the mutations: E488Q, V351G, S486A, T375S, based on amino acid sequence positions of hADAR2-D, and mutations in a homologous ADAR protein corresponding to the above. In one embodiment, the adenosine deaminase may comprise one or more of the mutations: E488Q, V351G, S486A, T375S, S370C, based on amino acid sequence positions of hADAR2-D, and mutations in a homologous ADAR protein corresponding to the above. In one embodiment, the adenosine deaminase may comprise one or more of the mutations: E488Q, V351G, S486A, T375S, S370C, P462A, based on amino acid sequence positions of hADAR2-D, and mutations in a homologous ADAR protein corresponding to the above. In one embodiment, the adenosine deaminase may comprise one or more of the mutations: E488Q, V351G, S486A, T375S, S370C, P462A, N597I, based on amino acid sequence positions of hADAR2-D, and mutations in a homologous ADAR protein corresponding to the above. In one embodiment, the adenosine deaminase may comprise one or more of the mutations: E488Q, V351G, S486A, T375S, S370C, P462A, N597I, L332I, based on amino acid sequence positions of hADAR2-D, and mutations in a homologous ADAR protein corresponding to the above. In one embodiment, the adenosine deaminase may comprise one or more of the mutations: E488Q, V351G, S486A, T375S, S370C, P462A, N597I, L332I, I398V, based on amino acid sequence positions of hADAR2-D, and mutations in a homologous ADAR protein corresponding to the above. In one embodiment, the adenosine deaminase may comprise one or more of the mutations: E488Q, V351G, S486A, T375S, S370C, P462A, N597I, L332I, 1398V, K350I, based on amino acid sequence positions of hADAR2-D, and mutations in a homologous ADAR protein corresponding to the above. In one embodiment, the adenosine deaminase may comprise one or more of the mutations: E488Q, V351G, S486A, T375S, S370C, P462A, N597I, L332I, I398V, K350I, M383L, based on amino acid sequence positions of hADAR2-D, and mutations in a homologous ADAR protein corresponding to the above. In one embodiment, the adenosine deaminase may comprise one or more of the mutations: E488Q, V351G, S486A, T375S, S370C, P462A, N597I, L332I, I398V, K350I, M383L, D619G, based on amino acid sequence positions of hADAR2-D, and mutations in a homologous ADAR protein corresponding to the above. In one embodiment, the adenosine deaminase may comprise one or more of the mutations: E488Q, V351G, S486A, T375S, S370C, P462A, N597I, L332I, I398V, K350I, M383L, D619G, S582T, based on amino acid sequence positions of hADAR2-D, and mutations in a homologous ADAR protein corresponding to the above. In one embodiment, the adenosine deaminase may comprise one or more of the mutations: E488Q, V351G, S486A, T375S, S370C, P462A, N597I, L332I, 1398V, K350I, M383L, D619G, S582T, V440I based on amino acid sequence positions of hADAR2-D, and mutations in a homologous ADAR protein corresponding to the above. In one embodiment, the adenosine deaminase may comprise one or more of the mutations: E488Q, V351G, S486A, T375S, S370C, P462A, N597I, L332I, I398V, K350I, M383L, D619G, S582T, V440I, S495N based on amino acid sequence positions of hADAR2-D, and mutations in a homologous ADAR protein corresponding to the above. In one embodiment, the adenosine deaminase may comprise one or more of the mutations: E488Q, V351G, S486A, T375S, S370C, P462A, N597I, L332I, I398V, K350I, M383L, D619G, S582T, V440I, S495N, K418E based on amino acid sequence positions of hADAR2-D, and mutations in a homologous ADAR protein corresponding to the above. In one embodiment, the adenosine deaminase may comprise one or more of the mutations: E488Q, V351G, S486A, T375S, S370C, P462A, N597I, L332I, I398V, K350I, M383L, D619G, S582T, V440I, S495N, K418E, S661T based on amino acid sequence positions of hADAR2-D, and mutations in a homologous ADAR protein corresponding to the above. In some examples, provided herein includes a mutated adenosine deaminase e.g., an adenosine deaminase comprising one or more mutations of E488Q, V351G, S486A, T375S, S370C, P462A, N597I, L332I, I398V, K350I, M383L, D619G, S582T, V440I, S495N, K418E, S661T, fused with a dead IscB polypeptide nuclease or IscB polypeptide nickase. In some examples, provided herein includes a mutated adenosine deaminase e.g., an adenosine deaminase comprising E488Q, V351G, S486A, T375S, S370C, P462A, N597I, L332I, I398V, K350I, M383L, D619G, S582T, V440I, S495N, K418E, and S661T, fused with a dead IscB polypeptide nuclease or IscB polypeptide nickase. In some examples, provided herein includes a mutated adenosine deaminase e.g., an adenosine deaminase comprising E488Q, V351G, S486A, T375S, S370C, P462A, N597I, L332I, I398V, K350I, M383L, D619G, S582T, V440I, S495N, K418E, S661T, and S375N fused with a dead IscB polypeptide nuclease or IscB polypeptide nickase.

[0389] In one embodiment, the adenosine deaminase may be a tRNA-specific adenosine deaminase or a variant thereof. In one embodiment, the adenosine deaminase may comprise one or more of the mutations: W23L, W23R, R26G, H36L, N37S, P48S, P48T, P48A, I49V, R51L, N72D, L84F, S97C, A106V, D108N, H123Y, G125A, A142N, S146C, D147Y, R152H, R152P, E155V, I156F, K157N, K161T, based on amino acid sequence positions of E. coli TadA, and mutations in a homologous deaminase protein corresponding to the above. In one embodiment, the adenosine deaminase may comprise one or more of the mutations: D108N based on amino acid sequence positions of E. coli TadA, and mutations in a homologous deaminase protein corresponding to the above. In one embodiment, the adenosine deaminase may comprise one or more of the mutations: A106V, D108N, based on amino acid sequence positions of E. coli TadA, and mutations in a homologous deaminase protein corresponding to the above. In one embodiment, the adenosine deaminase may comprise one or more of the mutations: A106V, D108N, D147Y, E155V, based on amino acid sequence positions of E. coli TadA, and mutations in a homologous deaminase protein corresponding to the above. In one embodiment, the adenosine deaminase may comprise one or more of the mutations: A106V, D108N, based on amino acid sequence positions of E. coli TadA, and mutations in a homologous deaminase protein corresponding to the above. In one embodiment, the adenosine deaminase may comprise one or more of the mutations: A106V, D108N, D147Y, E155V, L84F, H123Y, I156F, based on amino acid sequence positions of E. coli TadA, and mutations in a homologous deaminase protein corresponding to the above. In one embodiment, the adenosine deaminase may comprise one or more of the mutations: A106V, D108N, D147Y, E155V, L84F, H123Y, I156F, A142N, based on amino acid sequence positions of E. coli TadA, and mutations in a homologous deaminase protein corresponding to the above. In one embodiment, the adenosine deaminase may comprise one or more of the mutations: A106V, D108N, D147Y, E155V, L84F, H123Y, I156F, H36L, R51L, S146C, K157N, based on amino acid sequence positions of E. coli TadA, and mutations in a homologous deaminase protein corresponding to the above. In one embodiment, the adenosine deaminase may comprise one or more of the mutations: A106V, D108N, D147Y, E155V, L84F, H123Y, I156F, H36L, R51L, S146C, K157N, P48S, based on amino acid sequence positions of E. coli TadA, and mutations in a homologous deaminase protein corresponding to the above. In one embodiment, the adenosine deaminase may comprise one or more of the mutations: A106V, D108N, D147Y, E155V, L84F, H123Y, I156F, H36L, R51L, S146C, K157N, P48S, A142N, based on amino acid sequence positions of E. coli TadA, and mutations in a homologous deaminase protein corresponding to the above. In one embodiment, the adenosine deaminase may comprise one or more of the mutations: A106V, D108N, D147Y, E155V, L84F, H123Y, I156F, H36L, R51L, S146C, K157N, P48S, W23R, P48A, based on amino acid sequence positions of E. coli TadA, and mutations in a homologous deaminase protein corresponding to the above. In one embodiment, the adenosine deaminase may comprise one or more of the mutations: A106V, D108N, D147Y, E155V, L84F, H123Y, I156F, H36L, R51L, S146C, K157N, P48S, W23R, P48A, A142N, based on amino acid sequence positions of E. coli TadA, and mutations in a homologous deaminase protein corresponding to the above. In one embodiment, the adenosine deaminase may comprise one or more of the mutations: A106V, D108N, D147Y, E155V, L84F, H123Y, I156F, H36L, R51L, S146C, K157N, P48S, W23R, P48A, R152P, based on amino acid sequence positions of E. coli TadA, and mutations in a homologous deaminase protein corresponding to the above. In one embodiment, the adenosine deaminase may comprise one or more of the mutations: A106V, D108N, D147Y, E155V, L84F, H123Y, I156F, H36L, R51L, S146C, K157N, P48S, W23R, P48A, R152P, A142N, based on amino acid sequence positions of E. coli TadA, and mutations in a homologous deaminase protein corresponding to the above.

[0390] In some examples, the base editing systems may comprise an intein-mediated trans-splicing system that enables in vivo delivery of a base editor, e.g., a split-intein cytidine base editors (CBE) or adenine base editor (ABE) engineered to trans-splice. Examples of such base editing systems include those described in Colin K. W. Lim et al., Treatment of a Mouse Model of ALS by In Vivo Base Editing, Mol Ther. 2020 Jan. 14. pii: S1525-0016(20)30011-3. doi: 10.1016/j.ymthe.2020.01.005; and Jonathan M. Levy et al., Cytosine and adenine base editing of the brain, liver, retina, heart and skeletal muscle of mice via adeno-associated viruses, Nature Biomedical Engineering volume 4, pages97-110(2020), which are incorporated by reference herein in their entireties.

[0391] Examples of base editing systems include those described in International Patent Publication Nos. WO 2019/071048 (e.g. paragraphs [0933]-[0938]), WO 2019/084063 (e.g., paragraphs [0173]-[0186], [0323]-[0475], [0893]-[1094]), WO 2019/126716 (e.g., paragraphs [0290]-[0425], [1077]-[1084]), WO 2019/126709 (e.g., paragraphs [0294]-[0453]), WO 2019/126762 (e.g., paragraphs [0309]-[0438]), WO 2019/126774 (e.g., paragraphs [0511]-[0670]), Cox D B T, et al., RNA editing with CRISPR-Cas13, Science. 2017 Nov. 24; 358(6366): 1019-1027; Abudayyeh O O, et al., A cytosine deaminase for programmable single-base RNA editing, Science 26 Jul. 2019: Vol. 365, Issue 6451, pp. 382-386; Gaudelli N M et al., Programmable base editing of A·T to G·C in genomic DNA without DNA cleavage, Nature volume 551, pages 464-471 (23 Nov. 2017); Komor A C, et al., Programmable editing of a target base in genomic DNA without double-stranded DNA cleavage. Nature. 2016 May 19; 533(7603): 420-4; Jordan L. Doman et al., Evaluation and minimization of Cas9-independent off-target DNA editing by cytosine base editors, Nat Biotechnol (2020). doi.org/10.1038/s41587-020-0414-6; and Richter M F et al., Phage-assisted evolution of an adenine base editor with improved Cas domain compatibility and activity, Nat Biotechnol (2020). doi.org/10.1038/s41587-020-0453-z, which are incorporated by reference herein in their entireties and can be used to adapt to the IscB or CRISPR-associated IscB polypeptides.

### IscB Prime Editing Systems

[0392] In one embodiment, the present disclosure provides compositions and systems may comprise a IscB polypeptide or CRISPR-associated IscB polypeptide nuclease or a catalytically inactive form, one or more ωRNA or guide molecules, and a reverse transcriptase. The systems may be used to insert a donor polynucleotide to a target polynucleotide. In some examples, the composition or system comprises a catalytically inactive IscB polypeptide or CRISPR-associated IscB polypeptide nuclease, a reverse transcriptase associated with or otherwise capable of forming a complex with the IscB polypeptide or CRISPR-associated IscB polypeptide nuclease, and a ωRNA or guide molecule capable of forming a complex with the IscB polypeptide or CRISPR-associated IscB polypeptide nuclease and directing site-specific binding of the complex to a target sequence of a target polynucleotide, the ωRNA or guide molecule further comprising a donor sequence for insertion into the target polynucleotide.

[0393] In some cases, the catalytically inactive IscB polypeptide or CRISPR-associated IscB polypeptide nuclease may be a nickase, e.g., a DNA nickase. In some cases, the IscB polypeptide or CRISPR-associated IscB polypeptide nuclease has one or more mutations. In some examples, the IscB polypeptide or CRISPR-associated IscB polypeptide nuclease comprises mutations corresponding to the mutations in the RuvC or HNH nuclease.

[0394] The IscB polypeptide or CRISPR-associated IscB polypeptide nuclease may be associated with a reverse transcriptase. A reverse transcriptase domain may be a reverse transcriptase or a fragment thereof. In certain aspects, the reverse transcriptase is Human immunodeficiency virus (HIV) RT, Avian myoblastosis virus (AMV) RT, Moloney murine leukemia virus (M-MLV) RT a group II intron RT, a group II intron-like RT, or a chimeric RT. In an embodiment, the RT comprises modified forms of these RTs, such as, engineered variants of Avian myoblastosis virus (AMV) RT, Moloney murine leukemia virus (M-MLV) RT, or Human immunodeficiency virus (HIV) RT (see, e.g., Anzalone, et al., Search-and-replace genome editing without double-strand breaks or donor DNA, Nature. 2019 December; 576(7785): 149-157).

[0395] In some examples, the compositions and systems may comprise the IscB or CRISPR-associated protein disclosed herein; a reverse transcriptase (RT) polypeptide connected to or otherwise capable of forming a complex with the IscB polypeptide or CRISPR-associated IscB polypeptide; and a ωRNA or guide molecule capable of forming a complex with the IscB polypeptide or CRISPR-associated IscB polypeptide and comprising: a ωRNA or guide sequence capable of directing site-specific binding of the IscB polypeptide or CRISPR-associated IscB polypeptide complex to a target sequence of a target polynucleotide; a 3′ binding site region capable of binding to a cleaved upstream strand of the target polynucleotide; and a RT template sequence encoding an extended sequence, wherein the extended sequence comprises a variant region and a 3′ homologous sequence capable of hybridization to the downstream cleaved strand of the target polynucleotide.

[0396] A reverse transcriptase domain may be a reverse transcriptase or a fragment thereof. A wide variety of reverse transcriptases (RT) may be used in alternative embodiments of the present invention, including prokaryotic and eukaryotic RT, provided that the RT functions within the host to generate a donor polynucleotide sequence from the RNA template. If desired, the nucleotide sequence of a native RT may be modified, for example using known codon optimization techniques, so that expression within the desired host is optimized. A reverse transcriptase (RT) is an enzyme used to generate complementary DNA (cDNA) from an RNA template, a process termed reverse transcription. Reverse transcriptases are used by retroviruses to replicate their genomes, by retrotransposon mobile genetic elements to proliferate within the host genome, by eukaryotic cells to extend the telomeres at the ends of their linear chromosomes, and by some non-retroviruses such as the hepatitis B virus, a member of the Hepadnaviridae, which are dsDNA-RT viruses. Retroviral RT has three sequential biochemical activities: RNA-dependent DNA polymerase activity, ribonuclease H, and DNA-dependent DNA polymerase activity. Collectively, these activities enable the enzyme to convert single-stranded RNA into double-stranded cDNA. In an embodiment, the RT domain of a reverse transcriptase is used in the present invention. The domain may include only the RNA-dependent DNA polymerase activity. In some examples, the RT domain is non-mutagenic, i.e., does not cause mutation in the donor polynucleotide (e.g., during the reverse transcriptase process). In some examples, the RT domain may be non-retron RT, e.g., a viral RT or human endogenous RTs. In some examples, the RT domain may be retron RT or DGRs RT. In some examples, the RT may be less mutagenic than a counterpart wildtype RT. In one embodiment, the RT herein is not mutagenic.

[0397] The reverse transcriptase may be fused to the C-terminus of a IscB polypeptide or CRISPR-associated IscB polypeptide nuclease. Alternatively or additionally, the reverse transcriptase may be fused to the N-terminus of a IscB polypeptide or CRISPR-associated IscB polypeptide nuclease. The fusion may be via a linker and/or an adaptor protein. In some examples, the reverse transcriptase may be an M-MLV reverse transcriptase or variant thereof. The M-MLV reverse transcriptase variant may comprise one or more mutations. For the examples, the M-MLV reverse transcriptase may comprise D200N, L603W, and T330P. In another example, the M-MLV reverse transcriptase may comprise D200N, L603W, T330P, T306K, and W313F. In a particular example, the fusion of IscB polypeptide or CRISPR-associated IscB polypeptide nuclease and reverse transcriptase is IscB polypeptide or CRISPR-associated IscB polypeptide nuclease (with a mutation corresponding to H840A of SpCas9) fused with M-MLV reverse transcriptase (D200N+L603W+T330P+T306K+W313F).

[0398] In one embodiment, the IscB polypeptide or CRISPR-associated IscB polypeptide nuclease herein may target DNA using a ωRNA or guide RNA containing a binding sequence that hybridizes to the target sequence on the DNA. The ωRNA or guide RNA may further comprise an editing sequence that contains new genetic information that replaces target DNA nucleotides. The small sizes of the IscB polypeptide or CRISPR-associated IscB polypeptide nuclease herein may allow easier packaging and delivery of the prime editing system, e.g., with a viral vector, e.g., AAV or lentiviral vector.

[0399] A single-strand break (a nick) may be generated on the target DNA by the IscB polypeptide or CRISPR-associated IscB polypeptide nuclease at the target site to expose a 3′-hydroxyl group, thus priming the reverse transcription of an edit-encoding extension on the ωRNA or guide directly into the target site. These steps may result in a branched intermediate with two redundant single-stranded DNA flaps: a 5′ flap that contains the unedited DNA sequence, and a 3′ flap that contains the edited sequence copied from the hRNA. The 5′ flaps may be removed by a structure-specific endonuclease, e.g., FEN122, which excises 5′ flaps generated during lagging-strand DNA synthesis and long-patch base excision repair. The non-edited DNA strand may be nicked to induce bias DNA repair to preferentially replace the non-edited strand. Examples of prime editing systems and methods include those described in Anzalone A V et al., Search-and-replace genome editing without double-strand breaks or donor DNA, Nature. 2019 Oct. 21. doi: 10.1038/s41586-019-1711-4, which is incorporated by reference herein in its entirety.

[0400] The IscB polypeptide or CRISPR-associated IscB polypeptide (e.g., the nickase form) may be used to prime-edit a single nucleotide on a target DNA. Alternatively or additionally, the IscB polypeptide or CRISPR-associated IscB polypeptide nuclease may be used to prime-edit at least 2, at least 3, at least 4, at least 5, at least 6, at least 7, at least 8, at least 10, at least 11, at least 12, at least 13, at least 14, at least 15, at least 16, at least 17, at least 18, at least 19, at least 20, at least 21, at least 22, at least 23, at least 24, at least 25, at least 26, at least 27, at least 28, at least 29, at least 30, at least 40, at least 50, at least 60, at least 70, at least 80, at least 90, at least 100, at least 200, at least 300, at least 400, at least 500, at least 600, at least 700, at least 800, at least 900, or at least 1000 nucleotides on a target DNA.

[0401] In yet another embodiment, PRIME editing is used first to create a longer 3′ region (e.g., 20 nucleotides). Examples of prime editing systems and methods include those described in Anzalone A V et al., Search-and-replace genome editing without double-strand breaks or donor DNA, Nature. 2019 Oct. 21. doi: 10.1038/s41586-019-1711-4, which is incorporated by reference herein in its entirety. In such cases, the system comprises a IscB polypeptide or CRISPR-associated IscB polypeptide with nickase activity, a reverse transcriptase domain, and a DNA polymerase, and a ωRNA or guide molecule comprising a binding sequence capable of hybridizing to the target polynucleotide and a editing sequence. The generated region may be further extended on a DNA template as described herein. The latter may allow generation of a target-independent sequence, compatible with a generic donor sequence.

[0402] The IscB polypeptide or CRISPR-associated IscB polypeptide is capable of generating a first cleavage of in the target sequence and a second cleavage outside the target sequence on the target polynucleotide. In some variations, a second IscB polypeptide or CRISPR-associated IscB polypeptide-mediated cleavage in vicinity to the target site may be made, which may enable more efficient invasion of the extended DNA.

[0403] In some examples, the compositions and systems of the IscB polypeptide or CRISPR-associated IscB polypeptide herein comprise: a reverse transcriptase (RT) polypeptide connected to or otherwise capable of forming a complex with the IscB polypeptide or CRISPR-associated IscB polypeptide; a first ωRNA or guide molecule capable of forming a first IscB polypeptide or CRISPR-associated IscB polypeptide-Reverse transcriptase complex with the IscB polypeptide or CRISPR-associated IscB polypeptide and comprising: a ωRNA or guide sequence capable of directing site-specific binding of the first IscB polypeptide or CRISPR-associated IscB polypeptide-Reverse transcriptase complex to a first target sequence of a target polynucleotide; a first binding site region capable of binding to a cleaved or nicked strand of the target polynucleotide; and a RT template sequence encoding a first extended sequence; a second ωRNA or guide molecule capable of forming a second IscB polypeptide or CRISPR-associated IscB polypeptide-Reverse transcriptase complex with the IscB polypeptide or CRISPR-associated IscB polypeptide and comprising: a ωRNA or guide sequence capable of directing site specific binding of the second IscB polypeptide or CRISPR-associated IscB polypeptide-Reverse transcriptase complex to a second target sequence of the target polynucleotide; a second binding site region capable of binding to a cleaved or nicked strand of the target polynucleotide; and a RT template sequence encoding a second extended sequence.

[0404] In some cases, the compositions and systems may further comprise: a donor template; a third ωRNA or guide sequence capable of forming a IscB polypeptide or CRISPR-associated IscB polypeptide-Reverse transcriptase complex-ωRNA or guide with the IscB polypeptide or CRISPR-associated IscB polypeptide and comprising: a ωRNA or guide sequence capable of directing site-specific binding to a target sequence on the donor template; a third binding region capable of binding to a cleaved or nicked strand of the donor template; and a RT template encoding a third extended region complementary to the first extended region generated on the target polynucleotide; and a fourth ωRNA or guide sequence capable of forming a IscB polypeptide or CRISPR-associated IscB polypeptide-Reverse transcriptase complex with the IscB polypeptide or CRISPR-associated IscB polypeptide and comprising: a ωRNA or guide sequence capable of directing site-specific binding to a second target sequence on the donor template; a fourth binding region capable of binding to a cleaved or nicked strand of the donor template; and a RT template encoding a fourth extended region complementary to the second extended region generated on the target polynucleotide.

[0405] In some cases, the compositions and systems may further comprise a site-specific recombinase, and wherein the first and second extended regions are complementary to each other and introduce a serine integrase recombination site; and a donor molecule comprising a donor sequence for insertion into the target polypeptide and the complementary recombination site to the serine integrase recombination site.

[0406] In some examples, the compositions and systems may further comprise a recombinase. The recombinase is connected to or otherwise capable of forming a complex with the IscB polypeptide or CRISPR-associated IscB polypeptide. In an embodiment, the complex is capable of inserting a recombination site in the DNA loci of interest by extension of RT templates that encode for the recombination site on the 3′ extension of the ωRNA or guide sequences by the reverse transcriptase. In an embodiment, a donor template comprising a compatible recombination site is provided that can recombine unidirectionally with the inserted recombination site when a recombinase specific for the recombination site is also provided. In an embodiment, the donor template is a plasmid comprising the complementary recombination site and any sequence for insertion at the DNA loci of interest. In an embodiment, the recombinase is connected to or capable of forming a complex with the IscB polypeptide or CRISPR-associated IscB polypeptide nuclease, such that all of the enzymatic proteins are brought into contact at the loci of interest. In an embodiment, the recombinase is codon optimized for eukaryotic cells (described further herein). In an embodiment, the recombinase includes a NLS (described further herein). In an embodiment, the recombinase is provided as a separate protein. The separate recombinase may form a dimer and bind to the donor template recombination site. The recombinase may be targeted to the loci of interest as a result of the insertion of the compatible recombination site that is also recognized by the recombinase. Thus, the recombinase may recognize the recombination site inserted at the DNA loci of interest and the recombination site on the donor and be targeted to the DNA loci of interest without any additional modifications to the recombinase.

[0407] In an embodiment, a second IscB complex connected to a recombinase is targeted to the DNA loci of interest. In an embodiment, the second TnpB complex comprises a dead IscB protein (dIscB, described further herein), such that the recombinase is targeted to the DNA loci of interest, but the target sequence is not further cleaved. In an embodiment, the dIscB targets a sequence generated only after the insertion of the recombination site. In an embodiment, the recombinase recognizes and binds to the donor template recombination site and the inserted recombination site. In an embodiment, the recombinase forms a dimer with a recombinase provided as a separate protein.

[0408] As used herein, the term “recombinase” refers to an enzyme that catalyzes recombination between two or more recombination sites (e.g., an acceptor and donor site).

[0409] Recombinases useful in the present invention catalyze recombination at specific recombination sites, which are specific polynucleotide sequences that are recognized by a particular recombinase. “Uni-directional recombinases” or “integrases” refer to recombinase enzymes whose recognition sites are destroyed after the recombination has taken place. The term “integrase” refers to a type of recombinase. In other words, the sequence recognized by the recombinase is changed into one that is not recognized by the recombinase upon recombination. As a result, once a sequence is subjected to recombination by the uni-directional recombinase, the continued presence of the recombinase cannot reverse the previous recombination event.

[0410] “Recombination sites” are specific polynucleotide sequences that are recognized by the recombinase enzymes described herein. Typically, two different sites are involved (in regard to recombination termed “complementary sites”), one present in the target nucleic acid (e.g., a chromosome or episome of a eukaryote) and another on the nucleic acid that is to be integrated at the target recombination site. The terms “attB” and “attP,” which refer to attachment (or recombination) sites originally from a bacterial target (attachment site of bacteria) and a phage donor (attachment site of phage), respectively, are used herein although recombination sites for particular enzymes may have different names. The two attachment sites can share as little sequence identity as a few base pairs. The recombination sites typically include left and right arms separated by a core or spacer region. Thus, an attB recombination site consists of BOB′, where B and B′ are the left and right arms, respectively, and O is the core region. Similarly, attP is POP′, where P and P′ are the arms and O is again the core region. Upon recombination between the attB and attP sites, and concomitant integration of a nucleic acid at the target, the recombination sites that flank the integrated DNA are referred to as “attL” and “aatR.” The attL and attR sites, using the terminology above, thus consist of BOP′ and POB′, respectively. In some representations herein, the “O” is omitted and attB and attP, for example, are designated as BB′ and PP′, respectively.

### IscB Transposition Systems

[0411] Embodiments disclosed herein provide an engineered or non-natural guided excision-transposition system. The engineered or non-natural guided excision-transposition system may comprise one or more components of a ωRNA-IscB or guide-CRISPR-associated IscB system and one or more components of a Class II transposon. The components of the ωRNA-IscB or guide-CRISPR-associated IscB system can direct the Class II transposon component(s) to retrotransposon to a target nucleic acid sequence and direct its transposition into a recipient polynucleotide.

[0412] For example, the engineered or non-natural guided excision-transposition systems that can include (a) a first IscB polypeptide or CRISPR-associated IscB polypeptide; (b) a first Class II transposon polypeptide coupled to or otherwise capable of complexing with the first IscB polypeptide or CRISPR-associated IscB polypeptide; (c) a first guide molecule capable of forming a first ωRNA-IscB or guide-CRISPR-associated IscB complex with the first IscB protein or CRISPR-associated IscB polypeptide and directing site-specific binding to a first target sequence of a first target polynucleotide; (d) a second IscB polypeptide or CRISPR-associated IscB polypeptide; (e) a second Class II transposon polypeptide coupled to or otherwise capable of complexing with the second IscB polypeptide or CRISPR-associated IscB polypeptide; (f) a second guide molecule capable of forming a second ωRNA-IscB complex with the first IscB protein and directing site-specific binding to a second target sequence of the first target polynucleotide; and (g) a Class II transposon polynucleotide comprising the first target polynucleotide and is capable of forming a complex with the first and second IscB polypeptide or CRISPR-associated IscB polypeptide, the first and second guide molecules, and the first and second Class II transposon polypeptides.

[0413] In one embodiment, the engineered or non-natural guided excision-transposition system can include (h) a third guide molecule capable of complexing with the first IscB polypeptide or CRISPR-associated IscB polypeptide and directing site-specific binding to a first target sequence of a second target polynucleotide, wherein the third guide molecule is optionally coupled to the first IscB polypeptide or CRISPR-associated IscB polypeptide; (i) optionally, a first ωRNA or guide molecule polynucleotide that encodes the third ωRNA or guide molecule; (j) a fourth ωRNA or guide molecule capable of complexing with the second IscB polypeptide or CRISPR-associated IscB polypeptide and directing site-specific binding to a second target sequence of the second target polynucleotide, wherein the fourth guide molecule is optionally coupled to the second IscB polypeptide or CRISPR-associated IscB polypeptide; and (k) optionally, a second ωRNA or guide molecule polynucleotide that encodes the fourth ωRNA or guide molecule.

[0414] In one embodiment, the first and the second Class II transposon polypeptides are capable of excising the first target polynucleotide from the Class II transposon polynucleotide. In one embodiment, the first and the second Class II transposon polypeptides are capable of transposing the first target polynucleotide in the second target polynucleotide. In one embodiment, the first target polynucleotide does not include one or more Class II transposon long terminal repeats.

[0415] The engineered or non-natural guided excision-transposition systems described herein can be based on a Class II transposon or Class II transposon system. The engineered or non-natural guided excision-transposition system may include a first target polynucleotide, also referred to as a donor polynucleotide or transposon and a second target polynucleotide, which is also referred to herein as a recipient polynucleotide. As used herein, “transposon” (also referred to as transposable element) refers to a polynucleotide sequence that is capable of moving form location in a genome to another. There are several classes of transposons. Transposons include retrotransposons (Class I transposons) and DNA transposons (Class II transposons). In some cases, retrotransposons require the transcription of the polynucleotide that is moved (or transposed) in order to transpose the polynucleotide to a new genome or polynucleotide. DNA transposons are those that do not require reverse transcription of the polynucleotide that is moved (or transposed) in order to transpose the polynucleotide to a new genome or polynucleotide.

[0416] Any suitable transposon system can be used. Suitable transposon and systems thereof can include, but are not limited, to Sleeping Beauty transposon system (Tc1/mariner superfamily) (see e.g., Ivics et al. 1997. Cell. 91(4): 501-510), piggyBac (piggyBac superfamily) (see e.g., Li et al. 2013 110(25): E2279-E2287 and Yusa et al. 2011. PNAS. 108(4): 1531-1536), Tol2 (superfamily hAT), Frog Prince (Tc1/mariner superfamily) (see e.g., Miskey et al. 2003 Nucleic Acid Res. 31(23): 6873-6881) and variants thereof.

[0417] In one embodiment, the first and/or second Class II transposon polypeptide is a DD[E/D] transposon or transposon polypeptide. In one embodiment, the first and/or the second Class II transposon polynucleotide is a Tc1/mariner, PiggyBac, Frog Prince, Tn3, Tn5, hAT, CACTA, P, Mutator, PIF/Harbinger, Transib, or a Merlin/IS1016 transposon polynucleotide. In one embodiment, the first and/or second Class II transposon polypeptide is a Tc1/mariner, PiggyBac, Frog Prince, Tn3, Tn5, hAT, CACTA, P, Mutator, PIF/Harbinger, Transib, or a Merlin/IS1016 transposon polypeptide.

[0418] Suitable Class II transposon systems and components that can be utilized can also be and are not limited to those described in e.g., and without limitation, Han et al., 2013. BMC Genomics. 14:71, doi: 10.1186/1471-2164-14-71, Lopez and Garcia-Perez. 2010. Curr. Genomics. 11(2): 115-128; Wessler. 2006. PNAS. 103(47): 176000-17601; Gao et al., 2017. Marine Genomics. 34:67-77; Bradic et al. 2014. Mobile DNA. 5(12) doi: 10.1186/1759-8753-5-12; Li et al., 2013. PNAS. 110(25) E2279-E2287; Kebriaei et al. 2017. Trends in Genetics. 33(11): 852-870); Miskey et al. 2003. Nucleic Acid res. 31(23): 6873-6881; Nicolas et al. 2015. Microbiol Spectr. 3(4) doi: 10.1128/microbiolspec.MDNA3-0060-2014); W.S. Reznikoff. 1993. Annu Rev. Microbiol. 47:945-963; Rubin et al. 2001. Genetics. 158(3): 949-957; Wicker et al. 2003. Plant Physiol. 132(1): 52-63; Majumdar and Rio. 2015. Microbiol. Spectr. 3(2) doi: 10.1128/microbiolspec.MDNA3-0004-2014; D. Lisch. 2002. Trends in Plant Sci. 7(11): 498-504; Sinzelle et al. 2007. PNAS. 105(12): 4715-4720; Han et al. 2014; Genome Biol. Evol. 6(7): 1748-1757; Grzebelus et al. 2006; Mol. Genet. Genomics. 275(5): 450-459; Zhang et al. 2004. Genetics. 166(2): 971-986; Chen and Li. 2008. Gene. 408(1-2): 51-63; and C. Feschotte. 2004. Mol. Biol. Evol. 21(9): 1769-1780.

### IscB Retrotransposon Systems

[0419] The systems and compositions herein may comprise an Omega IscB polypeptide or CRISPR-associated IscB polypeptide nuclease, one or more ωRNAs or guide RNAs, and one or more components of a retrotransposon, e.g., a non-LTR retrotransposon. The one or more components of a retrotransposon include a retrotransposon protein and retrotransposon RNA. The systems and compositions may be used to insert a donor polynucleotide to a target polynucleotide. The systems and compositions may further comprise a donor polynucleotide.

[0420] In some examples, the present disclosure provides an engineered, non-naturally occurring composition comprising: a IscB polypeptide or CRISPR-associated IscB polypeptide nuclease, a non-LTR retrotransposon protein associated with or otherwise capable of forming a complex with the IscB polypeptide or CRISPR-associated IscB polypeptide nuclease; a single ωRNA or guide capable of forming a complex with the IscB polypeptide or CRISPR-associated IscB polypeptide nuclease and directing site-specific binding to a target sequence of a target polynucleotide. The composition may further comprise a donor construct comprising a donor polynucleotide for insertion to the target polynucleotide and located between two binding elements capable of forming a complex with the non-LTR retrotransposon protein. In some cases, the IscB polypeptide or CRISPR-associated IscB polypeptide nuclease is engineered to have nickase activity.

[0421] In some examples, the IscB polypeptide or CRISPR-associated IscB polypeptide nuclease is fused to the N-terminus of the non-LTR retrotransposon protein. In some examples, the IscB polypeptide or CRISPR-associated IscB polypeptide nuclease is fused to the C-terminus of the non-LTR retrotransposon protein.

[0422] The guides may direct the fusion protein to a target sequence 5′ of the targeted insertion site, and wherein the IscB polypeptide or CRISPR-associated IscB polypeptide nuclease generates a double-strand break at the targeted insertion site. The guides may direct the fusion protein to a target sequence 3′ of the targeted insertion site, and wherein the IscB polypeptide or CRISPR-associated IscB polypeptide nuclease generates a double-strand break at the targeted insertion site.

[0423] The donor polynucleotide may further comprise a polymerase processing element to facilitate 3′ end processing of the donor polynucleotide sequence. The polymerase may be a DNA polymerase, e.g., DNA polymerase I. In some examples, the polymerase may be an RNA polymerase.

[0424] In some examples, the donor polynucleotide further comprises a homology region to the target sequence on the 5′ end of the donor construct, the 3′ end of the donor construct, or both. In some examples, the homology region is from 1 to 50, from 5 to 30, from 8 to 25, e.g., 1, 2, 3, 4, 5, 6, 7, 8, 9, 10, 11, 12, 13, 14, 15, 16, 17, 18, 19, 20, 21, 22, 23, 24, 25, 26, 27, 28, 29, 30, 31, 32, 33, 34, 35, 36, 37, 38, 39, 40, 41, 42, 43, 44, 45, 46, 47, 48, 49, or 50 base pairs in length.

[0425] Native or wild-type non-LTR retrotransposons encode the protein machinery necessary for their self-mobilization. The non-LTR retrotransposon element comprises a DNA element integrated into a host genome. This DNA element may encode one or two open reading frames (ORFs). For example, the R2 element of Bombyx mori encodes a single ORF containing reverse transcriptase (RT) activity and a restriction enzyme-like (REL) domain. L1 elements encode two ORFs, ORF1 and ORF2. ORF1 contains a leucine zipper domain involved in protein-protein interactions and a C-terminal nucleic acid binding domain. ORF2 has a N-terminal apurinic/apyrimidinic endonuclease (APE), a central RT domain, and a C-terminal cysteine histidine rich domain. An example replicative cycle of a non-LTR retrotransposon may comprise transcription of the full-length retrotransposon element to generate an mRNA active element (retrotransposon RNA). The active element mRNA is translated to generate the encoded retrotransposon proteins or polypeptides. A ribonucleoprotein complex comprising the active element and the retrotransposon protein or polypeptide is formed and this RNP facilitates integration of the active element into the genome. The RNA-transposase complex nicks the genome. The 3′ end of the nicked DNA serves as a primer to allow the reverse transcription of the transposon RNA into cDNA. Fourth, the transposase proteins integrate the cDNA into the genome.

[0426] Elements of these systems may be engineered to work within the context of the invention. For example, a non-LTR retrotransposon polypeptide may be fused to a site-specific nuclease. The binding elements that allow a non-LTR retrotransposon polypeptide to bind to the native retrotransposon DNA element may be engineered into a donor construct to facilitate entry of a donor polynucleotide sequence into a target polypeptide.

[0427] In the present invention, the protein component of the non-LTR retrotransposon may be connected to or otherwise engineered to form a complex with a site-specific nuclease. The retrotransposon RNA may be engineered to encode a donor polynucleotide sequence. Thus, in certain example embodiments, the IscB polypeptide nuclease, via formation of an IscB polypeptide nuclease complex with a guide sequence, directs the retrotransposon complex (e.g., the retrotransposon polypeptide(s) and retrotransposon RNA to a target sequence in a target polynucleotide, where the retrotransposon RNP complex facilitates integration of the donor polynucleotide sequence into the target polynucleotide. Accordingly, the one or more non-LTR retrotransposon components may comprise retrotransposon polypeptides, or function domains thereof, that facilitate binding of the retrotransposon RNA, reverse transcription of the retrotransposon RNA into cDNA, and/or integration of the donor polynucleotide into the target polynucleotide, as well as retrotransposon RNA elements modified to encode the donor polynucleotide sequence.

[0428] Examples of non-LTR retrotransposons include CRE, R2, R4, L1, RTE, Tad, R1, LOA, I, Jockey, CR1. In one example, the non-LTR retrotransposon is R2. In another example, the non-LTR retrotransposon is L1. Examples of non-LTR retrotransposons may include those described in Christensen S M et al., RNA from the 5′ end of the R2 retrotransposon controls R2 protein binding to and cleavage of its DNA target site, Proc Natl Acad Sci USA. 2006 Nov. 21; 103(47): 17602-7; Eickbush T H et al, Integration, Regulation, and Long-Term Stability of R2 Retrotransposons, Microbiol Spectr. 2015 April; 3(2): MDNA3-0011-2014. doi: 10.1128/microbiolspec.MDNA3-0011-2014; Han J S, Non-long terminal repeat (non-LTR) retrotransposons: mechanisms, recent developments, and unanswered questions, Mob DNA. 2010 May 12; 1(1): 15. doi: 10.1186/1759-8753-1-15; Malik H S et al., The age and evolution of non-LTR retrotransposable elements, Mol Biol Evol. 1999 June; 16(6): 793-805, which are incorporated by reference herein in their entireties.

[0429] Examples of the non-LTR retrotransposon polypeptides also include R2 from Clonorchis sinensis, or Zonotrichia albicollis.

[0430] A non-LTR retrotransposon may comprise multiple retrotransposon polypeptides or polynucleotides encoding same. In one embodiment, the retrotransposon polypeptides may form a complex. For example, a non-LTR retrotransposon is a dimer, e.g., comprising two retrotransposon polypeptides forming a dimer. The dimer subunits may be connected or form a tandem fusion. An IscB polypeptide nuclease may be associate with (e.g., connected to) one or more subunits of such complex. In some examples, the non-LTR retrotransposon is a dimer of two retrotransposon polypeptides; one of the retrotransposon polypeptides comprises nuclease or nickase activity and is connected with an IscB polypeptide nuclease.

[0431] The retrotransposon polypeptides may comprise one or more modifications to, for example, enhance specificity or efficiency of donor polynucleotide recognition, target-primed template recognition (TPTR). The retrotransposon polypeptides may also comprise one or more truncations or excisions to remove domains or regions of wild-type protein to arrive at a minimal polypeptide that retain donor polynucleotide recognition and TPTR. In some example embodiments, the native endonuclease activity may be mutated to eliminate endonuclease activity.

[0432] In certain example embodiments, the modifications or truncations of the non-LTR retrotransposon peptide may be in a zinc finger region, a Myb region, a basic region, a reverse transcriptase domain, a cysteine-histidine rich motif, or an endonuclease domain.

[0433] A non-LTR retrotransposon may comprise polynucleotide encoding one or more retrotransposon RNA molecules. The polynucleotide may comprise one or more regulatory elements. The regulatory elements may be promoters. The regulatory elements and promoters on the polynucleotides include those described throughout this application. For example, the polynucleotide may comprise a pol2 promoter, a pol3 promoter, or a T7 promoter.

[0434] In some cases, the polynucleotide encodes a retrotransposon RNA with at least a portion of its sequence complementary to a target sequence. For example, the 3′ end of the retrotransposon RNA may be complementary to a target sequence. The RNA may be complementary to a portion of a nicked target sequence. In one embodiment, a retrotransposon RNA may comprise one or more donor polynucleotides. In certain cases, a retrotransposon RNA may encode one or more donor polynucleotides.

[0435] A retrotransposon RNA may be capable of binding to a retrotransposon polypeptide. Such retrotransposon RNA may comprise one or more elements for binding to the retrotransposon polypeptide. Examples of binding elements include hairpin structures, pseudoknots (e.g., a nucleic acid secondary structure containing at least two stem-loop structures in which half of one stem is intercalated between the two halves of another stem), stem loops, and bulges (e.g., unpaired stretches of nucleotides located within one strand of a nucleic acid duplex). In certain examples, the retrotransposon RNA comprises one or more hairpin structures. In some examples, the retrotransposon RNA comprises one or more pseudoknots. In certain examples, a retrotransposon RNA comprises a sequence encoding a donor polynucleotide and one or more binding elements for forming a complex with the retrotransposon polypeptide. The binding elements may be located on the 5′ end or the 3′ end.

[0436] In one embodiment, a retrotransposon RNA comprises a region capable of hybridizing with an overhang of a target polynucleotide at the target site. The overhang may be a stretch of single-stranded DNA. The overhang may function as a primer for reverse transcription of at least a portion of the retrotransposon RNA to a cDNA. In some cases, a region of the cDNA may be capable of hybridizing a second overhang of the target polynucleotide. The second overhang may function as a primer for the synthesis of a second strand to generate a double-stranded cDNA. The cDNA may comprise a donor polynucleotide sequence. The two overhangs may be from different strands of the target polynucleotide.

### IscB Diversity Generating Retroelement System

[0437] In an embodiment, the one or more functional domains may be a diversity generating retroelement(s) (e.g., DGR described in US20100041033A1). In one embodiment, the DGR may insert a donor polynucleotide with its homing mechanism. For example, the DGR may be associated with a catalytically inactive IscB protein (e.g., a dead IscB), and integrate the single-strand DNA using a homing mechanism. In some examples, the DGR may be less mutagenic than a counterpart wild type DGR. In some examples, the DGR is not error-prone. In one embodiment, the DGR herein is not mutagenic. The non-mutagenic DGR may be a mutant of a wild type DGR. As used herein, the term “DGR” encompasses both diversity generating retroelement polynucleotides and proteins encoded by diversity generating retroelement polynucleotides. In some examples, DGR may be proteins encoded by diversity generating retroelement polynucleotides having reverse transcriptase activity. In some examples, DGR may be proteins encoded by diversity generating retroelement polynucleotides having reverse transcriptase activity and integrase activity. In some cases, the template or donor polynucleotide may be encoded by a diversity generating retroelement polynucleotide. In certain cases, the template may be a polynucleotide different from the diversity generating retroelement polynucleotide, e.g., provided as a separate construct or molecule.

[0438] In one embodiment, the DGR herein may also include a Group II intron (and any proteins and polynucleotides encoded), which are mobile ribozymes that self-splice from precursor RNAs to yield excised intron lariat RNAs, which then invade new genomic DNA sites by reverse splicing. Examples of Group II intron include those described in Lambowitz A M et al., Group II Introns: Mobile Ribozymes that Invade DNA, Cold Spring Harb Perspect Biol. 2011 August; 3(8): a003616.

[0439] In one embodiment, the diversity-generating retroelements (DGRs) are genetic elements that can produce targeted, massive variations in the genomes that carry these elements. In one embodiment, the DGR systems rely on error-prone reverse transcriptases to produce mutagenized cDNA (containing A-to-N mutations) from a template region (TR), to replace a segment called a variable region (VR) that is similar to the TR region—this process is called mutagenic retrohoming (see, e.g., Sharifi and Ye, MyDGR: a server for identification and characterization of diversity-generating retroelements. Nucleic Acids Res. 2019 Jul. 2; 47 (W1): W289-W294). DGRs may include a unique family of retroelements that generate sequence diversity of DNA. They exist widely in bacteria, archaea, phage and plasmid, and benefit their hosts by introducing variations and accelerating the evolution of target proteins (see, e.g., Yan et al., Discovery and characterization of the evolution, variation and functions of diversity-generating retroelements using thousands of genomes and metagenomes. BMC Genomics. 2019; 20:595). The first DGR was discovered in a Bordetella phage, BPP-1. Bordetella causes the respiratory infection in humans and many other mammals, controlled by the BvgAS signal transduction system. The surface of Bordetella is highly variable owing to the dynamic gene expression in the infectious cycle. The invasion of BPP-1 to Bordetella relies on the phage tail fiber protein Mtd. With the process of mutagenic reverse transcription and cDNA integration, DGR may introduce multiple nucleotide substitutions to Mtd gene and generates different receptor-binding molecules, thus making BPP-1 the ability to invade Bordetellae with diverse cell surfaces.

[0440] The systems may be used to generate an ssDNA donor using a retron- or DGR RT, which is then integrated by homologous recombination upon target cleavage or nicking using a IscB nuclease. In one embodiment, the systems may comprise DGRs and/or Group-II intron reverse transcriptases. The homing mechanism of DGRs or Group-II introns may be used in modifying a target polynucleotide. The DGRs or Group-II introns reverse transcriptase may be guided to a target polynucleotide by tethering to a nuclease-dead IscB nuclease, TALE, or ZF protein. In another embodiment, a non-retron/DGR reverse transcriptase (e.g., a viral RT) may be used for generating cDNA off of a self-priming RNA. In one embodiment, a ssDNA may be generated by an RT, but integrate it using a dead IscB polypeptide or CRISPR-associated IscB polypeptide, creating an accessible R-loop instead of nicking/cleaving.

### IscB Helitron Systems

[0441] The systems and compositions herein may comprise an OMEGA IscB polypeptide or CRISPR-associated IscB polypeptide nuclease, one or more ωRNAs or guide RNAs, and one or more components of a helitron. The systems and compositions may be used to insert a donor polynucleotide to a target polynucleotide. The systems and compositions may further comprise a donor polynucleotide.

[0442] The term “helitron”, as used herein, refers to a polynucleotide (or nucleic acid segment), recognized as a transposon that captures and mobilizes gene fragments in eukaryotes. The term “helitron” as used herein refers to transposase that comprises an endonuclease domain and a C-terminal helicase domain. Helitrons are rolling-circle RNA transposons. In one embodiment, the helitron encodes a 1400 to about 2000 amino acid, or about 1800 amino acid multidomain transposase. In embodiments, the helitron comprises a hairpin near the 3′end to function as a transposition terminator. In embodiments, the transposon comprises a RepHel motif comprising a replication initiator (Rep) and a DNA helicase (hel) domain. See, Thomas J. & Pritham E. J. Helitrons, the eukaryotic rolling-circle transposable elements. Microbiol. Spectr. 3, 893-926(2015). In embodiments, the helitron comprises a Rep nuclease domain and C-terminal helicase domain and inserts between an AT dinucleotide in single strand DNA. In an aspect, the C-terminal helicase unwinds the DNA in a 5′ to 3′ direction. The HUH nuclease domain may comprise one or two active site tyrosine residues, in embodiments, is a 2 Tyrosine (Y2) HUH endonuclease domain. Helitrons can encompass helentron, proto-helentron and helitron2 type proteins, structures of which can be as described in Thomas et al., 2015 at FIGS. 1 and 3, incorporated specifically by reference. Particular organisms in which the helitron or helentrons have been found can include those in Table 1 of Thomas J. & Pritham E. J. Helitrons, the eukaryotic rolling-circle transposable elements. Microbiol. Spectr. 3, 893-926 (2015), incorporated herein by reference. Similarly, helitrons can be identified based at least in part on the Rep motif, and conserived residues in the helitrons, and according to the alignment sequence of FIG. 2 of Thomas J. & Pritham E. J. Helitrons, the eukaryotic rolling-circle transposable elements. Microbiol. Spectr. 3, 893-926(2015), specifically incorporated herein by reference.

[0443] The expression “helitron reaction” used herein refers to a reaction wherein a transposase inserts a donor polynucleotide sequence in or adjacent to an insertion site on a target polynucleotide. The insertion site may contain a sequence or secondary structure recognized by the helitron and/or an insertion motif sequence in the target polynucleotide into which the donor polynucleotide sequence may be inserted.

[0444] As described in Grabundzija 2018, the helitron terminal sequences contains a distinct ˜150 base pairs (bp) long sequence with an absolutely conserved dinucleotide at the end of left terminal sequence (LTS), and a tetranucleotide at the end of right terminal sequence (RTS) which is preceded by a palindromic sequence that can form a hairpin structure. Grabundzija et al., Nat. Commun. 2018; 9:1278; doi: 10.1035/s41467-018-03688-w.

[0445] The helitron end sequences may be responsible for identifying the donor polynucleotide for transposition. The helitron end sequences may be the DNA sequences used to perform a transposition reaction, the end sequences may be referred to herein as right terminal sequences and left terminal sequence. The donor polynucleotide can be configured to comprise a first and second helitron recognition sequence that are at least 80%, 85%, 90%, 95% 96%, 97%, 98%, 99% or 100% complementary to a left terminal sequence and/or a right terminal sequence of a polynucleotide encoding the helitron polypeptide.

[0446] In an aspect, the palindromic sequence may be located upstream of the right terminal sequence, for example, about 5, 10, 15, 20, 25, 30, 35 nucleotides upstream of the right terminal sequence end, or about 10 to 15 nucleotides upstream of the right terminal sequence end, about 10 to 12 nucleotides or about 11 nucleotides upstream of the right terminal sequence end. Ivana Grabundzija, Nat Commun. 2016; 7:10716, doi: 10.1038/ncomms10716, incorporated herein by reference.

[0447] Exemplary helitrons can be identified using software, for example (EAHelitron) that has been used to identify Helitrons in a wide range of plant genomes. See, Hu, K., Xu, K., Wen, J. et al. Helitron distribution in Brassicaceae and whole Genome Helitron density as a character for distinguishing plant species. BMC Bioinformatics 20, 354(2019). doi: 10.1186/s12859-019-2945-8, incorporated herein by reference.

[0448] The helitron may be derived from a eukaryote. In an aspect, the helitron is derived from a mammalian genome, in an aspect, vespertilionid bats, e.g., Helibat. In embodiments, the helitron is derived from derived from a Helibat1 transposon. In embodiments, the helitron is Helraiser, the full DNA sequence of the consensus transposon, including left terminal and right terminal sequences as well as hairpin identified is provided in Grabundzija, 2016 at Supplementary FIG. 1, specifically incorporated herein by reference. In an aspect, the helitron is flanked by left and right terminal sequences of the transposon. In an aspect, the left terminal sequence and right terminal sequence terminates with the conserved 5′-TC/CTAG-3′ motif. In an embodiment, the helitron may comprise a palindromic sequence that is about 10 to about 35, or about 5-25 bp or about 19-bp-long palindromic sequence with the potential to form a hairpin structure.

[0449] Elements of these systems may be engineered to work within the context of the invention. For example, a helitron polypeptide may be fused to a polypeptide capable of generating an R-loop. Fusion may be by any appropriate linker, in an exemplary embodiment, XTEN16. The binding elements that allow a helitron polypeptide to bind, for example, the use of sequences complementary to the right terminal sequence and the left terminal sequence of the helitron may be engineered into a donor construct to facilitate entry of a donor polynucleotide sequence into a target polynucleotide.

[0450] In certain example embodiments, the IscB polypeptide, via formation of complex with a hRNA sequence, directs the helitron polypeptide to a target sequence in a target polynucleotide, where the helitron facilitates integration of a donor polynucleotide sequence into the target polynucleotide.

[0451] The helitron polypeptides may also comprise one or more truncations or excisions to remove domains or regions of wild-type protein to arrive at a minimal polypeptide, alter functionality according to the system in which the helitron is used, or mutated to enhance or diminish particular activities associated with the helitron, i.e., nuclease activity or helicase activity.

### IscB Recombinase/Integrase Systems

[0452] The systems and compositions herein may comprise an OMEGA IscB polypeptide or CRISPR-associated IscB polypeptide system, and one or more components of a recombinase or integrase. In an aspect, the IscB polypeptide or CRISPR-associated IscB polypeptide is naturally catalytically inactive and utilized with one or more nucleic acid components to provide site-specific targeting, and the one or more components of the recombinase to introduce a modification. In an aspect, the IscB polypeptide or CRISPR-associated IscB polypeptide may be catalytically inactivated via mutation of one or more residues of a catalytic domain or via truncation, and utilized with one or more RNA components to provide site-specific targeting, and the one or more components of the recombinase introduce a modification. In an embodiment, the IscB polypeptide is naturally catalytically inactive, for example, from Table 1E. In one embodiment, a naturally inactive IscB is provided with a recombinase, e.g., an integrase, and optionally a reverse transcriptase.

[0453] A recombinase generally is an enzyme that mediates recombination, e.g., breaking and rejoining, of nucleic acids at specific points. DNA site-specific recombinases include serine integrases, which are phage-encoded site-specific recombinases that promote conservative recombination reactions between DNA substrates located on the phage (phage attachment site, attP) and bacterial attachment site, attB. In one embodiment, the recombinase is a serine integrase that drives a highly directions site-specific recombination.

[0454] In preferred embodiments, the recombinase mediates unidirectional site-specific recombination. In one embodiment, the recombinase is a serine recombinase (SR) also referred to as a serine integrase, encoded, for example, by IS607 family, Tn4451, and bacteriophage phiC31. See, generally, Smith M C, Thorpe H M: Diversity in the serine recombinases. Mol Microbiol. 2002, 44:299-307. 10.1046/j. 1365-2958.2002.02891.x; Li et al., (2018) J. Mol. Biol. 430:21, 4401-4418.

[0455] In an embodiment, the recombinase is a tyrosine recombinase (YR) encoded by IS91, Helitron, IS200/IS605, Crypton or DIRS-retrotransposon families. See, generally, Goodwin T J, Butler M I, Poulter T: Cryptons: a group of tyrosine-recombinase-encoding DNA transposons from pathogenic fungi. Microbiology. 2003, 149:3099-3109. Doi: 10.1099/mic.0.26529-0; Cappello J, Handelsman K, Lodish H F: Sequence of Dictyostelium DIRS-1: an apparent retrotransposon with inverted terminal repeats and an internal circle junction sequence. Cell. 1985, 43:105-115. 10.1016/0092-8674(85)90016-9.

[0456] In an aspect, the recombinase provides site-specific integration of a template that can be provided with the composition, e.g., a donor oligonucleotide. Without being bound by theory, the recombinase allows for integration independent of payload size and can coordinate strand exchange and re-ligation across multiple cell types, allowing integration of long stretches of polynucleotides. In an exemplary embodiment, the serine recombinase is PhiC31 and the target is DNA. In an aspect, the phiC31 allows for integration of a target site comprising an attP or pseudoattP recognition site. See, e.g., systembio.com/wp-content/uploads/phiC31_productsheet-1.pdf. In an embodiment utilizing phiC231, a donor oligonucleotide would be provided with an attB at sequence that facilitates attachment at the attP site of the target genome. Similar approaches of designing donor oligonucleotides with sequences complementary to attachment sites for a recombinase can be designed for use with the present invention. See, e.g., Li et al., (2018) J. Mol. Biol. 430:21, 4401-4418.

[0457] In preferred embodiments, the integrase mediates gene integration at diverse loci by directing insertion with an IscB nickase fused to both a reverse transcriptase and an integrase. In one embodiment, the integrase is a serine integrase, encoded, for example, BxbINT. See, generally, Ioannidi et al., “Drag-and-drop genome insertion without DNA cleavage with CRISPR-directed integrases”; doi: 10.1101/2021.11.01.466786m incorporated herein by reference in its entirety. In Ioannidi, Gootenberg, Abudayyeh, and colleagues show integration using a CRISPR-Cas9 nickase fused to a reverse transcriptase and serine integrase termed Programmable Addition via Site-specific Targeting Elements (PASTE) with delivery via a single dose of plasmids with functionality in non-dividing and primary cells, utilizing a guide RNA comprising an AttB landing site, termed attachment site-containing guide RNA were used to insert sequences, including diverse cargo sequences that can be inserted across different loci, varying in size up to about 36 kb. Additional uses of the PASTE system included gene tagging, gene replacement, gene delivery, and protein production and secretion, approaches that are contemplated for use with the IscB nickase and integrase approach. In an aspect, the omega RNA may comprise an AttB landing site. In an aspect, the recombinase provides site-specific integration of a template that can be provided with the composition, e.g., a donor oligonucleotide.

[0458] Additional large serine integrases can be used with the IscB nickase, for example as identified and described in Durrant et al., Large-scale discovery of recombinases for integrating DNA into the human genome, doi: 10.1101/2021.11.05.467528, incorporated herein by reference. Other integrases include BceINT, SscINT, SacINT. See, Ioannidi, 2021 at and FIG. 6d, and FIG. 10a.

[0459] Without being bound by theory, the recombinase allows for integration independent of payload size and can coordinate strand exchange and re-ligation across multiple cell types, allowing integration of long stretches of polynucleotides. In an exemplary embodiment, the integrase is BxbINT and the target is DNA. In an aspect, the BxbINT allows for integration of a target site comprising an attP or pseudoattP recognition site. In an embodiment utilizing BxbINT, a donor oligonucleotide would be provided with an attB at sequence that facilitates attachment at the attP site of the target genome. Similar approaches of designing donor oligonucleotides with sequences complementary to attachment sites for an integrase can be designed for use with the present invention, for example a circular double-strand DNA template containing the AttP attachment site, or delivery of large cargo via an adenovirus or other viral vector, as described elsewhere herein. See, e.g., Ioannidi et al., 2021 at FIGS. 1a, 1b and 5b.

### IscB Topoisomerase Systems

[0460] The one or more functional domains may be one or more topoisomerase domains. In one embodiment, an engineered system for modifying a target polynucleotide comprising: an OMEGA IscB polypeptide, or CRISPR-associated IscB polypeptide; a topoisomerase domain; and a nucleic acid template comprising or encoding a donor polynucleotide to be inserted to a target sequence of the target polynucleotide. In some examples, two or more of: the IscB polypeptide or CRISPR-associated IscB polypeptide; topoisomerase domain; and nucleic acid template may form a complex. In some examples, two or more of: the IscB polypeptide or CRISPR-associated IscB polypeptide; topoisomerase domain, may be comprised in a fusion protein.

[0461] Topoisomerases are a class of enzymes that modify the topological state of DNA via the breakage and rejoining of nucleic acid strands. In some cases, a topoisomerase may be a DNA topoisomerase, which is an enzyme that controls and alters the topologic states of DNA during transcription, and catalyzes the transient breaking and rejoining of a single strand of DNA which allows the strands to pass through one another, thus altering the topology of DNA.

[0462] In one embodiment, the topoisomerase domain is capable of ligating the donor polynucleotide with the target polynucleotide. The ligation may be achieved by sticky end or blunt end ligation. In an example, the donor polynucleotide may comprise an overhang comprising a sequence complementary to a region of the target polynucleotide. Examples of ligating the donor polynucleotide with the target polynucleotide include those of TOPO cloning, e.g., those described in “The Technology Behind TOPO Cloning,” at www.thermofisher.com/us/en/home/life-science/cloning/topo/topo-resources/the-technology-behind-topo-cloning.html.

[0463] In one embodiment, the topoisomerase domain may be associated with the donor polynucleotide. For example, the topoisomerase domain is covalently linked to the donor polynucleotide.

[0464] In one embodiment, a topoisomerase domain may be provided together with, e.g., associated (e.g., fused) with a IscB polypeptide or CRISPR-associated IscB polypeptide (e.g., an IscB polypeptide or CRISPR-associated IscB polypeptide or a variant thereof such as a dead IscB or an IscB nickase). Alternatively, or additionally, the topoisomerase domain may be on a molecule different from the IscB polypeptide or CRISPR-associated IscB polypeptide. In some cases, the topoisomerase domain may be associated with a donor polynucleotide. For example, the topoisomerase domain may be pre-loaded covalently with a donor DNA molecule. Such design may allow for efficient ligation of only a specific cargo. The topoisomerase domain may ligate the donor polynucleotide (e.g., a DNA molecule) to a target site on a target polynucleotide (e.g., a free double-stranded DNA end). In one embodiment, the donor polynucleotide may have an overhang that comprises a sequence complementary to a region of the target polynucleotide. For example, the overhang may invade into the target polynucleotide at a cut site generated by the IscB polypeptide or CRISPR-associated IscB polypeptide.

[0465] Examples of topoisomerases include type I, including type IA and type IB topoisomerases, which cleave a single strand of a double-stranded nucleic acid molecule, and type II topoisomerases (e.g., gyrases), which cleave both strands of a double-stranded nucleic acid molecule.

[0466] Type IA and IB topoisomerases cleave one strand of a double-stranded nucleic acid molecule. In some examples, the cleavage of a double-stranded nucleic acid molecule by type IA topoisomerases generates a 5′ phosphate and a 3′ hydroxyl at the cleavage site, with the type IA topoisomerase covalently binding to the 5′ terminus of a cleaved strand. Cleavage of a double-stranded nucleic acid molecule by type IB topoisomerases may generate a 3′ phosphate and a 5′ hydroxyl at the cleavage site, with the type IB topoisomerase covalently binding to the 3′ terminus of a cleaved strand.

[0467] Examples of Type IA topoisomerases include E. coli topoisomerase I, E. coli topoisomerase III, eukaryotic topoisomerase II, archeal reverse gyrase, yeast topoisomerase III, Drosophila topoisomerase III, human topoisomerase III, Streptococcus pneumoniae topoisomerase III, and the like, including other type IA topoisomerases. A DNA-protein adduct is formed with the enzyme covalently binding to the 5′-thymidine residue, with cleavage occurring between the two thymidine residues.

[0468] Examples of Type IB topoisomerases include the nuclear type I topoisomerases present in all eukaryotic cells and those encoded by Vaccinia and other cellular poxviruses. The eukaryotic type IB topoisomerases are exemplified by those expressed in yeast, Drosophila and mammalian cells, including human cells. Viral type IB topoisomerases are exemplified by those produced by the vertebrate poxviruses (Vaccinia, Shope fibroma virus, ORF virus, fowlpox virus, and molluscum contagiosum virus), and the insect poxvirus (Amsacta moorei entomopoxvirus).

[0469] Examples of Type II topoisomerases include, bacterial gyrase, bacterial DNA topoisomerase IV, eukaryotic DNA topoisomerase II, and T-even phage encoded DNA topoisomerases. Type II topoisomerases may have both cleaving and ligating activities. Substrate double-stranded nucleic acid molecules of type II topoisomerase can be prepared such that the type II topoisomerase can form a covalent linkage to one strand at a cleavage site. For example, calf thymus type II topoisomerase can cleave a substrate ds nucleic acid molecule containing a 5′ recessed topoisomerase recognition site positioned three nucleotides from the 5′ end, resulting in dissociation of the three nucleic acid molecule 5′ to the cleavage site and covalent binding of the topoisomerase to the 5′ terminus of the ds nucleic acid molecule. Furthermore, upon contacting such a type II topoisomerase-charged ds nucleic acid molecule with a second nucleic acid molecule containing a 3′ hydroxyl group, the type II topoisomerase can ligate the sequences together, and then is released from the recombinant nucleic acid molecule.

[0470] In some examples, the topoisomerase is DNA topoisomerase I, e.g., a Vaccinia virus topoisomerase I. The topoisomerase may be pre-loaded with a donor polynucleotide. The Vaccinia virus topoisomerase may need a target comprising a 5′-OH group.

### IscB Phosphatase System

[0471] The systems herein may further comprise a phosphatase domain. A phosphatase is an enzyme capable of removing a phosphate group from a molecule e.g., a nucleic acid such as DNA. Examples of phosphatases include calf intestinal phosphatase, shrimp alkaline phosphatase, Antarctic phosphatase, and APEX alkaline phosphatase.

[0472] In some examples, the 5′-OH group of in the target polynucleotide may be generated by a phosphatase. A topoisomerase compatible with a 5′ phosphate target may be used to generate stable loaded intermediates. In some cases, an IscB polypeptide or CRISPR-associated IscB polypeptide nuclease that leaves a 5′ OH after cleaving the target polynucleotide may be used. In some cases, the phosphatase domain may be associated with (e.g., fused to) the IscB protein. The phosphatase domain may be capable of generating a —OH group at a 5′ end of the target polynucleotide. The phosphatase may be delivered separated from other components in the system, e.g., as a separate protein, on a separate vector from other components.

### IscB Polyermase System

[0473] The systems herein may further comprise a polymerase domain. A polymerase refers to an enzyme that synthesizes chains of nucleic acids. The polymerase may be a DNA polymerase or an RNA polymerase.

[0474] In one embodiment, the systems comprise an engineered system for modifying a target polynucleotide comprising: an OMEGA IscB polypeptide, or CRISPR-associated IscB, polypeptide; a DNA polymerase domain; and a DNA template comprising a donor polynucleotide to be inserted to a target sequence of the target polynucleotide. In some examples, two or more of: the IscB protein; DNA polymerase domain; and DNA template may form a complex. In some examples, two or more of: the IscB protein; DNA polymerase domain; are comprised in a fusion protein. For example, the IscB polypeptide or CRISPR-associated IscB polypeptide and DNA polymerase domain may be comprised in a fusion protein.

[0475] In one embodiment, the systems may comprise an IscB polypeptide or CRISPR-associated IscB polypeptide nuclease (or variant thereof such as a dIscB polypeptide or CRISPR-associated IscB polypeptide or IscB polypeptide or CRISPR-associated IscB polypeptide nickase) and a DNA polymerase (e.g., phi29, T4, T7 DNA polymerase). The systems may further comprise a single-stranded DNA or double-stranded DNA template. The DNA template may comprise i) a first sequence homologous to a target site of the IscB protein on the target polynucleotide, and/or ii) a second sequence homologous to another region of the target polynucleotide. In one embodiment, the template may be a synthetic single-stranded or PCR-generated DNA molecule, (optionally end-protected by modified nucleotides), or a viral genome (e.g., AAV). In another embodiment, the template is generated using a reverse transcriptase. When the system is delivered into a cell, an endogenous DNA polymerase in the cell may be used. Alternatively, or additionally, an exogenous DNA polymerase may be expressed in the cell.

[0476] The DNA template may be end-protected by one or more modified nucleotides, or comprise a portion of a viral genome. In some embodiment, the DNA template comprises LNA or other modifications (e.g., at the 3′ end). The presence of LNA and/or the modifications may lead to more efficient annealing with the 3′ flap generated by IscB polypeptide or CRISPR-associated IscB polypeptide cleavage.

[0477] Examples of DNA polymerase include Taq, Tne (exo−), Tma (exo−), Pfu (exo−), Pwo (exo−), Thermoanaerobacter thermohydrosulfuricus DNA polymerase, Thermococcus litoralis DNA polymerase I, E. coli DNA polymerase I, Taq DNA polymerase I, Tth DNA polymerase I, Bacillus stearothermophilus (Bst) DNA polymerase I, E. coli DNA polymerase III, bacteriophage T5 DNA polymerase, bacteriophage M2 DNA polymerase, bacteriophage T4 DNA polymerase, bacteriophage T7 DNA polymerase, bacteriophage phi29 DNA polymerase, bacteriophage PRD1 DNA polymerase, bacteriophage phi15 DNA polymerase, bacteriophage phi21DNA polymerase, bacteriophage PZE DNA polymerase, bacteriophage PZA DNA polymerase, bacteriophage Nf DNA polymerase, bacteriophage M2Y DNA polymerase, bacteriophage B103 DNA polymerase, bacteriophage SF5 DNA polymerase, bacteriophage GA-1 DNA polymerase, bacteriophage Cp-5 DNA polymerase, bacteriophage Cp-7 DNA polymerase, bacteriophage PR4 DNA polymerase, bacteriophage PR5 DNA polymerase, bacteriophage PR722 DNA polymerase and bacteriophage L17 DNA polymerase.

### IscB Reverse Transcriptase Systems

[0478] The one or more functional domains may comprise alone, or in addition to, additional functional domains, one or more reverse transcriptase domains. In one embodiment, the systems comprise an engineered system for modifying a target polynucleotide comprising: an OMEGA IscB polypeptide or CRISPR-associated IscB polypeptide or a variant thereof (e.g., dIscB); a reverse transcriptase (RT) domain; a RNA template comprising or encoding a donor polynucleotide to be inserted to a target sequence of the target polynucleotide; and an ωRNA or guide RNA molecule (i.e., a naturally single guide RNA molecule comprising a scaffold for reprogamming).

[0479] The reverse transcriptase may generate single-strand DNA based on the RNA template. The single-strand DNA may be generated by a non-retron, retron, or diversity generating retroelement (DGR). In some examples, the single-strand DNA may be generated from a self-priming RNA template. A self-priming RNA template may be used to generate a DNA without the need of a separate primer.

[0480] A reverse transcriptase domain may be a reverse transcriptase or a fragment thereof. A wide variety of reverse transcriptases (RT) may be used in alternative embodiments of the present invention, including prokaryotic and eukaryotic RT, provided that the RT functions within the host to generate a donor polynucleotide sequence from the RNA template. If desired, the nucleotide sequence of a native RT may be modified, for example using known codon optimization techniques, so that expression within the desired host is optimized. A reverse transcriptase (RT) is an enzyme used to generate complementary DNA (cDNA) from an RNA template, a process termed reverse transcription. Reverse transcriptases are used by retroviruses to replicate their genomes, by retrotransposon mobile genetic elements to proliferate within the host genome, by eukaryotic cells to extend the telomeres at the ends of their linear chromosomes, and by some non-retroviruses such as the hepatitis B virus, a member of the Hepadnaviridae, which are dsDNA-RT viruses. Retroviral RT has three sequential biochemical activities: RNA-dependent DNA polymerase activity, ribonuclease H, and DNA-dependent DNA polymerase activity. Collectively, these activities enable the enzyme to convert single-stranded RNA into double-stranded cDNA. In an embodiment, the RT domain of a reverse transcriptase is used in the present invention. The domain may include only the RNA-dependent DNA polymerase activity. In some examples, the RT domain is non-mutagenic, i.e., does not cause mutation in the donor polynucleotide (e.g., during the reverse transcriptase process). In some examples, the RT domain may be non-retron RT, e.g., a viral RT or a human endogenous RT. In some examples, the RT domain may be retron RT or DGRs RT. In some examples, the RT may be less mutagenic than a counterpart wildtype RT. In one embodiment, the RT herein is not mutagenic.

### Retrons

[0481] In an embodiment, a donor template for homologous recombination is generated by use of a self-priming RNA template for reverse transcription. A non-limiting example of a self-priming reverse transcription system is the retron system. By the term “retron,” it is meant a genetic element which encodes components enabling the synthesis of branched RNA-linked single stranded DNA (msDNA) and a reverse transcriptase. Retrons which encode msDNA are known in the art, for example, but not limited to U.S. Pat. Nos. 6,017,737; 5,849,563; 5,780,269; 5,436,141; 5,405,775; 5,320,958; CA 2,075,515; all of which are herein incorporated by reference.

[0482] In an embodiment, the reverse transcriptase domain is a retron RT domain. In an embodiment, the RNA template encodes a retron RNA template that is recognized and reverse transcribed by the retron reverse transcriptase domain. Conserved across many bacterial species, retrons are highly efficient reverse transcription systems of relatively unknown function. The retron system consists of the retron RT protein, as well as the msr and msd transcripts, which function as the primer and template sequences, respectively. All components of the retron system are expressed from a single open reading frame as a single transcript including the msr-msd and encoding the retron RT protein (Lampson, et al., 2005, Retrons, msDNA, and the bacterial genome. Cytogenet Genome Res 110:491-499). The msr element ORF of a retron provides for the RNA portion of the msDNA molecule, while the msd element ORF provides for the DNA portion of the msDNA molecule. The primary transcript from the msr-msd region is thought to serve as both a template and a primer to produce the msDNA. Synthesis of msDNA is primed from an internal rG residue of the RNA transcript using its 2′-OH group. Modification of msd, or msr may also be made to permit insertion of a RNA template encoding a donor polynucleotide within the msd without altering the functioning of or the production of msDNA. The RNA template encoding a donor polynucleotide sequence may be any length but is preferably less than about 5 kb nucleotides, or also less than about 2 kb, or also less than 500 bases, provided that an msDNA product is produced.

### IscB Ligase Systems

[0483] In general, the systems comprise an OMEGA IscB polypeptide, or CRISPR-associated IscB, polypeptide and a ligase associated with the IscB protein. The OMEGA IscB polypeptide, or CRISPR-associated IscB polypeptide, may be recruited to the target sequence by an ωRNA, or guide RNA, and generate a break on the target sequence. The ωRNA or guide RNA may further comprise a template sequence with desired mutations or other sequence elements. The template sequence may be ligated to the target sequence to introduce the mutations or other sequence elements to the nucleic acid molecule. The OMEGA IscB polypeptide, or CRISPR-associated IscB polypeptide, may be a nickase that generates a single-strand break on nucleic acid molecule, and the ligase may be a single-strand DNA ligase. In one embodiment, the systems comprise a pair of OMEGA IscB polypeptide-ligase, or CRISPR-associated IscB polypeptide-ligases complexes, with two distinct ωRNA (or guide) sequences. Each OMEGA IscB polypeptide, or CRISPR-associated IscB polypeptide-ligase complex, can target one strand of a double-stranded polynucleotide, and work together to effectively modify the sequence of the double-stranded polynucleotides.

[0484] In some examples, the IscB polypeptide or CRISPR-associated IscB polypeptide is associated with a ligase or functional fragment thereof. The ligase may ligate a single-strand break (a nick) generated by the IscB polypeptide or CRISPR-associated IscB polypeptide. In certain cases, the ligase may ligate a double-strand break generated by the IscB polypeptide or CRISPR-associated IscB polypeptide. In certain examples, the IscB polypeptide or CRISPR-associated IscB polypeptide is associated with a reverse transcriptase or functional fragment thereof.

[0485] The present invention further provides systems and methods of modifying a nucleic acid sequence using a pair of distinct IscB polypeptide or CRISPR-associated IscB polypeptide-ligase-ωRNA or guide RNA complexes, said systems and methods comprising: (a) an engineered IscB polypeptide or CRISPR-associated IscB polypeptide connected to or complexed with a ligase; (b) two distinct ωRNA or guide RNA sequences complexed with such IscB polypeptide or CRISPR-associated IscB polypeptide-ligase protein complex to form a first and a second distinct IscB-ligase ωRNA complexes; (c) the first IscB-ligase-ωRNA or guide RNA complex binding to one strand of a target double-stranded polynucleotide sequence, and the second IscB polypeptide or CRISPR-associated IscB polypeptide-ligase-ωRNA or guide RNA complex binding to another strand of the target double-stranded polynucleotide sequence; (d) upon binding of the said complexes to the locus of interest the effector protein induces the modification of the sequences associated with or at the target locus of interest, whereby the two IscB polypeptide or CRISPR-associated IscB polypeptide-ligase-ωRNA or guide RNA complexes work together on different strands of the double-stranded target sequence and modify the sequence.

[0486] One of the advantages of using such a “pair” of IscB polypeptide or CRISPR-associated IscB polypeptide-ligase-ωRNA or guide RNA complexes includes high efficiency in modifying the sequence associated with or at the locus of interest of target double-stranded polynucleotides.

[0487] In one embodiment, the IscB polypeptide or CRISPR-associated IscB polypeptide can be a nickase. In a preferred embodiment, a ligase is linked to the IscB polypeptide or CRISPR-associated IscB polypeptide. The ligase can ligate the donor sequence to the target sequence. The ligase can be a single-strand DNA ligase or a double-strand DNA ligase. The ligase can be fused to the carboxyl-terminus of a IscB polypeptide or CRISPR-associated IscB polypeptide, or to the amino-terminus of a IscB polypeptide or CRISPR-associated IscB polypeptide.

[0488] As used herein the term “ligase” refers to an enzyme, which catalyzes the joining of breaks (e.g., double-stranded breaks or single-stranded breaks (“nicks”) between adjacent bases of nucleic acids. For example, a ligase may be an enzyme capable of forming intra- or inter-molecular covalent bonds between a 5′ phosphate group and a 3′ hydroxyl group. The term “ligate” refers to the reaction of covalently joining adjacent oligonucleotides through formation of an internucleotide linkage.

[0489] DNA ligases fall into two general categories: ATP-dependent DNA ligases (EC 6.5.1.1), and NAD (+) dependent DNA ligases (EC 6.5.1.2). NAD (+) dependent DNA ligases are found only in bacteria (and some viruses) while ATP-dependent DNA ligases are ubiquitous. The ATP-dependent DNA ligases can be divided into four classes: DNA ligase I, II, III, and IV. DNA ligase I links Okazaki fragments to form a continuous strand of DNA; DNA ligase II is an alternatively spliced form of DNA ligase III, found only in non-dividing cells; DNA ligase III is involved in base excision repair; and DNA ligase IV is involved in the repair of DNA double-strand breaks by non-homologous end joining (NHEJ). Amongst all ligases, there are two types of prokaryotic and one type of eukaryotic ligases that are particularly well suited for facilitating the blunt-ended, double-stranded DNA ligation: Prokaryotic DNA ligases (T3 and T4) and Eukaryotic DNA ligase (Ligase 1).

[0490] In some cases, the ligase is specific for double-stranded nucleic acids (e.g., dsDNA, dsRNA, RNA/DNA duplex). An example of a ligase specific for double-stranded DNA and DNA/RNA hybrids is T4 DNA ligase. In some cases, the ligase is specific for single-stranded nucleic acids (e.g., ssDNA, ssRNA). An example of such ligase is CircLigase II. In some cases, the ligase is specific for RNA/DNA duplexes. In some cases, the ligase is able to work on single-stranded, double-stranded, and/or RNA/DNA nucleic acids in any combination.

[0491] In some cases, the ligase may be a pan-ligase, which is a single ligase with the ability to ligate both DNA and RNA targets. The ligase may be specific for a target (e.g., DNA-specific or RNA-specific). In some cases, the ligase may be a dual ligase system that include DNA-specific, RNA-specific, and/or pan-ligases, in any combination.

[0492] Examples of ligases that can be used with the disclosure include T4 DNA Ligase, T3 DNA Ligase, T7 DNA Ligase, E. coli DNA Ligase, HiFi Taq DNA Ligase, 9° N™ DNA Ligase, Taq DNA Ligase, SplintR® Ligase (also known as. PBCV-1 DNA Ligase or Chlorella virus DNA Ligase), Thermostable 5′ AppDNA/RNA Ligase, T4 RNA Ligase, T4 RNA Ligase 2, T4 RNA Ligase 2 Truncated, T4 RNA Ligase 2 Truncated K227Q, T4 RNA Ligase 2, Truncated KQ, RtcB Ligase (joins single stranded RNA with a 3″-phosphate or 2′,3′-cyclic phosphate to another RNA), CircLigase II, CircLigase ssDNA Ligase, CircLigase RNA Ligase, or Ampligase® Thermostable DNA Ligas, NAD-dependent ligases including Taq DNA ligase, Thermus filiformis DNA ligase, Escherichia coliDNA ligase, Tth DNA ligase, Thermus scotoductus DNA ligase (I and II), thermostable ligase, Ampligase thermostable DNA ligase, VanC-type ligase, 9° N DNA Ligase, Tsp DNA ligase, and novel ligases discovered by bioprospecting; ATP-dependent ligases including T4 RNA ligase, T4 DNA ligase, T3 DNA ligase, T7 DNA ligase, Pfu DNA ligase, DNA ligase I, DNA ligase III, DNA ligase IV, and novel ligases discovered by bioprospecting, and wild-type, mutant isoforms, and genetically engineered variants thereof.

[0493] In one embodiment, the examples of the ligases include those used in sequencing by synthesis or sequencing by ligation reactions.

### Multiplexing

[0494] In one embodiment, an IscB polypeptide or CRISPR-associated IscB polypeptide nucleases may be used in a multiplex (tandem) targeting approach. For example, an IscB polypeptide or CRISPR-associated IscB polypeptide nuclease herein can employ more than one RNA guide without losing activity. This may enable the use of the IscB polypeptide or CRISPR-associated IscB polypeptide nuclease, systems or complexes as defined herein for targeting multiple DNA targets, genes or gene loci, with a single enzyme, system or complex as defined herein. The ωRNA or guide RNAs may be tandemly arranged, optionally separated by a nucleotide sequence such as a conserved nucleotide sequence as defined herein. The position of the different ωRNA or guide RNAs is the tandem does not influence the activity.

[0495] In one aspect, the IscB polypeptide or CRISPR-associated IscB polypeptide nucleases may be used for tandem or multiplex targeting. It is to be understood that any of the IscB polypeptide or CRISPR-associated IscB polypeptide nucleases, complexes, or compositions herein elsewhere may be used in such an approach. Any of the methods, products, compositions and uses as described herein elsewhere are equally applicable with the multiplex or tandem targeting approach further detailed below. By means of further guidance, the following particular aspects and embodiments are provided.

[0496] In one aspect, the invention provides for the use of a IscB polypeptide or CRISPR-associated IscB polypeptide nuclease, complex or system as defined herein for targeting multiple gene loci. In one embodiment, this can be established by using multiple (tandem or multiplex) ωRNA or guide RNA (gRNA) sequences. In an embodiment, a double nickase system is provided, wherein two or more IscB nickases are provided for modifying multiple target polynucleotides. In an aspect, the ωRNAs specifically targets its corresponding nucleic acid molecule, e.g., DNA molecule. In one embodiment, the ωRNAs target locations on opposite strands of the same double stranded DNA molecule. In an embodiment, the ωRNAs target locations on the same strand DNA molecule. In an embodiment, the two or more ωRNAs sequences direct sequence-specific binding of the IscB system to sense and antisense strands of the target sequence and introduce one or more double strand break(s) to the target sequence.

[0497] In one aspect, the invention provides methods for using one or more elements of an IscB polypeptide or CRISPR-associated IscB polypeptide nuclease, complex or system as defined herein for tandem or multiplex targeting, wherein said system herein comprises multiple ωRNA or guide RNA sequences. Said ωRNA or gRNA sequences are separated by a nucleotide sequence, such as a conserved nucleotide sequence as defined herein elsewhere.

[0498] The IscB polypeptide or CRISPR-associated IscB polypeptide nucleases, compositions, systems or complexes as defined herein provides an effective means for modifying multiple target polynucleotides. The IscB polypeptide or CRISPR-associated IscB polypeptide nuclease, system or complex as defined herein has a wide variety of utility including modifying (e.g., deleting, inserting, translocating, inactivating, activating) one or more target polynucleotides in a multiplicity of cell types. As such, the IscB polypeptide or CRISPR-associated IscB polypeptide nuclease, system or complex as defined herein of the invention has a broad spectrum of applications in, e.g., gene therapy, drug screening, disease diagnosis, and prognosis, including targeting multiple gene loci within a single system.

[0499] In one aspect, the present disclosure provides an IscB polypeptide or CRISPR-associated IscB polypeptide nuclease, system or complex as defined herein, having an IscB polypeptide or CRISPR-associated IscB polypeptide nuclease having at least one destabilization domain associated therewith, and multiple guide RNAs that target multiple nucleic acid molecules such as DNA molecules, whereby each of said multiple guide RNAs specifically targets its corresponding nucleic acid molecule, e.g., DNA molecule. In one embodiment, the IscB polypeptide or CRISPR-associated IscB polypeptide nuclease used for multiplex targeting is associated with one or more functional domains. In some more specific embodiments, the IscB polypeptide or CRISPR-associated IscB polypeptide nuclease used for multiplex targeting is a dead IscB polypeptide nuclease. The inventors have found that the IscB polypeptide or CRISPR-associated IscB polypeptide nuclease as described herein may enable improved and/or direct access to one or more nucleotides involved in the DNA: RNA duplex.

[0500] Each nucleic acid molecule target, e.g., DNA molecule, can encode a gene product or encompass a gene locus. Using multiple ωRNA or guide RNAs hence enables the targeting of multiple gene loci or multiple genes. In one embodiment, the IscB polypeptide or CRISPR-associated IscB polypeptide nuclease may cleave the DNA molecule encoding the gene product. In one embodiment expression of the gene product is altered. The IscB polypeptide or CRISPR-associated IscB polypeptide nuclease and the guide RNAs do not naturally occur together. The present disclosure comprehends the ωRNA or guide RNAs comprising tandemly arranged guide sequences. The present disclosure further comprehends coding sequences for the IscB polypeptide or CRISPR-associated IscB polypeptide nuclease being codon optimized for expression in a eukaryotic cell. In an embodiment the eukaryotic cell is a mammalian cell, a plant cell or a yeast cell and in a more preferred embodiment the mammalian cell is a human cell. Expression of the gene product may be decreased. The IscB polypeptide or CRISPR-associated IscB polypeptide nuclease may form part of a system or complex, which further comprises tandemly arranged ωRNA or guide RNAs (gRNAs) comprising a series of 2, 3, 4, 5, 6, 7, 8, 9, 10, 15, 25, 25, 30, or more than 30 guide sequences, each capable of specifically hybridizing to a target sequence in a genomic locus of interest in a cell. In one embodiment, the functional system or complex binds to the multiple target sequences. In one embodiment, the functional system or complex may edit the multiple target sequences, e.g., the target sequences may comprise a genomic locus, and, in one embodiment, there may be an alteration of gene expression. In one embodiment, the functional system or complex may comprise further functional domains. In one embodiment, the invention provides a method for altering or modifying expression of multiple gene products. The method may comprise introducing into a cell containing said target nucleic acids, e.g., DNA molecules, or containing and expressing target nucleic acid, e.g., DNA molecules; for instance, the target nucleic acids may encode gene products or provide for expression of gene products (e.g., regulatory sequences).

### Inducible Systems

[0501] In one embodiment, an IscB polypeptide or CRISPR-associated IscB polypeptide nuclease may form a component of an inducible system. The inducible nature of the system would allow for spatiotemporal control of gene editing or gene expression using a form of energy. The form of energy may include but is not limited to electromagnetic radiation, sound energy, chemical energy and thermal energy. Examples of inducible system include tetracycline inducible promoters (Tet-On or Tet-Off), small molecule two-hybrid transcription activations systems (FKBP, ABA, etc.), or light inducible systems (Phytochrome, LOV domains, or cryptochrome). In one embodiment, the IscB polypeptide or CRISPR-associated IscB polypeptide nuclease may be a part of a Light Inducible Transcriptional Effector (LITE) to direct changes in transcriptional activity in a sequence-specific manner. The components of a light may include an IscB polypeptide or CRISPR-associated IscB polypeptide nuclease, a light-responsive cytochrome heterodimer (e.g., from Arabidopsis thaliana), and a transcriptional activation/repression domain. Further examples of inducible DNA binding proteins and methods for their use are provided in U.S. Provisional Application Nos. 61/736,465 and U.S. 61/721,283, and International Patent Publication No. WO 2014/018423 A2 which is hereby incorporated by reference in its entirety.

### Self-Inactivating Systems

[0502] Once all copies of a gene in the genome of a cell have been edited, continued expression of the system in that cell is no longer necessary. Indeed, sustained expression would be undesirable in case of off-target effects at unintended genomic sites, etc. Thus time-limited expression would be useful. Inducible expression offers one approach, but in addition Applicants have engineered a self-Inactivating system that relies on the use of a non-coding guide target sequence within the vector itself. Thus, after expression begins, the system will lead to its own destruction, but before destruction is complete it will have time to edit the genomic copies of the target gene (which, with a normal point mutation in a diploid cell, requires at most two edits). Simply, the self-inactivating system includes additional RNA (e.g., guide RNA) that targets the coding sequence for the IscB polypeptide or CRISPR-associated IscB polypeptide nuclease itself or that targets one or more non-coding guide target sequences complementary to unique sequences present in one or more of the following: (a) within the promoter driving expression of the non-coding RNA elements, (b) within the promoter driving expression of the IscB polypeptide or CRISPR-associated IscB polypeptide nuclease gene, (c) within 100 bp of the ATG translational start codon in the IscB polypeptide nuclease coding sequence, (d) within the inverted terminal repeat (iTR) of a viral delivery vector, e.g., in the AAV genome.

[0503] In some aspects, a single ωRNA or gRNA is provided that is capable of hybridization to a sequence downstream of an IscB polypeptide or CRISPR-associated IscB polypeptide nuclease start codon, whereby after a period of time there is a loss of the IscB polypeptide or CRISPR-associated IscB polypeptide nuclease expression. In some aspects, one or more ωRNA or gRNA(s) are provided that are capable of hybridization to one or more coding or non-coding regions of the polynucleotide encoding the system, whereby after a period of time there is a inactivation of one or more, or in some cases all, of the system. In some aspects of the system, and not to be limited by theory, the cell may comprise a plurality of complexes, wherein a first subset of complexes comprise a first ωRNA or guide RNA capable of targeting a genomic locus or loci to be edited, and a second subset of complexes comprise at least one ωRNA or second guide RNA capable of targeting the polynucleotide encoding the system, wherein the first subset of complexes mediate editing of the targeted genomic locus or loci and the second subset of complexes eventually inactivate the system, thereby inactivating further expression in the cell.

[0504] The various coding sequences (IscB polypeptide or CRISPR-associated IscB polypeptide nuclease and guide RNAs) can be included on a single vector or on multiple vectors. For instance, it is possible to encode the enzyme on one vector and the various RNA sequences on another vector, or to encode the enzyme and one ωRNA or guide RNA on one vector, and the remaining ωRNA or guide RNA on another vector, or any other permutation. In general, a system using a total of one or two different vectors is preferred.

[0505] Where multiple vectors are used, it is possible to deliver them in unequal numbers, and ideally with an excess of a vector which encodes the first ωRNA or guide RNA relative to the second ωRNA or guide RNA, thereby assisting in delaying final inactivation of the system until genome editing has had a chance to occur.

[0506] The first ωRNA or guide RNA can target any target sequence of interest within a genome, as described elsewhere herein. The second ωRNA or guide RNA targets a sequence within the vector which encodes the IscB polypeptide or CRISPR-associated IscB polypeptide nuclease, and thereby inactivates the enzyme's expression from that vector. Thus, the target sequence in the vector must be capable of inactivating expression. Suitable target sequences can be, for instance, near to or within the translational start codon for the IscB polypeptide or CRISPR-associated IscB polypeptide nuclease coding sequence, in a non-coding sequence in the promoter driving expression of the non-coding RNA elements, within the promoter driving expression of the IscB polypeptide nuclease gene, within 100 bp of the ATG translational start codon in the IscB polypeptide nuclease coding sequence, and/or within the inverted terminal repeat (iTR) of a viral delivery vector, e.g., in the AAV genome. A double stranded break near this region can induce a frame shift in the IscB polypeptide nuclease coding sequence, causing a loss of protein expression. An alternative target sequence for the “self-inactivating” ωRNA or guide RNA would aim to edit/inactivate regulatory regions/sequences needed for the expression of the system or for the stability of the vector. For instance, if the promoter for the IscB polypeptide or CRISPR-associated IscB polypeptide nuclease coding sequence is disrupted then transcription can be inhibited or prevented. Similarly, if a vector includes sequences for replication, maintenance or stability then it is possible to target these. For instance, in a AAV vector a useful target sequence is within the iTR. Other useful sequences to target can be promoter sequences, polyadenylation sites, etc.

[0507] Furthermore, if the ωRNA or guide RNAs are expressed in array format, the “self-inactivating” ωRNA or guide RNAs that target both promoters simultaneously will result in the excision of the intervening nucleotides from within the IscB polypeptide or CRISPR-associated IscB polypeptide nuclease expression construct, effectively leading to its complete inactivation. Similarly, excision of the intervening nucleotides will result where the ωRNA or guide RNAs target both ITRs, or targets two or more other components simultaneously. Self-inactivation as explained herein is applicable, in general, with systems in order to provide regulation of the systems. For example, self-inactivation as explained herein may be applied to the repair of mutations, for example expansion disorders, as explained herein. As a result of this self-inactivation, repair may be only transiently active.

[0508] Addition of non-targeting nucleotides to the 5′ end (e.g., 1-10 nucleotides, preferably 1-5 nucleotides) of the “self-inactivating” ωRNA or guide RNA can be used to delay its processing and/or modify its efficiency as a means of ensuring editing at the targeted genomic locus prior to shut down.

[0509] In one aspect of the self-inactivating AAV system, plasmids that co-express one or more ωRNA or guide RNA targeting genomic sequences of interest (e.g., 1-2, 1-5, 1-10, 1-15, 1-20, 1-30) may be established with “self-inactivating” ωRNA or guide RNAs that target an IscB polypeptide or CRISPR-associated IscB polypeptide nuclease sequence at or near the engineered ATG start site (e.g., within 5 nucleotides, within 15 nucleotides, within 30 nucleotides, within 50 nucleotides, within 100 nucleotides). A regulatory sequence in the U6 promoter region can also be targeted with an ωRNA or guide RNA. The U6-driven guide RNAs may be designed in an array format such that multiple ωRNA or guide RNA sequences can be simultaneously released. When first delivered into target tissue/cells (left cell), ωRNA or guide RNAs begin to accumulate while IscB polypeptide or CRISPR-associated IscB polypeptide nuclease levels rise in the nucleus. IscB polypeptide or CRISPR-associated IscB polypeptide nuclease complexes with all of the guide RNAs to mediate genome editing and self-inactivation of the IscB polypeptide or CRISPR-associated IscB polypeptide nuclease plasmids.

[0510] One aspect of a self-inactivating system is expression of singly or in tandem array format from 1 up to 4 or more different ωRNA or guide sequences, e.g., up to about 20 or about 30 ωRNA or guide sequences. Each individual self-inactivating ωRNA or guide sequence may target a different target. Such may be processed from, e.g., one chimeric pol3 transcript. Pol3 promoters such as U6 or H1 promoters may be used. Pol2 promoters such as those mentioned throughout herein. Inverted terminal repeat (iTR) sequences may flank the Pol3 promoter-ωRNA or guide RNA(s)-Pol2 promoter-IscB polypeptide or CRISPR-associated IscB polypeptide nuclease.

[0511] One aspect of a tandem array transcript is that one or more ωRNA or guide(s) edit the one or more target(s) while one or more self-inactivating ωRNA or guides inactivate the system. Thus, for example, the described system for repairing expansion disorders may be directly combined with the self-inactivating system described herein. Such a system may, for example, have two ωRNA or guides directed to the target region for repair as well as at least a third ωRNA or guide directed to self-inactivation of the IscB polypeptide or CRISPR-associated IscB polypeptide nuclease or systems.

[0512] The ωRNA or guide RNA may be a control guide. For example, it may be engineered to target a nucleic acid sequence encoding the IscB polypeptide or CRISPR-associated IscB polypeptide nuclease itself, as described in U.S. Patent Publication No. US2015232881A1, the disclosure of which is hereby incorporated by reference. In one embodiment, a system or composition may be provided with just the ωRNA or guide RNA engineered to target the nucleic acid sequence encoding the IscB polypeptide or CRISPR-associated IscB polypeptide nuclease. In addition, the system or composition may be provided with the ωRNA or guide RNA engineered to target the nucleic acid sequence encoding the IscB polypeptide or CRISPR-associated IscB polypeptide nuclease, as well as nucleic acid sequence encoding the IscB polypeptide or CRISPR-associated IscB polypeptide nuclease and, optionally a second ωRNA or guide RNA and, further optionally, a repair template. The second ωRNA or guide RNA may be the primary target of the system or composition (such a therapeutic, diagnostic, knock out etc. as defined herein). In this way, the system or composition is self-inactivating. This is exemplified in relation to Cas in US2015232881A1 (also published as WO2015070083 (A1) referenced elsewhere herein, and may be extrapolated to other IscB polypeptide or CRISPR-associated IscB polypeptide nuclease, e.g., IscB polypeptides.

### Polynucleotides Encoding Iscb Systems and Vectors

[0513] The systems herein may comprise one or more polynucleotides. The polynucleotide(s) may comprise coding sequences of components of the systems herein, e.g., IscB polypeptide ωRNA(s), functional domain(s), donor polynucleotide(s), and/or other components in the systems. The present disclosure further provides vectors or vector systems comprising one or more polynucleotides herein. The vectors or vector systems include those described in the delivery sections herein.

[0514] The terms “polynucleotide”, “nucleotide”, “nucleotide sequence”, “nucleic acid” and “oligonucleotide” are used interchangeably. They refer to a polymeric form of nucleotides of any length, either deoxyribonucleotides or ribonucleotides, or analogs thereof. Polynucleotides may have any three-dimensional structure, and may perform any function, known or unknown. The following are non-limiting examples of polynucleotides: coding or non-coding regions of a gene or gene fragment, loci (locus) defined from linkage analysis, exons, introns, messenger RNA (mRNA), transfer RNA, ribosomal RNA, short interfering RNA (siRNA), short-hairpin RNA (shRNA), micro-RNA (miRNA), ribozymes, cDNA, recombinant polynucleotides, branched polynucleotides, plasmids, vectors, isolated DNA of any sequence, isolated RNA of any sequence, nucleic acid probes, and primers. The term also encompasses nucleic-acid-like structures with synthetic backbones, see, e.g., Eckstein, 1991; Baserga et al., 1992; Milligan, 1993; WO 97/03211; WO 96/39154; Mata, 1997; Strauss-Soukup, 1997; and Samstag, 1996. A polynucleotide may comprise one or more modified nucleotides, such as methylated nucleotides and nucleotide analogs. If present, modifications to the nucleotide structure may be imparted before or after assembly of the polymer. The sequence of nucleotides may be interrupted by non-nucleotide components. A polynucleotide may be further modified after polymerization, such as by conjugation with a labeling component. As used herein the term “wild type” is a term of the art understood by skilled persons and means the typical form of an organism, strain, gene or characteristic as it occurs in nature as distinguished from mutant or variant forms. A “wild type” can be a base line. As used herein the term “variant” should be taken to mean the exhibition of qualities that have a pattern that deviates from what occurs in nature. The terms “non-naturally occurring” or “engineered” are used interchangeably and indicate the involvement of the hand of man. The terms, when referring to nucleic acid molecules or polypeptides mean that the nucleic acid molecule or the polypeptide is at least substantially free from at least one other component with which they are naturally associated in nature and as found in nature. “Complementarity” refers to the ability of a nucleic acid to form hydrogen bond(s) with another nucleic acid sequence by either traditional Watson-Crick base pairing or other non-traditional types. A percent complementarity indicates the percentage of residues in a nucleic acid molecule which can form hydrogen bonds (e.g., Watson-Crick base pairing) with a second nucleic acid sequence (e.g., 5, 6, 7, 8, 9, 10 out of 10 being 50%, 60%, 70%, 80%, 90%, and 100% complementary). “Perfectly complementary” means that all the contiguous residues of a nucleic acid sequence will hydrogen bond with the same number of contiguous residues in a second nucleic acid sequence. “Substantially complementary” as used herein refers to a degree of complementarity that is at least 60%, 65%, 70%, 75%, 80%, 85%, 90%, 95%, 97%, 98%, 99%, or 100% over a region of 8, 9, 10, 11, 12, 13, 14, 15, 16, 17, 18, 19, 20, 21, 22, 23, 24, 25, 30, 35, 40, 45, 50, or more nucleotides, or refers to two nucleic acids that hybridize under stringent conditions. As used herein, “stringent conditions” for hybridization refer to conditions under which a nucleic acid having complementarity to a target sequence predominantly hybridizes with the target sequence, and substantially does not hybridize to non-target sequences. Stringent conditions are generally sequence-dependent, and vary depending on a number of factors. In general, the longer the sequence, the higher the temperature at which the sequence specifically hybridizes to its target sequence. Non-limiting examples of stringent conditions are described in detail in Tijssen (1993), Laboratory Techniques In Biochemistry And Molecular Biology-Hybridization With Nucleic Acid Probes Part I, Second Chapter “Overview of principles of hybridization and the strategy of nucleic acid probe assay”, Elsevier, N.Y. Where reference is made to a polynucleotide sequence, then complementary or partially complementary sequences are also envisaged. These are preferably capable of hybridizing to the reference sequence under highly stringent conditions. “Hybridization” refers to a reaction in which one or more polynucleotides react to form a complex that is stabilized via hydrogen bonding between the bases of the nucleotide residues. The hydrogen bonding may occur by Watson Crick base pairing, Hoogstein binding, or in any other sequence specific manner. The complex may comprise two strands forming a duplex structure, three or more strands forming a multi stranded complex, a single self-hybridizing strand, or any combination of these. A hybridization reaction may constitute a step in a more extensive process, such as the initiation of PCR, or the cleavage of a polynucleotide by an enzyme. A sequence capable of hybridizing with a given sequence is referred to as the “complement” of the given sequence. As used herein, the term “genomic locus” or “locus” (plural loci) is the specific location of a gene or DNA sequence on a chromosome. A “gene” refers to stretches of DNA or RNA that encode a polypeptide or an RNA chain that has functional role to play in an organism and hence is the molecular unit of heredity in living organisms. For the purpose of this invention, it may be considered that genes include regions which regulate the production of the gene product, whether or not such regulatory sequences are adjacent to coding and/or transcribed sequences. Accordingly, a gene includes, but is not necessarily limited to, promoter sequences, terminators, translational regulatory sequences such as ribosome binding sites and internal ribosome entry sites, enhancers, silencers, insulators, boundary elements, replication origins, matrix attachment sites and locus control regions. As used herein, “expression of a genomic locus” or “gene expression” is the process by which information from a gene is used in the synthesis of a functional gene product. The products of gene expression are often proteins, but in non-protein coding genes such as rRNA genes or tRNA genes, the product is functional RNA. The process of gene expression is used by all known life-eukaryotes (including multicellular organisms), prokaryotes (bacteria and archaea) and viruses to generate functional products to survive. As used herein “expression” of a gene or nucleic acid encompasses not only cellular gene expression, but also the transcription and translation of nucleic acid(s) in cloning systems and in any other context. As used herein, “expression” also refers to the process by which a polynucleotide is transcribed from a DNA template (such as into and mRNA or other RNA transcript) and/or the process by which a transcribed mRNA is subsequently translated into peptides, polypeptides, or proteins. Transcripts and encoded polypeptides may be collectively referred to as “gene product.” If the polynucleotide is derived from genomic DNA, expression may include splicing of the mRNA in a eukaryotic cell. The terms “polypeptide”, “peptide” and “protein” are used interchangeably herein to refer to polymers of amino acids of any length. The polymer may be linear or branched, it may comprise modified amino acids, and it may be interrupted by non amino acids. The terms also encompass an amino acid polymer that has been modified; for example, disulfide bond formation, glycosylation, lipidation, acetylation, phosphorylation, or any other manipulation, such as conjugation with a labeling component. As used herein the term “amino acid” includes natural and/or unnatural or synthetic amino acids, including glycine and both the D or L optical isomers, and amino acid analogs and peptidomimetics. As used herein, the term “domain” or “protein domain” refers to a part of a protein sequence that may exist and function independently of the rest of the protein chain. As described in aspects of the invention, sequence identity is related to sequence homology. Homology comparisons may be conducted by eye, or more usually, with the aid of readily available sequence comparison programs. These commercially available computer programs may calculate percent (%) homology between two or more sequences and may also calculate the sequence identity shared by two or more amino acid or nucleic acid sequences.

[0515] In an embodiment, the polynucleotide sequence is recombinant DNA. In further embodiments, the polynucleotide sequence further comprises additional sequences as described elsewhere herein. In an embodiment, the nucleic acid sequence is synthesized in vitro.

[0516] The present disclosure provides polynucleotide molecules that encode one or more components of the system or IscB polypeptide nuclease as referred to in any embodiment herein. In an embodiment, the polynucleotide molecules may comprise further regulatory sequences. By means of guidance and not limitation, the polynucleotide sequence can be part of an expression plasmid, a minicircle, a lentiviral vector, a retroviral vector, an adenoviral or adeno-associated viral vector, a piggyback vector, or a tol2 vector. In an embodiment, the polynucleotide sequence may be a bicistronic expression construct. In further embodiments, the isolated polynucleotide sequence may be incorporated in a cellular genome. In yet further embodiments, the isolated polynucleotide sequence may be part of a cellular genome. In further embodiments, the isolated polynucleotide sequence may be comprised in an artificial chromosome. In an embodiment, the 5′ and/or 3′ end of the isolated polynucleotide sequence may be modified to improve the stability of the sequence of actively avoid degradation. In an embodiment, the isolated polynucleotide sequence may be comprised in a bacteriophage. In other embodiments, the isolated polynucleotide sequence may be contained in agrobacterium species. In an embodiment, the isolated polynucleotide sequence is lyophilized.

[0517] Aspects of the invention relate to polynucleotide molecules that encode one or more components of one or more systems as described in any of the embodiments herein, wherein at least one or more regions of the polynucleotide molecule may be codon optimized for expression in eukaryotic cells. In an embodiment, the polynucleotide molecules that encode one or more components of one or more systems as described in any of the embodiments herein are optimized for expression in a mammalian cell or a plant cell.

[0518] An example of a codon optimized sequence is in this instance a sequence optimized for expression in a eukaryote, e.g., humans (i.e., being optimized for expression in humans), or for another eukaryote, animal or mammal as herein discussed. In one embodiment, an enzyme coding sequence encoding a DNA/RNA-targeting IscB polypeptide or CRISPR-associated IscB polypeptide nuclease is codon optimized for expression in particular cells, such as eukaryotic cells. The eukaryotic cells may be those of or derived from a particular organism, such as a plant or a mammal, including but not limited to human, or non-human eukaryote or animal or mammal as herein discussed, e.g., mouse, rat, rabbit, dog, livestock, or non-human mammal or primate. In one embodiment, processes for modifying the germ line genetic identity of human beings and/or processes for modifying the genetic identity of animals which are likely to cause them suffering without any substantial medical benefit to man or animal, and also animals resulting from such processes, may be excluded. In general, codon optimization refers to a process of modifying a nucleic acid sequence for enhanced expression in the host cells of interest by replacing at least one codon (e.g., about or more than about 1, 2, 3, 4, 5, 10, 15, 20, 25, 50, or more codons) of the native sequence with codons that are more frequently or most frequently used in the genes of that host cell while maintaining the native amino acid sequence. Various species exhibit particular bias for certain codons of a particular amino acid. Codon bias (differences in codon usage between organisms) often correlates with the efficiency of translation of messenger RNA (mRNA), which is in turn believed to be dependent on, among other things, the properties of the codons being translated and the availability of particular transfer RNA (tRNA) molecules. The predominance of selected tRNAs in a cell is generally a reflection of the codons used most frequently in peptide synthesis. Accordingly, genes can be tailored for optimal gene expression in a given organism based on codon optimization. Codon usage tables are readily available, for example, at the “Codon Usage Database” available at www.kazusa.orjp/codon/and these tables can be adapted in a number of ways. See Nakamura, Y., et al. “Codon usage tabulated from the international DNA sequence databases: status for the year 2000” Nucl. Acids Res. 28:292(2000). Computer algorithms for codon optimizing a particular sequence for expression in a particular host cell are also available, such as Gene Forge (Aptagen; Jacobus, PA), are also available. In one embodiment, one or more codons (e.g., 1, 2, 3, 4, 5, 10, 15, 20, 25, 50, or more, or all codons) in a sequence encoding an IscB polypeptide nuclease corresponds to the most frequently used codon for a particular amino acid.

### Delivery

[0519] The present disclosure also provides delivery systems for introducing components of the systems and compositions herein to cells, tissues, organs, or organisms. A delivery system may comprise one or more delivery vehicles and/or cargos. Exemplary delivery systems and methods include those described in paragraphs to of Feng Zhang et al., (WO2016106236A1), and pages 1241-1251 and Table 1 of Lino C A et al., Delivering CRISPR: a review of the challenges and approaches, DRUG DELIVERY, 2018, VOL. 25, NO. 1, 1234-1257, which are incorporated by reference herein in their entireties and can be adapted for use with the IscB proteins disclosed herein.

[0520] In one embodiment, the delivery systems may be used to introduce the components of the systems and compositions to plant cells. For example, the components may be delivered to plant using electroporation, microinjection, aerosol beam injection of plant cell protoplasts, biolistic methods, DNA particle bombardment, and/or Agrobacterium-mediated transformation. Examples of methods and delivery systems for plants include those described in Fu et al., Transgenic Res. 2000 February; 9(1): 11-9; Klein R M, et al., Biotechnology. 1992; 24:384-6; Casas A M et al., Proc Natl Acad Sci USA. 1993 Dec. 1; 90(23): 11212-11216; and U.S. Pat. No. 5,563,055, Davey M R et al., Plant Mol Biol. 1989 September; 13(3): 273-85, which are incorporated by reference herein in their entireties.

[0521] The example delivery compositions, systems, and methods described herein related to composition or IscB polypeptide or CRISPR-associated IscB polypeptide nuclease also apply to functional domains and other components (e.g., other proteins and polynucleotides related to the IscB polypeptide or CRISPR-associated IscB polypeptide nuclease, such as reverse transcriptase, nucleotide deaminase, retrotransposon, donor polynucleotide, etc.).

### Cargos

[0522] The delivery systems may comprise one or more cargos. The cargos may comprise one or more components of the systems and compositions herein. A cargo may comprise one or more of the following: i) a plasmid encoding one or more proteins components in the compositions and systems such as the IscB polypeptide or CRISPR-associated IscB polypeptide nuclease and/or functional domains; ii) a plasmid encoding one or more hRNAs, iii) mRNA of one or more one or more proteins components in the compositions and systems such as the IscB polypeptide or CRISPR-associated IscB polypeptide nuclease and/or functional domains; iv) one or more guide RNAs; v) one or more proteins components in the compositions and systems such as the IscB polypeptide or CRISPR-associated IscB polypeptide nuclease and/or functional domains; vi) any combination thereof. The one or more protein components may include the nuclei acid-guided nuclease (e.g., Cas), reverse transcriptase, nucleotide deaminase, retrotransposon protein, other functional domain, or any combination thereof.

[0523] In some examples, a cargo may comprise a plasmid encoding one or more proteins components in the compositions and systems such as the IscB polypeptide or CRISPR-associated IscB polypeptide nuclease and/or functional domains and one or more (e.g., a plurality of) guide RNAs. In some cases, the plasmid may also encode a recombination template (e.g., for HDR). In one embodiment, a cargo may comprise mRNA encoding one or more protein components and one or more ωRNA or guide RNAs.

[0524] In some examples, a cargo may comprise one or more protein components and one or more ωRNA or guide RNAs, e.g., in the form of ribonucleoprotein complexes (RNP). The ribonucleoprotein complexes may be delivered by methods and systems herein. In some cases, the ribonucleoprotein may be delivered by way of a polypeptide-based shuttle agent. In one example, the ribonucleoprotein may be delivered using synthetic peptides comprising an endosome leakage domain (ELD) operably linked to a cell penetrating domain (CPD), to a histidine-rich domain and a CPD, e.g., as describe in WO2016161516. RNP may also be used for delivering the compositions and systems to plant cells, e.g., as described in Wu J W, et al., Nat Biotechnol. 2015 November; 33(11): 1162-4.

### Physical Delivery

[0525] In one embodiment, the cargos may be introduced to cells by physical delivery methods. Examples of physical methods include microinjection, electroporation, and hydrodynamic delivery. Both nucleic acid and proteins may be delivered using such methods. For example, one or more protein components may be prepared in vitro, isolated, (refolded, purified if needed), and introduced to cells.

### Microinjection

[0526] Microinjection of the cargo directly to cells can achieve high efficiency, e.g., above 90% or about 100%. In one embodiment, microinjection may be performed using a microscope and a needle (e.g., with 0.5-5.0 μm in diameter) to pierce a cell membrane and deliver the cargo directly to a target site within the cell. Microinjection may be used for in vitro and ex vivo delivery.

[0527] Plasmids comprising coding sequences for one or more protein components and/or ωRNAs, mRNAs, and/or guide RNAs, may be microinjected. In some cases, microinjection may be used i) to deliver DNA directly to a cell nucleus, and/or ii) to deliver mRNA (e.g., in vitro transcribed) to a cell nucleus or cytoplasm. In certain examples, microinjection may be used to delivery ωRNA directly to the nucleus and mRNA to the cytoplasm, e.g., facilitating translation and shuttling of one or more protein components to the nucleus.

[0528] Microinjection may be used to generate genetically modified animals. For example, gene editing cargos may be injected into zygotes to allow for efficient germline modification. Such approach can yield normal embryos and full-term mouse pups harboring the desired modification(s). Microinjection can also be used to provide transiently up- or down-regulate a specific gene within the genome of a cell, e.g., using IscB polypeptide or CRISPR-associated IscB polypeptide.

### Electroporation

[0529] In one embodiment, the cargos and/or delivery vehicles may be delivered by electroporation. Electroporation may use pulsed high-voltage electrical currents to transiently open nanometer-sized pores within the cellular membrane of cells suspended in buffer, allowing for components with hydrodynamic diameters of tens of nanometers to flow into the cell. In some cases, electroporation may be used on various cell types and efficiently transfer cargo into cells. Electroporation may be used for in vitro and ex vivo delivery.

[0530] Electroporation may also be used to deliver the cargo to into the nuclei of mammalian cells by applying specific voltage and reagents, e.g., by nucleofection. Such approaches include those described in Wu Y, et al. (2015). Cell Res 25:67-79; Ye L, et al. (2014). Proc Natl Acad Sci USA 111:9591-6; Choi P S, Meyerson M. (2014). Nat Commun 5:3728; Wang J, Quake S R. (2014). Proc Natl Acad Sci 111:13157-62. Electroporation may also be used to deliver the cargo in vivo, e.g., with methods described in Zuckermann M, et al. (2015). Nat Commun 6:7391.

### Hydrodynamic Delivery

[0531] Hydrodynamic delivery may also be used for delivering the cargos, e.g., for in vivo delivery. In some examples, hydrodynamic delivery may be performed by rapidly pushing a large volume (8-10% body weight) solution containing the gene editing cargo into the bloodstream of a subject (e.g., an animal or human), e.g., for mice, via the tail vein. As blood is incompressible, the large bolus of liquid may result in an increase in hydrodynamic pressure that temporarily enhances permeability into endothelial and parenchymal cells, allowing for cargo not normally capable of crossing a cellular membrane to pass into cells. This approach may be used for delivering naked DNA plasmids and proteins. The delivered cargos may be enriched in liver, kidney, lung, muscle, and/or heart.

### Transfection

[0532] The cargos, e.g., nucleic acids, may be introduced to cells by transfection methods for introducing nucleic acids into cells. Examples of transfection methods include calcium phosphate-mediated transfection, cationic transfection, liposome transfection, dendrimer transfection, heat shock transfection, magnetofection, lipofection, impalefection, optical transfection, proprietary agent-enhanced uptake of nucleic acid.

### Delivery Vehicles

[0533] The delivery systems may comprise one or more delivery vehicles. The delivery vehicles may deliver the cargo into cells, tissues, organs, or organisms (e.g., animals or plants). The cargos may be packaged, carried, or otherwise associated with the delivery vehicles. The delivery vehicles may be selected based on the types of cargo to be delivered, and/or the delivery is in vitro and/or in vivo. Examples of delivery vehicles include vectors, viruses, non-viral vehicles, and other delivery reagents described herein.

[0534] The delivery vehicles in accordance with the present invention may have a greatest dimension (e.g., diameter) of less than 100 microns (μm). In one embodiment, the delivery vehicles have a greatest dimension of less than 10 μm. In one embodiment, the delivery vehicles may have a greatest dimension of less than 2000 nanometers (nm). In one embodiment, the delivery vehicles may have a greatest dimension of less than 1000 nanometers (nm). In one embodiment, the delivery vehicles may have a greatest dimension (e.g., diameter) of less than 900 nm, less than 800 nm, less than 700 nm, less than 600 nm, less than 500 nm, less than 400 nm, less than 300 nm, less than 200 nm, less than 150 nm, or less than 100 nm, less than 50 nm. In one embodiment, the delivery vehicles may have a greatest dimension ranging between 25 nm and 200 nm.

[0535] In one embodiment, the delivery vehicles may be or comprise particles. For example, the delivery vehicle may be or comprise nanoparticles (e.g., particles with a greatest dimension (e.g., diameter) no greater than 1000 nm. The particles may be provided in different forms, e.g., as solid particles (e.g., metal such as silver, gold, iron, titanium), non-metal, lipid-based solids, polymers), suspensions of particles, or combinations thereof. Metal, dielectric, and semiconductor particles may be prepared, as well as hybrid structures (e.g., core-shell particles). Nanoparticles may also be used to deliver the compositions and systems to plant cells, e.g., as described in International Patent Publication No. WO 2008042156, US Publication Application No. US20130185823, and International Patent Publication No WO 2015/089419.

### Vectors

[0536] The systems, compositions, and/or delivery systems may comprise one or more vectors. The present disclosure also includes vector systems. A vector system may comprise one or more vectors. In one embodiment, a vector refers to a nucleic acid molecule capable of transporting another nucleic acid to which it has been linked. Vectors include nucleic acid molecules that are single-stranded, double-stranded, or partially double-stranded; nucleic acid molecules that comprise one or more free ends, no free ends (e.g., circular); nucleic acid molecules that comprise DNA, RNA, or both; and other varieties of polynucleotides known in the art. A vector may be a plasmid, e.g., a circular double stranded DNA loop into which additional DNA segments can be inserted, such as by standard molecular cloning techniques. Certain vectors may be capable of autonomous replication in a host cell into which they are introduced (e.g., bacterial vectors having a bacterial origin of replication and episomal mammalian vectors). Some vectors (e.g., non-episomal mammalian vectors) are integrated into the genome of a host cell upon introduction into the host cell, and thereby are replicated along with the host genome. In certain examples, vectors may be expression vectors, e.g., capable of directing the expression of genes to which they are operatively-linked. In some cases, the expression vectors may be for expression in eukaryotic cells. Common expression vectors of utility in recombinant DNA techniques are often in the form of plasmids.

[0537] Examples of vectors include pGEX, pMAL, pRIT5, E. coli expression vectors (e.g., pTrc, pET 11d, yeast expression vectors (e.g., pYepSec1, pMFa, pJRY88, pYES2, and picZ, Baculovirus vectors (e.g., for expression in insect cells such as SF9 cells) (e.g., pAc series and the pVL series), mammalian expression vectors (e.g., pCDM8 and pMT2PC.

[0538] A vector may comprise i) one or more protein components encoding sequence(s), and/or ii) a single, or at least 2, at least 3, at least 4, at least 5, at least 6, at least 7, at least 8, at least 9, at least 10, at least 12, at least 14, at least 16, at least 32, at least 48, at least 50 guide RNA(s) encoding sequences. In a single vector there can be a promoter for each RNA coding sequence. Alternatively, or additionally, in a single vector, there may be a promoter controlling (e.g., driving transcription and/or expression) multiple RNA encoding sequences.

[0539] Furthermore, that compositions or systems may be delivered via a vector, e.g., a separate vector or the same vector that is encoding the complex. When provided by a separate vector, the RNA that targets IscB polypeptide or CRISPR-associated IscB polypeptide nuclease expression can be administered sequentially or simultaneously. When administered sequentially, the RNA that targets IscB polypeptide or CRISPR-associated IscB polypeptide nuclease expression is to be delivered after the RNA that is intended for e.g., gene editing or gene engineering. This period may be a period of minutes (e.g., 5 minutes, 10 minutes, 20 minutes, 30 minutes, 45 minutes, 60 minutes). This period may be a period of hours (e.g., 2 hours, 4 hours, 6 hours, 8 hours, 12 hours, 24 hours). This period may be a period of days (e.g., 2 days, 3 days, 4 days, 7 days). This period may be a period of weeks (e.g., 2 weeks, 3 weeks, 4 weeks). This period may be a period of months (e.g., 2 months, 4 months, 8 months, 12 months). This period may be a period of years (2 years, 3 years, 4 years). In this fashion, the IscB polypeptide nuclease associates with a first hRNA molecule capable of hybridizing to a first target, such as a genomic locus or loci of interest and undertakes the function(s) desired of the system (e.g., gene engineering), and subsequently the IscB polypeptide or CRISPR-associated IscB polypeptide nuclease may then associate with the second hRNA molecule capable of hybridizing to the sequence comprising at least part of the IscB polypeptide or CRISPR-associated IscB polypeptide nuclease. Where the guide RNA targets the sequences encoding expression of the IscB polypeptide or CRISPR-associated IscB polypeptide nuclease, the enzyme becomes impeded, and the system becomes self-inactivating. In the same manner, RNA that targets IscB polypeptide or CRISPR-associated IscB polypeptide nuclease expression applied via, for example liposome, lipofection, particles, microvesicles as explained herein, may be administered sequentially or simultaneously. Similarly, self-inactivation may be used for inactivation of one or more guide RNA used to target one or more targets.

### Regulatory Elements

[0540] A vector may comprise one or more regulatory elements. The regulatory element(s) may be operably linked to coding sequences of IscB polypeptide or CRISPR-associated IscB polypeptide nuclease, accessory proteins, ωRNA scaffold and/or guide RNA or combination thereof. The term “operably linked” is intended to mean that the nucleotide sequence of interest is linked to the regulatory element(s) in a manner that allows for expression of the nucleotide sequence (e.g., in an in vitro transcription/translation system or in a host cell when the vector is introduced into the host cell). In certain examples, a vector may comprise: a first regulatory element operably linked to a nucleotide sequence encoding a IscB polypeptide or CRISPR-associated IscB polypeptide nuclease, and a second regulatory element operably linked to a nucleotide sequence encoding a ωRNA or guide RNA.

[0541] Examples of regulatory elements include promoters, enhancers, internal ribosomal entry sites (IRES), and other expression control elements (e.g., transcription termination signals, such as polyadenylation signals and poly-U sequences). Such regulatory elements are described, for example, in Goeddel, GENE EXPRESSION TECHNOLOGY: METHODS IN ENZYMOLOGY 185, Academic Press, San Diego, Calif. (1990). Regulatory elements include those that direct constitutive expression of a nucleotide sequence in many types of host cell and those that direct expression of the nucleotide sequence only in certain host cells (e.g., tissue-specific regulatory sequences). A tissue-specific promoter may direct expression primarily in a desired tissue of interest, such as muscle, neuron, bone, skin, blood, specific organs (e.g., liver, pancreas), or particular cell types (e.g., lymphocytes). Regulatory elements may also direct expression in a temporal-dependent manner, such as in a cell-cycle dependent or developmental stage-dependent manner, which may or may not also be tissue or cell-type specific.

[0542] Examples of promoters include one or more pol III promoter (e.g., 1, 2, 3, 4, 5, or more pol III promoters), one or more pol II promoters (e.g., 1, 2, 3, 4, 5, or more pol II promoters), one or more pol I promoters (e.g., 1, 2, 3, 4, 5, or more pol I promoters), or combinations thereof. Examples of pol III promoters include, but are not limited to, U6 and H1 promoters. Examples of pol II promoters include, but are not limited to, the retroviral Rous sarcoma virus (RSV) LTR promoter (optionally with the RSV enhancer), the cytomegalovirus (CMV) promoter (optionally with the CMV enhancer), the SV40 promoter, the dihydrofolate reductase promoter, the β-actin promoter, the phosphoglycerol kinase (PGK) promoter, and the EF1α promoter.

### Viral Vectors

[0543] The cargos may be delivered by viruses. In one embodiment, viral vectors are used. A viral vector may comprise virally-derived DNA or RNA sequences for packaging into a virus (e.g., retroviruses, replication defective retroviruses, adenoviruses, replication defective adenoviruses, and adeno-associated viruses). Viral vectors also include polynucleotides carried by a virus for transfection into a host cell. Viruses and viral vectors may be used for in vitro, ex vivo, and/or in vivo deliveries.

### Adeno Associated Virus (AAV)

[0544] The systems and compositions herein may be delivered by adeno associated virus (AAV). AAV vectors may be used for such delivery. AAV, of the Dependovirus genus and Parvoviridae family, is a single stranded DNA virus. In one embodiment, AAV may provide a persistent source of the provided DNA, as AAV delivered genomic material can exist indefinitely in cells, e.g., either as exogenous DNA or, with some modification, be directly integrated into the host DNA. In one embodiment, AAV do not cause or relate with any diseases in humans. The virus itself is able to efficiently infect cells while provoking little to no innate or adaptive immune response or associated toxicity.

[0545] Examples of AAV that can be used herein include AAV-1, AAV-2, AAV-3, AAV-4, AAV-5, AAV-6, AAV-8, and AAV-9. The type of AAV may be selected with regard to the cells to be targeted; e.g., one can select AAV serotypes 1, 2, 5 or a hybrid capsid AAV1, AAV2, AAV5 or any combination thereof for targeting brain or neuronal cells; and one can select AAV4 for targeting cardiac tissue. AAV8 is useful for delivery to the liver. AAV-2-based vectors were originally proposed for CFTR delivery to CF airways, other serotypes such as AAV-1, AAV-5, AAV-6, and AAV-9 exhibit improved gene transfer efficiency in a variety of models of the lung epithelium. Examples of cell types targeted by AAV are described in Grimm, D. et al, J. Virol. 82:5887-5911(2008)), and shown in Table 5 as follows:

TABLE 5
Examples of cell types targeted by AAV.

| Cell Line | AAV-1 | AAV-2 | AAV-3 | AAV-4 | AAV-5 | AAV-6 | AAV-8 | AAV-9 |
|---|---|---|---|---|---|---|---|---|
| Huh-7 | 13 | 100 | 2.5 | 0.0 | 0.1 | 10 | 0.7 | 0.0 |
| HEK293 | 25 | 100 | 2.5 | 0.1 | 0.1 | 5 | 0.7 | 0.1 |
| HeLa | 3 | 100 | 2.0 | 0.1 | 6.7 | 1 | 0.2 | 0.1 |
| HepG2 | 3 | 100 | 16.7 | 0.3 | 1.7 | 5 | 0.3 | ND |
| Hep1A | 20 | 100 | 0.2 | 1.0 | 0.1 | 1 | 0.2 | 0.0 |
| 911 | 17 | 100 | 11 | 0.2 | 0.1 | 17 | 0.1 | ND |
| CHO | 100 | 100 | 14 | 1.4 | 333 | 50 | 10 | 1.0 |
| COS | 33 | 100 | 33 | 3.3 | 5.0 | 14 | 2.0 | 0.5 |
| MeWo | 10 | 100 | 20 | 0.3 | 6.7 | 10 | 1.0 | 0.2 |
| NIH3T3 | 10 | 100 | 2.9 | 2.9 | 0.3 | 10 | 0.3 | ND |
| A549 | 14 | 100 | 20 | ND | 0.5 | 10 | 0.5 | 0.1 |
| HT1180 | 20 | 100 | 10 | 0.1 | 0.3 | 33 | 0.5 | 0.1 |
| Monocytes | 1111 | 100 | ND | ND | 125 | 1429 | ND | ND |
| Immature | 2500 | 100 | ND | ND | 222 | 2857 | ND | ND |
| DC | | | | | | | | |
| Mature DC | 2222 | 100 | ND | ND | 333 | 3333 | ND | ND |

[0546] The AAV particles may be created in HEK 293 T cells. Once particles with specific tropism have been created, they are used to infect the target cell line much in the same way that native viral particles do. This may allow for persistent presence of the components in the infected cell type, and what makes this version of delivery particularly suited to cases where long-term expression is desirable. Examples of doses and formulations for AAV that can be used include those describe in U.S. Pat. Nos. 8,454,972 and 8,404,658.

[0547] Various strategies may be used for delivery the systems and compositions herein with AAVs. In some examples, coding sequences of IscB polypeptide nuclease and ωRNA may be packaged directly onto one DNA plasmid vector and delivered via one AAV particle. In some examples, AAVs may be used to deliver ωRNAs into cells that have been previously engineered to express IscB polypeptide or CRISPR-associated IscB polypeptide nuclease. In some examples, coding sequences of IscB polypeptide or CRISPR-associated IscB polypeptide nuclease and ωRNA may be made into two separate AAV particles, which are used for co-transfection of target cells. In some examples, markers, tags, and other sequences may be packaged in the same AAV particles as coding sequences of IscB polypeptide or CRISPR-associated IscB polypeptide nuclease and/or ωRNAs.

### Lentiviruses

[0548] The systems and compositions herein may be delivered by lentiviruses. Lentiviral vectors may be used for such delivery. Lentiviruses are complex retroviruses that have the ability to infect and express their genes in both mitotic and post-mitotic cells.

[0549] Examples of lentiviruses include human immunodeficiency virus (HIV), which may use its envelope glycoproteins of other viruses to target a broad range of cell types; minimal non-primate lentiviral vectors based on the equine infectious anemia virus (EIAV), which may be used for ocular therapies. In an embodiment, self-inactivating lentiviral vectors with an siRNA targeting a common exon shared by HIV tat/rev, a nucleolar-localizing TAR decoy, and an anti-CCR5-specific hammerhead ribozyme (see, e.g., DiGiusto et al. (2010) Sci Transl Med 2:36ra43) may be used/and or adapted to the nucleic acid-targeting system herein.

[0550] Lentiviruses may be pseudo-typed with other viral proteins, such as the G protein of vesicular stomatitis virus. In doing so, the cellular tropism of the lentiviruses can be altered to be as broad or narrow as desired. In some cases, to improve safety, second- and third-generation lentiviral systems may split essential genes across three plasmids, which may reduce the likelihood of accidental reconstitution of viable viral particles within cells.

[0551] In some examples, leveraging the integration ability, lentiviruses may be used to create libraries of cells comprising various genetic modifications, e.g., for screening and/or studying genes and signaling pathways.

### Adenoviruses

[0552] The systems and compositions herein may be delivered by adenoviruses. Adenoviral vectors may be used for such delivery. Adenoviruses include nonenveloped viruses with an icosahedral nucleocapsid containing a double stranded DNA genome. Adenoviruses may infect dividing and non-dividing cells. In one embodiment, adenoviruses do not integrate into the genome of host cells, which may be used for limiting off-target effects of systems in gene editing applications.

### Viral Vehicles for Delivery to Plants

[0553] The systems and compositions may be delivered to plant cells using viral vehicles. In one embodiment, the compositions and systems may be introduced in the plant cells using a plant viral vector (e.g., as described in Scholthof et al. 1996, Annu Rev Phytopathol. 1996; 34:299-323). Such viral vector may be a vector from a DNA virus, e.g., geminivirus (e.g., cabbage leaf curl virus, bean yellow dwarf virus, wheat dwarf virus, tomato leaf curl virus, maize streak virus, tobacco leaf curl virus, or tomato golden mosaic virus) or nanovirus (e.g., Faba bean necrotic yellow virus). The viral vector may be a vector from an RNA virus, e.g., tobravirus (e.g., tobacco rattle virus, tobacco mosaic virus), potexvirus (e.g., potato virus X), or hordeivirus (e.g., barley stripe mosaic virus). The replicating genomes of plant viruses may be non-integrative vectors.

### Non-Viral Vehicles

[0554] The delivery vehicles may comprise non-viral vehicles. In general, methods and vehicles capable of delivering nucleic acids and/or proteins may be used for delivering the systems compositions herein. Examples of non-viral vehicles include lipid nanoparticles, cell-penetrating peptides (CPPs), DNA nanoclews, gold nanoparticles, streptolysin O, multifunctional envelope-type nanodevices (MENDs), lipid-coated mesoporous silica particles, and other inorganic nanoparticles.

### Lipid Particles

[0555] The delivery vehicles may comprise lipid particles, e.g., lipid nanoparticles (LNPs) and liposomes.

### Lipid Nanoparticles (LNPs)

[0556] LNPs may encapsulate nucleic acids within cationic lipid particles (e.g., liposomes), and may be delivered to cells with relative ease. In some examples, lipid nanoparticles do not contain any viral components, which helps minimize safety and immunogenicity concerns. Lipid particles may be used for in vitro, ex vivo, and in vivo deliveries. Lipid particles may be used for various scales of cell populations.

[0557] In some examples. LNPs may be used for delivering DNA molecules (e.g., those comprising coding sequences of IscB polypeptide nuclease and/or hRNA) and/or RNA molecules (e.g., mRNA of IscB polypeptide or CRISPR-associated IscB polypeptide nuclease, ωRNA or gRNAs). In certain cases, LNPs may be use for delivering RNP complexes of IscB polypeptide or CRISPR-associated IscB polypeptide/ωRNA.

[0558] Components in LNPs may comprise cationic lipids 1,2-dilineoyl-3-dimethylammonium-propane (DLinDAP), 1,2-dilinoleyloxy-3-N,N-dimethylaminopropane (DLinDMA), 1,2-dilinoleyloxyketo-N,N-dimethyl-3-aminopropane (DLinK-DMA), 1,2-dilinoleyl-4-(2-dimethylaminoethyl)-[1,3]-dioxolane (DLinKC2-DMA), (3-o-[2″-(methoxypolyethyleneglycol 2000) succinoyl]-1,2-dimyristoyl-sn-glycol (PEG-S-DMG), R-3-[(ro-methoxy-poly(ethylene glycol)2000) carbamoyl]-1,2-dimyristyloxlpropyl-3-amine (PEG-C-DOMG, and any combination thereof. Preparation of LNPs and encapsulation may be adapted from Rosin et al, Molecular Therapy, vol. 19, no. 12, pages 1286-220 December 2011).

### Liposomes

[0559] In one embodiment, a lipid particle may be liposome. Liposomes are spherical vesicle structures composed of a uni- or multilamellar lipid bilayer surrounding internal aqueous compartments and a relatively impermeable outer lipophilic phospholipid bilayer. In one embodiment, liposomes are biocompatible, nontoxic, can deliver both hydrophilic and lipophilic drug molecules, protect their cargo from degradation by plasma enzymes, and transport their load across biological membranes and the blood brain barrier (BBB).

[0560] Liposomes can be made from several different types of lipids, e.g., phospholipids. A liposome may comprise natural phospholipids and lipids such as 1,2-distearoryl-sn-glycero-3-phosphatidyl choline (DSPC), sphingomyelin, egg phosphatidylcholines, monosialoganglioside, or any combination thereof.

[0561] Several other additives may be added to liposomes in order to modify their structure and properties. For instance, liposomes may further comprise cholesterol, sphingomyelin, and/or 1,2-dioleoyl-sn-glycero-3-phosphoethanolamine (DOPE), e.g., to increase stability and/or to prevent the leakage of the liposomal inner cargo.

### Stable Nucleic-Acid-Lipid Particles (SNALPs)

[0562] In one embodiment, the lipid particles may be stable nucleic acid lipid particles (SNALPs). SNALPs may comprise an ionizable lipid (DLinDMA) (e.g., cationic at low pH), a neutral helper lipid, cholesterol, a diffusible polyethylene glycol (PEG)-lipid, or any combination thereof. In some examples, SNALPs may comprise synthetic cholesterol, dipalmitoylphosphatidylcholine, 3-N-[(w-methoxy polyethylene glycol)2000) carbamoyl]-1,2-dimyrestyloxypropylamine, and cationic 1,2-dilinoleyloxy-3-N,Ndimethylaminopropane. In some examples, SNALPs may comprise synthetic cholesterol, 1,2-distearoyl-sn-glycero-3-phosphocholine, PEG-CDMA, and 1,2-dilinoleyloxy-3-(N;N-dimethyl)aminopropane (DLinDMA)

### Other Lipids

[0563] The lipid particles may also comprise one or more other types of lipids, e.g., cationic lipids, such as amino lipid 2,2-dilinoleyl-4-dimethylaminoethyl-[1,3]-dioxolane (DLin-KC2-DMA), DLin-KC2-DMA4, C12-200 and colipids disteroylphosphatidyl choline, cholesterol, and PEG-DMG.

### Lipoplexes/Polyplexes

[0564] In one embodiment, the delivery vehicles comprise lipoplexes and/or polyplexes. Lipoplexes may bind to negatively charged cell membrane and induce endocytosis into the cells. Examples of lipoplexes may be complexes comprising lipid(s) and non-lipid components. Examples of lipoplexes and polyplexes include FuGENE-6 reagent, a non-liposomal solution containing lipids and other components, zwitterionic amino lipids (ZALs), Ca2b (e.g., forming DNA/Ca²⁺ microcomplexes), polyethenimine (PEI) (e.g., branched PEI), and poly(L-lysine) (PLL).

### Cell Penetrating Peptides

[0565] In one embodiment, the delivery vehicles comprise cell penetrating peptides (CPPs). CPPs are short peptides that facilitate cellular uptake of various molecular cargo (e.g., from nanosized particles to small chemical molecules and large fragments of DNA).

[0566] CPPs may be of different sizes, amino acid sequences, and charges. In some examples, CPPs can translocate the plasma membrane and facilitate the delivery of various molecular cargoes to the cytoplasm or an organelle. CPPs may be introduced into cells via different mechanisms, e.g., direct penetration in the membrane, endocytosis-mediated entry, and translocation through the formation of a transitory structure.

[0567] CPPs may have an amino acid composition that either contains a high relative abundance of positively charged amino acids such as lysine or arginine or has sequences that contain an alternating pattern of polar/charged amino acids and non-polar, hydrophobic amino acids. These two types of structures are referred to as polycationic or amphipathic, respectively. A third class of CPPs are the hydrophobic peptides, containing only apolar residues, with low net charge or have hydrophobic amino acid groups that are crucial for cellular uptake. Another type of CPPs is the trans-activating transcriptional activator (Tat) from Human Immunodeficiency Virus 1 (HIV-1). Examples of CPPs include Penetratin, Tat (48-60), Transportan, and (R-AhX-R4) (Ahx refers to aminohexanoyl), Kaposi fibroblast growth factor (FGF) signal peptide sequence, integrin β3 signal peptide sequence, polyarginine peptide Args sequence, Guanine rich-molecular transporters, and sweet arrow peptide. Examples of CPPs and related applications also include those described in U.S. Pat. No. 8,372,951.

[0568] CPPs can be used for in vitro and ex vivo work quite readily, and extensive optimization for each cargo and cell type is usually required. In some examples, CPPs may be covalently attached to the IscB polypeptide nuclease directly, which is then complexed with the hRNA and delivered to cells. In some examples, separate delivery of CPP-IscB and CPP-hRNA to multiple cells may be performed. CPP may also be used to delivery RNPs.

[0569] CPPs may be used to deliver the compositions and systems to plants. In some examples, CPPs may be used to deliver the components to plant protoplasts, which are then regenerated to plant cells and further to plants.

### DNA Nanoclews

[0570] In one embodiment, the delivery vehicles comprise DNA nanoclews. A DNA nanoclew refers to a sphere-like structure of DNA (e.g., with a shape of a ball of yarn). The nanoclew may be synthesized by rolling circle amplification with palindromic sequences that aide in the self-assembly of the structure. The sphere may then be loaded with a payload. An example of DNA nanoclew is described in Sun W et al, J Am Chem Soc. 2014 Oct. 22; 136(42): 14722-5; and Sun W et al, Angew Chem Int Ed Engl. 2015 Oct. 5; 54(41): 12029-33. DNA nanoclew may have a palindromic sequences to be partially complementary to the guide RNA within the IscB polypeptide nuclease: hRNA ribonucleoprotein complex. A DNA nanoclew may be coated, e.g., coated with PEI to induce endosomal escape.

### Gold Nanoparticles

[0571] In one embodiment, the delivery vehicles comprise gold nanoparticles (also referred to AuNPs or colloidal gold). Gold nanoparticles may form complex with cargos, e.g., IscB polypeptide nuclease: hRNA RNP. Gold nanoparticles may be coated, e.g., coated in a silicate and an endosomal disruptive polymer, PAsp(DET). Examples of gold nanoparticles include AuraSense Therapeutics' Spherical Nucleic Acid (SNA™) constructs, and those described in Mout R, et al. (2017). ACS Nano 11:2452-8; Lee K, et al. (2017). Nat Biomed Eng 1:889-901.

iTOP

[0572] In one embodiment, the delivery vehicles comprise iTOP. iTOP refers to a combination of small molecules drives the highly efficient intracellular delivery of native proteins, independent of any transduction peptide. iTOP may be used for induced transduction by osmocytosis and propanebetaine, using NaCl-mediated hyperosmolality together with a transduction compound (propanebetaine) to trigger macropinocytotic uptake into cells of extracellular macromolecules. Examples of iTOP methods and reagents include those described in D′Astolfo D S, Pagliero R J, Pras A, et al. (2015). Cell 161:674-690.

### Polymer-Based Particles

[0573] In one embodiment, the delivery vehicles may comprise polymer-based particles (e.g., nanoparticles). In one embodiment, the polymer-based particles may mimic a viral mechanism of membrane fusion. The polymer-based particles may be a synthetic copy of Influenza virus machinery and form transfection complexes with various types of nucleic acids ((siRNA, miRNA, plasmid DNA or shRNA, mRNA) that cells take up via the endocytosis pathway, a process that involves the formation of an acidic compartment. The low pH in late endosomes acts as a chemical switch that renders the particle surface hydrophobic and facilitates membrane crossing. Once in the cytosol, the particle releases its payload for cellular action. This Active Endosome Escape technology is safe and maximizes transfection efficiency as it is using a natural uptake pathway. In one embodiment, the polymer-based particles may comprise alkylated and carboxyalkylated branched polyethylenimine. In some examples, the polymer-based particles are VIROMER, e.g., VIROMER RNAi, VIROMER RED, VIROMER mRNA. Example methods of delivering the systems and compositions herein include those described in Bawage S S et al., Synthetic mRNA expressed Cas13a mitigates RNA virus infections, www.biorxiv.org/content/10.1101/370460v1.full doi: doi.org/10.1101/370460, Viromer® RED, a powerful tool for transfection of keratinocytes. doi: 10.13140/RG.2.2.16993.61281, Viromer® Transfection-Factbook 2018: technology, product overview, users' data., doi: 10.13140/RG.2.2.23912.16642.

### Streptolysin O (SLO)

[0574] The delivery vehicles may be streptolysin O (SLO). SLO is a toxin produced by Group A streptococci that works by creating pores in mammalian cell membranes. SLO may act in a reversible manner, which allows for the delivery of proteins (e.g., up to 100 kDa) to the cytosol of cells without compromising overall viability. Examples of SLO include those described in Sierig G, et al. (2003). Infect Immun 71:446-55; Walev I, et al. (2001). Proc Natl Acad Sci USA 98:3185-90; Teng K W, et al. (2017). Elife 6: e25460.

### Multifunctional Envelope-Type Nanodevice (MEND)

[0575] The delivery vehicles may comprise multifunctional envelope-type nanodevice (MENDs). MENDs may comprise condensed plasmid DNA, a PLL core, and a lipid film shell. A MEND may further comprise cell-penetrating peptide (e.g., stearyl octaarginine). The cell penetrating peptide may be in the lipid shell. The lipid envelope may be modified with one or more functional components, e.g., one or more of: polyethylene glycol (e.g., to increase vascular circulation time), ligands for targeting of specific tissues/cells, additional cell-penetrating peptides (e.g., for greater cellular delivery), lipids to enhance endosomal escape, and nuclear delivery tags. In some examples, the MEND may be a tetra-lamellar MEND (T-MEND), which may target the cellular nucleus and mitochondria. In certain examples, a MEND may be a PEG-peptide-DOPE-conjugated MEND (PPD-MEND), which may target bladder cancer cells. Examples of MENDs include those described in Kogure K, et al. (2004). J Control Release 98:317-23; Nakamura T, et al. (2012). Acc Chem Res 45:1113-21.

### Lipid-Coated Mesoporous Silica Particles

[0576] The delivery vehicles may comprise lipid-coated mesoporous silica particles. Lipid-coated mesoporous silica particles may comprise a mesoporous silica nanoparticle core and a lipid membrane shell. The silica core may have a large internal surface area, leading to high cargo loading capacities. In one embodiment, pore sizes, pore chemistry, and overall particle sizes may be modified for loading different types of cargos. The lipid coating of the particle may also be modified to maximize cargo loading, increase circulation times, and provide precise targeting and cargo release. Examples of lipid-coated mesoporous silica particles include those described in Du X, et al. (2014). Biomaterials 35:5580-90; Durfee P N, et al. (2016). ACS Nano 10:8325-45.

### Inorganic Nanoparticles

[0577] The delivery vehicles may comprise inorganic nanoparticles. Examples of inorganic nanoparticles include carbon nanotubes (CNTs) (e.g., as described in Bates K and Kostarelos K. (2013). Adv Drug Deliv Rev 65:2023-33.), bare mesoporous silica nanoparticles (MSNPs) (e.g., as described in Luo G F, et al. (2014). Sci Rep 4:6064), and dense silica nanoparticles (SiNPs) (as described in Luo D and Saltzman W M. (2000). Nat Biotechnol 18:893-5).

### Exosomes

[0578] The delivery vehicles may comprise exosomes. Exosomes include membrane bound extracellular vesicles, which can be used to contain and delivery various types of biomolecules, such as proteins, carbohydrates, lipids, and nucleic acids, and complexes thereof (e.g., RNPs). Examples of exosomes include those described in Schroeder A, et al., J Intern Med. 2010 January; 267(1): 9-21; El-Andaloussi S, et al., Nat Protoc. 2012 December; 7(12): 2112-26; Uno Y, et al., Hum Gene Ther. 2011 June; 22(6): 711-9; Zou W, et al., Hum Gene Ther. 2011 April; 22(4): 465-75.

[0579] In some examples, the exosome may form a complex (e.g., by binding directly or indirectly) to one or more components of the cargo. In certain examples, a molecule of an exosome may be fused with first adapter protein and a component of the cargo may be fused with a second adapter protein. The first and the second adapter protein may specifically bind each other, thus associating the cargo with the exosome. Examples of such exosomes include those described in Ye Y, et al., Biomater Sci. 2020 Apr. 28. doi: 10.1039/d0bm00427h.

### Retrovirus Like Delivery Systems

[0580] The delivery vehicle may comprise a retro-virus like protein, such as PEG10, which is capable of incorporating a cargo into a virus-like particle. As such systems can be re-programmed to package specific cargos, polynucleotides encoding components of the IsrB systems disclosed herein may be further modified with a recognition sequence that leads to selective packaging of the IsrB components into such retro-virus like VLPs. Said VLPs may be further modified with fusogenic proteins that impart tissue or cell specificity. Example systems are disclosed in Segal et al. Mammalian retrovirus-like protein PEG10 packages its own mRNA and can be pseudotyped for mRNA delivery. 373 Science, 882-889(2021), which is incorporated herein by reference.

### Genetically Modified Cells and Organisms

[0581] The present disclosure further provides cells comprising one or more components of the compositions and systems herein, e.g., the IscB polypeptide or CRISPR-associated IscB polypeptide nuclease and/or ωRNA(s). Also provided include cells modified by the systems and methods herein, and cell cultures, tissues, organs, organism comprising such cells or progeny thereof. In one embodiment, the present disclosure provides a method of modifying a cell or organism. The cell may be a prokaryotic cell or a eukaryotic cell. The cell may be a mammalian cell. The mammalian cell many be a non-human primate, bovine, porcine, rodent or mouse cell. The cell may be a non-mammalian eukaryotic cell such as poultry, fish or shrimp. The cell may be a therapeutic T cell or antibody-producing B-cell. The cell may also be a plant cell. The plant cell may be of a crop plant such as cassava, corn, sorghum, wheat, or rice. The plant cell may also be of an algae, tree or vegetable. The modification introduced to the cell by the present invention may be such that the cell and progeny of the cell are altered for improved production of biologic products such as an antibody, starch, alcohol or other desired cellular output. The modification introduced to the cell by the present invention may be such that the cell and progeny of the cell include an alteration that changes the biologic product produced.

[0582] In one embodiment, one or more polynucleotide molecules, vectors, or vector systems driving expression of one or more elements of the compositions, systems, or delivery systems comprising one or more elements of the nucleic acid-targeting system are introduced into a host cell such that expression of the elements of the nucleic acid-targeting system direct formation of a nucleic acid-targeting complex at one or more target sites. In an embodiment of the invention the host cell may be a eukaryotic cell, a prokaryotic cell, or a plant cell.

[0583] In one embodiment, the host cell is a cell of a cell line. Cell lines are available from a variety of sources known to those with skill in the art (see, e.g., the American Type Culture Collection (ATCC) (Manassas, Va.)). In one embodiment, a cell transfected with one or more vectors described herein is used to establish a new cell line comprising one or more vector-derived sequences. In one embodiment, a cell transiently transfected with the components of a system as described herein (such as by transient transfection of one or more vectors, or transfection with RNA), and modified through the activity of a complex, is used to establish a new cell line comprising cells containing the modification but lacking any other exogenous sequence. In one embodiment, cells transiently or non-transiently transfected with one or more vectors described herein, or cell lines derived from such cells are used in assessing one or more test compounds.

[0584] Further intended are isolated human cells or tissues, plants or non-human animals comprising one or more of the polynucleotide molecules, vectors, vector systems, or cells described in any of the embodiments herein. In an aspect, host cells and cell lines modified by or comprising the compositions, systems or modified enzymes of present invention are provided, including (isolated) stem cells, and progeny thereof.

[0585] In an embodiment, the plants or non-human animals comprise at least one of the system components, polynucleotide molecules, vectors, vector systems, or cells described in any of the embodiments herein at least one tissue type of the plant or non-human animal. In an embodiment, non-human animals comprise at least one of the system components, polynucleotide molecules, vectors, vector systems, or cells described in any of the embodiments herein in at least one tissue type. In an embodiment, the presence of the system components is transient, in that they are degraded over time. In an embodiment, expression of the components of the systems and compositions described in any of the embodiments comprised in polynucleotide molecules, vectors, vector systems, or cells is limited to certain tissue types or regions in the plant or non-human animal. In an embodiment, the expression of the components of the systems and compositions described in any of the embodiments comprised in polynucleotide molecules, vectors, vector systems, or cells is dependent of a physiological cue. In an embodiment, expression of the components of the systems and compositions described in any of the embodiments comprised in polynucleotide molecules, vectors, vector systems, or cells may be triggered by an exogenous molecule. In an embodiment, expression of the components of the systems and compositions described in any of the embodiments comprised in polynucleotide molecules, vectors, vector systems, or cells is dependent on the expression of a non-Cas molecule in the plant or non-human animal.

### Applications and Uses in General

[0586] The systems, the vector systems, the vectors and the compositions described herein may be used in various nucleic acids-targeting applications, altering or modifying synthesis of a gene product, such as a protein, nucleic acids cleavage, nucleic acids editing, nucleic acids splicing; trafficking of target nucleic acids, tracing of target nucleic acids, isolation of target nucleic acids, visualization of target nucleic acids, etc.

[0587] Aspects of the invention thus also encompass methods and uses of the compositions and systems described herein in genome engineering, e.g., for altering or manipulating the expression of one or more genes or the one or more gene products, in prokaryotic or eukaryotic cells, in vitro, in vivo or ex vivo. In some examples, the target polynucleotides are target sequences within genomic DNA, including nuclear genomic DNA, mitochondrial DNA, or chloroplast DNA.

[0588] Typically, in the context of a nucleic acid-targeting system, formation of a nucleic acid-targeting complex (comprising a ωRNA or guide RNA hybridized to a target sequence and complexed with one or more nucleic acid-targeting effector proteins) results in cleavage of one or both DNA or RNA strands in or near (e.g., within 1, 2, 3, 4, 5, 6, 7, 8, 9, 10, 20, 50, or more base pairs from) the target sequence. As used herein the term “sequence(s) associated with a target locus of interest” refers to sequences near the vicinity of the target sequence (e.g., within 1, 2, 3, 4, 5, 6, 7, 8, 9, 10, 20, 50, or more base pairs from the target sequence, wherein the target sequence is comprised within a target locus of interest).

[0589] In one embodiment, the present disclosure provides a method of targeting a polynucleotide, comprising contacting a sample (such as cell, population of cells, tissue, organ, or an organism) that comprises a target polynucleotide with the composition, systems, polynucleotide(s), or vector(s). The contacting may result in modification of a gene product or modification of the amount or expression of a gene product. In some examples, the target sequence of the polynucleotide is a disease-associated target sequence.

[0590] In one embodiment, the present disclosure provides a method of modifying target polynucleotides comprising delivering the composition, the one or more polynucleotides of 2, or one or more vectors to a cell or population of cells comprising the target polynucleotides, wherein the complex directs the reverse transcriptase to the target sequence and the reverse transcriptase facilitates insertion of the donor sequence from the ωRNA into the target polynucleotide.

[0591] Examples of target polynucleotides include a sequence associated with a signaling biochemical pathway, e.g., a signaling biochemical pathway-associated gene or polynucleotide. Examples of target polynucleotides include a disease associated gene or polynucleotide. A “disease-associated” gene or polynucleotide refers to any gene or polynucleotide which is yielding transcription or translation products at an abnormal level or in an abnormal form in cells derived from a disease-affected tissues compared with tissues or cells of a non-disease control. It may be a gene that becomes expressed at an abnormally high level; it may be a gene that becomes expressed at an abnormally low level, where the altered expression correlates with the occurrence and/or progression of the disease. A disease-associated gene also refers to a gene possessing mutation(s) or genetic variation that is directly responsible or is in linkage disequilibrium with a gene(s) that is responsible for the etiology of a disease. The transcribed or translated products may be known or unknown and may be at a normal or abnormal level.

[0592] The target polynucleotide of a complex can be any polynucleotide endogenous or exogenous to the eukaryotic cell. For example, the target polynucleotide can be a polynucleotide residing in the nucleus of the eukaryotic cell. The target polynucleotide can be a sequence coding a gene product (e.g., a protein) or a non-coding sequence (e.g., a regulatory polynucleotide or a junk DNA). Without wishing to be bound by theory, it is believed that the target sequence should be associated with a TAM (target adjacent motif), that is, a short sequence recognized by the complex. The precise sequence and length requirements for the TAM differ depending on the IscB polypeptide or CRISPR-associated IscB polypeptide nuclease used, but TAMs are typically 2-5 base pair sequences adjacent the protospacer (that is, the target sequence) A skilled person will be able to identify further TAM sequences for use with a given IscB polypeptide or CRISPR-associated IscB polypeptide nuclease. Further, engineering of the TAM Interacting domain may allow programing of TAM specificity, improve target site recognition fidelity, and increase the versatility of the IscB polypeptide nuclease, genome engineering platform. IscB polypeptide or CRISPR-associated IscB polypeptide nuclease may be engineered to alter their TAM specificity.

[0593] In an embodiment the IscB TAM is ATNA where N is any nucleotide. In an embodiment, the IscB TAM is ATGA, ATAA, ATAAA, or ATN. In one embodiment, the IscB is Ignatius tetrasporus and the TAM is NNG.

[0594] Examples of target polynucleotides include a sequence associated with a signaling biochemical pathway, e.g., a signaling biochemical pathway-associated gene or polynucleotide. Examples of target polynucleotides include a disease associated gene or polynucleotide. A “disease-associated” gene or polynucleotide refers to any gene or polynucleotide which is yielding transcription or translation products at an abnormal level or in an abnormal form in cells derived from a disease-affected tissues compared with tissues or cells of a non-disease control. It may be a gene that becomes expressed at an abnormally high level; it may be a gene that becomes expressed at an abnormally low level, where the altered expression correlates with the occurrence and/or progression of the disease. A disease-associated gene also refers to a gene possessing mutation(s) or genetic variation that is directly responsible or is in linkage disequilibrium with a gene(s) that is responsible for the etiology of a disease. The transcribed or translated products may be known or unknown and may be at a normal or abnormal level.

[0595] Aspects of the invention relate to a method of targeting a polynucleotide, comprising contacting a sample that comprises the polynucleotide with a composition, system or IscB polypeptide or CRISPR-associated IscB polypeptide nuclease as described in any embodiment herein, a delivery system comprising a composition, system or IscB polypeptide or CRISPR-associated IscB polypeptide nuclease as described in any embodiment herein, a polynucleotide comprising a composition, system or IscB polypeptide or CRISPR-associated IscB polypeptide nuclease as described in any embodiment herein, a vector comprising a composition, system or IscB polypeptide or CRISPR-associated IscB polypeptide nuclease as described in any embodiment herein, or a vector system comprising a composition, system or IscB polypeptide or CRISPR-associated IscB polypeptide nuclease as described in any embodiment herein. In an embodiment, a target polynucleotide is contacted with at least two different compositions, systems, or IscB polypeptide or CRISPR-associated IscB polypeptide nucleases. In further embodiments, the two different IscB polypeptide nucleases have different target polynucleotide specificities, or degrees of specificity. In an embodiment, the two different IscB polypeptide or CRISPR-associated IscB polypeptide nucleases have a different TAM specificity.

[0596] Also envisaged are methods of targeting a polynucleotide, comprising contacting a sample that comprises the polynucleotide with the composition and systems, vectors, polynucleotides, herein wherein contacting results in modification of a gene product or modification of the amount or expression of a gene product. In an embodiment, the expression of the targeted gene product is increased by the method. In an embodiment, the expression of the targeted gene product is increased by at least 10%, at least 15%, at least 20%, at least 25%, at least 30%, at least 35%, at least 40%, at least 45%, at least 50%, at least 55%, at least 60%, at least 65%, at least 70%, at least 75%, at least 80%, at least 85%, p at least 90%, at least 95%, 100%. In an embodiment, the expression of the targeted gene product is increased at least 1.5-fold, at least 2-fold, at least 2.5-fold, at least 3-fold, at least 3.5-fold, at least 3.5-fold, at least 4-fold, at least 4.5-fold, at least 5-fold, at least 10-fold, at least 10-fold, at least 15-fold, at least 20-fold, at least 25-fold, at least 50-fold, at least 100-fold. In an embodiment, the expression of the targeted gene product is reduced by at least 10%, by at least 15%, by at least 20%, by at least 25%, by at least 30%, by at least 35%, by at least 40%, by at least 45%, by at least 50%, by at least 55%, by at least 60%, by at least 65%, by at least 70%, by at least 75%, by at least 80%, by at least 85%, by at least 90%, by at least 95%, by at least 100%. In an embodiment, the expression of the targeted gene product is reduced at least 1.5-fold, at least 2-fold, at least 2.5-fold, at least 3-fold, at least 3.5-fold, at least 3.5-fold, at least 4-fold, at least 4.5-fold, at least 5-fold, at least 10-fold, at least 10-fold, at least 15-fold, at least 20-fold, at least 25-fold, at least 50-fold, at least 100-fold. In alternative embodiments, the expression of the targeted gene product is reduced by the method. In further embodiments, expression of the targeted gene may be completely eliminated or may be considered eliminated as remnant expression levels of the targeted gene fall below the detection limit of methods known in the art that are used to quantify, detect, or monitor expression levels of genes.

[0597] In one embodiment, one or more polynucleotide molecules, vectors, or vector systems driving expression of one or more elements of a nucleic acid-targeting system or delivery systems comprising one or more elements of the nucleic acid-targeting system are introduced into a host cell such that expression of the elements of the nucleic acid-targeting system direct formation of a nucleic acid-targeting complex at one or more target sites. In an embodiment of the invention the host cell may be a eukaryotic cell, a prokaryotic cell, or a plant cell.

[0598] In one embodiment, the host cell is a cell of a cell line. Cell lines are available from a variety of sources known to those with skill in the art (see, e.g., the American Type Culture Collection (ATCC) (Manassas, Va.)). In one embodiment, a cell transfected with one or more vectors described herein is used to establish a new cell line comprising one or more vector-derived sequences. In one embodiment, a cell transiently transfected with the components of a composition or system as described herein (such as by transient transfection of one or more vectors, or transfection with RNA), and modified through the activity of a complex, is used to establish a new cell line comprising cells containing the modification but lacking any other exogenous sequence. In one embodiment, cells transiently or non-transiently transfected with one or more vectors described herein, or cell lines derived from such cells are used in assessing one or more test compounds.

[0599] Further intended are isolated human cells or tissues, plants or non-human animals comprising one or more of the polynucleotide molecules, vectors, vector systems, or cells described in any of the embodiments herein. In an aspect, host cells and cell lines modified by or comprising the compositions, systems or modified enzymes of present invention are provided, including (isolated) stem cells, and progeny thereof.

[0600] In an embodiment, the plants or non-human animals comprise at least one of the compositions, polynucleotide molecules, vectors, vector systems, or cells described in any of the embodiments herein at least one tissue type of the plant or non-human animal. In certain embodiments, non-human animals comprise at least one of the compositions, polynucleotide molecules, vectors, vector systems, or cells described in any of the embodiments herein in at least one tissue type. In an embodiment, the presence of the compositions is transient, in that they are degraded over time. In an embodiment, expression of the compositions described in any of the embodiments comprised in polynucleotide molecules, vectors, vector systems, or cells is limited to certain tissue types or regions in the plant or non-human animal. In an embodiment, the expression of the compositions described in any of the embodiments comprised in polynucleotide molecules, vectors, vector systems, or cells is dependent of a physiological cue. In an embodiment, expression of the compositions described in any of the embodiments comprised in polynucleotide molecules, vectors, vector systems, or cells may be triggered by an exogenous molecule. In an embodiment, expression of the compositions described in any of the embodiments comprised in polynucleotide molecules, vectors, vector systems, or cells is dependent on the expression of a non-Cas molecule in the plant or non-human animal.

[0601] In one aspect, the invention provides methods for using one or more elements of a nucleic acid-targeting system. The nucleic acid-targeting complex of the invention provides an effective means for modifying a target DNA or RNA (single or double stranded, linear or super-coiled). The nucleic acid-targeting complex of the invention has a wide variety of utility including modifying (e.g., deleting, inserting, translocating, inactivating, activating) a target DNA or RNA in a multiplicity of cell types. As such, the nucleic acid-targeting complex of the invention has a broad spectrum of applications in, e.g., gene therapy, drug screening, disease diagnosis, and prognosis. An exemplary nucleic acid-targeting complex comprises a DNA or RNA-targeting effector protein complexed with a ωRNA or guide RNA hybridized to a target sequence within the target locus of interest.

[0602] In one embodiment, this invention provides a method of cleaving a target polynucleotide. The method may comprise modifying a target polynucleotide using a nucleic acid-targeting complex that binds to the target polynucleotide and effect cleavage of said target polynucleotide. In an embodiment, the nucleic acid-targeting complex of the invention, when introduced into a cell, may create a break (e.g., a single or a double strand break) in the polynucleotide sequence. For example, the method can be used to cleave a disease polynucleotide in a cell. For example, an exogenous template comprising a sequence to be integrated flanked by an upstream sequence and a downstream sequence may be introduced into a cell. The upstream and downstream sequences share sequence similarity with either side of the site of integration in the polynucleotide. The exogenous template comprises a sequence to be integrated (e.g., a mutated RNA). The sequence for integration may be a sequence endogenous or exogenous to the cell. Examples of a sequence to be integrated include polynucleotide encoding a protein or a non-coding RNA (e.g., a microRNA). Thus, the sequence for integration may be operably linked to an appropriate control sequence or sequences. Alternatively, the sequence to be integrated may provide a regulatory function. The upstream and downstream sequences in the recombination template are selected to promote recombination between the RNA sequence of interest and the recombination. The upstream sequence is a polynucleotide sequence that shares sequence similarity with the sequence upstream of the targeted site for integration. Similarly, the downstream sequence is a polynucleotide sequence that shares sequence similarity with the polynucleotide sequence downstream of the targeted site of integration. The upstream and downstream sequences in the recombination template can have 75%, 80%, 85%, 90%, 95%, or 100% sequence identity with the targeted sequence. Preferably, the upstream and downstream sequences in the recombination template have about 95%, 96%, 97%, 98%, 99%, or 100% sequence identity with the targeted sequence. In some methods, the upstream and downstream sequences in the recombination template have about 99% or 100% sequence identity with the targeted sequence. An upstream or downstream sequence may comprise from about 20 bp to about 2500 bp, for example, about 50, 100, 200, 300, 400, 500, 600, 700, 800, 900, 1000, 1100, 1200, 1300, 1400, 1500, 1600, 1700, 1800, 1900, 2000, 2100, 2200, 2300, 2400, or 2500 bp. In some methods, the exemplary upstream or downstream sequence have about 200 bp to about 2000 bp, about 600 bp to about 1000 bp, or more particularly about 700 bp to about 1000 bp. In some methods, the recombination template may further comprise a marker. Such a marker may make it easy to screen for targeted integrations. Examples of suitable markers include restriction sites, fluorescent proteins, or selectable markers. The recombination template of the invention can be constructed using recombinant techniques (see, for example, Sambrook et al., 2001 and Ausubel et al., 1996). In a method for modifying a target sequence by integrating a recombination template, a break (e.g., double or single stranded break in double or single stranded DNA or RNA) is introduced into the DNA or RNA sequence by the nucleic acid-targeting complex, the break is repaired via homologous recombination with a recombination template such that the template is integrated into the target. The presence of a double-stranded break facilitates integration of the template. In other embodiments, this invention provides a method of modifying expression of a RNA in a eukaryotic cell. The method comprises increasing or decreasing expression of a target polynucleotide by using a nucleic acid-targeting complex that binds to the DNA or RNA (e.g., mRNA or pre-mRNA). In some methods, a target can be inactivated to affect the modification of the expression in a cell. For example, upon the binding of a nucleic acid-targeting complex to a target sequence in a cell, the target is inactivated such that the sequence is not translated, the coded protein is not produced, or the sequence does not function as the wild-type sequence does. For example, a protein or microRNA coding sequence may be inactivated such that the protein or microRNA or pre-microRNA transcript is not produced. The target of a nucleic acid-targeting complex can be any polynucleotide endogenous or exogenous to the eukaryotic cell. For example, the target polynucleotide can be a polynucleotide residing in the nucleus of the eukaryotic cell. The target polynucleotide can be a sequence coding a gene product (e.g., a protein) or a non-coding sequence (e.g., ncRNA, lncRNA, tRNA, or rRNA). Examples of target RNA include a sequence associated with a signaling biochemical pathway, e.g., a signaling biochemical pathway-associated polynucleotide. Examples of target polynucleotide include a disease associated polynucleotide. A “disease-associated” polynucleotide refers to any polynucleotide which is yielding translation products at an abnormal level or in an abnormal form in cells derived from a disease-affected tissues compared with tissues or cells of a non-disease control. It may be a gene that becomes expressed at an abnormally high level; it may be a gene that becomes expressed at an abnormally low level, where the altered expression correlates with the occurrence and/or progression of the disease. A disease-associated polynucleotide also refers to a gene possessing mutation(s) or genetic variation that is directly responsible or is in linkage disequilibrium with a gene(s) that is responsible for the etiology of a disease. The translated products may be known or unknown and may be at a normal or abnormal level. The target RNA of a nucleic acid-targeting complex can be any polynucleotide endogenous or exogenous to the eukaryotic cell. For example, the target RNA can be a RNA residing in the nucleus of the eukaryotic cell. The target polynucleotide can be a sequence coding a gene product (e.g., a protein) or a non-coding sequence (e.g., ncRNA, lncRNA, tRNA, or rRNA).

[0603] In one embodiment, the method may comprise allowing compositions to bind to the target DNA or RNA to effect cleavage of said target DNA or RNA thereby modifying the target DNA or RNA, wherein the nucleic acid-targeting complex comprises a nucleic acid-targeting effector protein complexed with a guide RNA hybridized to a target sequence within said target DNA or RNA. In one aspect, the invention provides a method of modifying expression of DNA or RNA in a eukaryotic cell. In one embodiment, the method comprises allowing a nucleic acid-targeting complex to bind to the DNA or RNA such that said binding results in increased or decreased expression of said DNA or RNA; wherein the nucleic acid-targeting complex comprises a nucleic acid-targeting effector protein complexed with a ωRNA or guide RNA. Similar considerations and conditions apply as above for methods of modifying a target DNA or RNA. In fact, these sampling, culturing and re-introduction options apply across the aspects of the present invention. In one aspect, the invention provides for methods of modifying a target DNA or RNA in a eukaryotic cell, which may be in vivo, ex vivo or in vitro. In one embodiment, the method comprises sampling a cell or population of cells from a human or non-human animal and modifying the cell or cells. Culturing may occur at any stage ex vivo. The cell or cells may even be re-introduced into the non-human animal or plant. For re-introduced cells, it is particularly preferred that the cells are stem cells. The compositions as described in any embodiment herein may be used to detect nucleic acid identifiers. Nucleic acid identifiers are non-coding nucleic acids that may be used to identify a particular article. Example nucleic acid identifiers, such as DNA watermarks, are described in Heider and Barnekow. “DNA watermarks: A proof of concept” BMC Molecular Biology 9:40 (2008). The nucleic acid identifiers may also be a nucleic acid barcode. A nucleic-acid based barcode is a short sequence of nucleotides (for example, DNA, RNA, or combinations thereof) that is used as an identifier for an associated molecule, such as a target molecule and/or target nucleic acid. A nucleic acid barcode can have a length of at least, for example, 4, 5, 6, 7, 8, 9, 10, 11, 12, 13, 14, 15, 16, 17, 18, 19, 20, 21, 22, 23, 24, 25, 26, 27, 28, 29, 30, 35, 40, 45, 50, 60, 70, 80, 90, or 100 nucleotides, and can be in single- or double-stranded form. One or more nucleic acid barcodes can be attached, or “tagged,” to a target molecule and/or target nucleic acid. This attachment can be direct (for example, covalent or non-covalent binding of the barcode to the target molecule) or indirect (for example, via an additional molecule, for example, a specific binding agent, such as an antibody (or other protein) or a barcode receiving adaptor (or other nucleic acid molecule). Target molecule and/or target nucleic acids can be labeled with multiple nucleic acid barcodes in combinatorial fashion, such as a nucleic acid barcode concatemer. Typically, a nucleic acid barcode is used to identify target molecules and/or target nucleic acids as being from a particular compartment (for example, a discrete volume), having a particular physical property (for example, affinity, length, sequence, etc.), or having been subject to certain treatment conditions. Target molecule and/or target nucleic acid can be associated with multiple nucleic acid barcodes to provide information about all of these features (and more). Methods of generating nucleic acid-barcodes are disclosed, for example, in International Patent Application Publication No. WO/2014/047561.

[0604] In an embodiment, compositions induce a double strand break for the purpose of inducing HDR-mediated correction. In a further embodiment, two or more guide RNAs complexing with IscB polypeptide nuclease or an ortholog or homolog thereof, may be used to induce multiplexed breaks for purpose of inducing HDR-mediated correction.

[0605] A recombination template nucleic acid, as that term is used herein, refers to a nucleic acid sequence which can be used in conjunction with compositions discloser herein to alter the structure of a target position. In an embodiment, the target nucleic acid is modified to have some or all of the sequence of the recombination template nucleic acid, typically at or near cleavage site(s). In an embodiment, the recombination template nucleic acid is single stranded. In an alternate embodiment, the recombination template nucleic acid is double stranded. In an embodiment, the recombination template nucleic acid is DNA, e.g., double stranded DNA. In an alternate embodiment, the recombination template nucleic acid is single stranded DNA.

[0606] In one embodiment, a recombination template is provided to serve as a template in homologous recombination, such as within or near a target sequence nicked or cleaved by a nucleic acid-targeting effector protein as a part of a nucleic acid-targeting complex.

[0607] A recombination template may be a component of another vector as described herein, contained in a separate vector, or provided as a separate polynucleotide. A recombination template polynucleotide may be of any suitable length, such as about or more than about 10, 15, 20, 25, 50, 75, 100, 150, 200, 500, 1000, or more nucleotides in length. In one embodiment, the recombination template polynucleotide is complementary to a portion of a polynucleotide comprising the target sequence. When optimally aligned, a recombination template polynucleotide might overlap with one or more nucleotides of target sequences (e.g., about or more than about 1, 5, 10, 15, 20, 25, 30, 35, 40, 45, 50, 60, 70, 80, 90, 100 or more nucleotides). In one embodiment, when a recombination template sequence and a polynucleotide comprising a target sequence are optimally aligned, the nearest nucleotide of the recombination template polynucleotide is within about 1, 5, 10, 15, 20, 25, 50, 75, 100, 200, 300, 400, 500, 1000, 5000, 10000, or more nucleotides from the target sequence.

[0608] In an embodiment, the recombination template nucleic acid alters the structure of the target position by participating in homologous recombination. In an embodiment, the recombination template nucleic acid alters the sequence of the target position. In an embodiment, the recombination template nucleic acid results in the incorporation of a modified, or non-naturally occurring base into the target nucleic acid.

[0609] The recombination template sequence may undergo a breakage mediated or catalyzed recombination with the target sequence. In an embodiment, the recombination template nucleic acid may include sequence that corresponds to a site on the target sequence that is cleaved by an IscB polypeptide nuclease mediated cleavage event. In an embodiment, the recombination template nucleic acid may include sequence that corresponds to both, a first site on the target sequence that is cleaved in a first IscB polypeptide nuclease mediated event and a second site on the target sequence that is cleaved in a second IscB polypeptide nuclease mediated event.

[0610] In an embodiment, the recombination template nucleic acid can include sequence which results in an alteration in the coding sequence of a translated sequence, e.g., one which results in the substitution of one amino acid for another in a protein product, e.g., transforming a mutant allele into a wild type allele, transforming a wild type allele into a mutant allele, and/or introducing a stop codon, insertion of an amino acid residue, deletion of an amino acid residue, or a nonsense mutation. In an embodiment, the recombination template nucleic acid can include sequence which results in an alteration in a non-coding sequence, e.g., an alteration in an exon or in a 5′ or 3′ non-translated or non-transcribed region. Such alterations include an alteration in a control element, e.g., a promoter, enhancer, and an alteration in a cis-acting or trans-acting control element.

[0611] A recombination template nucleic acid having homology with a target position in a target gene may be used to alter the structure of a target sequence. The recombination template sequence may be used to alter an unwanted structure, e.g., an unwanted or mutant nucleotide. The recombination template nucleic acid may include sequence which, when integrated, results in: decreasing the activity of a positive control element; increasing the activity of a positive control element; decreasing the activity of a negative control element; increasing the activity of a negative control element; decreasing the expression of a gene; increasing the expression of a gene; increasing resistance to a disorder or disease; increasing resistance to viral entry; correcting a mutation or altering an unwanted amino acid residue conferring, increasing, abolishing or decreasing a biological property of a gene product, e.g., increasing the enzymatic activity of an enzyme, or increasing the ability of a gene product to interact with another molecule.

[0612] The recombination template nucleic acid may include sequence which results in: a change in sequence of 1, 2, 3, 4, 5, 6, 7, 8, 9, 10, 11, 12 or more nucleotides of the target sequence. In an embodiment, the recombination template nucleic acid may be 20+/−10, 30+/−10, 40+/−10, 50+/−10, 60+/−10, 70+/−10, 80+/−10, 90+/−10, 100+/−10, 110+/−10, 120+/−10, 130+/−10, 140+/−10, 150+/−10, 160+/−10, 170+/−10, 180+/−10, 190+/−10, 200+/−10, 210+/−10, of 220+/−10 nucleotides in length. In an embodiment, the t recombination template nucleic acid may be 30+/−20, 40+/−20, 50+/−20, 60+/−20, 70+/−20, 80+/−20, 90+/−20, 100+/−20, 110+/−20, 120+/−20, 130+/−20, 140+/−20, I 50+/−20, 160+/−20, 170+/−20, 180+/−20, 190+/−20, 200+/−20, 210+/−20, of 220+/−20 nucleotides in length. In an embodiment, the recombination template nucleic acid is 10 to 1,000, 20 to 900, 30 to 800, 40 to 700, 50 to 600, 50 to 500, 50 to 400, 50 to 300, 50 to 200, or 50 to 100 nucleotides in length.

[0613] A recombination template nucleic acid comprises the following components: [5′ homology arm]-[replacement sequence]-[3′ homology arm]. The homology arms provide for recombination into the chromosome, thus replacing the undesired element, e.g., a mutation or signature, with the replacement sequence. In an embodiment, the homology arms flank the most distal cleavage sites. In an embodiment, the 3′ end of the 5′ homology arm is the position next to the 5′ end of the replacement sequence. In an embodiment, the 5′ homology arm can extend at least 10, 20, 30, 40, 50, 100, 200, 300, 400, 500, 600, 700, 800, 900, 1000, 1500, or 2000 nucleotides 5′ from the 5′ end of the replacement sequence. In an embodiment, the 5′ end of the 3′ homology arm is the position next to the 3′ end of the replacement sequence. In an embodiment, the 3′ homology arm can extend at least 10, 20, 30, 40, 50, 100, 200, 300, 400, 500, 600, 700, 800, 900, 1000, 1500, or 2000 nucleotides 3′ from the 3′ end of the replacement sequence.

[0614] In an embodiment, one or both homology arms may be shortened to avoid including certain sequence repeat elements. For example, a 5′ homology arm may be shortened to avoid a sequence repeat element. In other embodiments, a 3′ homology arm may be shortened to avoid a sequence repeat element. In one embodiment, both the 5′ and the 3′ homology arms may be shortened to avoid including certain sequence repeat elements.

[0615] In an embodiment, a recombination template nucleic acids for correcting a mutation may designed for use as a single-stranded oligonucleotide. When using a single-stranded oligonucleotide, 5′ and 3′ homology arms may range up to about 200 base pairs (bp) in length, e.g., at least 25, 50, 75, 100, 125, 150, 175, or 200 bp in length.

[0616] Mutating key residues in both DNA cleavage domains of the IscB polypeptide nuclease results in the generation of a catalytically inactive IscB polypeptide nuclease. A catalytically inactive IscB polypeptide or CRISPR-associated IscB polypeptide nuclease complexes with a guide RNA and localizes to the DNA sequence specified by that guide RNA's targeting domain, however, it does not cleave the target DNA. Fusion of the inactive IscB polypeptide or CRISPR-associated IscB polypeptide nuclease protein to an effector domain, e.g., a transcription repression domain, enables recruitment of the effector to any DNA site specified by the guide RNA. In an embodiment, IscB polypeptide or CRISPR-associated IscB polypeptide nuclease may be fused to a transcriptional repression domain and recruited to the promoter region of a gene. Especially for gene repression, it is contemplated herein that blocking the binding site of an endogenous transcription factor would aid in downregulating gene expression. In another embodiment, an inactive IscB polypeptide or CRISPR-associated IscB polypeptide nuclease can be fused to a chromatin modifying protein. Altering chromatin status can result in decreased expression of the target gene.

[0617] In an embodiment, a guide RNA molecule can be targeted to a known transcription response elements (e.g., promoters, enhancers, etc.), a known upstream activating sequences, and/or sequences of unknown or known function that are suspected of being able to control expression of the target DNA.

[0618] In some methods, a target polynucleotide can be inactivated to affect the modification of the expression in a cell. For example, upon the binding of a composition to a target sequence in a cell, the target polynucleotide is inactivated such that the sequence is not transcribed, the coded protein is not produced, or the sequence does not function as the wild-type sequence does. For example, a protein or microRNA coding sequence may be inactivated such that the protein is not produced.

### Non-Homologous End-Joining

[0619] In an embodiment, nuclease-induced non-homologous end-joining (NHEJ) can be used to target gene-specific knockouts. Nuclease-induced NHEJ can also be used to remove (e.g., delete) sequence in a gene of interest. Generally, NHEJ repairs a double-strand break in the DNA by joining together the two ends; however, generally, the original sequence is restored only if two compatible ends, exactly as they were formed by the double-strand break, are perfectly ligated. The DNA ends of the double-strand break are frequently the subject of enzymatic processing, resulting in the addition or removal of nucleotides, at one or both strands, prior to rejoining of the ends. This results in the presence of insertion and/or deletion (indel) mutations in the DNA sequence at the site of the NHEJ repair. Two-thirds of these mutations typically alter the reading frame and, therefore, produce a non-functional protein. Additionally, mutations that maintain the reading frame, but which insert or delete a significant amount of sequence, can destroy functionality of the protein. This is locus dependent as mutations in critical functional domains are likely less tolerable than mutations in non-critical regions of the protein. The indel mutations generated by NHEJ are unpredictable in nature; however, at a given break site certain indel sequences are favored and are over-represented in the population, likely due to small regions of microhomology. The lengths of deletions can vary widely; most commonly in the 1-50 bp range, but they can easily be greater than 50 bp, e.g., they can easily reach greater than about 100-200 bp. Insertions tend to be shorter and often include short duplications of the sequence immediately surrounding the break site. However, it is possible to obtain large insertions, and in these cases, the inserted sequence has often been traced to other regions of the genome or to plasmid DNA present in the cells.

[0620] Because NHEJ is a mutagenic process, it may also be used to delete small sequence motifs as long as the generation of a specific final sequence is not required. If a double-strand break is targeted near to a short target sequence, the deletion mutations caused by the NHEJ repair often span, and therefore remove, the unwanted nucleotides. For the deletion of larger DNA segments, introducing two double-strand breaks, one on each side of the sequence, can result in NHEJ between the ends with removal of the entire intervening sequence. Both of these approaches can be used to delete specific DNA sequences; however, the error-prone nature of NHEJ may still produce indel mutations at the site of repair.

[0621] Both double strand cleaving IscB polypeptide nuclease, or an ortholog or homolog thereof, and single strand, or nickase, IscB polypeptide nuclease, or an ortholog or homolog thereof, molecules can be used in the methods and compositions described herein to generate NHEJ-mediated indels. NHEJ-mediated indels targeted to the gene, e.g., a coding region, e.g., an early coding region of a gene of interest can be used to knockout (i.e., eliminate expression of) a gene of interest. For example, early coding region of a gene of interest includes sequence immediately following a transcription start site, within a first exon of the coding sequence, or within 500 bp of the transcription start site (e.g., less than 500, 450, 400, 350, 300, 250, 200, 150, 100 or 50 bp).

[0622] In an embodiment, in which a guide RNA and IscB polypeptide nuclease, or an ortholog or homolog thereof, generate a double strand break for the purpose of inducing NHEJ-mediated indels, a guide RNA may be configured to position one double-strand break in close proximity to a nucleotide of the target position. In an embodiment, the cleavage site may be between 0-500 bp away from the target position (e.g., less than 500, 400, 300, 200, 100, 50, 40, 30, 25, 20, 15, 10, 9, 8, 7, 6, 5, 4, 3, 2 or 1 bp from the target position).

[0623] In an embodiment, in which two guide RNAs complexing with IscB polypeptide nuclease, or an ortholog or homolog thereof, e.g., IscB polypeptide nickases induce two single strand breaks for the purpose of inducing NHEJ-mediated indels, two guide RNAs may be configured to position two single-strand breaks to provide for NHEJ repair a nucleotide of the target position.

[0624] In some examples, the systems herein may introduce one or more indels via NHEJ pathway and insert sequence from a combination template via HDR.

### Exemplary Applications

[0625] The invention provides a non-naturally occurring or engineered composition, or one or more polynucleotides encoding components of said composition, or vector or delivery systems comprising one or more polynucleotides encoding components of said composition for use in a modifying a target cell in vivo, ex vivo or in vitro and, may be conducted in a manner alters the cell such that once modified the progeny or cell line of the IscB polypeptide or CRISPR-associated IscB polypeptide nuclease modified cell retains the altered phenotype. The modified cells and progeny may be part of a multi-cellular organism such as a plant or animal with ex vivo or in vivo application of composition to desired cell types. The methods herein include a therapeutic method of treatment. The therapeutic method of treatment may comprise gene or genome editing, or gene therapy.

[0626] In one embodiment, one or more vectors described herein are used to produce a non-human transgenic animal or transgenic plant. In one embodiment, the transgenic animal is a mammal, such as a mouse, rat, or rabbit. Methods for producing transgenic animals and plants are known in the art, and generally begin with a method of cell transfection, such as described herein.

### Use of Orthogonal Catalytically Inactive IscB Polypeptide or CRISPR-Associated IscB Polypeptide Nucleases

[0627] In one embodiment, the IscB polypeptide nickase, for example selected from Tables 1C and 1D, is used in combination with an orthogonal catalytically inactive IscB polypeptide, for example from Table 1E, or CRISPR-associated IscB polypeptide nuclease to increase efficiency of said nickase (e.g., as described in Chen et al. 2017, Nature Communications 8:14958; doi: 10.1038/ncomms14958). More particularly, the orthogonal catalytically inactive IscB polypeptide nuclease is characterized by a different TAM recognition site than the IscB nickase used in the AD-functionalized composition and the corresponding guide sequence is selected to bind to a target sequence proximal to that of the nickase of the functionalized IscB polypeptide or CRISPR-associated IscB polypeptide nuclease. The orthogonal catalytically inactive IscB polypeptide or CRISPR-associated IscB polypeptide nuclease as used in the context of the present invention does not form part of the functionalized composition but merely functions to increase the efficiency of said nickase and is used in combination with a standard hRNA as described in the art for said IscB polypeptide or CRISPR-associated IscB polypeptide nuclease. In one embodiment, said orthogonal catalytically inactive IscB polypeptide or CRISPR-associated IscB polypeptide nuclease is a dead IscB polypeptide nuclease, i.e., comprising one or more mutations which abolishes the nuclease activity of said IscB polypeptide nuclease. In one embodiment, the catalytically inactive orthogonal IscB polypeptide or CRISPR-associated IscB polypeptide nuclease is provided with two or more ωRNAs or guide RNAs which are capable of hybridizing to target sequences which are proximal to the target sequence of the nickase. In one embodiment, at least two ωRNAs are used to target said catalytically inactive IscB polypeptide or CRISPR-associated IscB polypeptide nuclease, of which at least one ωRNA or guide RNAs is capable of hybridizing to a target sequence 5″ of the target sequence of the nickase and at least one ωRNA is capable of hybridizing to a target sequence 3′ of the target sequence of the nickase of the functionalized composition, whereby said one or more target sequences may be on the same or the opposite DNA strand as the target sequence of the IscB polypeptide or CRISPR-associated IscB polypeptide nickase. In one embodiment, the guide sequences for the one or more hRNAs of the orthogonal catalytically inactive IscB polypeptide or CRISPR-associated IscB polypeptide nuclease are selected such that the target sequences are proximal to that of the hRNA for the targeting of the functionalized composition, e.g., for the targeting of the nickase. In one embodiment, the one or more target sequences of the orthogonal catalytically inactive IscB polypeptide or CRISPR-associated IscB polypeptide nuclease are each separated from the target sequence of the nickase by more than 5 but less than 450 base pairs. Optimal distances between the target sequences of the guides for use with the orthogonal catalytically inactive IscB polypeptide or CRISPR-associated IscB polypeptide nuclease and the target sequence of the functionalized composition can be determined by the skilled person. In one embodiment, the catalytically inactive orthogonal IscB polypeptide or CRISPR-associated IscB polypeptide nuclease has been modified to alter its TAM specificity as described elsewhere herein. In one embodiment, the IscB polypeptide or CRISPR-associated IscB polypeptide nickase is a nickase which, by itself has limited activity in human cells, but which, in combination with an inactive orthogonal IscB polypeptide or CRISPR-associated IscB polypeptide nuclease and one or more corresponding proximal guides ensures the required nickase activity.

### Detection Methods Such as FISH

[0628] In one aspect, the invention provides an engineered, non-naturally occurring composition comprising a catalytically inactivate IscB polypeptide or CRISPR-associated IscB polypeptide nuclease described herein and use this system in detection methods such as fluorescence in situ hybridization (FISH). A dead IscB polypeptide or CRISPR-associated IscB polypeptide nuclease which lacks the ability to produce DNA double-strand breaks may be fused with a marker, such as fluorescent protein, such as the enhanced green fluorescent protein (eEGFP) and co-expressed with small guide RNAs to target pericentric, centric and teleomeric repeats in vivo. The dead IscB polypeptide (see, e.g., Table 1E) or CRISPR-associated IscB polypeptide nuclease system can be used to visualize both repetitive sequences and individual genes in the human genome. Such new applications of labelled dead IscB polypeptide or CRISPR-associated IscB polypeptide nuclease may be important in imaging cells and studying the functional nuclear architecture, especially in cases with a small nucleus volume or complex 3-D structures. (Chen B, Gilbert L A, Cimini B A, Schnitzbauer J, Zhang W, Li G W, Park J, Blackburn E H, Weissman J S, Qi L S, Huang B. 2013. Dynamic imaging of genomic loci in living human cells by an optimized CRISPR/Cas system. Cell 155(7): 1479-91. doi: 10.1016/j.cell.2013.12.001.)

### Patient-Specific Screening Methods

[0629] A nucleic acid-targeting system that targets DNA, e.g., trinucleotide repeats can be used to screen patients or patent samples for the presence of such repeats. The repeats can be the target of the RNA of the nucleic acid-targeting system, and if there is binding thereto by the nucleic acid-targeting system, that binding can be detected, to thereby indicate that such a repeat is present. Thus, a nucleic acid-targeting system can be used to screen patients or patient samples for the presence of the repeat. The patient can then be administered suitable compound(s) to address the condition or can be administered a nucleic acid-targeting system to bind to and cause insertion, deletion or mutation and alleviate the condition.

### Models of Genetic and Epigenetic Conditions

[0630] A method of the invention may be used to create a plant, an animal or cell that may be used to model and/or study genetic or epigenetic conditions of interest, such as a through a model of mutations of interest or a disease model. As used herein, “disease” refers to a disease, disorder, or indication in a subject. For example, a method of the invention may be used to create an animal or cell that comprises a modification in one or more nucleic acid sequences associated with a disease, or a plant, animal or cell in which the expression of one or more nucleic acid sequences associated with a disease are altered. Such a nucleic acid sequence may encode a disease associated protein sequence or may be a disease associated control sequence. Accordingly, it is understood that in embodiments of the invention, a plant, subject, patient, organism or cell can be a non-human subject, patient, organism or cell. Thus, the invention provides a plant, animal or cell, produced by the present methods, or a progeny thereof. The progeny may be a clone of the produced plant or animal or may result from sexual reproduction by crossing with other individuals of the same species to introgress further desirable traits into their offspring. The cell may be in vivo or ex vivo in the cases of multicellular organisms, particularly animals or plants. In the instance where the cell is in cultured, a cell line may be established if appropriate culturing conditions are met and preferably if the cell is suitably adapted for this purpose (for instance a stem cell). Bacterial cell lines produced by the invention are also envisaged. Hence, cell lines are also envisaged.

[0631] In some methods, the disease model can be used to study the effects of mutations on the animal or cell and development and/or progression of the disease using measures commonly used in the study of the disease. Alternatively, such a disease model is useful for studying the effect of a pharmaceutically active compound on the disease.

[0632] In some methods, the disease model can be used to assess the efficacy of a potential gene therapy strategy. That is, a disease-associated gene or polynucleotide can be modified such that the disease development and/or progression is inhibited or reduced. In particular, the method comprises modifying a disease-associated gene or polynucleotide such that an altered protein is produced and, as a result, the animal or cell has an altered response. Accordingly, in some methods, a genetically modified animal may be compared with an animal predisposed to development of the disease such that the effect of the gene therapy event may be assessed.

[0633] In another embodiment, this invention provides a method of developing a biologically active agent that modulates a cell signaling event associated with a disease gene. The method comprises contacting a test compound with a cell comprising one or more vectors that drive expression of one or more of an IscB polypeptide or CRISPR-associated IscB polypeptide nuclease, and a conserved nucleotide sequence linked to a guide sequence; and detecting a change in a readout that is indicative of a reduction or an augmentation of a cell signaling event associated with, e.g., a mutation in a disease gene contained in the cell.

[0634] A cell model or animal model can be constructed in combination with the method of the invention for screening a cellular function change. Such a model may be used to study the effects of a genome sequence modified by the complex of the invention on a cellular function of interest. For example, a cellular function model may be used to study the effect of a modified genome sequence on intracellular signaling or extracellular signaling. Alternatively, a cellular function model may be used to study the effects of a modified genome sequence on sensory perception. In some such models, one or more genome sequences associated with a signaling biochemical pathway in the model are modified.

[0635] Several disease models have been specifically investigated. These include de novo autism risk genes CHD8, KATNAL2, and SCN2A; and the syndromic autism (Angelman Syndrome) gene UBE3A. These genes and resulting autism models are of course preferred, but serve to show the broad applicability of the invention across genes and corresponding models. An altered expression of one or more genome sequences associated with a signaling biochemical pathway can be determined by assaying for a difference in the mRNA levels of the corresponding genes between the test model cell and a control cell, when they are contacted with a candidate agent. Alternatively, the differential expression of the sequences associated with a signaling biochemical pathway is determined by detecting a difference in the level of the encoded polypeptide or gene product.

[0636] To assay for an agent-induced alteration in the level of mRNA transcripts or corresponding polynucleotides, nucleic acid contained in a sample is first extracted according to standard methods in the art. For instance, mRNA can be isolated using various lytic enzymes or chemical solutions according to the procedures set forth in Sambrook et al. (1989) or extracted by nucleic-acid-binding resins following the accompanying instructions provided by the manufacturers. The mRNA contained in the extracted nucleic acid sample is then detected by amplification procedures or conventional hybridization assays (e.g., Northern blot analysis) according to methods widely known in the art or based on the methods exemplified herein.

[0637] For purpose of this invention, amplification means any method employing a primer and a polymerase capable of replicating a target sequence with reasonable fidelity. Amplification may be carried out by natural or recombinant DNA polymerases such as TaqGold™, T7 DNA polymerase, Klenow fragment of E. coli DNA polymerase, and reverse transcriptase. A preferred amplification method is PCR. In particular, the isolated RNA can be subjected to a reverse transcription assay that is coupled with a quantitative polymerase chain reaction (RT-PCR) in order to quantify the expression level of a sequence associated with a signaling biochemical pathway.

[0638] Detection of the gene expression level can be conducted in real time in an amplification assay. In one aspect, the amplified products can be directly visualized with fluorescent DNA-binding agents including but not limited to DNA intercalators and DNA groove binders. Because the amount of the intercalators incorporated into the double-stranded DNA molecules is typically proportional to the amount of the amplified DNA products, one can conveniently determine the amount of the amplified products by quantifying the fluorescence of the intercalated dye using conventional optical systems in the art. DNA-binding dye suitable for this application include SYBR green, SYBR blue, DAPI, propidium iodine, Hoeste, SYBR gold, ethidium bromide, acridines, proflavine, acridine orange, acriflavine, fluorcoumanin, ellipticine, daunomycin, chloroquine, distamycin D, chromomycin, homidium, mithramycin, ruthenium polypyridyls, anthramycin, and the like.

[0639] In another aspect, other fluorescent labels such as sequence specific probes can be employed in the amplification reaction to facilitate the detection and quantification of the amplified products. Probe-based quantitative amplification relies on the sequence-specific detection of a desired amplified product. It utilizes fluorescent, target-specific probes (e.g., TaqMan® probes) resulting in increased specificity and sensitivity. Methods for performing probe-based quantitative amplification are well established in the art and are taught in U.S. Pat. No. 5,210,015.

[0640] In yet another aspect, conventional hybridization assays using hybridization probes that share sequence homology with sequences associated with a signaling biochemical pathway can be performed. Typically, probes are allowed to form stable complexes with the sequences associated with a signaling biochemical pathway contained within the biological sample derived from the test subject in a hybridization reaction. It will be appreciated by one of skill in the art that where antisense is used as the probe nucleic acid, the target polynucleotides provided in the sample are chosen to be complementary to sequences of the antisense nucleic acids. Conversely, where the nucleotide probe is a sense nucleic acid, the target polynucleotide is selected to be complementary to sequences of the sense nucleic acid.

[0641] Hybridization can be performed under conditions of various stringency. Suitable hybridization conditions for the practice of the present invention are such that the recognition interaction between the probe and sequences associated with a signaling biochemical pathway is both sufficiently specific and sufficiently stable. Conditions that increase the stringency of a hybridization reaction are widely known and published in the art. See, for example, (Sambrook, et al., (1989); Nonradioactive In Situ Hybridization Application Manual, Boehringer Mannheim, second edition). The hybridization assay can be formed using probes immobilized on any solid support, including but are not limited to nitrocellulose, glass, silicon, and a variety of gene arrays. A preferred hybridization assay is conducted on high-density gene chips as described in U.S. Pat. No. 5,445,934.

[0642] For a convenient detection of the probe-target complexes formed during the hybridization assay, the nucleotide probes are conjugated to a detectable label. Detectable labels suitable for use in the present invention include any composition detectable by photochemical, biochemical, spectroscopic, immunochemical, electrical, optical or chemical means. A wide variety of appropriate detectable labels are known in the art, which include fluorescent or chemiluminescent labels, radioactive isotope labels, enzymatic or other ligands. In preferred embodiments, one will likely desire to employ a fluorescent label or an enzyme tag, such as digoxigenin, ß-galactosidase, urease, alkaline phosphatase or peroxidase, avidin/biotin complex.

[0643] The detection methods used to detect or quantify the hybridization intensity will typically depend upon the label selected above. For example, radiolabels may be detected using photographic film or a phosphoimager. Fluorescent markers may be detected and quantified using a photodetector to detect emitted light. Enzymatic labels are typically detected by providing the enzyme with a substrate and measuring the reaction product produced by the action of the enzyme on the substrate; and finally colorimetric labels are detected by simply visualizing the colored label.

[0644] An agent-induced change in expression of sequences associated with a signaling biochemical pathway can also be determined by examining the corresponding gene products. Determining the protein level typically involves a) contacting the protein contained in a biological sample with an agent that specifically bind to a protein associated with a signaling biochemical pathway; and (b) identifying any agent: protein complex so formed. In one aspect of this embodiment, the agent that specifically binds a protein associated with a signaling biochemical pathway is an antibody, preferably a monoclonal antibody.

[0645] The reaction is performed by contacting the agent with a sample of the proteins associated with a signaling biochemical pathway derived from the test samples under conditions that will allow a complex to form between the agent and the proteins associated with a signaling biochemical pathway. The formation of the complex can be detected directly or indirectly according to standard procedures in the art. In the direct detection method, the agents are supplied with a detectable label and unreacted agents may be removed from the complex; the amount of remaining label thereby indicating the amount of complex formed. For such method, it is preferable to select labels that remain attached to the agents even during stringent washing conditions. It is preferable that the label does not interfere with the binding reaction. In the alternative, an indirect detection procedure may use an agent that contains a label introduced either chemically or enzymatically. A desirable label generally does not interfere with binding or the stability of the resulting agent: polypeptide complex. However, the label is typically designed to be accessible to an antibody for an effective binding and, hence generating a detectable signal.

[0646] A wide variety of labels suitable for detecting protein levels are known in the art. Non-limiting examples include radioisotopes, enzymes, colloidal metals, fluorescent compounds, bioluminescent compounds, and chemiluminescent compounds.

[0647] The amount of agent: polypeptide complexes formed during the binding reaction can be quantified by standard quantitative assays. As illustrated above, the formation of agent: polypeptide complex can be measured directly by the amount of label remained at the site of binding. In an alternative, the protein associated with a signaling biochemical pathway is tested for its ability to compete with a labeled analog for binding sites on the specific agent. In this competitive assay, the amount of label captured is inversely proportional to the amount of protein sequences associated with a signaling biochemical pathway present in a test sample.

[0648] A number of techniques for protein analysis based on the general principles outlined above are available in the art. They include but are not limited to radioimmunoassay, ELISA (enzyme linked immunoradiometric assays), “sandwich” immunoassays, immunoradiometric assays, in situ immunoassays (using e.g., colloidal gold, enzyme or radioisotope labels), western blot analysis, immunoprecipitation assays, immunofluorescent assays, and SDS-PAGE.

[0649] Antibodies that specifically recognize or bind to proteins associated with a signaling biochemical pathway are preferable for conducting the aforementioned protein analyses. Where desired, antibodies that recognize a specific type of post-translational modifications (e.g., signaling biochemical pathway inducible modifications) can be used. Post-translational modifications include but are not limited to glycosylation, lipidation, acetylation, and phosphorylation. These antibodies may be purchased from commercial vendors. For example, anti-phosphotyrosine antibodies that specifically recognize tyrosine-phosphorylated proteins are available from a number of vendors including Invitrogen and Perkin Elmer. Anti-phosphotyrosine antibodies are particularly useful in detecting proteins that are differentially phosphorylated on their tyrosine residues in response to an ER stress. Such proteins include but are not limited to eukaryotic translation initiation factor 2 alpha (eIF-2α). Alternatively, these antibodies can be generated using conventional polyclonal or monoclonal antibody technologies by immunizing a host animal or an antibody-producing cell with a target protein that exhibits the desired post-translational modification.

### Genome Wide Knock-Out Screening

[0650] The IscB polypeptide nuclease and systems described herein can be used to perform efficient and cost effective functional genomic screens. Such screens can utilize IscB polypeptide nuclease-based genome wide libraries. Such screens and libraries can provide for determining the function of genes, cellular pathways genes are involved in, and how any alteration in gene expression can result in a particular biological process. An advantage of the present invention is that the composition avoids off-target binding and its resulting side effects. This is achieved using systems arranged to have a high degree of sequence specificity for the target DNA. In preferred embodiments of the invention, the IscB polypeptide or CRISPR-associated IscB polypeptide nuclease complexes are IscB polypeptide nuclease complexes.

[0651] In embodiments of the invention, a genome wide library may comprise a plurality of IscB polypeptide nuclease guide RNAs, as described herein, comprising guide sequences that are capable of targeting a plurality of target sequences in a plurality of genomic loci in a population of eukaryotic cells. The population of cells may be a population of embryonic stem (ES) cells. The target sequence in the genomic locus may be a non-coding sequence. The non-coding sequence may be an intron, regulatory sequence, splice site, 3′ UTR, 5′ UTR, or polyadenylation signal. Gene function of one or more gene products may be altered by said targeting. The targeting may result in a knockout of gene function. The targeting of a gene product may comprise more than one guide RNA. A gene product may be targeted by 2, 3, 4, 5, 6, 7, 8, 9, or 10 guide RNAs, preferably 3 to 4 per gene. Off-target modifications may be minimized by exploiting the staggered double strand breaks generated by IscB polypeptide nuclease complexes or by utilizing methods analogous to those used in composition (See, e.g., DNA targeting specificity of RNA-guided Cas nucleases. Hsu, P., Scott, D., Weinstein, J., Ran, F A., Konermann, S., Agarwala, V., Li, Y., Fine, E., Wu, X., Shalem, O., Cradick, T J., Marraffini, L A., Bao, G., & Zhang, F. Nat Biotechnol doi: 10.1038/nbt.2647(2013)), incorporated herein by reference. The targeting may be of about 100 or more sequences. The targeting may be of about 1000 or more sequences. The targeting may be of about 20,000 or more sequences. The targeting may be of the entire genome. The targeting may be of a panel of target sequences focused on a relevant or desirable pathway. The pathway may be an immune pathway. The pathway may be a cell division pathway.

[0652] One aspect of the invention comprehends a genome wide library that may comprise a plurality of ωRNAs or guide RNAs that may comprise guide sequences that are capable of targeting a plurality of target sequences in a plurality of genomic loci, wherein said targeting results in a knockout of gene function. This library may potentially comprise ωguide RNAs that target each and every gene in the genome of an organism.

[0653] In one embodiment of the invention, the organism or subject is a eukaryote (including mammal including human) or a non-human eukaryote or a non-human animal or a non-human mammal. In one embodiment, the organism or subject is a non-human animal, and may be an arthropod, for example, an insect, or may be a nematode. In some methods of the invention the organism or subject is a plant. In some methods of the invention, the organism or subject is a mammal or a non-human mammal. A non-human mammal may be for example a rodent (preferably a mouse or a rat), an ungulate, or a primate. In some methods of the invention the organism or subject is algae, including microalgae, or is a fungus.

[0654] The knockout of gene function may comprise introducing into each cell in the population of cells a vector system of one or more vectors comprising an engineered, non-naturally occurring composition herein. The guide sequence may target a unique gene in each cell, wherein the IscB polypeptide or CRISPR-associated IscB polypeptide nuclease is operably linked to a regulatory element, wherein when transcribed, the ωRNAs or guide RNA comprising the guide sequence directs sequence-specific binding of the IscB polypeptide nuclease to a target sequence in the genomic loci of the unique gene, inducing cleavage of the genomic loci by the IscB polypeptide or CRISPR-associated IscB polypeptide nuclease, and confirming different knockout mutations in a plurality of unique genes in each cell of the population of cells thereby generating a gene knockout cell library. The invention comprehends that the population of cells is a population of eukaryotic cells, and in a preferred embodiment, the population of cells is a population of embryonic stem (ES) cells.

[0655] The one or more vectors may be plasmid vectors. The vector may be a single vector comprising a IscB polypeptide or CRISPR-associated IscB polypeptide nuclease, a ωRNA, and optionally, a selection marker into target cells. Not being bound by a theory, the ability to simultaneously deliver a IscB polypeptide or CRISPR-associated IscB polypeptide nuclease and hRNA through a single vector enables application to any cell type of interest, without the need to first generate cell lines that express the IscB polypeptide or CRISPR-associated IscB polypeptide nuclease. The regulatory element may be an inducible promoter. The inducible promoter may be a doxycycline inducible promoter. In some methods of the invention, the expression of the guide sequence is under the control of the T7 promoter and is driven by the expression of T7 polymerase. The confirming of different knockout mutations may be by whole exome sequencing. The knockout mutation may be achieved in 100 or more unique genes. The knockout mutation may be achieved in 1000 or more unique genes. The knockout mutation may be achieved in 20,000 or more unique genes. The knockout mutation may be achieved in the entire genome. The knockout of gene function may be achieved in a plurality of unique genes which function in a particular physiological pathway or condition. The pathway or condition may be an immune pathway or condition. The pathway or condition may be a cell division pathway or condition.

[0656] Useful in the practice of the instant invention utilizing IscB polypeptide or CRISPR-associated IscB polypeptide nuclease complexes are methods used in compositions and reference is made to: Genome-Scale CRISPR-Cas Knockout Screening in Human Cells. Shalem, O., Sanjana, N E., Hartenian, E., Shi, X., Scott, D A., Mikkelson, T., Heckl, D., Ebert, B L., Root, D E., Doench, J G., Zhang, F. Science December 12. (2013). [Epub ahead of print]; Published in final edited form as: Science. 2014 Jan. 3; 343(6166): 84-87. Shalem et al. involves a new way to interrogate gene function on a genome-wide scale. Their studies showed that delivery of a genome-scale CRISPR-Cas knockout (GeCKO) library targeted 18,080 genes with 64,751 unique guide sequences enabled both negative and positive selection screening in human cells. First, the authors showed use of the GeCKO library to identify genes essential for cell viability in cancer and pluripotent stem cells. Next, in a melanoma model, the authors screened for genes whose loss is involved in resistance to vemurafenib, a therapeutic that inhibits mutant protein kinase BRAF. Their studies showed that the highest-ranking candidates included previously validated genes NF1 and MED12 as well as novel hitsNF2, CUL3, TADA2B, and TADA1. The authors observed a high level of consistency between independent guide RNAs targeting the same gene and a high rate of hit confirmation, and thus demonstrated the promise of genome-scale screening with IscB polypeptide nucleases.

[0657] Reference is also made to US patent publication number US20140357530; and PCT Patent Publication WO2014093701, hereby incorporated herein by reference. Reference is also made to NIH Press Release of Oct. 22, 2015 entitled, “Researchers identify potential alternative to CRISPR-Cas genome editing tools: New Cas enzymes shed light on evolution of CRISPR-Cas systems, which is incorporated by reference.

### Functional Alteration and Screening

[0658] In another aspect, the present invention provides for a method of functional evaluation and screening of genes. The use of the compositions to precisely deliver functional domains, to activate or repress genes or to alter epigenetic state by precisely altering the methylation site on a specific locus of interest, can be with one or more ωRNAs or guide RNAs applied to a single cell or population of cells or with a library applied to genome in a pool of cells ex vivo or in vivo comprising the administration or expression of a library comprising a plurality of hRNAs (comprising guide molecules) and wherein the screening further comprises use of an IscB polypeptide or CRISPR-associated IscB polypeptide nuclease, wherein the complex comprising the IscB polypeptide or CRISPR-associated IscB polypeptide nuclease is modified to comprise a heterologous functional domain. In an aspect the invention provides a method for screening a genome comprising the administration to a host or expression in a host in vivo of a library. In an aspect the invention provides a method as herein discussed further comprising an activator administered to the host or expressed in the host. In an aspect the invention provides a method as herein discussed wherein the activator is attached to a IscB polypeptide or CRISPR-associated IscB polypeptide nuclease. In an aspect, the invention provides a method as herein discussed wherein the activator is attached to the N terminus or the C terminus of the IscB polypeptide or CRISPR-associated IscB polypeptide nuclease. In an aspect, the invention provides a method as herein discussed wherein the activator is attached to a ωRNA loop. In an aspect, the invention provides a method as herein discussed further comprising a repressor administered to the host or expressed in the host. In an aspect, the invention provides a method as herein discussed, wherein the screening comprises affecting and detecting gene activation, gene inhibition, or cleavage in the locus.

[0659] It is also preferred to target endogenous (regulatory) control elements (such as enhancers and silencers) e.g., in addition to a promoter or promoter-proximal elements. Thus, the invention can also be used to target endogenous control elements (including enhancers and silencers) in addition to targeting of the promoter. These control elements can be located upstream and downstream of the transcriptional start site (TSS), starting from 200 bp from the TSS to 100 kb away. Targeting of known control elements can be used to activate or repress the gene of interest. In some cases, a single control element can influence the transcription of multiple target genes. Targeting of a single control element could therefore be used to control the transcription of multiple genes simultaneously.

[0660] Targeting of putative control elements on the other hand (e.g., by tiling the region of the putative control element as well as 200 bp up to 100 kB around the element) can be used as a means to verify such elements (by measuring the transcription of the gene of interest) or to detect novel control elements (e.g., by tiling 100 kb upstream and downstream of the TSS of the gene of interest). In addition, targeting of putative control elements can be useful in the context of understanding genetic causes of disease. Many mutations and common SNP variants associated with disease phenotypes are located outside coding regions. Targeting of such regions with either the activation or repression systems described herein can be followed by readout of transcription of either a) a set of putative targets (e.g., a set of genes located in closest proximity to the control element) or b) whole-transcriptome readout by e.g., RNAseq or microarray. This would allow for the identification of likely candidate genes involved in the disease phenotype. Such candidate genes could be useful as novel drug targets.

[0661] Histone acetyltransferase (HAT) inhibitors are mentioned herein. However, an alternative is for the one or more functional domains to comprise an acetyltransferase, preferably a histone acetyltransferase. These are useful in the field of epigenomics, for example in methods of interrogating the epigenome. Methods of interrogating the epigenome may include, for example, targeting epigenomic sequences. Targeting epigenomic sequences may include the guide being directed to an epigenomic target sequence. Epigenomic target sequence may include a promoter, silencer or an enhancer sequence.

### Saturating Mutagenesis

[0662] The compositions herein can be used to perform saturating or deep scanning mutagenesis of genomic loci in conjunction with a cellular phenotype—for instance, for determining critical minimal features and discrete vulnerabilities of functional elements required for gene expression, drug resistance, and reversal of disease. By saturating or deep scanning mutagenesis is meant that every or essentially every DNA base is cut within the genomic loci. A library of Cas1 effector protein guide RNAs may be introduced into a population of cells. The library may be introduced, such that each cell receives a single hRNA. In the case where the library is introduced by transduction of a viral vector, as described herein, a low multiplicity of infection (MOI) is used. The library may include ωRNAs targeting every sequence upstream of a TAM sequence in a genomic locus. The library may include at least 100 non-overlapping genomic sequences upstream of a TAM sequence for every 1000 base pairs within the genomic locus. The library may include hRNAs targeting sequences upstream of at least one different TAM sequence. The composition may include more than one IscB polypeptide nuclease. Any IscB polypeptide or CRISPR-associated IscB polypeptide nuclease protein as described herein, including orthologues or engineered IscB polypeptide or CRISPR-associated IscB polypeptide nuclease that recognize different TAM sequences may be used. The frequency of off target sites for a ωRNA may be less than 500. Off target scores may be generated to select ωRNAs with the lowest off target sites. Any phenotype determined to be associated with cutting at a hRNA target site may be confirmed by using ωRNAs targeting the same site in a single experiment. Validation of a target site may also be performed by using a modified IscB polypeptide or CRISPR-associated IscB polypeptide or CRISPR-associated IscB polypeptide nuclease, as described herein, and two hRNAs targeting the genomic site of interest. Not being bound by a theory, a target site is a true hit if the change in phenotype is observed in validation experiments.

[0663] The genomic loci may include at least one continuous genomic region. The at least one continuous genomic region may comprise up to the entire genome. The at least one continuous genomic region may comprise a functional element of the genome. The functional element may be within a non-coding region, coding gene, intronic region, promoter, or enhancer. The at least one continuous genomic region may comprise at least 1 kb, preferably at least 50 kb of genomic DNA. The at least one continuous genomic region may comprise a transcription factor binding site. The at least one continuous genomic region may comprise a region of DNase I hypersensitivity. The at least one continuous genomic region may comprise a transcription enhancer or repressor element. The at least one continuous genomic region may comprise a site enriched for an epigenetic signature. The at least one continuous genomic DNA region may comprise an epigenetic insulator. The at least one continuous genomic region may comprise two or more continuous genomic regions that physically interact. Genomic regions that interact may be determined by ‘4C technology’. 4C technology allows the screening of the entire genome in an unbiased manner for DNA segments that physically interact with a DNA fragment of choice, as is described in Zhao et al. ((2006) Nat Genet 38, 1341-7) and in U.S. Pat. No. 8,642,295, both incorporated herein by reference in its entirety. The epigenetic signature may be histone acetylation, histone methylation, histone ubiquitination, histone phosphorylation, DNA methylation, or a lack thereof.

[0664] The compositions for saturating or deep scanning mutagenesis can be used in a population of cells. The compositions can be used in eukaryotic cells, including but not limited to mammalian and plant cells. The population of cells may be prokaryotic cells. The population of eukaryotic cells may be a population of embryonic stem (ES) cells, neuronal cells, epithelial cells, immune cells, endocrine cells, muscle cells, erythrocytes, lymphocytes, plant cells, or yeast cells.

[0665] In one aspect, the present invention provides for a method of screening for functional elements associated with a change in a phenotype. The library may be introduced into a population of cells that are adapted to contain an IscB polypeptide or CRISPR-associated IscB polypeptide nuclease. The cells may be sorted into at least two groups based on the phenotype. The phenotype may be expression of a gene, cell growth, or cell viability. The relative representation of the ωRNAs or guide RNAs present in each group are determined, whereby genomic sites associated with the change in phenotype are determined by the representation of ωRNAs or guide RNAs present in each group. The change in phenotype may be a change in expression of a gene of interest. The gene of interest may be upregulated, downregulated, or knocked out. The cells may be sorted into a high expression group and a low expression group. The population of cells may include a reporter construct that is used to determine the phenotype. The reporter construct may include a detectable marker. Cells may be sorted by use of the detectable marker.

[0666] In another aspect, the present invention provides for a method of screening for genomic sites associated with resistance to a chemical compound. The chemical compound may be a drug or pesticide. The library may be introduced into a population of cells that are adapted to contain an IscB polypeptide or CRISPR-associated IscB polypeptide nuclease, wherein each cell of the population contains no more than one ωRNA or guide RNA; the population of cells are treated with the chemical compound; and the representation of ωRNA or guide RNAs are determined after treatment with the chemical compound at a later time point as compared to an early time point, whereby genomic sites associated with resistance to the chemical compound are determined by enrichment of ωRNAs. Representation of ωRNAs may be determined by deep sequencing methods.

[0667] Useful in the practice of the instant invention utilizing compositions are methods used in compositions and reference is made to the article entitled BCL11A enhancer dissection by Cas-mediated in situ saturating mutagenesis. Canver, M. C., Smith, E. C., Sher, F., Pinello, L., Sanjana, N. E., Shalem, O., Chen, D. D., Schupp, P. G., Vinjamur, D. S., Garcia, S. P., Luc, S., Kurita, R., Nakamura, Y., Fujiwara, Y., Maeda, T., Yuan, G., Zhang, F., Orkin, S. H., & Bauer, D. E. DOI: 10.1038/nature15521, published online Sep. 16, 2015, the article is herein incorporated by reference and discussed briefly below:

[0668] Canver et al. involves novel pooled guide RNA libraries to perform in situ saturating mutagenesis of the human and mouse BCL11A erythroid enhancers previously identified as an enhancer associated with fetal hemoglobin (HbF) level and whose mouse ortholog is necessary for erythroid BCL11A expression. This approach revealed critical minimal features and discrete vulnerabilities of these enhancers. Through editing of primary human progenitors and mouse transgenesis, the authors validated the BCL11A erythroid enhancer as a target for HbF reinduction. The authors generated a detailed enhancer map that informs therapeutic genome editing.

### Modification of a Cell or Organism

[0669] The present disclosure further provides cells comprising one or more components of the systems herein, e.g., the IscB polypeptide or CRISPR-associated IscB polypeptide nuclease and/or ωRNA(s). Also provided include cells modified by the systems and methods herein, and cell cultures, tissues, organs, organism comprising such cells or progeny thereof. The invention comprehends a method of modifying a cell or organism. The cell may be a prokaryotic cell or a eukaryotic cell. The cell may be a mammalian cell. The mammalian cell many be a non-human primate, bovine, porcine, rodent or mouse cell. The cell may be a non-mammalian eukaryotic cell such as poultry, fish or shrimp. The cell may also be a plant cell. The plant cell may be of a crop plant such as cassava, corn, sorghum, wheat, or rice. The plant cell may also be of an algae, tree or vegetable. The modification introduced to the cell by the present invention may be such that the cell and progeny of the cell are altered for improved production of biologic products such as an antibody, starch, alcohol or other desired cellular output. The modification introduced to the cell by the present invention may be such that the cell and progeny of the cell include an alteration that changes the biologic product produced.

### Therapeutic Uses and Methods of Treatment

[0670] Also provided herein are methods of diagnosing, prognosing, treating, and/or preventing a disease, state, or condition in or of a subject. Generally, the methods of diagnosing, prognosing, treating, and/or preventing a disease, state, or condition in or of a subject can include modifying a polynucleotide in a subject or cell thereof using a composition, system, or component thereof described herein and/or include detecting a diseased or healthy polynucleotide in a subject or cell thereof using a composition, system, or component thereof described herein. In one embodiment, the method of treatment or prevention can include using a composition, system, or component thereof to modify a polynucleotide of an infectious organism (e.g., bacterial or virus) within a subject or cell thereof. In one embodiment, the method of treatment or prevention can include using a composition, system, or component thereof to modify a polynucleotide of an infectious organism or symbiotic organism within a subject. The composition, system, and components thereof can be used to develop models of diseases, states, or conditions. The composition, system, and components thereof can be used to detect a disease state or correction thereof, such as by a method of treatment or prevention described herein. The composition, system, and components thereof can be used to screen and select cells that can be used, for example, as treatments or preventions described herein. The composition, system, and components thereof can be used to develop biologically active agents that can be used to modify one or more biologic functions or activities in a subject or a cell thereof.

[0671] In general, the method can include delivering a composition, system, and/or component thereof to a subject or cell thereof, or to an infectious or symbiotic organism by a suitable delivery technique and/or composition. Once administered the components can operate as described elsewhere herein to elicit a nucleic acid modification event. In some aspects, the nucleic acid modification event can occur at the genomic, epigenomic, and/or transcriptomic level. DNA and/or RNA cleavage, gene activation, and/or gene deactivation can occur. Additional features, uses, and advantages are described in greater detail below. On the basis of this concept, several variations are appropriate to elicit a genomic locus event, including DNA cleavage, gene activation, or gene deactivation. Using the provided compositions, the person skilled in the art can advantageously and specifically target single or multiple loci with the same or different functional domains to elicit one or more genomic locus events. In addition to treating and/or preventing a disease in a subject, the compositions may be applied in a wide variety of methods for screening in libraries in cells and functional modeling in vivo (e.g., gene activation of lincRNA and identification of function; gain-of-function modeling; loss-of-function modeling; the use the compositions of the invention to establish cell lines and transgenic animals for optimization and screening purposes).

[0672] The composition, system, and components thereof described elsewhere herein can be used to treat and/or prevent a disease, such as a genetic and/or epigenetic disease, in a subject. The composition, system, and components thereof described elsewhere herein can be used to treat and/or prevent genetic infectious diseases in a subject, such as bacterial infections, viral infections, fungal infections, parasite infections, and combinations thereof. The composition, system, and components thereof described elsewhere herein can be used to modify the composition or profile of a microbiome in a subject, which can in turn modify the health status of the subject. The composition, system, described herein can be used to modify cells ex vivo, which can then be administered to the subject whereby the modified cells can treat or prevent a disease or symptom thereof. This is also referred to in some contexts as adoptive therapy. The composition, system, described herein can be used to treat mitochondrial diseases, where the mitochondrial disease etiology involves a mutation in the mitochondrial DNA.

[0673] Also provided is a method of treating a subject, e.g., a subject in need thereof, comprising inducing gene editing by transforming the subject with the polynucleotide encoding one or more components of the composition, system, or complex or any of polynucleotides or vectors described herein and administering them to the subject. A suitable repair template may also be provided, for example delivered by a vector comprising said repair template. The repair template may be a recombination template herein. Also provided is a method of treating a subject, e.g., a subject in need thereof, comprising inducing transcriptional activation or repression of multiple target gene loci by transforming the subject with the polynucleotides or vectors described herein, wherein said polynucleotide or vector encodes or comprises one or more components of composition, system, complex or component thereof comprising multiple IscB polypeptide nucleases. Where any treatment is occurring ex vivo, for example in a cell culture, then it will be appreciated that the term ‘subject’ may be replaced by the phrase “cell or cell culture.”

[0674] Also provided is a method of treating a subject, e.g., a subject in need thereof, comprising inducing gene editing by transforming the subject with the IscB polypeptide or CRISPR-associated IscB polypeptide nuclease(s), advantageously encoding and expressing in vivo the remaining portions of the composition, system, (e.g., RNA, guides). A suitable repair template may also be provided, for example delivered by a vector comprising said repair template. Also provided is a method of treating a subject, e.g., a subject in need thereof, comprising inducing transcriptional activation or repression by transforming the subject with the IscB polypeptide nuclease(s) advantageously encoding and expressing in vivo the remaining portions of the composition, system, (e.g., RNA, guides); advantageously In one embodiment the IscB polypeptide or CRISPR-associated IscB polypeptide nuclease is a catalytically inactive IscB polypeptide or CRISPR-associated IscB polypeptide nuclease and includes one or more associated functional domains. Where any treatment is occurring ex vivo, for example in a cell culture, then it will be appreciated that the term ‘subject’ may be replaced by the phrase “cell or cell culture.”

[0675] One or more components of the composition and system described herein can be included in a composition, such as a pharmaceutical composition, and administered to a host individually or collectively. Alternatively, these components may be provided in a single composition for administration to a host. Administration to a host may be performed via viral vectors known to the skilled person or described herein for delivery to a host (e.g., lentiviral vector, adenoviral vector, AAV vector). As explained herein, use of different selection markers (e.g., for lentiviral hRNA selection) and concentration of ωRNA (e.g., dependent on whether multiple ωRNAs are used) may be advantageous for eliciting an improved effect.

[0676] Thus, also described herein are methods of inducing one or more polynucleotide modifications in a eukaryotic or prokaryotic cell or component thereof (e.g., a mitochondria) of a subject, infectious organism, and/or organism of the microbiome of the subject. The modification can include the introduction, deletion, or substitution of one or more nucleotides at a target sequence of a polynucleotide of one or more cell(s). The modification can occur in vitro, ex vivo, in situ, or in vivo.

[0677] In one embodiment, the method of treating or inhibiting a condition or a disease caused by one or more mutations in a genomic locus in a eukaryotic organism or a non-human organism can include manipulation of a target sequence within a coding, non-coding or regulatory element of said genomic locus in a target sequence in a subject or a non-human subject in need thereof comprising modifying the subject or a non-human subject by manipulation of the target sequence and wherein the condition or disease is susceptible to treatment or inhibition by manipulation of the target sequence including providing treatment comprising delivering a composition comprising the particle delivery system or the delivery system or the virus particle of any one of the above embodiment or the cell of any one of the above embodiment.

[0678] Also provided herein is the use of the particle delivery system or the delivery system or the virus particle of any one of the above embodiments or the cell of any one of the above embodiments in ex vivo or in vivo gene or genome editing; or for use in in vitro, ex vivo or in vivo gene therapy. Also provided herein are particle delivery systems, non-viral delivery systems, and/or the virus particle of any one of the above embodiments or the cell of any one of the above embodiments used in the manufacture of a medicament for in vitro, ex vivo or in vivo gene or genome editing or for use in in vitro, ex vivo or in vivo gene therapy or for use in a method of modifying an organism or a non-human organism by manipulation of a target sequence in a genomic locus associated with a disease or in a method of treating or inhibiting a condition or disease caused by one or more mutations in a genomic locus in a eukaryotic organism or a non-human organism.

[0679] In one embodiment, polynucleotide modification can include the introduction, deletion, or substitution of 1-75 nucleotides at each target sequence of said polynucleotide of said cell(s). The modification can include the introduction, deletion, or substitution of at least 1, 5, 10, 11, 12, 13, 14, 15, 16, 17, 18, 19, 20, 21, 22, 23, 24, 25, 26, 27, 28, 29, 30, 35, 40, 45, 50, or 75 nucleotides at each target sequence. The modification can include the introduction, deletion, or substitution of at least 5, 10, 11, 12, 13, 14, 15, 16, 17, 18, 19, 20, 21, 22, 23, 24, 25, 26, 27, 28, 29, 30, 35, 40, 45, 50, or 75 nucleotides at each target sequence of said cell(s). The modification can include the introduction, deletion, or substitution of at least 10, 11, 12, 13, 14, 15, 16, 17, 18, 19, 20, 21, 22, 23, 24, 25, 26, 27, 28, 29, 30, 35, 40, 45, 50, or 75 nucleotides at each target sequence of said cell(s). The modification can include the introduction, deletion, or substitution of at least 20, 21, 22, 23, 24, 25, 26, 27, 28, 29, 30, 35, 40, 45, 50, or 75 nucleotides at each target sequence of said cell(s). The modification can include the introduction, deletion, or substitution of at least 40, 45, 50, 75, 100, 200, 300, 400 or 500 nucleotides at each target sequence of said cell(s). The modification can include the introduction, deletion, or substitution of at least 500, 600, 700, 800, 900, 1000, 1100, 1200, 1300, 1400, 1500, 1600, 1700, 1800, 1900, 2000, 2100, 2200, 2300, 2400, 2500, 2600, 2700, 2800, 2900, 3000, 3100, 3200, 3300, 3400, 3500, 3600, 3700, 3800, 3900, 4000, 4100, 4200, 4300, 4400, 4500, 4600, 4700, 4800, 4900, 5000, 5100, 5200, 5300, 5400, 5500, 5600, 5700, 5800, 5900, 6000, 6100, 6200, 6300, 6400, 6500, 6600, 6700, 6800, 6900, 7000, 7100, 7200, 7300, 7400, 7500, 7600, 7700, 7800, 7900, 8000, 8100, 8200, 8300, 8400, 8500, 8600, 8700, 8800, 8900, 9000, 9100, 9200, 9300, 9400, 9500, 9600, 9700, 9800, or 9900 to 10000 nucleotides at each target sequence of said cell(s).

[0680] In one embodiment, the modifications can include the introduction, deletion, or substitution of nucleotides at each target sequence of said cell(s) via nucleic acid components (e.g., guide(s) RNA(s) or ωRNA(s)), such as those mediated by a composition, system, or a component thereof described elsewhere herein. In one embodiment, the modifications can include the introduction, deletion, or substitution of nucleotides at a target or random sequence of said cell(s) via a composition, system, or technique.

[0681] In one embodiment, the composition, system, or component thereof can promote Non-Homologous End-Joining (NHEJ). In one embodiment, modification of a polynucleotide by a composition, system, or a component thereof, such as a diseased polynucleotide, can include NHEJ. In one embodiment, promotion of this repair pathway by the composition, system, or a component thereof can be used to target gene or polynucleotide specific knock-outs and/or knock-ins. In one embodiment, promotion of this repair pathway by the composition, system, or a component thereof can be used to generate NHEJ-mediated indels. Nuclease-induced NHEJ can also be used to remove (e.g., delete) sequence in a gene of interest. Generally, NHEJ repairs a double-strand break in the DNA by joining together the two ends; however, generally, the original sequence is restored only if two compatible ends, exactly as they were formed by the double-strand break, are perfectly ligated. The DNA ends of the double-strand break are frequently the subject of enzymatic processing, resulting in the addition or removal of nucleotides, at one or both strands, prior to rejoining of the ends. This results in the presence of insertion and/or deletion (indel) mutations in the DNA sequence at the site of the NHEJ repair. The indel can range in size from 1-50 or more base pairs. In one embodiment thee indel can be 1, 2, 3, 4, 5, 6, 7, 8, 9, 10, 11, 12, 13, 14, 15, 16, 17, 18, 19, 20, 21, 22, 23, 24, 25, 26, 27, 28, 29, 30, 31, 32, 33, 34, 35, 36, 37, 38, 39, 40, 41, 42, 43, 44, 45, 46, 47, 48, 49, 50, 51, 52, 53, 54, 55, 56, 57, 58, 59, 60, 61, 62, 63, 64, 65, 66, 67, 68, 69, 70, 71, 72, 73, 74, 75, 76, 77, 78, 79, 80, 81, 82, 83, 84, 85, 86, 87, 88, 89, 90, 91, 92, 93, 94, 95, 96, 97, 98, 99, 100, 101, 102, 103, 104, 105, 106, 107, 108, 109, 110, 111, 112, 113, 114, 115, 116, 117, 118, 119, 120, 121, 122, 123, 124, 125, 126, 127, 128, 129, 130, 131, 132, 133, 134, 135, 136, 137, 138, 139, 140, 141, 142, 143, 144, 145, 146, 147, 148, 149, 150, 151, 152, 153, 154, 155, 156, 157, 158, 159, 160, 161, 162, 163, 164, 165, 166, 167, 168, 169, 170, 171, 172, 173, 174, 175, 176, 177, 178, 179, 180, 181, 182, 183, 184, 185, 186, 187, 188, 189, 190, 191, 192, 193, 194, 195, 196, 197, 198, 199, 200, 201, 202, 203, 204, 205, 206, 207, 208, 209, 210, 211, 212, 213, 214, 215, 216, 217, 218, 219, 220, 221, 222, 223, 224, 225, 226, 227, 228, 229, 230, 231, 232, 233, 234, 235, 236, 237, 238, 239, 240, 241, 242, 243, 244, 245, 246, 247, 248, 249, 250, 251, 252, 253, 254, 255, 256, 257, 258, 259, 260, 261, 262, 263, 264, 265, 266, 267, 268, 269, 270, 271, 272, 273, 274, 275, 276, 277, 278, 279, 280, 281, 282, 283, 284, 285, 286, 287, 288, 289, 290, 291, 292, 293, 294, 295, 296, 297, 298, 299, 300, 301, 302, 303, 304, 305, 306, 307, 308, 309, 310, 311, 312, 313, 314, 315, 316, 317, 318, 319, 320, 321, 322, 323, 324, 325, 326, 327, 328, 329, 330, 331, 332, 333, 334, 335, 336, 337, 338, 339, 340, 341, 342, 343, 344, 345, 346, 347, 348, 349, 350, 351, 352, 353, 354, 355, 356, 357, 358, 359, 360, 361, 362, 363, 364, 365, 366, 367, 368, 369, 370, 371, 372, 373, 374, 375, 376, 377, 378, 379, 380, 381, 382, 383, 384, 385, 386, 387, 388, 389, 390, 391, 392, 393, 394, 395, 396, 397, 398, 399, 400, 401, 402, 403, 404, 405, 406, 407, 408, 409, 410, 411, 412, 413, 414, 415, 416, 417, 418, 419, 420, 421, 422, 423, 424, 425, 426, 427, 428, 429, 430, 431, 432, 433, 434, 435, 436, 437, 438, 439, 440, 441, 442, 443, 444, 445, 446, 447, 448, 449, 450, 451, 452, 453, 454, 455, 456, 457, 458, 459, 460, 461, 462, 463, 464, 465, 466, 467, 468, 469, 470, 471, 472, 473, 474, 475, 476, 477, 478, 479, 480, 481, 482, 483, 484, 485, 486, 487, 488, 489, 490, 491, 492, 493, 494, 495, 496, 497, 498, 499, or 500 base pairs or more. If a double-strand break is targeted near to a short target sequence, the deletion mutations caused by the NHEJ repair often span, and therefore remove, the unwanted nucleotides. For the deletion of larger DNA segments, introducing two double-strand breaks, one on each side of the sequence, can result in NHEJ between the ends with removal of the entire intervening sequence. Both of these approaches can be used to delete specific DNA sequences.

[0682] In one embodiment, composition, system, mediated NHEJ can be used in the method to delete small sequence motifs. In one embodiment, composition, system, mediated NHEJ can be used in the method to generate NHEJ-mediate indels that can be targeted to the gene, e.g., a coding region, e.g., an early coding region of a gene of interest can be used to knockout (i.e., eliminate expression of) a gene of interest. For example, early coding region of a gene of interest includes sequence immediately following a transcription start site, within a first exon of the coding sequence, or within 500 bp of the transcription start site (e.g., less than 500, 450, 400, 350, 300, 250, 200, 150, 100 or 50 bp). In an embodiment, in which a ωRNA or guide RNA and IscB polypeptide nuclease generate a double strand break for the purpose of inducing NHEJ-mediated indels, a ωRNA or guide RNA may be configured to position one double-strand break in close proximity to a nucleotide of the target position. In an embodiment, the cleavage site may be between 0-500 bp away from the target position (e.g., less than 500, 400, 300, 200, 100, 50, 40, 30, 25, 20, 15, 10, 9, 8, 7, 6, 5, 4, 3, 2 or 1 bp from the target position). In an embodiment, in which two ωRNA or guide RNAs complexing with one or more nickases induce two single strand breaks for the purpose of inducing NHEJ-mediated indels, two guide RNAs may be configured to position two single-strand breaks to provide for NHEJ repair a nucleotide of the target position.

[0683] For minimization of toxicity and off-target effect, it may be important to control the concentration of IscB polypeptide or CRISPR-associated IscB polypeptide nuclease mRNA and guide RNA delivered. Optimal concentrations of IscB polypeptide or CRISPR-associated IscB polypeptide nuclease mRNA and guide RNA can be determined by testing different concentrations in a cellular or non-human eukaryote animal model and using deep sequencing the analyze the extent of modification at potential off-target genomic loci. Alternatively, to minimize the level of toxicity and off-target effect, nickase mRNA (for example S. pyogenes Cas9 with the D10A mutation) can be delivered with a pair of guide RNAs targeting a site of interest. Guide sequences and strategies to minimize toxicity and off-target effects can be as in International Patent Publication No. WO 2014/093622 (PCT/US2013/074667); or, via mutation. Others are as described elsewhere herein.

[0684] Typically, in the context of an endogenous IscB polypeptide nuclease, formation of a IscB polypeptide nuclease or complex (comprising a guide sequence hybridized to a target sequence and complexed with one or more IscB polypeptide or CRISPR-associated IscB polypeptide nucleases) results in cleavage, nicking, and/or another modification of one or both strands in or near (e.g., within 1, 2, 3, 4, 5, 6, 7, 8, 9, 10, 20, 50, or more base pairs from) the target sequence.

[0685] In one embodiment, a method of modifying a target polynucleotide in a cell to treat or prevent a disease can include allowing a composition, system, or component thereof to bind to the target polynucleotide, e.g., to effect cleavage, nicking, or other modification as the composition, system, is capable of said target polynucleotide, thereby modifying the target polynucleotide, wherein the composition, system, or component thereof, complex with a guide sequence, and hybridize said guide sequence to a target sequence within the target polynucleotide, wherein said guide sequence is optionally linked to a ωRNA scaffold sequence. In some of these embodiments, the composition, system, or component thereof can be or include an IscB polypeptide or CRISPR-associated IscB polypeptide nuclease complexed with a guide sequence. In one embodiment, modification can include cleaving or nicking one or two strands at the location of the target sequence by one or more components of the composition, system, or component thereof.

[0686] The cleavage, nicking, or other modification capable of being performed by the composition, system, can modify transcription of a target polynucleotide. In one embodiment, modification of transcription can include decreasing transcription of a target polynucleotide. In one embodiment, modification can include increasing transcription of a target polynucleotide. In one embodiment, the method includes repairing said cleaved target polynucleotide by homologous recombination with a recombination template polynucleotide, wherein said repair results in a modification such as, but not limited to, an insertion, deletion, or substitution of one or more nucleotides of said target polynucleotide. In one embodiment, said modification results in one or more amino acid changes in a protein expressed from a gene comprising the target sequence. In one embodiment, the modification imparted by the composition, system, or component thereof provides a transcript and/or protein that can correct a disease or a symptom thereof, including but not limited to, any of those described in greater detail elsewhere herein.

[0687] In one embodiment, the method of treating or preventing a disease can include delivering one or more vectors or vector systems to a cell, such as a eukaryotic or prokaryotic cell, wherein one or more vectors or vector systems include the composition, system, or component thereof. In one embodiment, the vector(s) or vector system(s) can be a viral vector or vector system, such as an AAV or lentiviral vector system, which are described in greater detail elsewhere herein. In one embodiment, the method of treating or preventing a disease can include delivering one or more viral particles, such as an AAV or lentiviral particle, containing the composition, system, or component thereof. In one embodiment, the viral particle has a tissue specific tropism. In one embodiment, the viral particle has a liver, muscle, eye, heart, pancreas, kidney, neuron, epithelial cell, endothelial cell, astrocyte, glial cell, immune cell, or red blood cell specific tropism.

[0688] It will be understood that the composition and system, according to the invention as described herein, such as the composition and system, for use in the methods according to the invention as described herein, may be suitably used for any type of application known for composition, system, preferably in eukaryotes. In certain aspects, the application is therapeutic, preferably therapeutic in a eukaryote organism, such as including but not limited to animals (including human), plants, algae, fungi (including yeasts), etc. Alternatively, or in addition, in certain aspects, the application may involve accomplishing or inducing one or more particular traits or characteristics, such as genotypic and/or phenotypic traits or characteristics, as also described elsewhere herein.

### Treating Diseases of the Circulatory System

[0689] In one embodiment, the composition, system, and/or component thereof described herein can be used to treat and/or prevent a circulatory system disease. Exemplary disease is provided, for example, in Table 6. In one embodiment the plasma exosomes of Wahlgren et al. (Nucleic Acids Research, 2012, Vol. 40, No. 17 e130) can be used to deliver the composition, system, and/or component thereof described herein to the blood. In one embodiment, the circulatory system disease can be treated by using a lentivirus to deliver the composition, system, described herein to modify hematopoietic stem cells (HSCs) in vivo or ex vivo (see e.g. Drakopoulou, “Review Article, The Ongoing Challenge of Hematopoietic Stem Cell-Based Gene Therapy for β-Thalassemia,” Stem Cells International, Volume 2011, Article ID 987980, 10 pages, doi: 10.4061/2011/987980, which can be adapted for use with the composition, system, herein in view of the description herein). In one embodiment, the circulatory system disorder can be treated by correcting HSCs as to the disease using a composition, system, herein or a component thereof, wherein the composition, system, optionally includes a suitable HDR repair template (see e.g., Cavazzana, “Outcomes of Gene Therapy for β-Thalassemia Major via Transplantation of Autologous Hematopoietic Stem Cells Transduced Ex Vivo with a Lentiviral βA-T87Q-Globin Vector.”; Cavazzana-Calvo, “Transfusion independence and HMGA2 activation after gene therapy of human β-thalassaemia”, Nature 467, 318-322 (16 Sep. 2010) doi: 10.1038/nature09328; Nienhuis, “Development of Gene Therapy for Thalassemia, Cold Spring Harbor Perspectives in Medicine, doi: 10.1101/cshperspect.a011833(2012), LentiGlobin BB305, a lentiviral vector containing an engineered β-globin gene (βA-T87Q); and Xie et al., “Seamless gene correction of β-thalassaemia mutations in patient-specific iPSCs using CRISPR/Cas9 and piggyback” Genome Research gr.173427.114 (2014) www.genome.org/cgi/doi/10.1101/gr.173427.114 (Cold Spring Harbor Laboratory Press; [1599] Watts, “Hematopoietic Stem Cell Expansion and Gene Therapy” Cytotherapy 13(10): 1164-1171. doi: 10.3109/14653249.2011.620748 (2011), which can be adapted for use with the composition, system, herein in view of the description herein). In one embodiment, iPSCs can be modified using a composition, system, described herein to correct a disease polynucleotide associated with a circulatory disease. In this regard, the teachings of Xu et al. (Sci Rep. 2015 Jul. 9; 5:12065. doi: 10.1038/srep12065) and Song et al. (Stem Cells Dev. 2015 May 1; 24(9): 1053-65. doi: 10.1089/scd.2014.0347. Epub 2015 Feb. 5) with respect to modifying iPSCs can be adapted for use in view of the description herein with the composition, system, described herein.

[0690] The term “Hematopoietic Stem Cell” or “HSC” refers broadly those cells considered to be an HSC, e.g., blood cells that give rise to all the other blood cells and are derived from mesoderm; located in the red bone marrow, which is contained in the core of most bones. HSCs of the invention include cells having a phenotype of hematopoietic stem cells, identified by small size, lack of lineage (lin) markers, and markers that belong to the cluster of differentiation series, like: CD34, CD38, CD90, CD133, CD105, CD45, and also c-kit,—the receptor for stem cell factor. Hematopoietic stem cells are negative for the markers that are used for detection of lineage commitment, and are, thus, called Lin−; and, during their purification by FACS, a number of up to 14 different mature blood-lineage markers, e.g., CD13 & CD33 for myeloid, CD71 for erythroid, CD19 for B cells, CD61 for megakaryocytic, etc. for humans; and, β220 (murine CD45) for B cells, Mac-1 (CD11b/CD18) for monocytes, Gr-1 for Granulocytes, Ter119 for erythroid cells, I17Ra, CD3, CD4, CD5, CD8 for T cells, etc. Mouse HSC markers: CD34lo/−, SCA-1+, Thy1.1+/lo, CD38+, C-kit+, lin−, and Human HSC markers: CD34+, CD59+, Thy1/CD90+, CD38lo/−, C-kit/CD117+, and lin-. HSCs are identified by markers. Hence in embodiments discussed herein, the HSCs can be CD34+ cells. HSCs can also be hematopoietic stem cells that are CD34−/CD38−. Stem cells that may lack c-kit on the cell surface that are considered in the art as HSCs are within the ambit of the invention, as well as CD133+ cells likewise considered HSCs in the art.

[0691] In one embodiment, the treatment or prevention for treating a circulatory system or blood disease can include modifying a human cord blood cell with any modification described herein. In one embodiment, the treatment or prevention for treating a circulatory system or blood disease can include modifying a granulocyte colony-stimulating factor-mobilized peripheral blood cell (mPB) with any modification described herein. In one embodiment, the human cord blood cell or mPB can be CD34+. In one embodiment, the cord blood cell(s) or mPB cell(s) modified can be autologous. In one embodiment, the cord blood cell(s) or mPB cell(s) can be allogenic. In addition to the modification of the disease gene(s), allogenic cells can be further modified using the composition, system, described herein to reduce the immunogenicity of the cells when delivered to the recipient. Such techniques are described elsewhere herein and e.g., Cartier, “MINI-SYMPOSIUM: X-Linked Adrenoleukodystrophypa, Hematopoietic Stem Cell Transplantation and Hematopoietic Stem Cell Gene Therapy in X-Linked Adrenoleukodystrophy,” Brain Pathology 20 (2010) 857-862, which can be adapted for use with the composition, system, herein. The modified cord blood cell(s) or mPB cell(s) can be optionally expanded in vitro. The modified cord blood cell(s) or mPB cell(s) can be derived to a subject in need thereof using any suitable delivery technique.

[0692] The compositions may be engineered to target genetic locus or loci in HSCs. In one embodiment, the IscB polypeptide or CRISPR-associated IscB polypeptide nuclease(s) can be codon-optimized for a eukaryotic cell and especially a mammalian cell, e.g., a human cell, for instance, HSC, or iPSC and hRNA targeting a locus or loci in HSC, such as circulatory disease, can be prepared. These may be delivered via particles. The particles may be formed by the IscB polypeptide nuclease and the ωRNA being admixed. The ωRNA and IscB polypeptide nuclease mixture can be, for example, admixed with a mixture comprising or consisting essentially of or consisting of surfactant, phospholipid, biodegradable polymer, lipoprotein and alcohol, whereby particles containing the ωRNA and IscB polypeptide or CRISPR-associated IscB polypeptide nuclease may be formed. The invention comprehends so making particles and particles from such a method as well as uses thereof. Particles suitable delivery of the composition in the context of blood or circulatory system or HSC delivery to the blood or circulatory system are described in greater detail elsewhere herein.

[0693] In one embodiment, after ex vivo modification the HSCs or iPCS can be expanded prior to administration to the subject. Expansion of HSCs can be via any suitable method such as that described by, Lee, “Improved ex vivo expansion of adult hematopoietic stem cells by overcoming CUL4-mediated degradation of HOXB4.” Blood. 2013 May 16; 121(20):4082-9. doi: 10.1182/blood-2012-09-455204. Epub 2013 Mar. 21.

[0694] In one embodiment, the HSCs or iPSCs modified can be autologous. In one embodiment, the HSCs or iPSCs can be allogenic. In addition to the modification of the disease gene(s), allogenic cells can be further modified using the composition, system, described herein to reduce the immunogenicity of the cells when delivered to the recipient. Such techniques are described elsewhere herein and e.g., Cartier, “MINI-SYMPOSIUM: X-Linked Adrenoleukodystrophypa, Hematopoietic Stem Cell Transplantation and Hematopoietic Stem Cell Gene Therapy in X-Linked Adrenoleukodystrophy,” Brain Pathology 20 (2010)857-862, which can be adapted for use with the composition, system, herein.

### Treating Neurological Diseases

[0695] In one embodiment, the compositions, systems, described herein can be used to treat diseases of the brain and CNS. Delivery options for the brain include encapsulation of IscB polypeptide nuclease and guide RNA in the form of either DNA or RNA into liposomes and conjugating to molecular Trojan horses for trans-blood brain barrier (BBB) delivery. Molecular Trojan horses have been shown to be effective for delivery of B-gal expression vectors into the brain of non-human primates. The same approach can be used to delivery vectors containing IscB polypeptide nuclease and guide RNA. For instance, Xia C F and Boado R J, Pardridge W M (“Antibody-mediated targeting of siRNA via the human insulin receptor using avidin-biotin technology.” Mol Pharm. 2009 May-June; 6(3):747-51. doi: 10.1021/mp800194) describes how delivery of short interfering RNA (siRNA) to cells in culture, and in vivo, is possible with combined use of a receptor-specific monoclonal antibody (mAb) and avidin-biotin technology. The authors also report that because the bond between the targeting mAb and the siRNA is stable with avidin-biotin technology, and RNAi effects at distant sites such as brain are observed in vivo following an intravenous administration of the targeted siRNA, the teachings of which can be adapted for use with the compositions, systems, herein. In other embodiments, an artificial virus can be generated for CNS and/or brain delivery. See e.g., Zhang et al. (Mol Ther. 2003 January; 7(1): 11-8.)), the teachings of which can be adapted for use with the compositions, systems, herein.

### Treating Hearing Diseases

[0696] In one embodiment, the composition and system described herein can be used to treat a hearing disease or hearing loss in one or both ears. Deafness is often caused by lost or damaged hair cells that cannot relay signals to auditory neurons. In such cases, cochlear implants may be used to respond to sound and transmit electrical signals to the nerve cells. But these neurons often degenerate and retract from the cochlea as fewer growth factors are released by impaired hair cells.

[0697] In one embodiment, the composition, system, or modified cells can be delivered to one or both ears for treating or preventing hearing disease or loss by any suitable method or technique. Suitable methods and techniques include, but are not limited to, those set forth in US Patent Publication No. 20120328580 describes injection of a pharmaceutical composition into the ear (e.g., auricular administration), such as into the luminae of the cochlea (e.g., the Scala media, Sc vestibulae, and Sc tympani), e.g., using a syringe, e.g., a single-dose syringe. For example, one or more of the compounds described herein can be administered by intratympanic injection (e.g., into the middle ear), and/or injections into the outer, middle, and/or inner ear; administration in situ, via a catheter or pump (see e.g. McKenna et al., (U.S. Patent Publication No. 2006/0030837) and Jacobsen et al., (U.S. Pat. No. 7,206,639); administration in combination with a mechanical device such as a cochlear implant or a hearing aid, which is worn in the outer ear (see e.g., U.S. Patent Publication No. 2007/0093878, which provides an exemplary cochlear implant suitable for delivery of the compositions, systems, described herein to the ear). Such methods are routinely used in the art, for example, for the administration of steroids and antibiotics into human ears. Injection can be, for example, through the round window of the ear or through the cochlear capsule. Other inner ear administration methods are known in the art (see, e.g., Salt and Plontke, Drug Discovery Today, 10:1299-1306, 2005). In one embodiment, a catheter or pump can be positioned, e.g., in the ear (e.g., the outer, middle, and/or inner ear) of a patient during a surgical procedure. In one embodiment, a catheter or pump can be positioned, e.g., in the ear (e.g., the outer, middle, and/or inner ear) of a patient without the need for a surgical procedure.

[0698] In general, the cell therapy methods described in US Patent Publication No. 20120328580 can be used to promote complete or partial differentiation of a cell to or towards a mature cell type of the inner ear (e.g., a hair cell) in vitro. Cells resulting from such methods can then be transplanted or implanted into a patient in need of such treatment. The cell culture methods required to practice these methods, including methods for identifying and selecting suitable cell types, methods for promoting complete or partial differentiation of selected cells, methods for identifying complete or partially differentiated cell types, and methods for implanting complete or partially differentiated cells are described below.

[0699] Cells suitable for use in the present invention include, but are not limited to, cells that are capable of differentiating completely or partially into a mature cell of the inner ear, e.g., a hair cell (e.g., an inner and/or outer hair cell), when contacted, e.g., in vitro, with one or more of the compounds described herein. Exemplary cells that are capable of differentiating into a hair cell include, but are not limited to stem cells (e.g., inner ear stem cells, adult stem cells, bone marrow derived stem cells, embryonic stem cells, mesenchymal stem cells, skin stem cells, iPS cells, and fat derived stem cells), progenitor cells (e.g., inner ear progenitor cells), support cells (e.g., Deiters' cells, pillar cells, inner phalangeal cells, tectal cells and Hensen's cells), and/or germ cells. The use of stem cells for the replacement of inner ear sensory cells is described in Li et al., (U.S. Patent Publication No. 2005/0287127) and Li et al., (U.S. patent application Ser. No. 11/953,797). The use of bone marrow derived stem cells for the replacement of inner ear sensory cells is described in Edge et al., PCT/US2007/084654. iPS cells are described, e.g., at Takahashi et al., Cell, Volume 131, Issue 5, Pages 861-872(2007); Takahashi and Yamanaka, Cell 126, 663-76(2006); Okita et al., Nature 448, 260-262(2007); Yu, J. et al., Science 318(5858): 1917-1920(2007); Nakagawa et al., Nat. Biotechnol. 26:101-106(2008); and Zaehres and Scholer, Cell 131(5): 834-835(2007). Such suitable cells can be identified by analyzing (e.g., qualitatively or quantitatively) the presence of one or more tissue specific genes. For example, gene expression can be detected by detecting the protein product of one or more tissue-specific genes. Protein detection techniques involve staining proteins (e.g., using cell extracts or whole cells) using antibodies against the appropriate antigen. In this case, the appropriate antigen is the protein product of the tissue-specific gene expression. Although, in principle, a first antibody (i.e., the antibody that binds the antigen) can be labeled, it is more common (and improves the visualization) to use a second antibody directed against the first (e.g., an anti-IgG). This second antibody is conjugated either with fluorochromes, or appropriate enzymes for colorimetric reactions, or gold beads (for electron microscopy), or with the biotin-avidin system, so that the location of the primary antibody, and thus the antigen, can be recognized.

[0700] The composition and system may be delivered to the ear by direct application of pharmaceutical composition to the outer ear, with compositions modified from US Patent Publication No. 20110142917. In one embodiment the pharmaceutical composition is applied to the ear canal. Delivery to the ear may also be referred to as aural or otic delivery.

[0701] In one embodiment, the compositions, systems, or components thereof and/or vectors or vector systems can be delivered to ear via a transfection to the inner ear through the intact round window by a novel proteidic delivery technology which may be applied to the nucleic acid-targeting system of the present invention (see, e.g., Qi et al., Gene Therapy (2013), 1-9). About 40 μl of 10 mM RNA may be contemplated as the dosage for administration to the ear.

[0702] According to Rejali et al. (Hear Res. 2007 June; 228(1-2): 180-7), cochlear implant function can be improved by good preservation of the spiral ganglion neurons, which are the target of electrical stimulation by the implant and brain derived neurotrophic factor (BDNF) has previously been shown to enhance spiral ganglion survival in experimentally deafened ears. Rejali et al. tested a modified design of the cochlear implant electrode that includes a coating of fibroblast cells transduced by a viral vector with a BDNF gene insert. To accomplish this type of ex vivo gene transfer, Rejali et al. transduced guinea pig fibroblasts with an adenovirus with a BDNF gene cassette insert and determined that these cells secreted BDNF and then attached BDNF-secreting cells to the cochlear implant electrode via an agarose gel, and implanted the electrode in the scala tympani. Rejali et al. determined that the BDNF expressing electrodes were able to preserve significantly more spiral ganglion neurons in the basal turns of the cochlea after 48 days of implantation when compared to control electrodes and demonstrated the feasibility of combining cochlear implant therapy with ex vivo gene transfer for enhancing spiral ganglion neuron survival. Such a system may be applied to the nucleic acid-targeting system of the present invention for delivery to the ear.

[0703] In one embodiment, the system set forth in Mukherjea et al. (Antioxidants & Redox Signaling, Volume 13, Number 5, 2010) can be adapted for transtympanic administration of the composition, system, or component thereof to the ear. In one embodiment, a dosage of about 2 mg to about 4 mg of IscB polypeptide or CRISPR-associated IscB polypeptide nuclease for administration to a human.

[0704] In one embodiment, the system set forth in [Jung et al. (Molecular Therapy, vol. 21 no. 4, 834-841 April 2013) can be adapted for vestibular epithelial delivery of the composition, system, or component thereof to the ear. In one embodiment, a dosage of about 1 to about 30 mg of IscB polypeptide nuclease for administration to a human.

### Treating Diseases in Non-Dividing Cells

[0705] In one embodiment, the gene or transcript to be corrected is in a non-dividing cell. Exemplary non-dividing cells are muscle cells or neurons. Non-dividing (especially non-dividing, fully differentiated) cell types present issues for gene targeting or genome engineering, for example because homologous recombination (HR) is generally suppressed in the G1 cell-cycle phase. However, while studying the mechanisms by which cells control normal DNA repair systems, Durocher discovered a previously unknown switch that keeps HR “off” in non-dividing cells and devised a strategy to toggle this switch back on. Orthwein et al. (Daniel Durocher's lab at the Mount Sinai Hospital in Ottawa, Canada) recently reported (Nature 16142, published online 9 Dec. 2015) have shown that the suppression of HR can be lifted and gene targeting successfully concluded in both kidney (293T) and osteosarcoma (U2OS) cells. Tumor suppressors, BRCA1, PALB2 and BRAC2 are known to promote DNA DSB repair by HR. They found that formation of a complex of BRCA1 with PALB2-BRAC2 is governed by a ubiquitin site on PALB2, such that action on the site by an E3 ubiquitin ligase. This E3 ubiquitin ligase is composed of KEAP1 (a PALB2-interacting protein) in complex with cullin-3 (CUL3)-RBX1. PALB2 ubiquitylation suppresses its interaction with BRCA1 and is counteracted by the deubiquitylase USP11, which is itself under cell cycle control. Restoration of the BRCA1-PALB2 interaction combined with the activation of DNA-end resection is sufficient to induce homologous recombination in G1, as measured by a number of methods including an IscB polypeptide nuclease-based gene-targeting assay directed at USP11 or KEAP1 (expressed from a pX459 vector). However, when the BRCA1-PALB2 interaction was restored in resection-competent G1 cells using either KEAP1 depletion or expression of the PALB2-KR mutant, a robust increase in gene-targeting events was detected. These teachings can be adapted for and/or applied to the compositions, systems, described herein.

[0706] Thus, reactivation of HR in cells, especially non-dividing, fully differentiated cell types is preferred. In one embodiment, promotion of the BRCA1-PALB2 interaction is preferred. In one embodiment, the target cell is a non-dividing cell. In one embodiment, the target cell is a neuron or muscle cell. In one embodiment, the target cell is targeted in vivo. In one embodiment, the cell is in G1 and HR is suppressed. In one embodiment, use of KEAP1 depletion, for example inhibition of expression of KEAP1 activity, is preferred. KEAP1 depletion may be achieved through siRNA, for example as shown in Orthwein et al. Alternatively, expression of the PALB2-KR mutant (lacking all eight Lys residues in the BRCA1-interaction domain is preferred, either in combination with KEAP1 depletion or alone. PALB2-KR interacts with BRCA1 irrespective of cell cycle position. Thus, promotion or restoration of the BRCA1-PALB2 interaction, especially in G1 cells, is preferred. In one embodiment, especially where the target cells are non-dividing, or where removal and return (ex vivo gene targeting) is problematic, for example neuron or muscle cells. KEAP1 siRNA is available from ThermoFischer. In one embodiment, a BRCA1-PALB2 complex may be delivered to the G1 cell. In one embodiment, PALB2 deubiquitylation may be promoted for example by increased expression of the deubiquitylase USP11, so it is envisaged that a construct may be provided to promote or up-regulate expression or activity of the deubiquitylase USP11.

### Treating Diseases of the Eye

[0707] In one embodiment, the disease to be treated is a disease that affects the eyes. Thus, in one embodiment, the composition, system, or component thereof described herein is delivered to one or both eyes.

[0708] The composition, system, can be used to correct ocular defects that arise from several genetic mutations further described in Genetic Diseases of the Eye, Second Edition, edited by Elias I. Traboulsi, Oxford University Press, 2012.

[0709] In one embodiment, the condition to be treated or targeted is an eye disorder. In one embodiment, the eye disorder may include glaucoma. In one embodiment, the eye disorder includes a retinal degenerative disease. In one embodiment, the retinal degenerative disease is selected from Stargardt disease, Bardet-Biedl Syndrome, Best disease, Blue Cone Monochromacy, Choroidermia, Cone-rod dystrophy, Congenital Stationary Night Blindness, Enhanced S-Cone Syndrome, Juvenile X-Linked Retinoschisis, Leber Congenital Amaurosis, Malattia Leventinesse, Norrie Disease or X-linked Familial Exudative Vitreoretinopathy, Pattern Dystrophy, Sorsby Dystrophy, Usher Syndrome, Retinitis Pigmentosa, Achromatopsia or Macular dystrophies or degeneration, Retinitis Pigmentosa, Achromatopsia, and age related macular degeneration. In one embodiment, the retinal degenerative disease is Leber Congenital Amaurosis (LCA) or Retinitis Pigmentosa. Other exemplary eye diseases are described in greater detail elsewhere herein.

[0710] In one embodiment, the composition, system, is delivered to the eye, optionally via intravitreal injection or subretinal injection. Intraocular injections may be performed with the aid of an operating microscope. For subretinal and intravitreal injections, eyes may be prolapsed by gentle digital pressure and fundi visualized using a contact lens system consisting of a drop of a coupling medium solution on the cornea covered with a glass microscope slide coverslip. For subretinal injections, the tip of a 10-mm 34-gauge needle, mounted on a 5-μl Hamilton syringe may be advanced under direct visualization through the superior equatorial sclera tangentially towards the posterior pole until the aperture of the needle was visible in the subretinal space. Then, 2 μl of vector suspension may be injected to produce a superior bullous retinal detachment, thus confirming subretinal vector administration. This approach creates a self-sealing sclerotomy allowing the vector suspension to be retained in the subretinal space until it is absorbed by the RPE, usually within 48 h of the procedure. This procedure may be repeated in the inferior hemisphere to produce an inferior retinal detachment. This technique results in the exposure of approximately 70% of neurosensory retina and RPE to the vector suspension. For intravitreal injections, the needle tip may be advanced through the sclera 1 mm posterior to the corneoscleral limbus and 2 μl of vector suspension injected into the vitreous cavity. For intracameral injections, the needle tip may be advanced through a corneoscleral limbal paracentesis, directed towards the central cornea, and 2 μl of vector suspension may be injected. For intracameral injections, the needle tip may be advanced through a corneoscleral limbal paracentesis, directed towards the central cornea, and 2 μl of vector suspension may be injected. These vectors may be injected at titers of either 1.0-1.4×10¹⁰ or 1.0-1.4×10⁹ transducing units (TU)/ml.

[0711] In one embodiment, for administration to the eye, lentiviral vectors. In one embodiment, the lentiviral vector is an equine infectious anemia virus (EIAV) vector. Exemplary EIAV vectors for eye delivery are described in Balagaan, J Gene Med 2006; 8:275-285, Published online 21 Nov. 2005 in Wiley InterScience (www.interscience.wiley.com). DOI: 10.1002/jgm.845; Binley et al., HUMAN GENE THERAPY 23:980-991 (September 2012), which can be adapted for use with the composition, system, described herein. In one embodiment, the dosage can be 1.1×10⁵ transducing units per eye (TU/eye) in a total volume of 100 μl.

[0712] Other viral vectors can also be used for delivery to the eye, such as AAV vectors, such as those described in Campochiaro et al., Human Gene Therapy 17:167-176 (February 2006), Millington-Ward et al. (Molecular Therapy, vol. 19 no. 4, 642-649 April 2011; Dalkara et al. (Sci Transl Med 5, 189ra76(2013)), which can be adapted for use with the composition, system, described herein. In one embodiment, the dose can range from about 10⁶ to 10^{9.5} particle units. In the context of the Millington-Ward AAV vectors, a dose of about 2×10¹¹ to about 6×10¹³ virus particles can be administered. In the context of Dalkara vectors, a dose of about 1×10¹⁵ to about 1×10¹⁶ vg/ml administered to a human.

[0713] In one embodiment, the sd-rxRNA® system of RXi Pharmaceuticals may be used/and or adapted for delivering composition, system, to the eye. In this system, a single intravitreal administration of 3 μg of sd-rxRNA results in sequence-specific reduction of PPIB mRNA levels for 14 days. The sd-rxRNA® system may be applied to the nucleic acid-targeting system of the present invention, contemplating a dose of about 3 to 20 mg of composition administered to a human.

[0714] In other embodiments, the methods of US Patent Publication No. 20130183282, which is directed to methods of cleaving a target sequence from the human rhodopsin gene, may also be modified to the nucleic acid-targeting system of the present invention.

[0715] In other embodiments, the methods of US Patent Publication No. 20130202678 for treating retinopathies and sight-threatening ophthalmologic disorders relating to delivering of the Puf-A gene (which is expressed in retinal ganglion and pigmented cells of eye tissues and displays a unique anti-apoptotic activity) to the sub-retinal or intravitreal space in the eye may be used or adapted. In particular, desirable targets are zgc:193933, prdm1a, spata2, tex 10, rbb4, ddx3, zp2.2, Blimp-1 and HtrA2, all of which may be targeted by the composition, system, of the present invention.

[0716] Wu (Cell Stem Cell, 13:659-62, 2013) designed a guide RNA that led Cas9to a single base pair mutation that causes cataracts in mice, where it induced DNA cleavage. Then using either the other wild-type allele or oligos given to the zygotes repair mechanisms corrected the sequence of the broken allele and corrected the cataract-causing genetic defect in mutant mouse. This approach can be adapted to and/or applied to the compositions, systems, described herein.

[0717] US Patent Publication No. 20120159653, describes use of zinc finger nucleases to genetically modify cells, animals and proteins associated with macular degeneration (MD), the teachings of which can be applied to and/or adapted for the compositions, systems, described herein.

[0718] One aspect of US Patent Publication No. 20120159653 relates to editing of any chromosomal sequences that encode proteins associated with MD which may be applied to the nucleic acid-targeting system of the present invention.

### Treating Muscle Diseases and Cardiovascular Diseases

[0719] In one embodiment, the composition, system can be used to treat and/or prevent a muscle disease and associated circulatory or cardiovascular disease or disorder. The present invention also contemplates delivering the composition, system, described herein, e.g., IscB polypeptide or CRISPR-associated IscB polypeptide systems, to the heart. For the heart, a myocardium tropic adeno-associated virus (AAVM) is preferred, in particular AAVM41 which showed preferential gene transfer in the heart (see, e.g., Lin-Yanga et al., PNAS, Mar. 10, 2009, vol. 106, no. 10). Administration may be systemic or local. A dosage of about 1-10×10¹⁴ vector genomes is contemplated for systemic administration. See also, e.g., Eulalio et al. (2012) Nature 492:376 and Somasuntharam et al. (2013) Biomaterials 34:7790, the teachings of which can be adapted for and/or applied to the compositions, systems, described herein.

[0720] For example, US Patent Publication No. 20110023139, the teachings of which can be adapted for and/or applied to the compositions, systems, described herein describes use of zinc finger nucleases to genetically modify cells, animals and proteins associated with cardiovascular disease. Cardiovascular diseases generally include high blood pressure, heart attacks, heart failure, and stroke and TIA. Any chromosomal sequence involved in cardiovascular disease or the protein encoded by any chromosomal sequence involved in cardiovascular disease may be utilized in the methods described in this disclosure. The cardiovascular-related proteins are typically selected based on an experimental association of the cardiovascular-related protein to the development of cardiovascular disease. For example, the production rate or circulating concentration of a cardiovascular-related protein may be elevated or depressed in a population having a cardiovascular disorder relative to a population lacking the cardiovascular disorder. Differences in protein levels may be assessed using proteomic techniques including but not limited to Western blot, immunohistochemical staining, enzyme linked immunosorbent assay (ELISA), and mass spectrometry. Alternatively, the cardiovascular-related proteins may be identified by obtaining gene expression profiles of the genes encoding the proteins using genomic techniques including but not limited to DNA microarray analysis, serial analysis of gene expression (SAGE), and quantitative real-time polymerase chain reaction (Q-PCR).

[0721] The compositions, systems, herein can be used for treating diseases of the muscular system. The present invention also contemplates delivering the composition, system, described herein, effector protein systems, to muscle(s).

[0722] In one embodiment, the muscle disease to be treated is a muscle dystrophy such as DMD. In one embodiment, the composition, system, such as a system capable of RNA modification, described herein can be used to achieve exon skipping to achieve correction of the diseased gene. As used herein, the term “exon skipping” refers to the modification of pre-mRNA splicing by the targeting of splice donor and/or acceptor sites within a pre-mRNA with one or more complementary antisense oligonucleotide(s) (AONs). By blocking access of a spliceosome to one or more splice donor or acceptor site, an AON may prevent a splicing reaction thereby causing the deletion of one or more exons from a fully-processed mRNA. Exon skipping may be achieved in the nucleus during the maturation process of pre-mRNAs. In some examples, exon skipping may include the masking of key sequences involved in the splicing of targeted exons by using a composition, system, described herein capable of RNA modification. In one embodiment, exon skipping can be achieved in dystrophin mRNA. In one embodiment, the composition, system, can induce exon skipping at exon 1, 2, 3, 4, 5, 6, 7, 8, 10, 11, 12, 13, 14, 15, 16, 17, 18, 19, 20, 21, 22, 23, 24, 25, 26, 27, 28, 29, 30, 31, 32, 33, 34, 45, 36, 37, 38, 39, 40, 41, 42, 43, 44, 45, 46, 47, 48, 49, 50, 51, 52, 53, 54, 55, 56, 57, 58, 59, 60, 61, 62, 63, 64, 65, 66, 67, 68, 69, 70, 71, 72, 73, 74, 75, 76, 77, 78, 79, or any combination thereof of the dystrophin mRNA. In one embodiment, the composition, system, can induce exon skipping at exon 43, 44, 50, 51, 52, 55, or any combination thereof of the dystrophin mRNA. Mutations in these exons, can also be corrected using non-exon skipping polynucleotide modification methods.

[0723] In one embodiment, for treatment of a muscle disease, the method of Bortolanza et al. Molecular Therapy vol. 19 no. 11, 2055-264 November 2011) may be applied to an AAV expressing IscB polypeptide or CRISPR-associated IscB polypeptide nuclease and injected into humans at a dosage of about 2×10¹⁵ or 2×10¹⁶ vg of vector. The teachings of Bortolanza et al., can be adapted for and/or applied to the compositions, systems, described herein.

[0724] In one embodiment, the method of Dumonceaux et al. (Molecular Therapy vol. 18 no. 5, 881-887 May 2010) may be applied to an AAV expressing IscB polypeptide or CRISPR-associated IscB polypeptide nuclease and injected into humans, for example, at a dosage of about 10¹⁴ to about 10¹⁵ vg of vector. The teachings of Dumonceaux described herein can be adapted for and/or applied to the compositions, systems, described herein.

[0725] In one embodiment, the method of Kinouchi et al. (Gene Therapy (2008)15, 1126-1130) may be applied to compositions described herein and injected into a human, for example, at a dosage of about 500 to 1000 ml of a 40 μM solution into the muscle.

[0726] In one embodiment, the method of Hagstrom et al. (Molecular Therapy Vol. 10, No. 2, August 2004) can be adapted for and/or applied to the compositions, systems, herein and injected at a dose of about 15 to about 50 mg into the great saphenous vein of a human.

[0727] In one embodiment, the method comprises treating a sickle cell related disease, e.g., sickle cell trait, sickle cell disease such as sickle cell anemia, β-thalassaemia. For example, the method and system may be used to modify the genome of the sickle cell, e.g., by correcting one or more mutations of the β-globin gene. In the case of β-thalassaemia, sickle cell anemia can be corrected by modifying HSCs with the systems. The system allows the specific editing of the cell's genome by cutting its DNA and then letting it repair itself. The IscB polypeptide nuclease is inserted and directed by a RNA guide to the mutated point and then it cuts the DNA at that point. Simultaneously, a healthy version of the sequence is inserted. This sequence is used by the cell's own repair system to fix the induced cut. In this way, the IscB polypeptide or CRISPR-associated IscB polypeptide nuclease allows the correction of the mutation in the previously obtained stem cells. The methods and systems may be used to correct HSCs as to sickle cell anemia using systems that target and correct the mutation (e.g., with a suitable HDR template that delivers a coding sequence for β-globin, advantageously non-sickling β-globin); specifically, the guide RNA can target mutation that give rise to sickle cell anemia, and the HDR can provide coding for proper expression of β-globin. An ωRNA or guide RNA that targets the mutation-and-IscB polypeptide nuclease containing particle is contacted with HSCs carrying the mutation. The particle also can contain a suitable HDR template to correct the mutation for proper expression of β-globin; or the HSC can be contacted with a second particle or a vector that contains or delivers the HDR template. The so contacted cells can be administered; and optionally treated/expanded; cf. Cartier. The HDR template can provide for the HSC to express an engineered β-globin gene (e.g., βA-T87Q), or β-globin.

### Treating Diseases of the Liver and Kidney

[0728] In one embodiment, the composition, system, or component thereof described herein can be used to treat a disease of the kidney or liver. Thus, in one embodiment, delivery of the composition or component thereof described herein is to the liver or kidney.

[0729] Delivery strategies to induce cellular uptake of the therapeutic nucleic acid include physical force or vector systems such as viral-, lipid- or complex-based delivery, or nanocarriers. From the initial applications with less possible clinical relevance, when nucleic acids were addressed to renal cells with hydrodynamic high-pressure injection systemically, a wide range of gene therapeutic viral and non-viral carriers have been applied already to target posttranscriptional events in different animal kidney disease models in vivo (Csaba Révész and Peter Hamar (2011). Delivery Methods to Target RNAs in the Kidney, Gene Therapy Applications, Prof. Chunsheng Kang (Ed.), ISBN: 978-953-307-541-9, InTech, Available from: www.intechopen.com/books/gene-therapy-applications/delivery-methods-to-target-rnas-inthe-kidney). Delivery methods to the kidney may include those in Yuan et al. (Am J Physiol Renal Physiol 295: F605-F617, 2008). The method of Yuang et al. may be applied to the composition of the present invention contemplating a 1-2 g subcutaneous injection of IscB polypeptide nuclease conjugated with cholesterol to a human for delivery to the kidneys. In one embodiment, the method of Molitoris et al. (J Am Soc Nephrol 20:1754-1764, 2009) can be adapted to the composition and a cumulative dose of 12-20 mg/kg to a human can be used for delivery to the proximal tubule cells of the kidneys. In one embodiment, the methods of Thompson et al. (Nucleic Acid Therapeutics, Volume 22, Number 4, 2012) can be adapted to the compositions and a dose of up to 25 mg/kg can be delivered via i.v. administration. In one embodiment, the method of Shimizu et al. (J Am Soc Nephrol 21:622-633, 2010) can be adapted to the compositions and a dose of about of 10-20 μmol compositions complexed with nanocarriers in about 1-2 liters of a physiologic fluid for i.p. administration can be used.

[0730] Other various delivery vehicles can be used to deliver the composition, system to the kidney such as viral, hydrodynamic, lipid, polymer nanoparticles, aptamers and various combinations thereof (see e.g. Larson et al., Surgery, (August 2007), Vol. 142, No. 2, pp. (262-269); Hamar et al., Proc Natl Acad Sci, (October 2004), Vol. 101, No. 41, pp. (14883-14888); Zheng et al., Am J Pathol, (October 2008), Vol. 173, No. 4, pp. (973-980); Feng et al., Transplantation, (May 2009), Vol. 87, No. 9, pp. (1283-1289); Q. Zhang et al., PloS ONE, (July 2010), Vol. 5, No. 7, e11709, pp. (1-13); Kushibikia et al., J Controlled Release, (July 2005), Vol. 105, No. 3, pp. (318-331); Wang et al., Gene Therapy, (July 2006), Vol. 13, No. 14, pp. (1097-1103); Kobayashi et al., Journal of Pharmacology and Experimental Therapeutics, (February 2004), Vol. 308, No. 2, pp. (688-693); Wolfrum et al., Nature Biotechnology, (September 2007), Vol. 25, No. 10, pp. (1149-1157); Molitoris et al., J Am Soc Nephrol, (August 2009), Vol. 20, No. 8 pp. (1754-1764); Mikhaylova et al., Cancer Gene Therapy, (March 2011), Vol. 16, No. 3, pp. (217-226); Y. Zhang et al., J Am Soc Nephrol, (April 2006), Vol. 17, No. 4, pp. (1090-1101); Singhal et al., Cancer Res, (May 2009), Vol. 69, No. 10, pp. (4244-4251); Malek et al., Toxicology and Applied Pharmacology, (April 2009), Vol. 236, No. 1, pp. (97-108); Shimizu et al., J Am Soc Nephrology, (April 2010), Vol. 21, No. 4, pp. (622-633); Jiang et al., Molecular Pharmaceutics, (May-June 2009), Vol. 6, No. 3, pp. (727-737); Cao et al, J Controlled Release, (June 2010), Vol. 144, No. 2, pp. (203-212); Ninichuk et al., Am J Pathol, (March 2008), Vol. 172, No. 3, pp. (628-637); Purschke et al., Proc Natl Acad Sci, (March 2006), Vol. 103, No. 13, pp. (5173-5178).

[0731] In one embodiment, delivery is to liver cells. In one embodiment, the liver cell is a hepatocyte. Delivery of the composition and system herein may be via viral vectors, especially AAV (and in particular AAV2/6) vectors. These can be administered by intravenous injection. A preferred target for the liver, whether in vitro or in vivo, is the albumin gene. This is a so-called ‘safe harbor” as albumin is expressed at very high levels and so some reduction in the production of albumin following successful gene editing is tolerated. It is also preferred as the high levels of expression seen from the albumin promoter/enhancer allows for useful levels of correct or transgene production (from the inserted recombination template) to be achieved even if only a small fraction of hepatocytes is edited. See sites identified by Wechsler et al. (reported at the 57th Annual Meeting and Exposition of the American Society of Hematology—abstract available online at ash.confex.com/ash/2015/webprogram/Paper86495.html and presented on 6th December 2015) which can be adapted for use with the compositions, systems, herein.

[0732] Exemplary liver and kidney diseases that can be treated and/or prevented are described elsewhere herein.

### Treating Epithelial and Lung Diseases

[0733] In one embodiment, the disease treated or prevented by the composition and system described herein can be a lung or epithelial disease. The compositions and systems described herein can be used for treating epithelial and/or lung diseases. The present invention also contemplates delivering the composition, system, described herein, to one or both lungs.

[0734] In one embodiment, as viral vector can be used to deliver the composition, system, or component thereof to the lungs. In one embodiment, the AAV is an AAV-1, AAV-2, AAV-5, AAV-6, and/or AAV-9 for delivery to the lungs. (see, e.g., Li et al., Molecular Therapy, vol. 17 no. 12, 2067-277 December 2009). In one embodiment, the MOI can vary from 1×10³ to 4×10⁵ vector genomes/cell. In one embodiment, the delivery vector can be an RSV vector as in Zamora et al. (Am J Respir Crit Care Med Vol 183. pp 531-538, 2011. The method of Zamora et al. may be applied to the nucleic acid-targeting system of the present invention and an aerosolized composition, for example with a dosage of 0.6 mg/kg, may be contemplated for the present invention.

[0735] Subjects treated for a lung disease may for example receive pharmaceutically effective amount of aerosolized AAV vector system per lung endobronchially delivered while spontaneously breathing. As such, aerosolized delivery is preferred for AAV delivery in general. An adenovirus or an AAV particle may be used for delivery. Suitable gene constructs, each operably linked to one or more regulatory sequences, may be cloned into the delivery vector. In this instance, the following constructs are provided as examples: Cbh or EF1a promoter for Cas, U6 or H1 promoter for guide RNA. A preferred arrangement is to use a CFTRdelta508 targeting guide, a repair template for deltaF508 mutation and a codon optimized composition, with optionally one or more nuclear localization signal or sequence(s) (NLS(s)), e.g., two (2) NLSs.

### Treating Diseases of the Skin

[0736] The compositions and systems described herein can be used for the treatment of skin diseases. The present invention also contemplates delivering the composition and system, described herein, to the skin.

[0737] In one embodiment, delivery to the skin (intradermal delivery) of the composition, system, or component thereof can be via one or more microneedles or microneedle containing device. For example, the device and methods of Hickerson et al. (Molecular Therapy-Nucleic Acids (2013)2, e129) can be used and/or adapted to deliver the composition, system, described herein, for example, at a dosage of up to 300 μl of 0.1 mg/ml compositions to the skin.

[0738] In one embodiment, the methods and techniques of Leachman et al. (Molecular Therapy, vol. 18 no. 2, 442-446 February 2010) can be used and/or adapted for delivery of a compositions described herein to the skin.

[0739] In one embodiment, the methods and techniques of Zheng et al. (PNAS, Jul. 24, 2012, vol. 109, no. 30, 11975-11980) can be used and/or adapted for nanoparticle delivery of a compositions described herein to the skin. In one embodiment, a dosage of about 25 nM applied in a single application can achieve gene knockdown in the skin.

### Treating Cancer

[0740] The compositions, systems, described herein can be used for the treatment of cancer. The present invention also contemplates delivering the composition, system, described herein, to a cancer cell. Also, as is described elsewhere herein, the compositions and systems can be used to modify an immune cell, such as a CAR or CAR T cell, which can then in turn be used to treat and/or prevent cancer. This is also described in International Patent Publication No. WO 2015/161276, the disclosure of which is hereby incorporated by reference and described herein below.

[0741] Target genes suitable for the treatment or prophylaxis of cancer can include those set forth in Tables 7 and 8. In one embodiment, target genes for cancer treatment and prevention can also include those described in International Patent Publication No. WO 2015/048577 the disclosure of which is hereby incorporated by reference and can be adapted for and/or applied to the composition, system, described herein.

### Adoptive Cell Therapy

[0742] The compositions, systems, and components thereof described herein can be used to modify cells for an adoptive cell therapy. In an aspect of the invention, methods and compositions which involve editing a target nucleic acid sequence, or modulating expression of a target nucleic acid sequence, and applications thereof in connection with cancer immunotherapy are comprehended by adapting the composition, system, of the present invention. In some examples, the compositions, systems, and methods may be used to modify a stem cell (e.g., induced pluripotent cell) to derive modified natural killer cells, gamma delta T cells, and alpha beta T cells, which can be used for the adoptive cell therapy. In certain examples, the compositions, systems, and methods may be used to modify modified natural killer cells, gamma delta T cells, and alpha beta T cells.

[0743] As used herein, “ACT”, “adoptive cell therapy” and “adoptive cell transfer” may be used interchangeably. In an embodiment, Adoptive cell therapy (ACT) can refer to the transfer of cells to a patient with the goal of transferring the functionality and characteristics into the new host by engraftment of the cells (see, e.g., Mettananda et al., Editing an α-globin enhancer in primary human hematopoietic stem cells as a treatment for β-thalassemia, Nat Commun. 2017 Sep. 4; 8(1): 424). As used herein, the term “engraft” or “engraftment” refers to the process of cell incorporation into a tissue of interest in vivo through contact with existing cells of the tissue. Adoptive cell therapy (ACT) can refer to the transfer of cells, most commonly immune-derived cells, back into the same patient or into a new recipient host with the goal of transferring the immunologic functionality and characteristics into the new host. If possible, use of autologous cells helps the recipient by minimizing GVHD issues. The adoptive transfer of autologous tumor infiltrating lymphocytes (TIL) (Zacharakis et al., (2018) Nat Med. 2018 June; 24(6): 724-730; Besser et al., (2010) Clin. Cancer Res 16(9) 2646-55; Dudley et al., (2002) Science 298(5594): 850-4; and Dudley et al., (2005) Journal of Clinical Oncology 23 (10): 2346-57.) or genetically re-directed peripheral blood mononuclear cells (Johnson et al., (2009) Blood 114(3): 535-46; and Morgan et al., (2006) Science 314(5796) 126-9) has been used to successfully treat patients with advanced solid tumors, including melanoma, metastatic breast cancer and colorectal carcinoma, as well as patients with CD19-expressing hematologic malignancies (Kalos et al., (2011) Science Translational Medicine 3(95): 95ra73). In an embodiment, allogenic cells immune cells are transferred (see, e.g., Ren et al., (2017) Clin Cancer Res 23(9) 2255-2266). As described further herein, allogenic cells can be edited to reduce alloreactivity and prevent graft-versus-host disease. Thus, use of allogenic cells allows for cells to be obtained from healthy donors and prepared for use in patients as opposed to preparing autologous cells from a patient after diagnosis.

[0744] Aspects of the invention involve the adoptive transfer of immune system cells, such as T cells, specific for selected antigens, such as tumor associated antigens or tumor specific neoantigens (see, e.g., Maus et al., 2014, Adoptive Immunotherapy for Cancer or Viruses, Annual Review of Immunology, Vol. 32:189-225; Rosenberg and Restifo, 2015, Adoptive cell transfer as personalized immunotherapy for human cancer, Science Vol. 348 no. 6230 pp. 62-68; Restifo et al., 2015, Adoptive immunotherapy for cancer: harnessing the T cell response. Nat. Rev. Immunol. 12(4): 269-281; and Jenson and Riddell, 2014, Design and implementation of adoptive therapy with chimeric antigen receptor-modified T cells. Immunol Rev. 257(1): 127-144; and Rajasagi et al., 2014, Systematic identification of personal tumor-specific neoantigens in chronic lymphocytic leukemia. Blood. 2014 Jul. 17; 124(3): 453-62).

[0745] In an embodiment, an antigen (such as a tumor antigen) to be targeted in adoptive cell therapy (such as particularly CAR or TCR T-cell therapy) of a disease (such as particularly of tumor or cancer) may be selected from a group consisting of: MRI (see, e.g., Crowther, et al., 2020, Genome-wide CRISPR-Cas9 screening reveals ubiquitous T cell cancer targeting via the monomorphic MHC class I-related protein MR1, Nature Immunology vol. 21, pages 178-185), B cell maturation antigen (BCMA) (see, e.g., Friedman et al., Effective Targeting of Multiple BCMA-Expressing Hematological Malignancies by Anti-BCMA CAR T Cells, Hum Gene Ther. 2018 Mar. 8; Berdeja J G, et al. Durable clinical responses in heavily pretreated patients with relapsed/refractory multiple myeloma: updated results from a multicenter study of bb2121 anti-Bcma CAR T cell therapy. Blood. 2017; 130:740; and Mouhieddine and Ghobrial, Immunotherapy in Multiple Myeloma: The Era of CAR T Cell Therapy, Hematologist, May-June 2018, Volume 15, issue 3); PSA (prostate-specific antigen); prostate-specific membrane antigen (PSMA); PSCA (Prostate stem cell antigen); Tyrosine-protein kinase transmembrane receptor ROR1; fibroblast activation protein (FAP); Tumor-associated glycoprotein 72 (TAG72); Carcinoembryonic antigen (CEA); Epithelial cell adhesion molecule (EPCAM); Mesothelin; Human Epidermal growth factor Receptor 2 (ERBB2 (Her2/neu)); Prostase; Prostatic acid phosphatase (PAP); elongation factor 2 mutant (ELF2M); Insulin-like growth factor 1 receptor (IGF-1R); gplOO; BCR-ABL (breakpoint cluster region-Abelson); tyrosinase; New York esophageal squamous cell carcinoma 1 (NY-ESO-1); K-light chain, LAGE (L antigen); MAGE (melanoma antigen); Melanoma-associated antigen 1 (MAGE-A1); MAGE A3; MAGE A6; legumain; Human papillomavirus (HPV) E6; HPV E7; prostein; survivin; PCTA1 (Galectin 8); Melan-A/MART-1; Ras mutant; TRP-1 (tyrosinase related protein 1, or gp75); Tyrosinase-related Protein 2 (TRP2); TRP-2/INT2 (TRP-2/intron 2); RAGE (renal antigen); receptor for advanced glycation end products 1 (RAGE1); Renal ubiquitous 1, 2 (RU1, RU2); intestinal carboxyl esterase (ICE); Heat shock protein 70-2 (HSP70-2) mutant; thyroid stimulating hormone receptor (TSHR); CD123; CD171; CD19; CD20; CD22; CD26; CD30; CD33; CD44v7/8 (cluster of differentiation 44, exons 7/8); CD53; CD92; CD100; CD148; CD150; CD200; CD261; CD262; CD362; CS-1 (CD2 subset 1, CRACC, SLAMF7, CD319, and 19A24); C-type lectin-like molecule-1 (CLL-1); ganglioside GD3 (aNeu5Ac(2-8)aNeu5Ac(2-3)bDGalp(1-4)bDGlcp(1-1)Cer); Tn antigen (Tn Ag); Fms-Like Tyrosine Kinase 3 (FLT3); CD38; CD138; CD44v6; B7H3 (CD276); KIT (CD117); Interleukin-13 receptor subunit alpha-2 (IL-13Ra2); Interleukin 11 receptor alpha (IL-11Ra); prostate stem cell antigen (PSCA); Protease Serine 21 (PRSS21); vascular endothelial growth factor receptor 2 (VEGFR2); Lewis(Y) antigen; CD24; Platelet-derived growth factor receptor beta (PDGFR-beta); stage-specific embryonic antigen-4 (SSEA-4); Mucin 1, cell surface associated (MUC1); mucin 16 (MUC16); epidermal growth factor receptor (EGFR); epidermal growth factor receptor variant III (EGFRvIII); neural cell adhesion molecule (NCAM); carbonic anhydrase IX (CAIX); Proteasome (Prosome, Macropain) Subunit, Beta Type, 9 (LMP2); ephrin type-A receptor 2 (EphA2); Ephrin B2; Fucosyl GM1; sialyl Lewis adhesion molecule (sLe); ganglioside GM3 (aNeu5Ac(2-3)bDGalp(1-4)bDGlcp(1-1)Cer); TGS5; high molecular weight-melanoma-associated antigen (HMWMAA); o-acetyl-GD2 ganglioside (OAcGD2); Folate receptor alpha; Folate receptor beta; tumor endothelial marker 1 (TEM1/CD248); tumor endothelial marker 7-related (TEM7R); claudin 6 (CLDN6); G protein-coupled receptor class C group 5, member D (GPRC5D); chromosome X open reading frame 61 (CXORF61); CD97; CD179a; anaplastic lymphoma kinase (ALK); Polysialic acid; placenta-specific 1 (PLAC1); hexasaccharide portion of globoH glycoceramide (GloboH); mammary gland differentiation antigen (NY-BR-1); uroplakin 2 (UPK2); Hepatitis A virus cellular receptor 1 (HAVCR1); adrenoceptor beta 3 (ADRB3); pannexin 3 (PANX3); G protein-coupled receptor 20 (GPR20); lymphocyte antigen 6 complex, locus K 9 (LY6K); Olfactory receptor 51E2 (OR51E2); TCR Gamma Alternate Reading Frame Protein (TARP); Wilms tumor protein (WT1); ETS translocation-variant gene 6, located on chromosome 12p (ETV6-AML); sperm protein 17 (SPA17); X Antigen Family, Member 1A (XAGE1); angiopoietin-binding cell surface receptor 2 (Tie 2); CT (cancer/testis (antigen)); melanoma cancer testis antigen-1 (MAD-CT-1); melanoma cancer testis antigen-2 (MAD-CT-2); Fos-related antigen 1; p53; p53 mutant; human Telomerase reverse transcriptase (hTERT); sarcoma translocation breakpoints; melanoma inhibitor of apoptosis (ML-IAP); ERG (transmembrane protease, serine 2 (TMPRSS2) ETS fusion gene); N-Acetyl glucosaminyl-transferase V (NA17); paired box protein Pax-3 (PAX3); Androgen receptor; Cyclin B1; Cyclin D1; v-myc avian myelocytomatosis viral oncogene neuroblastoma derived homolog (MYCN); Ras Homolog Family Member C (RhoC); Cytochrome P450 1B1 (CYP1B1); CCCTC-Binding Factor (Zinc Finger Protein)-Like (BORIS); Squamous Cell Carcinoma Antigen Recognized By T Cells-1 or 3 (SART1, SART3); Paired box protein Pax-5 (PAX5); proacrosin binding protein sp32 (OY-TES1); lymphocyte-specific protein tyrosine kinase (LCK); A kinase anchor protein 4 (AKAP-4); synovial sarcoma, X breakpoint-1, -2, -3 or -4 (SSX1, SSX2, SSX3, SSX4); CD79a; CD79b; CD72; Leukocyte-associated immunoglobulin-like receptor 1 (LAIR1); Fc fragment of IgA receptor (FCAR); Leukocyte immunoglobulin-like receptor subfamily A member 2 (LILRA2); CD300 molecule-like family member f (CD300LF); C-type lectin domain family 12 member A (CLEC12A); bone marrow stromal cell antigen 2 (BST2); EGF-like module-containing mucin-like hormone receptor-like 2 (EMR2); lymphocyte antigen 75 (LY75); Glypican-3 (GPC3); Fc receptor-like 5 (FCRL5); mouse double minute 2 homolog (MDM2); livin; alphafetoprotein (AFP); transmembrane activator and CAML Interactor (TACI); B-cell activating factor receptor (BAFF-R); V-Ki-ras2 Kirsten rat sarcoma viral oncogene homolog (KRAS); immunoglobulin lambda-like polypeptide 1 (IGLL1); 707-AP (707 alanine proline); ART-4 (adenocarcinoma antigen recognized by T4 cells); BAGE (B antigen; b-catenin/m, b-catenin/mutated); CAMEL (CTL-recognized antigen on melanoma); CAP1 (carcinoembryonic antigen peptide 1); CASP-8 (caspase-8); CDC27m (cell-division cycle 27 mutated); CDK4/m (cycline-dependent kinase 4 mutated); Cyp-B (cyclophilin B); DAM (differentiation antigen melanoma); EGP-2 (epithelial glycoprotein 2); EGP-40 (epithelial glycoprotein 40); Erbb2, 3, 4 (erythroblastic leukemia viral oncogene homolog-2, -3, 4); FBP (folate binding protein); fAchR (Fetal acetylcholine receptor); G250 (glycoprotein 250); GAGE (G antigen); GnT-V (N-acetylglucosaminyltransferase V); HAGE (helicose antigen); ULA-A (human leukocyte antigen-A); HST2 (human signet ring tumor 2); KIAA0205; KDR (kinase insert domain receptor); LDLR/FUT (low density lipid receptor/GDP L-fucose: b-D-galactosidase 2-a-L fucosyltransferase); L1CAM (L1 cell adhesion molecule); MC1R (melanocortin 1 receptor); Myosin/m (myosin mutated); MUM-1, -2, -3 (melanoma ubiquitous mutated 1, 2, 3); NA88-A (NA cDNA clone of patient M88); KG2D (Natural killer group 2, member D) ligands; oncofetal antigen (h5T4); p190 minor bcr-abl (protein of 190KD bcr-abl); Pml/RARa (promyelocytic leukemia/retinoic acid receptor a); PRAME (preferentially expressed antigen of melanoma); SAGE (sarcoma antigen); TEL/AML 1 (translocation Ets-family leukemia/acute myeloid leukemia 1); TPI/m (triosephosphate isomerase mutated); CD70; and any combination thereof.

[0746] In an embodiment, an antigen to be targeted in adoptive cell therapy (such as particularly CAR or TCR T-cell therapy) of a disease (such as particularly of tumor or cancer) is a tumor-specific antigen (TSA).

[0747] In an embodiment, an antigen to be targeted in adoptive cell therapy (such as particularly CAR or TCR T-cell therapy) of a disease (such as particularly of tumor or cancer) is a neoantigen.

[0748] In an embodiment, an antigen to be targeted in adoptive cell therapy (such as particularly CAR or TCR T-cell therapy) of a disease (such as particularly of tumor or cancer) is a tumor-associated antigen (TAA).

[0749] In an embodiment, an antigen to be targeted in adoptive cell therapy (such as particularly CAR or TCR T-cell therapy) of a disease (such as particularly of tumor or cancer) is a universal tumor antigen. In certain preferred embodiments, the universal tumor antigen is selected from the group consisting of: a human telomerase reverse transcriptase (hTERT), survivin, mouse double minute 2 homolog (MDM2), cytochrome P450 1B 1 (CYP1B), HER2/neu, Wilms' tumor gene 1 (WT1), livin, alphafetoprotein (AFP), carcinoembryonic antigen (CEA), mucin 16 (MUC16), MUC1, prostate-specific membrane antigen (PSMA), p53, cyclin (Dl), and any combinations thereof.

[0750] In an embodiment, an antigen (such as a tumor antigen) to be targeted in adoptive cell therapy (such as particularly CAR or TCR T-cell therapy) of a disease (such as particularly of tumor or cancer) may be selected from a group consisting of: CD19, BCMA, CD70, CLL-1, MAGE A3, MAGE A6, HPV E6, HPV E7, WT1, CD22, CD171, ROR1, MUC16, and SSX2.

[0751] In certain preferred embodiments, the antigen may be CD19. For example, CD19 may be targeted in hematologic malignancies, such as in lymphomas, more particularly in B-cell lymphomas, such as without limitation in diffuse large B-cell lymphoma, primary mediastinal b-cell lymphoma, transformed follicular lymphoma, marginal zone lymphoma, mantle cell lymphoma, acute lymphoblastic leukemia including adult and pediatric ALL, non-Hodgkin lymphoma, indolent non-Hodgkin lymphoma, or chronic lymphocytic leukemia. For example, BCMA may be targeted in multiple myeloma or plasma cell leukemia (see, e.g., 2018 American Association for Cancer Research (AACR) Annual meeting Poster: Allogeneic Chimeric Antigen Receptor T Cells Targeting B Cell Maturation Antigen). For example, CLL1 may be targeted in acute myeloid leukemia. For example, MAGE A3, MAGE A6, SSX2, and/or KRAS may be targeted in solid tumors. For example, HPV E6 and/or HPV E7 may be targeted in cervical cancer or head and neck cancer. For example, WT1 may be targeted in acute myeloid leukemia (AML), myelodysplastic syndromes (MDS), chronic myeloid leukemia (CML), non-small cell lung cancer, breast, pancreatic, ovarian or colorectal cancers, or mesothelioma. For example, CD22 may be targeted in B cell malignancies, including non-Hodgkin lymphoma, diffuse large B-cell lymphoma, or acute lymphoblastic leukemia. For example, CD171 may be targeted in neuroblastoma, glioblastoma, or lung, pancreatic, or ovarian cancers. For example, ROR1 may be targeted in ROR1+ malignancies, including non-small cell lung cancer, triple negative breast cancer, pancreatic cancer, prostate cancer, ALL, chronic lymphocytic leukemia, or mantle cell lymphoma. For example, MUC16 may be targeted in MUC16ecto+epithelial ovarian, fallopian tube or primary peritoneal cancer. For example, CD70 may be targeted in both hematologic malignancies as well as in solid cancers such as renal cell carcinoma (RCC), gliomas (e.g., GBM), and head and neck cancers (HNSCC). CD70 is expressed in both hematologic malignancies as well as in solid cancers, while its expression in normal tissues is restricted to a subset of lymphoid cell types (see, e.g., 2018 American Association for Cancer Research (AACR) Annual meeting Poster: Allogeneic CRISPR Engineered Anti-CD70 CAR-T Cells Demonstrate Potent Preclinical Activity Against Both Solid and Hematological Cancer Cells).

[0752] Various strategies may for example be employed to genetically modify T cells by altering the specificity of the T cell receptor (TCR) for example by introducing new TCR α and β chains with selected peptide specificity (see U.S. Pat. No. 8,697,854; PCT Patent Publications: WO2003020763, WO2004033685, WO2004044004, WO2005114215, WO2006000830, WO2008038002, WO2008039818, WO2004074322, WO2005113595, WO2006125962, WO2013166321, WO2013039889, WO2014018863, WO2014083173; U.S. Pat. No. 8,088,379).

[0753] As an alternative to, or addition to, TCR modifications, chimeric antigen receptors (CARs) may be used in order to generate immunoresponsive cells, such as T cells, specific for selected targets, such as malignant cells, with a wide variety of receptor chimera constructs having been described (see U.S. Pat. Nos. 5,843,728; 5,851,828; 5,912,170; 6,004,811; 6,284,240; 6,392,013; 6,410,014; 6,753,162; 8,211,422; and, PCT Publication WO 9215322).

[0754] In general, CARs are comprised of an extracellular domain, a transmembrane domain, and an intracellular domain, wherein the extracellular domain comprises an antigen-binding domain that is specific for a predetermined target. While the antigen-binding domain of a CAR is often an antibody or antibody fragment (e.g., a single chain variable fragment, scFv), the binding domain is not particularly limited so long as it results in specific recognition of a target. For example, the antigen-binding domain may comprise a receptor, such that the CAR is capable of binding to the ligand of the receptor. Alternatively, the antigen-binding domain may comprise a ligand, such that the CAR is capable of binding the endogenous receptor of that ligand.

[0755] The antigen-binding domain of a CAR is generally separated from the transmembrane domain by a hinge or spacer. The spacer is also not particularly limited, and it is designed to provide the CAR with flexibility. For example, a spacer domain may comprise a portion of a human Fc domain, including a portion of the CH3 domain, or the hinge region of any immunoglobulin, such as IgA, IgD, IgE, IgG, or IgM, or variants thereof. Furthermore, the hinge region may be modified so as to prevent off-target binding by FcRs or other potential interfering objects. For example, the hinge may comprise an IgG4 Fc domain with or without a S228P, L235E, and/or N297Q mutation (according to Kabat numbering) in order to decrease binding to FcRs. Additional spacers/hinges include, but are not limited to, CD4, CD8, and CD28 hinge regions.

[0756] The transmembrane domain of a CAR may be derived either from a natural or from a synthetic source. Where the source is natural, the domain may be derived from any membrane bound or transmembrane protein. Transmembrane regions of particular use in this disclosure may be derived from CD8, CD28, CD3, CD45, CD4, CD5, CDS, CD9, CD 16, CD22, CD33, CD37, CD64, CD80, CD86, CD 134, CD137, CD 154, TCR. Alternatively, the transmembrane domain may be synthetic, in which case it will comprise predominantly hydrophobic residues such as leucine and valine. Preferably a triplet of phenylalanine, tryptophan and valine will be found at each end of a synthetic transmembrane domain. Optionally, a short oligo- or polypeptide linker, preferably between 2 and 10 amino acids in length may form the linkage between the transmembrane domain and the cytoplasmic signaling domain of the CAR. A glycine-serine doublet provides a particularly suitable linker.

[0757] Alternative CAR constructs may be characterized as belonging to successive generations. First-generation CARs typically consist of a single-chain variable fragment of an antibody specific for an antigen, for example comprising a VL linked to a VH of a specific antibody, linked by a flexible linker, for example by a CD8a hinge domain and a CD8a transmembrane domain, to the transmembrane and intracellular signaling domains of either CD3 or FcRγ (scFv-CD35 or scFv-FcRγ; see U.S. Pat. Nos. 7,741,465; 5,912,172; 5,906,936). Second-generation CARs incorporate the intracellular domains of one or more costimulatory molecules, such as CD28, OX40 (CD134), or 4-1BB (CD137) within the endodomain (for example scFv-CD28/OX40/4-1BB-CD3ζ; see U.S. Pat. Nos. 8,911,993; 8,916,381; 8,975,071; 9,101,584; 9,102,760; 9,102,761). Third-generation CARs include a combination of costimulatory endodomains, such a CD33-chain, CD97, GDI 1a-CD18, CD2, ICOS, CD27, CD154, CDS, OX40, 4-1BB, CD2, CD7, LIGHT, LFA-1, NKG2C, B7-H3, CD30, CD40, PD-1, or CD28 signaling domains (for example scFv-CD28-4-1BB-CD3ζ or scFv-CD28-OX40-CD3ζ; see U.S. Pat. Nos. 8,906,682; 8,399,645; 5,686,281; PCT Publication No. WO 2014/134165; PCT Publication No. WO 2012/079000). In an embodiment, the primary signaling domain comprises a functional signaling domain of a protein selected from the group consisting of CD3 zeta, CD3 gamma, CD3 delta, CD3 epsilon, common FcR gamma (FCERIG), FcR beta (Fc Epsilon R1b), CD79a, CD79b, Fc gamma RIIa, DAP10, and DAP12. In certain preferred embodiments, the primary signaling domain comprises a functional signaling domain of CD3ζ or FcRγ. In an embodiment, the one or more costimulatory signaling domains comprise a functional signaling domain of a protein selected, each independently, from the group consisting of: CD27, CD28, 4-1BB (CD137), OX40, CD30, CD40, PD-1, ICOS, lymphocyte function-associated antigen-1 (LFA-1), CD2, CD7, LIGHT, NKG2C, B7-H3, a ligand that specifically binds with CD83, CDS, ICAM-1, GITR, BAFFR, HVEM (LIGHTR), SLAMF7, NKp80 (KLRF1), CD160, CD19, CD4, CD8 alpha, CD8 beta, IL2R beta, IL2R gamma, IL 7R alpha, ITGA4, VLA1, CD49a, ITGA4, IA4, CD49D, ITGA6, VLA-6, CD49f, ITGAD, CD11d, ITGAE, CD103, ITGAL, CD11a, LFA-1, ITGAM, CD11b, ITGAX, CD11c, ITGB1, CD29, ITGB2, CD18, ITGB7, TNFR2, TRANCE/RANKL, DNAM1 (CD226), SLAMF4 (CD244, 2β4), CD84, CD96 (Tactile), CEACAM1, CRTAM, Ly9 (CD229), CD160 (BY55), PSGL1, CD100 (SEMA4D), CD69, SLAMF6 (NTB-A, Lyl08), SLAM (SLAMF1, CD150, IPO-3), BLAME (SLAMF8), SELPLG (CD162), LTBR, LAT, GADS, SLP-76, PAG/Cbp, NKp44, NKp30, NKp46, and NKG2D. In an embodiment, the one or more costimulatory signaling domains comprise a functional signaling domain of a protein selected, each independently, from the group consisting of: 4-1BB, CD27, and CD28. In an embodiment, a chimeric antigen receptor may have the design as described in U.S. Pat. No. 7,446,190, comprising an intracellular domain of CD33 chain (such as amino acid residues 52-163 of the human CD3 zeta chain, as shown in SEQ ID NO: 14 of U.S. Pat. No. 7,446,190), a signaling region from CD28 and an antigen-binding element (or portion or domain; such as scFv). The CD28 portion, when between the zeta chain portion and the antigen-binding element, may suitably include the transmembrane and signaling domains of CD28 (such as amino acid residues 114-220 of SEQ ID NO: 10, full sequence shown in SEQ ID NO: 6 of U.S. Pat. No. 7,446,190; these can include the following portion of CD28 as set forth in Genbank identifier NM_006139. Alternatively, when the zeta sequence lies between the CD28 sequence and the antigen-binding element, intracellular domain of CD28 can be used alone (such as amino sequence set forth in SEQ ID NO: 9 of U.S. Pat. No. 7,446,190). Hence, an embodiment employs a CAR comprising (a) a zeta chain portion comprising the intracellular domain of human CD3ζ chain, (b) a costimulatory signaling region, and (c) an antigen-binding element (or portion or domain), wherein the costimulatory signaling region comprises the amino acid sequence encoded by SEQ ID NO: 6 of U.S. Pat. No. 7,446,190.

[0758] Alternatively, co-stimulation may be orchestrated by expressing CARs in antigen-specific T cells, chosen so as to be activated and expanded following engagement of their native αβTCR, for example by antigen on professional antigen-presenting cells, with attendant co-stimulation. In addition, additional engineered receptors may be provided on the immune-responsive cells, for example to improve targeting of a T-cell attack and/or minimize side effects.

[0759] By means of an example and without limitation, Kochenderfer et al., (2009) J Immunother. 32 (7): 689-702 described anti-CD19 chimeric antigen receptors (CAR). FMC63-28Z CAR contained a single chain variable region moiety (scFv) recognizing CD19 derived from the FMC63 mouse hybridoma (described in Nicholson et al., (1997) Molecular Immunology 34:1157-1165), a portion of the human CD28 molecule, and the intracellular component of the human TCR-molecule. FMC63-CD828BBZ CAR contained the FMC63 scFv, the hinge and transmembrane regions of the CD8 molecule, the cytoplasmic portions of CD28 and 4-1BB, and the cytoplasmic component of the TCR-ζ molecule. The exact sequence of the CD28 molecule included in the FMC63-28Z CAR corresponded to Genbank identifier NM_006139; the sequence included all amino acids starting with the amino acid sequence IEVMYPPPY (SEQ ID NO: 2058) and continuing all the way to the carboxy-terminus of the protein. To encode the anti-CD19 scFv component of the vector, the authors designed a DNA sequence which was based on a portion of a previously published CAR (Cooper et al., (2003) Blood 101:1637-1644). This sequence encoded the following components in frame from the 5′ end to the 3′ end: an XhoI site, the human granulocyte-macrophage colony-stimulating factor (GM-CSF) receptor α-chain signal sequence, the FMC63 light chain variable region (as in Nicholson et al., supra), a linker peptide (as in Cooper et al., supra), the FMC63 heavy chain variable region (as in Nicholson et al., supra), and a NotI site. A plasmid encoding this sequence was digested with XhoI and NotI. To form the MSGV-FMC63-28Z retroviral vector, the XhoI and NotI-digested fragment encoding the FMC63 scFv was ligated into a second XhoI and NotI-digested fragment that encoded the MSGV retroviral backbone (as in Hughes et al., (2005) Human Gene Therapy 16:457-472) as well as part of the extracellular portion of human CD28, the entire transmembrane and cytoplasmic portion of human CD28, and the cytoplasmic portion of the human TCR-(molecule (as in Maher et al., 2002) Nature Biotechnology 20: 70-75). The FMC63-28Z CAR is included in the KTE-C19 (axicabtagene ciloleucel) anti-CD19 CAR-T therapy product in development by Kite Pharma, Inc. for the treatment of inter alia patients with relapsed/refractory aggressive B-cell non-Hodgkin lymphoma (NHL). Accordingly, in an embodiment, cells intended for adoptive cell therapies, more particularly immune-responsive cells such as T cells, may express the FMC63-28Z CAR as described by Kochenderfer et al. (supra). Hence, in an embodiment, cells intended for adoptive cell therapies, more particularly immune-responsive cells such as T cells, may comprise a CAR comprising an extracellular antigen-binding element (or portion or domain; such as scFv) that specifically binds to an antigen, an intracellular signaling domain comprising an intracellular domain of a CD35 chain, and a costimulatory signaling region comprising a signaling domain of CD28. Preferably, the CD28 amino acid sequence is as set forth in Genbank identifier NM_006139 (sequence version 1, 2 or 3) starting with the amino acid sequence IEVMYPPPY (SEQ ID NO: 2058) and continuing all the way to the carboxy-terminus of the protein. Preferably, the antigen is CD19, more preferably the antigen-binding element is an anti-CD19 scFv, even more preferably the anti-CD19 scFv as described by Kochenderfer et al. (supra).

[0760] Additional anti-CD19 CARs are further described in International Patent Publication No. WO 2015/187528. More particularly Example 1 and Table 1 of WO2015187528, incorporated by reference herein, demonstrate the generation of anti-CD19 CARs based on a fully human anti-CD19 monoclonal antibody (47G4, as described in US20100104509) and murine anti-CD19 monoclonal antibody (as described in Nicholson et al. and explained above). Various combinations of a signal sequence (human CD8-alpha or GM-CSF receptor), extracellular and transmembrane regions (human CD8-alpha) and intracellular T-cell signaling domains (CD28-CD3ζ; 4-1BB-CD3ζ; CD27-CD3ζ; CD28-CD27-CD3ζ, 4-1BB-CD27-CD3ζ; CD27-4-1BB-CD3; CD28-CD27-FcεRI gamma chain; or CD28-FcεRI gamma chain) were disclosed. Hence, in an embodiment, cells intended for adoptive cell therapies, more particularly immune-responsive cells such as T cells, may comprise a CAR comprising an extracellular antigen-binding element that specifically binds to an antigen, an extracellular and transmembrane region as set forth in Table 1 of WO2015187528 and an intracellular T-cell signaling domain as set forth in Table 1 of No. WO 2015/187528. Preferably, the antigen is CD19, more preferably the antigen-binding element is an anti-CD19 scFv, even more preferably the mouse or human anti-CD19 scFv as described in Example 1 of. WO 2015/187528. In an embodiment, the CAR comprises, consists essentially of or consists of an amino acid sequence of SEQ ID NO: 1, SEQ ID NO: 2, SEQ ID NO: 3, SEQ ID NO: 4, SEQ ID NO: 5, SEQ ID NO: 6, SEQ ID NO: 7, SEQ ID NO: 8, SEQ ID NO: 9, SEQ ID NO: 10, SEQ ID NO: 11, SEQ ID NO: 12, or SEQ ID NO: 13 as set forth in Table 1 of WO2015187528.

[0761] By means of an example and without limitation, chimeric antigen receptor that recognizes the CD70 antigen is described in WO2012058460A2 (see also, Park et al., CD70 as a target for chimeric antigen receptor T cells in head and neck squamous cell carcinoma, Oral Oncol. 2018 March; 78:145-150; and Jin et al., CD70, a novel target of CAR T-cell therapy for gliomas, Neuro Oncol. 2018 Jan. 10; 20(1): 55-65). CD70 is expressed by diffuse large B-cell and follicular lymphoma and also by the malignant cells of Hodgkins lymphoma, Waldenstrom's macroglobulinemia and multiple myeloma, and by HTLV-1- and EBV-associated malignancies. (Agathanggelou et al. Am.J.Pathol. 1995; 147:1152-1160; Hunter et al., Blood 2004; 104:4881. 26; Lens et al., J Immunol. 2005; 174:6212-6219; Baba et al., J Virol. 2008; 82:3843-3852.) In addition, CD70 is expressed by non-hematological malignancies such as renal cell carcinoma and glioblastoma. (Junker et al., J Urol. 2005; 173:2150-2153; Chahlavi et al., Cancer Res 2005; 65:5428-5438) Physiologically, CD70 expression is transient and restricted to a subset of highly activated T, B, and dendritic cells.

[0762] By means of an example and without limitation, chimeric antigen receptor that recognizes BCMA has been described (see, e.g., US20160046724A1; WO2016014789A2; WO2017211900A1; WO2015158671A1; US20180085444A1; WO2018028647A1; US20170283504A1; and WO2013154760A1).

[0763] In an embodiment, the immune cell may, in addition to a CAR or exogenous TCR as described herein, further comprise a chimeric inhibitory receptor (inhibitory CAR) that specifically binds to a second target antigen and is capable of inducing an inhibitory or immunosuppressive or repressive signal to the cell upon recognition of the second target antigen. In an embodiment, the chimeric inhibitory receptor comprises an extracellular antigen-binding element (or portion or domain) configured to specifically bind to a target antigen, a transmembrane domain, and an intracellular immunosuppressive or repressive signaling domain. In an embodiment, the second target antigen is an antigen that is not expressed on the surface of a cancer cell or infected cell or the expression of which is downregulated on a cancer cell or an infected cell. In an embodiment, the second target antigen is an MHC-class I molecule. In an embodiment, the intracellular signaling domain comprises a functional signaling portion of an immune checkpoint molecule, such as for example PD-1 or CTLA4. Advantageously, the inclusion of such inhibitory CAR reduces the chance of the engineered immune cells attacking non-target (e.g., non-cancer) tissues.

[0764] Alternatively, T-cells expressing CARs may be further modified to reduce or eliminate expression of endogenous TCRs in order to reduce off-target effects. Reduction or elimination of endogenous TCRs can reduce off-target effects and increase the effectiveness of the T cells (U.S. Pat. No. 9,181,527). T cells stably lacking expression of a functional TCR may be produced using a variety of approaches. T cells internalize, sort, and degrade the entire T cell receptor as a complex, with a half-life of about 10 hours in resting T cells and 3 hours in stimulated T cells (von Essen, M. et al. 2004. J. Immunol. 173:384-393). Proper functioning of the TCR complex requires the proper stoichiometric ratio of the proteins that compose the TCR complex. TCR function also requires two functioning TCR zeta proteins with ITAM motifs. The activation of the TCR upon engagement of its MHC-peptide ligand requires the engagement of several TCRs on the same T cell, which all must signal properly. Thus, if a TCR complex is destabilized with proteins that do not associate properly or cannot signal optimally, the T cell will not become activated sufficiently to begin a cellular response.

[0765] Accordingly, in one embodiment, TCR expression may eliminated using RNA interference (e.g., shRNA, siRNA, miRNA, etc.), IscB polypeptide or CRISPR-associated IscB polypeptide nuclease, or other methods that target the nucleic acids encoding specific TCRs (e.g., TCR-α and TCR-β) and/or CD3 chains in primary T cells. By blocking expression of one or more of these proteins, the T cell will no longer produce one or more of the key components of the TCR complex, thereby destabilizing the TCR complex and preventing cell surface expression of a functional TCR.

[0766] In some instances, CAR may also comprise a switch mechanism for controlling expression and/or activation of the CAR. For example, a CAR may comprise an extracellular, transmembrane, and intracellular domain, in which the extracellular domain comprises a target-specific binding element that comprises a label, binding domain, or tag that is specific for a molecule other than the target antigen that is expressed on or by a target cell. In such embodiments, the specificity of the CAR is provided by a second construct that comprises a target antigen binding domain (e.g., an scFv or a bispecific antibody that is specific for both the target antigen and the label or tag on the CAR) and a domain that is recognized by or binds to the label, binding domain, or tag on the CAR. See, e.g., WO 2013/044225, WO 2016/000304, WO 2015/057834, WO 2015/057852, WO 2016/070061, U.S. Pat. No. 9,233,125, US 2016/0129109. In this way, a T-cell that expresses the CAR can be administered to a subject, but the CAR cannot bind its target antigen until the second composition comprising an antigen-specific binding domain is administered.

[0767] Alternative switch mechanisms include CARs that require multimerization in order to activate their signaling function (see, e.g., US Patent Publication Nos. US 2015/0368342, US 2016/0175359, US 2015/0368360) and/or an exogenous signal, such as a small molecule drug (US 2016/0166613, Yung et al., Science, 2015), in order to elicit a T-cell response. Some CARs may also comprise a “suicide switch” to induce cell death of the CAR T-cells following treatment (Buddee et al., PLoS One, 2013) or to downregulate expression of the CAR following binding to the target antigen (International Patent Publication No. WO 2016/011210).

[0768] Alternative techniques may be used to transform target immunoresponsive cells, such as protoplast fusion, lipofection, transfection or electroporation. A wide variety of vectors may be used, such as retroviral vectors, lentiviral vectors, adenoviral vectors, adeno-associated viral vectors, plasmids or transposons, such as a Sleeping Beauty transposon (see U.S. Pat. Nos. 6,489,458; 7,148,203; 7,160,682; 7,985,739; 8,227,432), may be used to introduce CARs, for example using 2nd generation antigen-specific CARs signaling through CD3ζ and either CD28 or CD137. Viral vectors may for example include vectors based on HIV, SV40, EBV, HSV or BPV.

[0769] Cells that are targeted for transformation may for example include T cells, Natural Killer (NK) cells, cytotoxic T lymphocytes (CTL), regulatory T cells, human embryonic stem cells, tumor-infiltrating lymphocytes (TIL) or a pluripotent stem cell from which lymphoid cells may be differentiated. T cells expressing a desired CAR may for example be selected through co-culture with γ-irradiated activating and propagating cells (AaPC), which co-express the cancer antigen and co-stimulatory molecules. The engineered CAR T-cells may be expanded, for example by co-culture on AaPC in presence of soluble factors, such as IL-2 and IL-21. This expansion may for example be carried out so as to provide memory CAR+ T cells (which may for example be assayed by non-enzymatic digital array and/or multi-panel flow cytometry). In this way, CAR T cells may be provided that have specific cytotoxic activity against antigen-bearing tumors (optionally in conjunction with production of desired chemokines such as interferon-γ). CAR T cells of this kind may for example be used in animal models, for example to treat tumor xenografts.

[0770] In an embodiment, ACT includes co-transferring CD4+ Th1 cells and CD8+ CTLs to induce a synergistic antitumor response (see, e.g., Li et al., Adoptive cell therapy with CD4+ T helper 1 cells and CD8+ cytotoxic T cells enhances complete rejection of an established tumor, leading to generation of endogenous memory responses to non-targeted tumor epitopes. Clin Transl Immunology. 2017 October; 6(10): e160).

[0771] In an embodiment, Th17 cells are transferred to a subject in need thereof. Th17 cells have been reported to directly eradicate melanoma tumors in mice to a greater extent than Th1 cells (Muranski P, et al., Tumor-specific Th17-polarized cells eradicate large established melanoma. Blood. 2008 Jul. 15; 112(2): 362-73; and Martin-Orozco N, et al., T helper 17 cells promote cytotoxic T cell activation in tumor immunity. Immunity. 2009 Nov. 20; 31(5): 787-98). Those studies involved an adoptive T cell transfer (ACT) therapy approach, which takes advantage of CD4+ T cells that express a TCR recognizing tyrosinase tumor antigen. Exploitation of the TCR leads to rapid expansion of Th17 populations to large numbers ex vivo for reinfusion into the autologous tumor-bearing hosts.

[0772] In an embodiment, ACT may include autologous iPSC-based vaccines, such as irradiated iPSCs in autologous anti-tumor vaccines (see e.g., Kooreman, Nigel G. et al., Autologous iPSC-Based Vaccines Elicit Anti-tumor Responses In Vivo, Cell Stem Cell 22, 1-13, 2018, doi.org/10.1016/j.stem.2018.01.016).

[0773] Unlike T-cell receptors (TCRs) that are MHC restricted, CARs can potentially bind any cell surface-expressed antigen and can thus be more universally used to treat patients (see Irving et al., Engineering Chimeric Antigen Receptor T-Cells for Racing in Solid Tumors: Don't Forget the Fuel, Front. Immunol., 3 Apr. 2017, doi.org/10.3389/fimmu.2017.00267). In an embodiment, in the absence of endogenous T-cell infiltrate (e.g., due to aberrant antigen processing and presentation), which precludes the use of TIL therapy and immune checkpoint blockade, the transfer of CAR T-cells may be used to treat patients (see, e.g., Hinrichs C S, Rosenberg S A. Exploiting the curative potential of adoptive T-cell therapy for cancer. Immunol Rev (2014) 257(1): 56-71. doi: 10.1111/imr.12132).

[0774] Approaches such as the foregoing may be adapted to provide methods of treating and/or increasing survival of a subject having a disease, such as a neoplasia, for example by administering an effective amount of an immune-responsive cell comprising an antigen recognizing receptor that binds a selected antigen, wherein the binding activates the immune-responsive cell, thereby treating or preventing the disease (such as a neoplasia, a pathogen infection, an autoimmune disorder, or an allogeneic transplant reaction).

[0775] In an embodiment, the treatment can be administered after lymphodepleting pretreatment in the form of chemotherapy (typically a combination of cyclophosphamide and fludarabine) or radiation therapy. Initial studies in ACT had short lived responses and the transferred cells did not persist in vivo for very long (Houot et al., T-cell-based immunotherapy: adoptive cell transfer and checkpoint inhibition. Cancer Immunol Res (2015) 3(10): 1115-22; and Kamta et al., Advancing Cancer Therapy with Present and Emerging Immuno-Oncology Approaches. Front. Oncol. (2017) 7:64). Immune suppressor cells like Tregs and MDSCs may attenuate the activity of transferred cells by outcompeting them for the necessary cytokines. Not being bound by a theory lymphodepleting pretreatment may eliminate the suppressor cells allowing the TILs to persist.

[0776] In one embodiment, the treatment can be administrated into patients undergoing an immunosuppressive treatment (e.g., glucocorticoid treatment). The cells, or population of cells, may be made resistant to at least one immunosuppressive agent due to the inactivation of a gene encoding a receptor for such immunosuppressive agent. In an embodiment, the immunosuppressive treatment provides for the selection and expansion of the immune-responsive T cells within the patient.

[0777] In an embodiment, the treatment can be administered before primary treatment (e.g., surgery or radiation therapy) to shrink a tumor before the primary treatment. In another embodiment, the treatment can be administered after primary treatment to remove any remaining cancer cells.

[0778] In an embodiment, immune-metabolic barriers can be targeted therapeutically prior to and/or during ACT to enhance responses to ACT or CAR T-cell therapy and to support endogenous immunity (see, e.g., Irving et al., Engineering Chimeric Antigen Receptor T-Cells for Racing in Solid Tumors: Don't Forget the Fuel, Front. Immunol., 3 Apr. 2017, doi.org/10.3389/fimmu.2017.00267).

[0779] The administration of cells or population of cells, such as immune system cells or cell populations, such as more particularly immune-responsive cells or cell populations, as disclosed herein may be carried out in any convenient manner, including by aerosol inhalation, injection, ingestion, transfusion, implantation or transplantation. The cells or population of cells may be administered to a patient subcutaneously, intradermally, intratumorally, intranodally, intramedullary, intramuscularly, intrathecally, by intravenous or intralymphatic injection, or intraperitoneally. In one embodiment, the disclosed CARs may be delivered or administered into a cavity formed by the resection of tumor tissue (i.e., intracavity delivery) or directly into a tumor prior to resection (i.e., intratumoral delivery). In one embodiment, the cell compositions of the present invention are preferably administered by intravenous injection.

[0780] The administration of the cells or population of cells can consist of the administration of 104-109 cells per kg body weight, preferably 105 to 106 cells/kg body weight including all integer values of cell numbers within those ranges. Dosing in CAR T cell therapies may, for example, involve administration of from 106 to 109 cells/kg, with or without a course of lymphodepletion, for example with cyclophosphamide. The cells or population of cells can be administrated in one or more doses. In another embodiment, the effective amount of cells is administrated as a single dose. In another embodiment, the effective amount of cells is administrated as more than one dose over a period time. Timing of administration is within the judgment of managing physician and depends on the clinical condition of the patient. The cells or population of cells may be obtained from any source, such as a blood bank or a donor. While individual needs vary, determination of optimal ranges of effective amounts of a given cell type for a particular disease or conditions are within the skill of one in the art. An effective amount means an amount which provides a therapeutic or prophylactic benefit. The dosage administrated will be dependent upon the age, health and weight of the recipient, kind of concurrent treatment, if any, frequency of treatment and the nature of the effect desired.

[0781] In another embodiment, the effective amount of cells or composition comprising those cells is administrated parenterally. The administration can be an intravenous administration. The administration can be directly done by injection within a tumor.

[0782] To guard against possible adverse reactions, engineered immune-responsive cells may be equipped with a transgenic safety switch, in the form of a transgene that renders the cells vulnerable to exposure to a specific signal. For example, the herpes simplex viral thymidine kinase (TK) gene may be used in this way, for example, by introduction into allogeneic T lymphocytes used as donor lymphocyte infusions following stem cell transplantation (Greco, et al., Improving the safety of cell therapy with the TK-suicide gene. Front. Pharmacol. 2015; 6:95). In such cells, administration of a nucleoside prodrug such as ganciclovir or acyclovir causes cell death. Alternative safety switch constructs include inducible caspase 9, for example triggered by administration of a small-molecule dimerizer that brings together two nonfunctional icasp9 molecules to form the active enzyme. A wide variety of alternative approaches to implementing cellular proliferation controls have been described (see U.S. Patent Publication No. 20130071414; International Patent Publication WO 2011/146862; International Patent Publication WO 2014/011987; International Patent Publication WO 2013/040371; Zhou et al. BLOOD, 2014, 123/25:3895-3905; Di Stasi et al., The New England Journal of Medicine 2011; 365:1673-1683; Sadelain M, The New England Journal of Medicine 2011; 365:1735-173; Ramos et al., Stem Cells 28(6): 1107-15(2010)).

[0783] In a further refinement of adoptive therapies, genome editing may be used to tailor immune-responsive cells to alternative implementations, for example providing edited CAR T cells (see Poirot et al., 2015, Multiplex genome edited T-cell manufacturing platform for “off-the-shelf” adoptive T-cell immunotherapies, Cancer Res 75 (18): 3853; Ren et al., 2017, Multiplex genome editing to generate universal CAR T cells resistant to PD1 inhibition, Clin Cancer Res. 2017 May 1; 23(9): 2255-2266. doi: 10.1158/1078-0432.CCR-16-1300. Epub 2016 Nov. 4; Qasim et al., 2017, Molecular remission of infant B-ALL after infusion of universal TALEN gene-edited CAR T cells, Sci Transl Med. 2017 Jan. 25; 9(374); Legut, et al., 2018, CRISPR-mediated TCR replacement generates superior anticancer transgenic T cells. Blood, 131(3), 311-322; and Georgiadis et al., Long Terminal Repeat CRISPR-CAR-Coupled “Universal” T Cells Mediate Potent Anti-leukemic Effects, Molecular Therapy, In Press, Corrected Proof, Available online 6 Mar. 2018). Cells may be edited using any CRISPR system and method of use thereof as described herein. The composition and systems may be delivered to an immune cell by any method described herein. In preferred embodiments, cells are edited ex vivo and transferred to a subject in need thereof. Immuno-responsive cells, CAR T cells or any cells used for adoptive cell transfer may be edited. Editing may be performed, for example, to insert or knock-in an exogenous gene, such as an exogenous gene encoding a CAR or a TCR, at a preselected locus in a cell (e.g., TRAC locus); to eliminate potential alloreactive T-cell receptors (TCR) or to prevent inappropriate pairing between endogenous and exogenous TCR chains, such as to knock-out or knock-down expression of an endogenous TCR in a cell; to disrupt the target of a chemotherapeutic agent in a cell; to block an immune checkpoint, such as to knock-out or knock-down expression of an immune checkpoint protein or receptor in a cell; to knock-out or knock-down expression of other gene or genes in a cell, the reduced expression or lack of expression of which can enhance the efficacy of adoptive therapies using the cell; to knock-out or knock-down expression of an endogenous gene in a cell, said endogenous gene encoding an antigen targeted by an exogenous CAR or TCR; to knock-out or knock-down expression of one or more MHC constituent proteins in a cell; to activate a T cell; to modulate cells such that the cells are resistant to exhaustion or dysfunction; and/or increase the differentiation and/or proliferation of functionally exhausted or dysfunctional CD8+ T-cells (see International Patent Publication Nos. WO 2013/176915, WO 2014/059173, WO 2014/172606, WO 2014/184744, and WO 2014/191128).

[0784] In an embodiment, editing may result in inactivation of a gene. By inactivating a gene, it is intended that the gene of interest is not expressed in a functional protein form. In a particular embodiment, the system specifically catalyzes cleavage in one targeted gene thereby inactivating said targeted gene. The nucleic acid strand breaks caused are commonly repaired through the distinct mechanisms of homologous recombination or non-homologous end joining (NHEJ). However, NHEJ is an imperfect repair process that often results in changes to the DNA sequence at the site of the cleavage. Repair via non-homologous end joining (NHEJ) often results in small insertions or deletions (Indel) and can be used for the creation of specific gene knockouts. Cells in which a cleavage induced mutagenesis event has occurred can be identified and/or selected by well-known methods in the art. In an embodiment, homology directed repair (HDR) is used to concurrently inactivate a gene (e.g., TRAC) and insert an endogenous TCR or CAR into the inactivated locus.

[0785] Hence, in an embodiment, editing of cells, particularly cells intended for adoptive cell therapies, more particularly immune-responsive cells such as T cells, may be performed to insert or knock-in an exogenous gene, such as an exogenous gene encoding a CAR or a TCR, at a preselected locus in a cell. Conventionally, nucleic acid molecules encoding CARs or TCRs are transfected or transduced to cells using randomly integrating vectors, which, depending on the site of integration, may lead to clonal expansion, oncogenic transformation, variegated transgene expression and/or transcriptional silencing of the transgene. Directing of transgene(s) to a specific locus in a cell can minimize or avoid such risks and advantageously provide for uniform expression of the transgene(s) by the cells. Without limitation, suitable ‘safe harbor’ loci for directed transgene integration include CCR5 or AAVS1. Homology-directed repair (HDR) strategies are known and described elsewhere in this specification allowing to insert transgenes into desired loci (e.g., TRAC locus).

[0786] Further suitable loci for insertion of transgenes, in particular CAR or exogenous TCR transgenes, include without limitation loci comprising genes coding for constituents of endogenous T-cell receptor, such as T-cell receptor alpha locus (TRA) or T-cell receptor beta locus (TRB), for example T-cell receptor alpha constant (TRAC) locus, T-cell receptor beta constant 1 (TRBC1) locus or T-cell receptor beta constant 2 (TRBC1) locus. Advantageously, insertion of a transgene into such locus can simultaneously achieve expression of the transgene, potentially controlled by the endogenous promoter, and knock-out expression of the endogenous TCR. This approach has been exemplified in Eyquem et al., (2017) Nature 543: 113-117, wherein the authors used CRISPR/Cas9 gene editing to knock-in a DNA molecule encoding a CD19-specific CAR into the TRAC locus downstream of the endogenous promoter; the CAR-T cells obtained by CRISPR were significantly superior in terms of reduced tonic CAR signaling and exhaustion.

[0787] T cell receptors (TCR) are cell surface receptors that participate in the activation of T cells in response to the presentation of antigen. The TCR is generally made from two chains, α and β, which assemble to form a heterodimer and associates with the CD3-transducing subunits to form the T cell receptor complex present on the cell surface. Each α and β chain of the TCR consists of an immunoglobulin-like N-terminal variable (V) and constant (C) region, a hydrophobic transmembrane domain, and a short cytoplasmic region. As for immunoglobulin molecules, the variable region of the α and β chains are generated by V(D)J recombination, creating a large diversity of antigen specificities within the population of T cells. However, in contrast to immunoglobulins that recognize intact antigen, T cells are activated by processed peptide fragments in association with an MHC molecule, introducing an extra dimension to antigen recognition by T cells, known as MHC restriction. Recognition of MHC disparities between the donor and recipient through the T cell receptor leads to T cell proliferation and the potential development of graft versus host disease (GVHD). The inactivation of TCRα or TCRβ can result in the elimination of the TCR from the surface of T cells preventing recognition of alloantigen and thus GVHD. However, TCR disruption generally results in the elimination of the CD3 signaling component and alters the means of further T cell expansion.

[0788] Hence, in an embodiment, editing of cells, particularly cells intended for adoptive cell therapies, more particularly immune-responsive cells such as T cells, may be performed to knock-out or knock-down expression of an endogenous TCR in a cell. For example, NHEJ-based or HDR-based gene editing approaches can be employed to disrupt the endogenous TCR alpha and/or beta chain genes. For example, gene editing system or systems, such as IscB system or systems, can be designed to target a sequence found within the TCR beta chain conserved between the beta 1 and beta 2 constant region genes (TRBC1 and TRBC2) and/or to target the constant region of the TCR alpha chain (TRAC) gene.

[0789] Allogeneic cells are rapidly rejected by the host immune system. It has been demonstrated that, allogeneic leukocytes present in non-irradiated blood products will persist for no more than 5 to 6 days (Boni, Muranski et al. 2008 Blood 1; 112(12): 4746-54). Thus, to prevent rejection of allogeneic cells, the host's immune system usually has to be suppressed to some extent. However, in the case of adoptive cell transfer the use of immunosuppressive drugs also have a detrimental effect on the introduced therapeutic T cells. Therefore, to effectively use an adoptive immunotherapy approach in these conditions, the introduced cells would need to be resistant to the immunosuppressive treatment. Thus, in a particular embodiment, the present invention further comprises a step of modifying T cells to make them resistant to an immunosuppressive agent, preferably by inactivating at least one gene encoding a target for an immunosuppressive agent. An immunosuppressive agent is an agent that suppresses immune function by one of several mechanisms of action. An immunosuppressive agent can be, but is not limited to a calcineurin inhibitor, a target of rapamycin, an interleukin-2 receptor α-chain blocker, an inhibitor of inosine monophosphate dehydrogenase, an inhibitor of dihydrofolic acid reductase, a corticosteroid or an immunosuppressive antimetabolite. The present invention allows conferring immunosuppressive resistance to T cells for immunotherapy by inactivating the target of the immunosuppressive agent in T cells. As non-limiting examples, targets for an immunosuppressive agent can be a receptor for an immunosuppressive agent such as: CD52, glucocorticoid receptor (GR), a FKBP family gene member and a cyclophilin family gene member.

[0790] In an embodiment, editing of cells, particularly cells intended for adoptive cell therapies, more particularly immune-responsive cells such as T cells, may be performed to block an immune checkpoint, such as to knock-out or knock-down expression of an immune checkpoint protein or receptor in a cell. Immune checkpoints are inhibitory pathways that slow down or stop immune reactions and prevent excessive tissue damage from uncontrolled activity of immune cells. In an embodiment, the immune checkpoint targeted is the programmed death-1 (PD-1 or CD279) gene (PDCD1). In other embodiments, the immune checkpoint targeted is cytotoxic T-lymphocyte-associated antigen (CTLA-4). In additional embodiments, the immune checkpoint targeted is another member of the CD28 and CTLA4 Ig superfamily such as BTLA, LAG3, ICOS, PDL1 or KIR. In further additional embodiments, the immune checkpoint targeted is a member of the TNFR superfamily such as CD40, OX40, CD137, GITR, CD27 or TIM-3.

[0791] Additional immune checkpoints include Src homology 2 domain-containing protein tyrosine phosphatase 1 (SHP-1) (Watson H A, et al., SHP-1: the next checkpoint target for cancer immunotherapy? Biochem Soc Trans. 2016 Apr. 15; 44(2): 356-62). SHP-1 is a widely expressed inhibitory protein tyrosine phosphatase (PTP). In T-cells, it is a negative regulator of antigen-dependent activation and proliferation. It is a cytosolic protein, and therefore not amenable to antibody-mediated therapies, but its role in activation and proliferation makes it an attractive target for genetic manipulation in adoptive transfer strategies, such as chimeric antigen receptor (CAR) T cells. Immune checkpoints may also include T cell immunoreceptor with Ig and ITIM domains (TIGIT/Vstm3/WUCAM/VSIG9) and VISTA (Le Mercier I, et al., (2015) Beyond CTLA-4 and PD-1, the generation Z of negative checkpoint regulators. Front. Immunol. 6:418).

[0792] International Patent Publication No. WO 2014/172606 relates to the use of MT1 and/or MT2 inhibitors to increase proliferation and/or activity of exhausted CD8+ T-cells and to decrease CD8+ T-cell exhaustion (e.g., decrease functionally exhausted or unresponsive CD8+ immune cells). In an embodiment, metallothioneins are targeted by gene editing in adoptively transferred T cells.

[0793] In an embodiment, targets of gene editing may be at least one targeted locus involved in the expression of an immune checkpoint protein. Such targets may include, but are not limited to CTLA4, PPP2CA, PPP2CB, PTPN6, PTPN22, PDCD1, ICOS (CD278), PDL1, KIR, LAG3, HAVCR2, BTLA, CD160, TIGIT, CD96, CRTAM, LAIR1, SIGLEC7, SIGLEC9, CD244(2B4), TNFRSF10B, TNFRSF10A, CASP8, CASP10, CASP3, CASP6, CASP7, FADD, FAS, TGFBRII, TGFRBRI, SMAD2, SMAD3, SMAD4, SMAD10, SKI, SKIL, TGIF1, IL10RA, IL10RB, HMOX2, IL6R, IL6ST, EIF2AK4, CSK, PAG1, SIT1, FOXP3, PRDM1, BATF, VISTA, GUCY1A2, GUCY1A3, GUCY1B2, GUCY1B3, MT1, MT2, CD40, OX40, CD137, GITR, CD27, SHP-1, TIM-3, CEACAM-1, CEACAM-3, or CEACAM-5. In preferred embodiments, the gene locus involved in the expression of PD-1 or CTLA-4 genes is targeted. In other preferred embodiments, combinations of genes are targeted, such as, but not limited to, PD-1 and TIGIT.

[0794] By means of an example and without limitation, International Patent Publication No. WO 2016/196388 concerns an engineered T cell comprising (a) a genetically engineered antigen receptor that specifically binds to an antigen, which receptor may be a CAR; and (b) a disrupted gene encoding a PD-L1, an agent for disruption of a gene encoding a PD-L1, and/or disruption of a gene encoding PD-L1, wherein the disruption of the gene may be mediated by a gene editing nuclease, a zinc finger nuclease (ZFN), CRISPR/Cas9 and/or TALEN. WO2015142675 relates to immune effector cells comprising a CAR in combination with an agent (such as the composition or system herein) that increases the efficacy of the immune effector cells in the treatment of cancer, wherein the agent may inhibit an immune inhibitory molecule, such as PD1, PD-L1, CTLA-4, TIM-3, LAG-3, VISTA, BTLA, TIGIT, LAIR1, CD160, 2β4, TGFR beta, CEACAM-1, CEACAM-3, or CEACAM-5. Ren et al., (2017) Clin Cancer Res 23(9) 2255-2266 performed lentiviral delivery of CAR and electro-transfer of Cas9 mRNA and gRNAs targeting endogenous TCR, β-2 microglobulin (B2M) and PD1 simultaneously, to generate gene-disrupted allogeneic CAR T cells deficient of TCR, HLA class I molecule and PD1.

[0795] In an embodiment, cells may be engineered to express a CAR, wherein expression and/or function of methylcytosine dioxygenase genes (TET1, TET2 and/or TET3) in the cells has been reduced or eliminated, (such as the composition or system herein) (for example, as described in WO201704916).

[0796] In an embodiment, editing of cells, particularly cells intended for adoptive cell therapies, more particularly immune-responsive cells such as T cells, may be performed to knock-out or knock-down expression of an endogenous gene in a cell, said endogenous gene encoding an antigen targeted by an exogenous CAR or TCR, thereby reducing the likelihood of targeting of the engineered cells. In an embodiment, the targeted antigen may be one or more antigen selected from the group consisting of CD38, CD138, CS-1, CD33, CD26, CD30, CD53, CD92, CD100, CD148, CD150, CD200, CD261, CD262, CD362, human telomerase reverse transcriptase (hTERT), survivin, mouse double minute 2 homolog (MDM2), cytochrome P450 1B1 (CYP1B), HER2/neu, Wilms' tumor gene 1 (WT1), livin, alphafetoprotein (AFP), carcinoembryonic antigen (CEA), mucin 16 (MUC16), MUC1, prostate-specific membrane antigen (PSMA), p53, cyclin (D1), B cell maturation antigen (BCMA), transmembrane activator and CAML Interactor (TACI), and B-cell activating factor receptor (BAFF-R) (for example, as described in International Patent Publication Nos. WO 2016/011210 and WO 2017/011804).

[0797] In an embodiment, editing of cells, particularly cells intended for adoptive cell therapies, more particularly immune-responsive cells such as T cells, may be performed to knock-out or knock-down expression of one or more MHC constituent proteins, such as one or more HLA proteins and/or beta-2 microglobulin (B2M), in a cell, whereby rejection of non-autologous (e.g., allogeneic) cells by the recipient's immune system can be reduced or avoided. In preferred embodiments, one or more HLA class I proteins, such as HLA-A, B and/or C, and/or B2M may be knocked-out or knocked-down. Preferably, B2M may be knocked-out or knocked-down. By means of an example, Ren et al., (2017) Clin Cancer Res 23(9) 2255-2266 performed lentiviral delivery of CAR and electro-transfer of Cas mRNA and gRNAs targeting endogenous TCR, β-2 microglobulin (B2M) and PD1 simultaneously, to generate gene-disrupted allogeneic CAR T cells deficient of TCR, HLA class I molecule and PD1.

[0798] In other embodiments, at least two genes are edited. Pairs of genes may include, but are not limited to PD1 and TCRα, PD1 and TCRβ, CTLA-4 and TCRα, CTLA-4 and TCRβ, LAG3 and TCRα, LAG3 and TCRβ, Tim3 and TCRα, Tim3 and TCRβ, BTLA and TCRα, BTLA and TCRβ, BY55 and TCRα, BY55 and TCRβ, TIGIT and TCRα, TIGIT and TCRβ, β7H5 and TCRα, B7H5 and TCRβ, LAIR1 and TCRα, LAIR1 and TCRβ, SIGLEC10 and TCRα, SIGLEC10 and TCRβ, 2B4 and TCRα, 2B4 and TCRβ, B2M and TCRα, B2M and TCRβ.

[0799] In an embodiment, a cell may be multiplied edited (multiplex genome editing) as taught herein to (1) knock-out or knock-down expression of an endogenous TCR (for example, TRBC1, TRBC2 and/or TRAC), (2) knock-out or knock-down expression of an immune checkpoint protein or receptor (for example PD1, PD-L1 and/or CTLA4); and (3) knock-out or knock-down expression of one or more MHC constituent proteins (for example, HLA-A, B and/or C, and/or B2M, preferably B2M).

[0800] Whether prior to or after genetic modification of the T cells, the T cells can be activated and expanded generally using methods as described, for example, in U.S. Pat. Nos. 6,352,694; 6,534,055; 6,905,680; 5,858,358; 6,887,466; 6,905,681; 7,144,575; 7,232,566; 7,175,843; 5,883,223; 6,905,874; 6,797,514; 6,867,041; and 7,572,631. T cells can be expanded in vitro or in vivo.

[0801] Immune cells may be obtained using any method known in the art. In one embodiment, allogenic T cells may be obtained from healthy subjects. In one embodiment T cells that have infiltrated a tumor are isolated. T cells may be removed during surgery. T cells may be isolated after removal of tumor tissue by biopsy. T cells may be isolated by any means known in the art. In one embodiment, T cells are obtained by apheresis. In one embodiment, the method may comprise obtaining a bulk population of T cells from a tumor sample by any suitable method known in the art. For example, a bulk population of T cells can be obtained from a tumor sample by dissociating the tumor sample into a cell suspension from which specific cell populations can be selected. Suitable methods of obtaining a bulk population of T cells may include, but are not limited to, any one or more of mechanically dissociating (e.g., mincing) the tumor, enzymatically dissociating (e.g., digesting) the tumor, and aspiration (e.g., as with a needle).

[0802] The bulk population of T cells obtained from a tumor sample may comprise any suitable type of T cell. Preferably, the bulk population of T cells obtained from a tumor sample comprises tumor infiltrating lymphocytes (TILs).

[0803] The tumor sample may be obtained from any mammal. Unless stated otherwise, as used herein, the term “mammal” refers to any mammal including, but not limited to, mammals of the order Logomorpha, such as rabbits; the order Carnivora, including Felines (cats) and Canines (dogs); the order Artiodactyla, including Bovines (cows) and Swines (pigs); or of the order Perssodactyla, including Equines (horses). The mammals may be non-human primates, e.g., of the order Primates, Ceboids, or Simoids (monkeys) or of the order Anthropoids (humans and apes). In one embodiment, the mammal may be a mammal of the order Rodentia, such as mice and hamsters. Preferably, the mammal is a non-human primate or a human. An especially preferred mammal is the human.

[0804] T cells can be obtained from a number of sources, including peripheral blood mononuclear cells (PBMC), bone marrow, lymph node tissue, spleen tissue, and tumors. In an embodiment of the present invention, T cells can be obtained from a unit of blood collected from a subject using any number of techniques known to the skilled artisan, such as Ficoll separation. In one preferred embodiment, cells from the circulating blood of an individual are obtained by apheresis or leukapheresis. The apheresis product typically contains lymphocytes, including T cells, monocytes, granulocytes, B cells, other nucleated white blood cells, red blood cells, and platelets. In one embodiment, the cells collected by apheresis may be washed to remove the plasma fraction and to place the cells in an appropriate buffer or media for subsequent processing steps. In one embodiment of the invention, the cells are washed with phosphate buffered saline (PBS). In an alternative embodiment, the wash solution lacks calcium and may lack magnesium or may lack many if not all divalent cations. Initial activation steps in the absence of calcium lead to magnified activation. As those of ordinary skill in the art would readily appreciate a washing step may be accomplished by methods known to those in the art, such as by using a semi-automated “flow-through” centrifuge (for example, the Cobe 2991 cell processor) according to the manufacturer's instructions. After washing, the cells may be resuspended in a variety of biocompatible buffers, such as, for example, Ca-free, Mg-free PBS. Alternatively, the undesirable components of the apheresis sample may be removed and the cells directly resuspended in culture media.

[0805] In another embodiment, T cells are isolated from peripheral blood lymphocytes by lysing the red blood cells and depleting the monocytes, for example, by centrifugation through a PERCOLL™ gradient. A specific subpopulation of T cells, such as CD28+, CD4+, CDC, CD45RA+, and CD45RO+ T cells, can be further isolated by positive or negative selection techniques. For example, in one preferred embodiment, T cells are isolated by incubation with anti-CD3/anti-CD28 (i.e., 3×28)-conjugated beads, such as DYNABEADS® M-450 CD3/CD28 T, or XCYTE DYNABEADS™ for a time period sufficient for positive selection of the desired T cells. In one embodiment, the time period is about 30 minutes. In a further embodiment, the time period ranges from 30 minutes to 36 hours or longer and all integer values there between. In a further embodiment, the time period is at least 1, 2, 3, 4, 5, or 6 hours. In yet another preferred embodiment, the time period is 10 to 24 hours. In one preferred embodiment, the incubation time period is 24 hours. For isolation of T cells from patients with leukemia, use of longer incubation times, such as 24 hours, can increase cell yield. Longer incubation times may be used to isolate T cells in any situation where there are few T cells as compared to other cell types, such in isolating tumor infiltrating lymphocytes (TIL) from tumor tissue or from immunocompromised individuals. Further, use of longer incubation times can increase the efficiency of capture of CD8+ T cells.

[0806] Enrichment of a T cell population by negative selection can be accomplished with a combination of antibodies directed to surface markers unique to the negatively selected cells. A preferred method is cell sorting and/or selection via negative magnetic immunoadherence or flow cytometry that uses a cocktail of monoclonal antibodies directed to cell surface markers present on the cells negatively selected. For example, to enrich for CD4+ cells by negative selection, a monoclonal antibody cocktail typically includes antibodies to CD14, CD20, CD11b, CD16, HLA-DR, and CD8.

[0807] Further, monocyte populations (e.g., CD14+ cells) may be depleted from blood preparations by a variety of methodologies, including anti-CD14 coated beads or columns, or utilization of the phagocytotic activity of these cells to facilitate removal. Accordingly, in one embodiment, the invention uses paramagnetic particles of a size sufficient to be engulfed by phagocytotic monocytes. In an embodiment, the paramagnetic particles are commercially available beads, for example, those produced by Life Technologies under the trade name Dynabeads™. In one embodiment, other non-specific cells are removed by coating the paramagnetic particles with “irrelevant” proteins (e.g., serum proteins or antibodies). Irrelevant proteins and antibodies include those proteins and antibodies or fragments thereof that do not specifically target the T cells to be isolated. In an embodiment, the irrelevant beads include beads coated with sheep anti-mouse antibodies, goat anti-mouse antibodies, and human serum albumin.

[0808] In brief, such depletion of monocytes is performed by preincubating T cells isolated from whole blood, apheresed peripheral blood, or tumors with one or more varieties of irrelevant or non-antibody coupled paramagnetic particles at any amount that allows for removal of monocytes (approximately a 20:1 bead:cell ratio) for about 30 minutes to 2 hours at 22 to 37 degrees C., followed by magnetic removal of cells which have attached to or engulfed the paramagnetic particles. Such separation can be performed using standard methods available in the art. For example, any magnetic separation methodology may be used including a variety of which are commercially available, (e.g., DYNAL® Magnetic Particle Concentrator (DYNAL MPC®)). Assurance of requisite depletion can be monitored by a variety of methodologies known to those of ordinary skill in the art, including flow cytometric analysis of CD14 positive cells, before and after depletion.

[0809] For isolation of a desired population of cells by positive or negative selection, the concentration of cells and surface (e.g., particles such as beads) can be varied. In an embodiment, it may be desirable to significantly decrease the volume in which beads and cells are mixed together (i.e., increase the concentration of cells), to ensure maximum contact of cells and beads. For example, in one embodiment, a concentration of 2 billion cells/ml is used. In one embodiment, a concentration of 1 billion cells/ml is used. In a further embodiment, greater than 100 million cells/ml is used. In a further embodiment, a concentration of cells of 10, 15, 20, 25, 30, 35, 40, 45, or 50 million cells/ml is used. In yet another embodiment, a concentration of cells from 75, 80, 85, 90, 95, or 100 million cells/ml is used. In further embodiments, concentrations of 125 or 150 million cells/ml can be used. Using high concentrations can result in increased cell yield, cell activation, and cell expansion. Further, use of high cell concentrations allows more efficient capture of cells that may weakly express target antigens of interest, such as CD28-negative T cells, or from samples where there are many tumor cells present (i.e., leukemic blood, tumor tissue, etc.). Such populations of cells may have therapeutic value and would be desirable to obtain. For example, using high concentration of cells allows more efficient selection of CD8+ T cells that normally have weaker CD28 expression.

[0810] In a related embodiment, it may be desirable to use lower concentrations of cells. By significantly diluting the mixture of T cells and surface (e.g., particles such as beads), interactions between the particles and cells are minimized. This selects for cells that express high amounts of desired antigens to be bound to the particles. For example, CD4+ T cells express higher levels of CD28 and are more efficiently captured than CD8+ T cells in dilute concentrations. In one embodiment, the concentration of cells used is 5×106/ml. In other embodiments, the concentration used can be from about 1×105/ml to 1×106/ml, and any integer value in between.

[0811] T cells can also be frozen. Wishing not to be bound by theory, the freeze and subsequent thaw step provides a more uniform product by removing granulocytes and to some extent monocytes in the cell population. After a washing step to remove plasma and platelets, the cells may be suspended in a freezing solution. While many freezing solutions and parameters are known in the art and will be useful in this context, one method involves using PBS containing 20% DMSO and 8% human serum albumin, or other suitable cell freezing media, the cells then are frozen to −80° C. at a rate of 1° per minute and stored in the vapor phase of a liquid nitrogen storage tank. Other methods of controlled freezing may be used as well as uncontrolled freezing immediately at −20° C. or in liquid nitrogen.

[0812] T cells for use in the present invention may also be antigen-specific T cells. For example, tumor-specific T cells can be used. In an embodiment, antigen-specific T cells can be isolated from a patient of interest, such as a patient afflicted with a cancer or an infectious disease. In one embodiment, neoepitopes are determined for a subject and T cells specific to these antigens are isolated. Antigen-specific cells for use in expansion may also be generated in vitro using any number of methods known in the art, for example, as described in U.S. Patent Publication No. US20040224402 entitled, Generation and Isolation of Antigen-Specific T Cells, or in U.S. Pat. No. 6,040,177. Antigen-specific cells for use in the present invention may also be generated using any number of methods known in the art, for example, as described in Current Protocols in Immunology, or Current Protocols in Cell Biology, both published by John Wiley & Sons, Inc., Boston, Mass.

[0813] In a related embodiment, it may be desirable to sort or otherwise positively select (e.g., via magnetic selection) the antigen specific cells prior to or following one or two rounds of expansion. Sorting or positively selecting antigen-specific cells can be carried out using peptide-MHC tetramers (Altman, et al., Science. 1996 Oct. 4; 274(5284): 94-6). In another embodiment, the adaptable tetramer technology approach is used (Andersen et al., 2012 Nat Protoc. 7:891-902). Tetramers are limited by the need to utilize predicted binding peptides based on prior hypotheses, and the restriction to specific HLAs. Peptide-MHC tetramers can be generated using techniques known in the art and can be made with any MHC molecule of interest and any antigen of interest as described herein. Specific epitopes to be used in this context can be identified using numerous assays known in the art. For example, the ability of a polypeptide to bind to MHC class I may be evaluated indirectly by monitoring the ability to promote incorporation of 125I labeled β2-microglobulin (β2m) into MHC class I/β2m/peptide heterotrimeric complexes (see Parker et al., J. Immunol. 152:163, 1994).

[0814] In one embodiment cells are directly labeled with an epitope-specific reagent for isolation by flow cytometry followed by characterization of phenotype and TCRs. In one embodiment, T cells are isolated by contacting with T cell specific antibodies. Sorting of antigen-specific T cells, or generally any cells of the present invention, can be carried out using any of a variety of commercially available cell sorters, including, but not limited to, MoFlo sorter (DakoCytomation, Fort Collins, Colo.), FACSAria™, FACSArray™, FACSVantage™, BD™ LSR II, and FACSCalibur™ (BD Biosciences, San Jose, Calif.).

[0815] In a preferred embodiment, the method comprises selecting cells that also express CD3. The method may comprise specifically selecting the cells in any suitable manner. Preferably, the selecting is carried out using flow cytometry. The flow cytometry may be carried out using any suitable method known in the art. The flow cytometry may employ any suitable antibodies and stains. Preferably, the antibody is chosen such that it specifically recognizes and binds to the particular biomarker being selected. For example, the specific selection of CD3, CD8, TIM-3, LAG-3, 4-1BB, or PD-1 may be carried out using anti-CD3, anti-CD8, anti-TIM-3, anti-LAG-3, anti-4-1BB, or anti-PD-1 antibodies, respectively. The antibody or antibodies may be conjugated to a bead (e.g., a magnetic bead) or to a fluorochrome. Preferably, the flow cytometry is fluorescence-activated cell sorting (FACS). TCRs expressed on T cells can be selected based on reactivity to autologous tumors. Additionally, T cells that are reactive to tumors can be selected for based on markers using the methods described in patent publication Nos. WO2014133567 and WO2014133568, herein incorporated by reference in their entirety. Additionally, activated T cells can be selected for based on surface expression of CD107a.

[0816] In one embodiment of the invention, the method further comprises expanding the numbers of T cells in the enriched cell population. Such methods are described in U.S. Pat. No. 8,637,307 and is herein incorporated by reference in its entirety. The numbers of T cells may be increased at least about 3-fold (or 4-, 5-, 6-, 7-, 8-, or 9-fold), more preferably at least about 10-fold (or 20-, 30-, 40-, 50-, 60-, 70-, 80-, or 90-fold), more preferably at least about 100-fold, more preferably at least about 1,000-fold, or most preferably at least about 100,000-fold. The numbers of T cells may be expanded using any suitable method known in the art. Exemplary methods of expanding the numbers of cells are described in patent publication No. WO 2003/057171, U.S. Pat. No. 8,034,334, and U.S. Patent Publication No. 2012/0244133, each of which is incorporated herein by reference.

[0817] In one embodiment, ex vivo T cell expansion can be performed by isolation of T cells and subsequent stimulation or activation followed by further expansion. In one embodiment of the invention, the T cells may be stimulated or activated by a single agent. In another embodiment, T cells are stimulated or activated with two agents, one that induces a primary signal and a second that is a co-stimulatory signal. Ligands useful for stimulating a single signal or stimulating a primary signal and an accessory molecule that stimulates a second signal may be used in soluble form. Ligands may be attached to the surface of a cell, to an Engineered Multivalent Signaling Platform (EMSP), or immobilized on a surface. In a preferred embodiment both primary and secondary agents are co-immobilized on a surface, for example a bead or a cell. In one embodiment, the molecule providing the primary activation signal may be a CD3 ligand, and the co-stimulatory molecule may be a CD28 ligand or 4-1BB ligand.

[0818] In an embodiment, T cells comprising a CAR or an exogenous TCR, may be manufactured as described in International Patent Publication No. WO 2015/120096, by a method comprising enriching a population of lymphocytes obtained from a donor subject; stimulating the population of lymphocytes with one or more T-cell stimulating agents to produce a population of activated T cells, wherein the stimulation is performed in a closed system using serum-free culture medium; transducing the population of activated T cells with a viral vector comprising a nucleic acid molecule which encodes the CAR or TCR, using a single cycle transduction to produce a population of transduced T cells, wherein the transduction is performed in a closed system using serum-free culture medium; and expanding the population of transduced T cells for a predetermined time to produce a population of engineered T cells, wherein the expansion is performed in a closed system using serum-free culture medium. In an embodiment, T cells comprising a CAR or an exogenous TCR, may be manufactured as described in WO 2015/120096, by a method comprising: obtaining a population of lymphocytes; stimulating the population of lymphocytes with one or more stimulating agents to produce a population of activated T cells, wherein the stimulation is performed in a closed system using serum-free culture medium; transducing the population of activated T cells with a viral vector comprising a nucleic acid molecule which encodes the CAR or TCR, using at least one cycle transduction to produce a population of transduced T cells, wherein the transduction is performed in a closed system using serum-free culture medium; and expanding the population of transduced T cells to produce a population of engineered T cells, wherein the expansion is performed in a closed system using serum-free culture medium. The predetermined time for expanding the population of transduced T cells may be 3 days. The time from enriching the population of lymphocytes to producing the engineered T cells may be 6 days. The closed system may be a closed bag system. Further provided is population of T cells comprising a CAR or an exogenous TCR obtainable or obtained by said method, and a pharmaceutical composition comprising such cells.

[0819] In an embodiment, T cell maturation or differentiation in vitro may be delayed or inhibited by the method as described in International Patent Publication No. WO 2017/070395, comprising contacting one or more T cells from a subject in need of a T cell therapy with an AKT inhibitor (such as, e.g., one or a combination of two or more AKT inhibitors disclosed in claim 8 of WO2017070395) and at least one of exogenous Interleukin-7 (IL-7) and exogenous Interleukin-15 (IL-15), wherein the resulting T cells exhibit delayed maturation or differentiation, and/or wherein the resulting T cells exhibit improved T cell function (such as, e.g., increased T cell proliferation; increased cytokine production; and/or increased cytolytic activity) relative to a T cell function of a T cell cultured in the absence of an AKT inhibitor.

[0820] In an embodiment, a patient in need of a T cell therapy may be conditioned by a method as described in International Patent Publication No. WO 2016/191756 comprising administering to the patient a dose of cyclophosphamide between 200 mg/m2/day and 2000 mg/m2/day and a dose of fludarabine between 20 mg/m2/day and 900 mg/m²/day.

### Diseases

Genetic Diseases and Diseases with a Genetic and/or Epigenetic Aspect

[0821] The compositions, systems, or components thereof can be used to treat and/or prevent a genetic disease or a disease with a genetic and/or epigenetic aspect. The genes and conditions exemplified herein are not exhaustive. In one embodiment, a method of treating and/or preventing a genetic disease can include administering a composition, system, and/or one or more components thereof to a subject, where the composition, system, and/or one or more components thereof is capable of modifying one or more copies of one or more genes associated with the genetic disease or a disease with a genetic and/or epigenetic aspect in one or more cells of the subject. In one embodiment, modifying one or more copies of one or more genes associated with a genetic disease or a disease with a genetic and/or epigenetic aspect in the subject can eliminate a genetic disease or a symptom thereof in the subject. In one embodiment, modifying one or more copies of one or more genes associated with a genetic disease or a disease with a genetic and/or epigenetic aspect in the subject can decrease the severity of a genetic disease or a symptom thereof in the subject. In one embodiment, the compositions, systems, or components thereof can modify one or more genes or polynucleotides associated with one or more diseases, including genetic diseases and/or those having a genetic aspect and/or epigenetic aspect, including but not limited to, any one or more set forth in Table 6. It will be appreciated that those diseases and associated genes listed herein are non-exhaustive and non-limiting. Further some genes play roles in the development of multiple diseases.

TABLE 6
Exemplary Genetic and Other Diseases and Associated Genes

| | Primary | | |
|---|---|---|---|
| | Tissues or | Additional | |
| | System | Tissues/Systems | |
| Disease Name | Affected | Affected | Genes |
| Achondroplasia | Bone and | | fibroblast growth factor receptor 3 |
| | Muscle | | (FGFR3) |
| Achromatopsia | eye | | CNGA3, CNGB3, GNAT2, PDE6C, |
| | | | PDE6H, ACHM2, ACHM3, |
| Acute Renal Injury | kidney | | NFkappaB, AATF, p85alpha, FAS, |
| | | | Apoptosis cascade elements (e.g. |
| | | | FASR, Caspase 2, 3, 4, 6, 7, 8, 9, 10, |
| | | | AKT, TNF alpha, IGF1, IGF1R, |
| | | | RIPK1), p53 |
| Age Related Macular | eye | | Abcr; CCL2; CC2; CP |
| Degeneration | | | (ceruloplasmin); Timp3; cathepsinD; |
| | | | VLDLR, CCR2 |
| AIDS | Immune System | | KIR3DL1, NKAT3, NKB1, AMB11, |
| | | | KIR3DS1, IFNG, CXCL12, SDF1 |
| Albinism (including | Skin, hair, eyes, | | TYR, OCA2, TYRP1, and SLC45A2, |
| oculocutaneous albinism (types | | | SLC24A5 and C10orf11 |
| 1-7) and ocular albinism) | | | |
| Alkaptonuria | Metabolism of | Tissues/organs | HGD |
| | amino acids | where | |
| | | homogentisic acid | |
| | | accumulates, | |
| | | particularly | |
| | | cartilage (joints), | |
| | | heart valves, | |
| | | kidneys | |
| alpha-1 antitrypsin deficiency | Lung | Liver, skin, | SERPINA1, those set forth in |
| (AATD or A1AD) | | vascular system, | WO2017165862, PiZ allele |
| | | kidneys, GI | |
| ALS | CNS | | SOD1; ALS2; ALS3; ALS5; |
| | | | ALS7; STEX; FUS; TARDBP; VEGF |
| | | | (VEGF-a; |
| | | | VEGF-b; VEGF-c); DPP6; NEFH, |
| | | | PTGS1, SLC1A2, TNFRSF10B, |
| | | | PRPH, HSP90AA1, CRIA2, IFNG, |
| | | | AMPA2 S100B, FGF2, AOX1, CS, |
| | | | TXN, RAPHJ1, MAP3K5, NBEAL1, |
| | | | GPX1, ICA1L, RAC1, MAPT, |
| | | | ITPR2, ALS2CR4, GLS, ALS2CR8, |
| | | | CNTFR, ALS2CR11, FOLH1, |
| | | | FAM117B, P4HB, CNTF, SQSTM1, |
| | | | STRADB, NAIP, NLR, YWHAQ, |
| | | | SLC33A1, TRAK2, SCA1, NIF3L1, |
| | | | NIF3, PARD3B, COX8A, CDK15, |
| | | | HECW1, HECT, C2, WW 15, NOS1, |
| | | | MET, SOD2, HSPB1, NEFL, CTSB, |
| | | | ANG, HSPA8, RNase A, VAPB, |
| | | | VAMP, SNCA, alpha HGF, CAT, |
| | | | ACTB, NEFM, TH, BCL2, FAS, |
| | | | CASP3, CLU, SMN1, G6PD, BAX, |
| | | | HSF1, RNF19A, JUN, ALS2CR12, |
| | | | HSPA5, MAPK14, APEX1, |
| | | | TXNRD1, NOS2, TIMP1, CASP9, |
| | | | XIAP, GLG1, EPO, VEGFA, ELN, |
| | | | GDNF, NFE2L2, SLC6A3, HSPA4, |
| | | | APOE, PSMB8, DCTN2, TIMP3, |
| | | | KIFAP3, SLC1A1, SMN2, CCNC, |
| | | | STUB1, ALS2, PRDX6, SYP, |
| | | | CABIN1, CASP1, GART, CDK5, |
| | | | ATXN3, RTN4, C1QB, VEGFC, |
| | | | HTT, PARK7, XDH, GFAP, MAP2, |
| | | | CYCS, FCGR3B, CCS, UBL5, |
| | | | MMP9m SLC18A3, TRPM7, |
| | | | HSPB2, AKT1, DEERL1, CCL2, |
| | | | NGRN, GSR, TPPP3, APAF1, |
| | | | BTBD10, GLUD1, CXCR4, S:C1A3, |
| | | | FLT1, PON1, AR, LIF, ERBB3, |
| | | | :GA:S1, CD44, TP53, TLR3, GRIA1, |
| | | | GAPDH, AMPA, GRIK1, DES, |
| | | | CHAT, FLT4, CHMP2B, BAG1, |
| | | | CHRNA4, GSS, BAK1, KDR, |
| | | | GSTP1, OGG1, IL6 |
| Alzheimer's Disease | Brain | | E1; CHIP; UCH; UBB; Tau; LRP; |
| | | | PICALM; CLU; PS1; |
| | | | SORL1; CR1; VLDLR; UBA1; |
| | | | UBA3; CHIP28; AQP1; UCHL1; |
| | | | UCHL3; APP, AAA, CVAP, AD1, |
| | | | APOE, AD2, DCP1, ACE1, MPO, |
| | | | PACIP1, PAXIP1L, PTIP, A2M, |
| | | | BLMH, BMH, PSEN1, AD3, |
| | | | ALAS2, ABCA1, BIN1, BDNF, |
| | | | BTNL8, C1ORF49, CDH4, |
| | | | CHRNB2, CKLFSF2, CLEC4E, |
| | | | CR1L, CSF3R, CST3, CYP2C, |
| | | | DAPK1, ESR1, FCAR, FCGR3B, |
| | | | FFA2, FGA, GAB2, GALP, |
| | | | GAPDHS, GMPB, HP, HTR7, IDE, |
| | | | IF127, IFI6, IFIT2, IL1RN, IL-IRA, |
| | | | IL8RA, IL8RB, JAG1, KCNJ15, |
| | | | LRP6, MAPT, MARK4, |
| | | | MPHOSPH1, MTHFR, NBN, |
| | | | NCSTN, NIACR2, NMNAT3, NTM, |
| | | | ORM1, P2RY13, PBEF1, PCK1, |
| | | | PICALM, PLAU, PLXNC1, PRNP, |
| | | | PSEN1, PSEN2, PTPRA, RALGPS2, |
| | | | RGSL2, SELENBP1, SLC25A37, |
| | | | SORL1, Mitoferrin-1, TF, TFAM, |
| | | | TNF, TNFRSF10C, UBE1C |
| Amyloidosis | | | APOA1, APP, AAA, CVAP, AD1, |
| | | | GSN, FGA, LYZ, TTR, PALB |
| Amyloid neuropathy | | | TTR, PALB |
| Anemia | Blood | | CDAN1, CDA1, RPS19, DBA, |
| | | | PKLR, PK1, NT5C3, UMPH1, PSN1, |
| | | | RHAG, RH50A, NRAMP2, SPTB, |
| | | | ALAS2, ANH1, ASB, ABCB7, |
| | | | ABC7, ASAT |
| Angelman Syndrome | Nervous system, | | UBE3A |
| | brain | | |
| Attention Deficit Hyperactivity | Brain | | PTCHD1 |
| Disorder (ADHD) | | | |
| Autoimmune | Immune system | | TNFRSF6, APT1, FAS, CD95, |
| lymphoproliferative syndrome | | | ALPS1A |
| Autism, Autism spectrum | Brain | | PTCHD1; Mecp2; BZRAP1; |
| disorders (ASDs), including | | | MDGA2; Sema5A; Neurexin 1; |
| Asperger's and a general | | | GLO1, RTT, PPMX, MRX16, RX79, |
| diagnostic category called | | | NLGN3, NLGN4, KIAA1260, |
| Pervasive Developmental | | | AUTSX2, FMR1, FMR2; FXR1; |
| Disorders (PDDs) | | | FXR2; MGLUR5, ATP10C, CDH10, |
| | | | GRM6, MGLUR6, CDH9, CNTN4, |
| | | | NLGN2, CNTNAP2, SEMA5A, |
| | | | DHCR7, NLGN4X, NLGN4Y, DPP6, |
| | | | NLGN5, EN2, NRCAM, MDGA2, |
| | | | NRXN1, FMR2, AFF2, FOXP2, |
| | | | OR4M2, OXTR, FXR1, FXR2, PAH, |
| | | | GABRA1, PTEN, GABRA5, |
| | | | PTPRZ1, GABRB3, GABRG1, |
| | | | HIRIP3, SEZ6L2, HOXA1, |
| | | | SHANK3, IL6, SHBZRAP1, |
| | | | LAMB1, SLC6A4, SERT, MAPK3, |
| | | | TAS2R1, MAZ, TSC1, MDGA2, |
| | | | TSC2, MECP2, UBE3A, WNT2, see |
| | | | also 20110023145 |
| autosomal dominant polycystic | kidney | liver | PKD1, PKD2 |
| kidney disease (ADPKD) - | | | |
| (includes diseases such as von | | | |
| Hippel-Lindau disease and | | | |
| tubreous sclerosis complex | | | |
| disease) | | | |
| Autosomal Recessive Polycystic | kidney | liver | PKDH1 |
| Kidney Disease (ARPKD) | | | |
| Ataxia-Telangiectasia (a.k.a | Nervous system, | various | ATM |
| Louis Bar syndrome) | immune system | | |
| B-Cell Non-Hodgkin | | | BCL7A, BCL7 |
| Lymphoma | | | |
| Bardet-Biedl syndrome | Eye, | Liver, ear, | ARL6, BBS1, BBS2, BBS4, BBS5, |
| | musculoskeletal | gastrointestinal | BBS7, BBS9, BBS10, BBS12, |
| | system, kidney, | system, brain | CEP290, INPP5E, LZTFL1, MKKS, |
| | reproductive | | MKS1, SDCCAG8, TRIM32, TTC8 |
| | organs | | |
| Bare Lymphocyte Syndrome | blood | | TAPBP, TPSN, TAP2, ABCB3, |
| | | | PSF2, RING11, MHC2TA, C2TA, |
| | | | RFX5, RFXAP, RFX5 |
| Bartter's Syndrome (types I, II, | kidney | | SLC12A1 (type I), KCNJ1 (type II), |
| III, IVA and B, and V) | | | CLCNKB (type III), BSND (type IV |
| | | | A), or both the CLCNKA CLCNKB |
| | | | genes (type IV B), CASR (type V). |
| Becker muscular dystrophy | Muscle | | DMD, BMD, MYF6 |
| Best Disease (Vitelliform | eye | | VMD2 |
| Macular Dystrophy type 2) | | | |
| Bleeding Disorders | blood | | TBXA2R, P2RX1, P2X1 |
| Blue Cone Monochromacy | eye | | OPN1LW, OPN1MW, and LCR |
| Breast Cancer | Breast tissue | | BRCA1, BRCA2, COX-2 |
| Bruton's Disease (aka X-linked | Immune system, | | BTK |
| Agammglobulinemia) | specifically B | | |
| | cells | | |
| Cancers (e.g., lymphoma, | Various | | FAS, BID, CTLA4, PDCD1, CBLB, |
| chronic lymphocytic leukemia | | | PTPN6, TRAC, TRBC, those |
| (CLL), B cell acute lymphocytic | | | described in WO2015048577 |
| leukemia (B-ALL), acute | | | |
| lymphoblastic leukemia, acute | | | |
| myeloid leukemia, non- | | | |
| Hodgkin's lymphoma (NHL), | | | |
| diffuse large cell lymphoma | | | |
| (DLCL), multiple myeloma, | | | |
| renal cell carcinoma (RCC), | | | |
| neuroblastoma, colorectal | | | |
| cancer, breast cancer, ovarian | | | |
| cancer, melanoma, sarcoma, | | | |
| prostate cancer, lung cancer, | | | |
| esophageal cancer, | | | |
| hepatocellular carcinoma, | | | |
| pancreatic cancer, astrocytoma, | | | |
| mesothelioma, head and neck | | | |
| cancer, and medulloblastoma | | | |
| Cardiovascular Diseases | heart | Vascular system | IL1B, XDH, TP53, PTGS, MB, IL4, |
| | | | ANGPT1, ABCGu8, CTSK, PTGIR, |
| | | | KCNJ11, INS, CRP, PDGFRB, |
| | | | CCNA2, PDGFB, KCNJ5, KCNN3, |
| | | | CAPN10, ADRA2B, ABCG5, |
| | | | PRDX2, CPAN5, PARP14, MEX3C, |
| | | | ACE, RNF, IL6, TNF, STN, |
| | | | SERPINE1, ALB, ADIPOQ, APOB, |
| | | | APOE, LEP, MTHFR, APOA1, |
| | | | EDN1, NPPB, NOS3, PPARG, |
| | | | PLAT, PTGS2, CETP, AGTR1, |
| | | | HMGCR, IGF1, SELE, REN, |
| | | | PPARA, PON1, KNG1, CCL2, LPL, |
| | | | VWF, F2, ICAM1, TGFB, NPPA, |
| | | | IL10, EPO, SOD1, VCAM1, IFNG, |
| | | | LPA, MPO, ESR1, MAPK, HP, F3, |
| | | | CST3, COG2, MMP9, SERPINC1, |
| | | | F8, HMOX1, APOC3, IL8, PROL1, |
| | | | CBS, NOS2, TLR4, SELP, ABCA1, |
| | | | AGT, LDLR, GPT, VEGFA, NR3C2, |
| | | | IL18, NOS1, NR3C1, FGB, HGF, |
| | | | IL1A, AKT1, LIPC, HSPD1, |
| | | | MAPK14, SPP1, ITGB3, CAT, |
| | | | UTS2, THBD, F10, CP, |
| | | | TNFRSF11B, EGFR, MMP2, PLG, |
| | | | NPY, RHOD, MAPK8, MYC, FN1, |
| | | | CMA1, PLAU, GNB3, ADRB2, |
| | | | SOD2, F5, VDR, ALOX5, HLA- |
| | | | DRB1, PARP1, CD40LG, PON2, |
| | | | AGER, IRS1, PTGS1, ECE1, F7, |
| | | | IRMN, EPHX2, IGFBP1, MAPK10, |
| | | | FAS, ABCB1, JUN, IGFBP3, CD14, |
| | | | PDE5A, AGTR2, CD40, LCAT, |
| | | | CCR5, MMP1, TIMP1, ADM, |
| | | | DYT10, STAT3, MMP3, ELN, |
| | | | USF1, CFH, HSPA4, MMP12, MME, |
| | | | F2R, SELL, CTSB, ANXA5, |
| | | | ADRB1, CYBA, FGA, GGT1, LIPG, |
| | | | HIF1A, CXCR4, PROC, SCARB1, |
| | | | CD79A, PLTP, ADD1, FGG, SAA1, |
| | | | KCNH2, DPP4, NPR1, VTN, |
| | | | KIAA0101, FOS, TLR2, PPIG, |
| | | | IL1R1, AR, CYP1A1, SERPINA1, |
| | | | MTR, RBP4, APOA4, CDKN2A, |
| | | | FGF2, EDNRB, ITGA2, VLA-2, |
| | | | CABIN1, SHBG, HMGB1, |
| | | | HSP90B2P, CYP3A4, GJA1, CAV1, |
| | | | ESR2, LTA, GDF15, BDNF, |
| | | | CYP2D6, NGF, SP1, TGIF1, SRC, |
| | | | EGF, PIK3CG, HLA-A, KCNQ1, |
| | | | CNR1, FBN1, CHKA, BEST1, |
| | | | CTNNB1, IL2, CD36, PRKAB1, |
| | | | TPO, ALDH7A1, CX3CR1, TH, F9, |
| | | | CH1, TF, HFE, IL17A, PTEN, |
| | | | GSTM1, DMD, GATA4, F13A1, |
| | | | TTR, FABP4, PON3, APOC1, INSR, |
| | | | TNFRSF1B, HTR2A, CSF3, |
| | | | CYP2C9, TXN, CYP11B2, PTH, |
| | | | CSF2, KDR, PLA2G2A, THBS1, |
| | | | GCG, RHOA, ALDH2, TCF7L2, |
| | | | NFE2L2, NOTCH1, UGT1A1, |
| | | | IFNA1, PPARD, SIRT1, GNHR1, |
| | | | PAPPA, ARR3, NPPC, AHSP, |
| | | | PTK2, IL 13, MTOR, ITGB2, GSTT1, |
| | | | IL6ST, CPB2, CYP1A2, HNF4A, |
| | | | SLC64A, PLA2G6, TNFSF11, |
| | | | SLC8A1, F2RL1, AKR1A1, |
| | | | ALDH9A1, BGLAP, MTTP, MTRR, |
| | | | SULT1A3, RAGE, C4B, P2RY12, |
| | | | RNLS, CREB1, POMC, RAC1, |
| | | | LMNA, CD59, SCM5A, CYP1B1, |
| | | | MIF, MMP13, TIMP2, CYP19A1, |
| | | | CUP21A2, PTPN22, MYH14, MBL2, |
| | | | SELPLG, AOC3, CTSL1, PCNA, |
| | | | IGF2, ITGB1, CAST, CXCL12, |
| | | | IGHE, KCNE1, TFRC, COL1A1, |
| | | | COL1A2, IL2RB, PLA2G10, |
| | | | ANGPT2, PROCR, NOX4, HAMP, |
| | | | PTPN11, SLCA1, IL2RA, CCL5, |
| | | | IRF1, CF:AR, CA:CA, EIF4E, |
| | | | GSTP1, JAK2, CYP3A5, HSPG2, |
| | | | CCL3, MYD88, VIP, SOAT1, |
| | | | ADRBK1, NR4A2, MMP8, NPR2, |
| | | | GCH1, EPRS, PPARGC1A, F12, |
| | | | PECAM1, CCL4, CERPINA34, |
| | | | CASR, FABP2, TTF2, PROS1, |
| | | | CTF1, SGCB, YME1L1, CAMP, |
| | | | ZC3H12A, AKR1B1, MMP7, AHR, |
| | | | CSF1, HDAC9, CTGF, KCNMA1, |
| | | | UGT1A, PRKCA, COMT, S100B, |
| | | | EGR1, PRL, IL15, DRD4, CAMK2G, |
| | | | SLC22A2, CCL11, PGF, THPO, |
| | | | GP6, TACR1, NTS, HNF1A, SST, |
| | | | KCDN1, LOC646627, TBXAS1, |
| | | | CUP2J2, TBXA2R, ADH1C, |
| | | | ALOX12, AHSG, BHMT, GJA4, |
| | | | SLC25A4, ACLY, ALOX5AP, |
| | | | NUMA1, CYP27B1, CYSLTR2, |
| | | | SOD3, LTC4S, UCN, GHRL, |
| | | | APOC2, CLEC4A, KBTBD10, TNC, |
| | | | TYMS, SHC1, LRP1, SOCS3, |
| | | | ADH1B, KLK3, HSD11B1, |
| | | | VKORC1, SERPINB2, TNS1, |
| | | | RNF19A, EPOR, ITGAM, PITX2, |
| | | | MAPK7, FCGR3A, LEEPR, ENG, |
| | | | GPX1, GOT2, HRH1, NR112, CRH, |
| | | | HTR1A, VDAC1, HPSE, SFTPD, |
| | | | TAP2, RMF123, PTK2Bm NTRK2, |
| | | | IL6R, ACHE, GLP1R, GHR, GSR, |
| | | | NQO1, NR5A1, GJB2, SLC9A1, |
| | | | MAOA, PCSK9, FCGR2A, |
| | | | SERPINF1, EDN3, UCP2, TFAP2A, |
| | | | C4BPA, SERPINF2, TYMP, ALPP, |
| | | | CXCR2, SLC3A3, ABCG2, ADA, |
| | | | JAK3, HSPA1A, FASN, FGF1, F11, |
| | | | ATP7A, CR1, GFPA, ROCK1, |
| | | | MECP2, MYLK, BCHE, LIPE, |
| | | | ADORA1, WRN, CXCR3, CD81, |
| | | | SMAD7, LAMC2, MAP3K5, CHGA, |
| | | | IAPP, RHO, ENPP1, PTHLH, NRG1, |
| | | | VEGFC, ENPEP, CEBPB, NAGLU,. |
| | | | F2RL3, CX3CL1, BDKRB1, |
| | | | ADAMTS13, ELANE, ENPP2, |
| | | | CISH, GAST, MYOC, ATP1A2, |
| | | | NF1, GJB1, MEF2A, VCL, BMPR2, |
| | | | TUBB, CDC42, KRT18, HSF1, |
| | | | MYB, PRKAA2, ROCK2, TFP1, |
| | | | PRKG1, BMP2, CTNND1, CTH, |
| | | | CTSS, VAV2, NPY2R, IGFBP2, |
| | | | CD28, GSTA1, PPIA, APOH, |
| | | | S100A8, IL11, ALOX15, FBLN1, |
| | | | NR1H3, SCD, GIP, CHGB, PRKCB, |
| | | | SRD5A1, HSD11B2, CALCRL, |
| | | | GALNT2, ANGPTL4, KCNN4, |
| | | | PIK3C2A, HBEGF, CYP7A1, HLA- |
| | | | DRB5, BNIP3, GCKR, S100A12, |
| | | | PADI4, HSPA14, CXCR1, H19, |
| | | | KRTAP19-3, IDDM2, RAC2, YRY1, |
| | | | CLOCK, NGFR, DBH, CHRNA4, |
| | | | CACNA1C, PRKAG2, CHAT, |
| | | | PTGDS, NR1H2, TEK, VEGFB, |
| | | | MEF2C, MAPKAPK2, TNFRSF11A, |
| | | | HSPA9, CYSLTR1, MAT1A, |
| | | | OPRL1, IMPA1, CLCN2, DLD, |
| | | | PSMA6, PSMB8, CHI3L1, |
| | | | ALDH1B1, PARP2, STAR, LBP, |
| | | | ABCC6, RGS2, EFNB2, GJB6, |
| | | | APOA2, AMPD1, DYSF, |
| | | | FDFT1, EMD2, CCR6, GJB3, |
| | | | IL1RL1, ENTPD1, BBS4, CELSR2, |
| | | | F11R, RAPGEF3, HYAL1, ZNF259, |
| | | | ATOX1, ATF6, KHK, SAT1, GGH, |
| | | | TIMP4, SLC4A4, PDE2A, PDE3B, |
| | | | FADS1, FADS2, TMSB4X, TXNIP, |
| | | | LIMS1, RHOB, LY96, FOXO1, |
| | | | PNPLA2, TRH, GJC1, S:C17A5, |
| | | | FTO, GJD2, PRSC1, CASP12, |
| | | | GPBAR1, PXK, IL33, TRIB1, PBX4, |
| | | | NUPR1, 15-SEP, CILP2, TERC, |
| | | | GGT2, MTCO1, UOX, AVP |
| Cataract | eye | | CRYAA, CRYA1, CRYBB2, |
| | | | CRYB2, PITX3, BFSP2, CP49, |
| | | | CP47, CRYAA, CRYA1, PAX6, |
| | | | AN2, MGDA, CRYBA1, CRYB1, |
| | | | CRYGC, CRYG3, CCL, LIM2, |
| | | | MP19, CRYGD, CRYG4, BFSP2, |
| | | | CP49, CP47, HSF4, CTM, HSF4, |
| | | | CTM, MIP, AQP0, CRYAB, |
| | | | CRYA2, CTPP2, CRYBB1, CRYGD, |
| | | | CRYG4, CRYBB2, CRYB2, |
| | | | CRYGC, CRYG3, CCL, CRYAA, |
| | | | CRYA1, GJA8, CX50, CAE1, GJA3, |
| | | | CX46, CZP3, CAE3, CCM1, CAM, |
| | | | KRIT1 |
| CDKL-5 Deficiencies or | Brain, CNS | | CDKL5 |
| Mediated Diseases | | | |
| Charcot-Marie-Tooth (CMT) | Nervous system | Muscles | PMP22 (CMT1A and E), MPZ |
| disease (Types 1, 2, 3, 4,) | | (dystrophy) | (CMT1B), LITAF (CMT1C), EGR2 |
| | | | (CMT1D), NEFL (CMT1F), GJB1 |
| | | | (CMT1X), MFN2 (CMT2A), KIF1B |
| | | | (CMT2A2B), RAB7A (CMT2B), |
| | | | TRPV4 (CMT2C), GARS (CMT2D), |
| | | | NEFL (CMT2E), GAPD1 (CMT2K), |
| | | | HSPB8 (CMT2L), DYNC1H1, |
| | | | CMT2O), LRSAM1 (CMT2P), |
| | | | IGHMBP2 (CMT2S), MORC2 |
| | | | (CMT2Z), GDAP1 (CMT4A), |
| | | | MTMR2 or SBF2/MTMR13 |
| | | | (CMT4B), SH3TC2 (CMT4C), |
| | | | NDRG1 (CMT4D), PRX (CMT4F), |
| | | | FIG. 4 (CMT4J), NT-3 |
| Chédiak-Higashi Syndrome | Immune system | Skin, hair, eyes, | LYST |
| | | neurons | |
| Choroidermia | | | CHM, REP1, |
| Chorioretinal atrophy | eye | | PRDM13, RGR, TEAD1 |
| Chronic Granulomatous Disease | Immune system | | CYBA, CYBB, NCF1, NCF2, NCF4 |
| Chronic Mucocutaneous | Immune system | | AIRE, CARD9, CLEC7A IL12B, |
| Candidiasis | | | IL12B1, IL1F, IL17RA, IL17RC, |
| | | | RORC, STAT1, STAT3, TRAF31P2 |
| Cirrhosis | liver | | KRT18, KRT8, CIRH1A, NAIC, |
| | | | TEX292, KIAA1988 |
| Colon cancer (Familial | Gastrointestinal | | FAP: APC HNPCC: MSH2, |
| adenomatous polyposis (FAP) | | | MLH1, PMS2, SH6, PMS1 |
| and hereditary nonpolyposis | | | |
| colon cancer (HNPCC)) | | | |
| Combined Immunodeficiency | Immune System | | IL2RG, SCIDX1, SCIDX, IMD4); |
| | | | HIV-1 (CCL5, SCYA5, D17S136E, |
| | | | TCP228 |
| Cone(-rod) dystrophy | eye | | AIPL1, CRX, GUA1A, GUCY2D, |
| | | | PITPM3, PROM1, PRPH2, RIMS1, |
| | | | SEMA4A, ABCA4, ADAM9, ATF6, |
| | | | C21ORF2, C8ORF37, CACNA2D4, |
| | | | CDHR1, CERKL, CNGA3, CNGB3, |
| | | | CNNM4, CNAT2, IFT81, KCNV2, |
| | | | PDE6C, PDE6H, POC1B, RAX2, |
| | | | RDH5, RPGRIP1, TTLL5, RetCG1, |
| | | | GUCY2E |
| Congenital Stationary Night | eye | | CABP4, CACNA1F, CACNA2D4, |
| Blindness | | | GNAT1, CPR179, GRK1, GRM6, |
| | | | LRIT3, NYX, PDE6B, RDH5, RHO, |
| | | | RLBP1, RPE65, SAG, SLC24A1, |
| | | | TRPM1, |
| Congenital Fructose Intolerance | Metabolism | | ALDOB |
| Cori's Disease (Glycogen | Various- | | AGL |
| Storage Disease Type III) | wherever | | |
| | glycogen | | |
| | accumulates, | | |
| | particularly | | |
| | liver, heart, | | |
| | skeletal muscle | | |
| Corneal clouding and dystrophy | eye | | APOA1, TGFBI, CSD2, CDGG1, |
| | | | CSD, BIGH3, CDG2, TACSTD2, |
| | | | TROP2, M1S1, VSX1, RINX, PPCD, |
| | | | PPD, KTCN, COL8A2, FECD, |
| | | | PPCD2, PIP5K3, CFD |
| Cornea plana congenital | | | KERA, CNA2 |
| Cri du chat Syndrome, also | | | Deletions involving only band 5p15.2 |
| known as 5p syndrome and cat | | | to the entire short arm of chromosome |
| cry syndrome | | | 5, e.g. CTNND2, TERT, |
| Cystic Fibrosis (CF) | Lungs and | Pancreas, liver, | CTFR, ABCC7, CF, MRP7, |
| | respiratory | digestive system, | SCNN1A, those described in |
| | system | reproductive | WO2015157070 |
| | | system, exocrine, | |
| | | glands, | |
| Diabetic nephropathy | kidney | | Gremlin, 12/15- lipoxygenase, TIM44, |
| Dent Disease (Types 1 and 2) | Kidney | | Type 1: CLCN5, Type 2: ORCL |
| Dentatorubro-Pallidoluysian | CNS, brain, | | Atrophin-1 and Atn1 |
| Atrophy (DRPLA) (aka Haw | muscle | | |
| River and Naito-Oyanagi | | | |
| Disease) | | | |
| Down Syndrome | various | | Chromosome 21 trisomy |
| Drug Addiction | Brain | | Prkce; Drd2; Drd4; ABAT; |
| | | | GRIA2; Grm5; Grin1; Htr1b; Grin2a; |
| | | | Drd3; Pdyn; Gria1 |
| Duane syndrome (Types 1, 2, | eye | | CHN1, indels on chromosomes 4 and |
| and 3, including subgroups A, B | | | 8 |
| and C). Other names for this | | | |
| condition include: Duane's | | | |
| Retraction Syndrome (or DR | | | |
| syndrome), Eye Retraction | | | |
| Syndrome, Retraction | | | |
| Syndrome, Congenital retraction | | | |
| syndrome and Stilling-Turk- | | | |
| Duane Syndrome | | | |
| Duchenne muscular dystrophy | muscle | Cardiovascular, | DMD, BMD, dystrophin gene, intron |
| (DMD) | | respiratory | flanking exon 51 of DMD gene, exon |
| | | | 51 mutations in DMD gene, see also |
| | | | WO2013163628 and U.S. Pat. Pub. |
| | | | 20130145487 |
| Edward's Syndrome | | | Complete or partial trisomy of |
| (Trisomy 18) | | | chromosome 18 |
| Ehlers-Danlos Syndrome (Types | Various | | COL5A1, COL5A2, COL1A1, |
| I-VI) | depending on | | COL3A1, TNXB, PLOD1, COL1A2, |
| | type: including | | FKBP14 and ADAMTS2 |
| | musculoskeletal, | | |
| | eye, vasculature, | | |
| | immune, and | | |
| | skin | | |
| Emery-Dreifuss muscular | muscle | | LMNA, LMN1, EMD2, FPLD, |
| dystrophy | | | CMD1A, HGPS, LGMD1B, LMNA, |
| | | | LMN1, EMD2, FPLD, CMD1A |
| Enhanced S-Cone Syndrome | eye | | NR2E3, NRL |
| Fabry's Disease | Various - | | GLA |
| | including skin, | | |
| | eyes, and | | |
| | gastrointestinal | | |
| | system, kidney, | | |
| | heart, brain, | | |
| | nervous system | | |
| Facioscapulohumeral muscular | muscles | | FSHMD1A, FSHD1A, FRG1, |
| dystrophy | | | |
| Factor H and Factor H-like 1 | blood | | HF1, CFH, HUS |
| Factor V Leiden thrombophilia | blood | | Factor V (F5) |
| and Factor V deficiency | | | |
| Factor V and Factor VII | blood | | MCFD2 |
| deficiency | | | |
| Factor VII deficiency | blood | | F7 |
| Factor X deficiency | blood | | F10 |
| Factor XI deficiency | blood | | F11 |
| Factor XII deficiency | blood | | F12, HAF |
| Factor XIIIA deficiency | blood | | F13A1, F13A |
| Factor XIIIB deficiency | blood | | F13B |
| Familial Hypercholestereolemia | Cardiovascular | | APOB, LDLR, PCSK9 |
| | system | | |
| Familial Mediterranean Fever | Various- | Heart, kidney, | MEFV |
| (FMF) also called recurrent | organs/tissues | brain/CNS, | |
| polyserositis or familial | with serous or | reproductive | |
| paroxysmal polyserositis | synovial | organs | |
| | membranes, | | |
| | skin, joints | | |
| Fanconi Anemia | Various - blood | | FANCA, FACA, FA1, FA, FAA, |
| | (anemia), | | FAAP95, FAAP90, FLJ34064, |
| | immune system, | | FANCC, FANCG, RAD51, BRCA1, |
| | cognitive, | | BRCA2, BRIP1, BACH1, FANCJ, |
| | kidneys, eyes, | | FANCB, FANCD1, FANCD2, |
| | musculoskeletal | | FANCD, FAD, FANCE, FACE, |
| | | | FANCF, FANC1, ERCC4, FANCL, |
| | | | FANCM, PALB2, RAD51C, SLX4, |
| | | | UBE2T, FANCB, XRCC9, PHF9, |
| | | | KIAA1596 |
| Fanconi Syndrome Types I | kidneys | | FRTS1, GATM |
| (Childhood onset) and II (Adult | | | |
| Onset) | | | |
| Fragile X syndrome and related | brain | | FMR1, FMR2; FXR1; FXR2; |
| disorders | | | mGLUR5 |
| Fragile XE Mental Retardation | Brain, nervous | | FMR1 |
| (aka Martin Bell syndrome) | system | | |
| Friedreich Ataxia (FRDA) | Brain, nervous | heart | FXN/X25 |
| | system | | |
| Fuchs endothelial corneal | Eye | | TCF4; COL8A2 |
| dystrophy | | | |
| Galactosemia | Carbohydrate | Various-where | GALT, GALK1, and GALE |
| | metabolism | galactose | |
| | disorder | accumulates - | |
| | | liver, brain, eyes | |
| Gastrointestinal Epithelial | | | CISH |
| Cancer, GI cancer | | | |
| Gaucher Disease (Types 1, 2, | Fat metabolism | Various-liver, | GBA |
| and 3, as well as other unusual | disorder | spleen, blood, | |
| forms that may not fit into these | | CNS, skeletal | |
| types) | | system | |
| Griscelli syndrome | | | |
| Glaucoma | eye | | MYOC, TIGR, GLC1A, JOAG, |
| | | | GPOA, OPTN, GLC1E, FIP2, HYPL, |
| | | | NRP, CYP1B1, GLC3A, OPA1, |
| | | | NTG, NPG, CYP1B1, GLC3A, those |
| | | | described in WO2015153780 |
| Glomerulo sclerosis | kidney | | CC chemokine ligand 2 |
| Glycogen Storage Diseases | Metabolism | | SLC2A2, GLUT2, G6PC, G6PT, |
| Types I-VI -See also Cori's | Diseases | | G6PT1, GAA, LAMP2, LAMPB, |
| Disease, Pompe's Disease, | | | AGL, GDE, GBE1, GYS2, PYGL, |
| McArdle's disease, Hers | | | PFKM, see also Cori's Disease, |
| Disease, and Von Gierke's | | | Pompe's Disease, McArdle's disease, |
| disease | | | Hers Disease, and Von Gierke's |
| | | | disease |
| RBC Glycolytic enzyme | blood | | any mutations in a gene for an |
| deficiency | | | enzyme in the glycolysis pathway |
| | | | including mutations in genes for |
| | | | hexokinases I and II, glucokinase, |
| | | | phosphoglucose isomerase, |
| | | | phosphofructokinase, aldolase Bm |
| | | | triosephosphate isomerease, |
| | | | glyceraldehydee-3-phosphate |
| | | | dehydrogenase, |
| | | | phosphoglycerokinase, |
| | | | phosphoglycerate mutase, enolase I, |
| | | | pyruvate kinase |
| Hartnup's disease | Malabsorption | Various- brain, | SLC6A19 |
| | disease | gastrointestinal, | |
| | | skin, | |
| Hearing Loss | ear | | NOX3, Hes5, BDNF, |
| Hemochromatosis (HH) | Iron absorption | Various-wherever | HFE and H63D |
| | regulation | iron accumulates, | |
| | disease | liver, heart, | |
| | | pancreas, joints, | |
| | | pituitary gland | |
| Hemophagocytic | blood | | PRF1, HPLH2, UNC13D, MUNC13-4, |
| lymphohistiocytosis disorders | | | HPLH3, HLH3, FHL3 |
| Hemorrhagic disorders | blood | | PI, ATT, F5 |
| Hers disease (Glycogen storage | liver | muscle | PYGL |
| disease Type VI) | | | |
| Hereditary angioedema (HAE) | | | kalikrein B1 |
| Hereditary Hemorrhagic | Skin and | | ACVRL1, ENG and SMAD4 |
| Telangiectasia (Osler-Weber- | mucous | | |
| Rendu Syndrome) | membranes | | |
| Hereditary Spherocytosis | blood | | NK1, EPB42, SLC4A1, SPTA1, and |
| | | | SPTB |
| Hereditary Persistence of Fetal | blood | | HBG1, HBG2, BCL11A, promoter |
| Hemoglobin | | | region of HBG 1 and/or 2 (in the |
| | | | CCAAT box) |
| Hemophilia (hemophilia A | blood | | A: FVIII, F8C, HEMA |
| (Classic) a B (aka Christmas | | | B: FVIX, HEMB |
| disease) and C) | | | C: F9, F11 |
| Hepatic adenoma | liver | | TCF1, HNF1A, MODY3 |
| Hepatic failure, early onset, and | liver | | SCOD1, SCO1 |
| neurologic disorder | | | |
| Hepatic lipase deficiency | liver | | LIPC |
| Hepatoblastoma, cancer and | liver | | CTNNB1, PDGFRL, PDGRL, |
| carcinomas | | | PRLTS, AXIN1, AXIN, CTNNB1, |
| | | | TP53, P53, LFS1, IGF2R, MPRI, |
| | | | MET, CASP8, MCH5 |
| Hermansky-Pudlak syndrome | Skin, eyes, | | HPS1, HPS3, HPS4, HPS5, HPS6, |
| | blood, lung, | | HPS7, DTNBP1, BLOC1, BLOC1S2, |
| | kidneys, | | BLOC3 |
| | intestine | | |
| HIV susceptibility or infection | Immune system | | IL10, CSIF, CMKBR2, CCR2, |
| | | | CMKBR5, CCCKR5 (CCR5), those |
| | | | in WO2015148670A1 |
| Holoprosencephaly (HPE) | brain | | ACVRL1, ENG, SMAD4 |
| (Alobar, Semilobar, and Lobar) | | | |
| Homocystinuria | Metabolic | Various- | CBS, MTHFR, MTR, MTRR, and |
| | disease | connective tissue, | MMADHC |
| | | muscles, CNS, | |
| | | cardiovascular | |
| | | system | |
| HPV | | | HPV16 and HPV18 E6/E7 |
| HSV1, HSV2, and related | eye | | HSV1 genes (immediate early and |
| keratitis | | | late HSV-1 genes (UL1, 1.5, 5, 6, 8, |
| | | | 9, 12, 15, 16, 18, 19, 22, 23, 26, 26.5, |
| | | | 27, 28, 29, 30, 31, 32, 33, 34, 35, 36, |
| | | | 37, 38, 42, 48, 49.5, 50, 52, 54, S6, |
| | | | RL2, RS1, those described in |
| | | | WO2015153789, WO2015153791 |
| Hunter's Syndrome (aka | Lysosomal | Various- liver, | IDS |
| Mucopolysaccharidosis type II) | storage disease | spleen, eye, joint, | |
| | | heart, brain, | |
| | | skeletal | |
| Huntington's disease (HD) and | Brain, nervous | | HD, HTT, IT15, PRNP, PRIP, JPH3, |
| HD-like disorders | system | | JP3, HDL2, TBP, SCA17, PRKCE; |
| | | | IGF1; EP300; RCOR1; PRKCZ; |
| | | | HDAC4; and TGM2, and those |
| | | | described in WO2013130824, |
| | | | WO2015089354 |
| Hurler's Syndrome (aka | Lysosomal | Various- liver, | IDUA, α-L-iduronidase |
| mucopolysaccharidosis type I H, | storage disease | spleen, eye, joint, | |
| MPS IH) | | heart, brain, | |
| | | skeletal | |
| Hurler-Scheie syndrome (aka | Lysosomal | Various- liver, | IDUA, α-L-iduronidase |
| mucopolysaccharidosis type I H- | storage disease | spleen, eye, joint, | |
| S, MPS I H-S) | | heart, brain, | |
| | | skeletal | |
| hyaluronidase deficiency (aka | Soft and | | HYAL1 |
| MPS IX) | connective | | |
| | tissues | | |
| Hyper IgM syndrome | Immune system | | CD40L |
| Hyper- tension caused renal | kidney | | Mineral corticoid receptor |
| damage | | | |
| Immunodeficiencies | Immune System | | CD3E, CD3G, AICDA, AID, |
| | | | HIGM2, TNFRSF5, CD40, UNG, |
| | | | DGU, HIGM4, TNFSF5, CD40LG, |
| | | | HIGM1, IGM, FOXP3, IPEX, AIID, |
| | | | XPID, PIDX, TNFRSF14B, TACI |
| Inborn errors of metabolism: | Metabolism | Various organs | See also: Carbohydrate metabolism |
| including urea cycle disorders, | diseases, liver | and cells | disorders (e.g. galactosemia), Amino |
| organic acidemias), fatty acid | | | acid Metabolism disorders (e.g. |
| oxidation defects, amino | | | phenylketonuria), Fatty acid |
| acidopathies, carbohydrate | | | metabolism (e.g. MCAD deficiency), |
| disorders, mitochondrial | | | Urea Cycle disorders (e.g. |
| disorders | | | Citrullinemia), Organic acidemias |
| | | | (e.g. Maple Syrup Urine disease), |
| | | | Mitochondrial disorders (e.g. |
| | | | MELAS), peroxisomal disorders (e.g. |
| | | | Zellweger syndrome) |
| Inflammation | Various | | IL-10; IL-1 (IL-1a; IL-1b); IL-13; IL- |
| | | | 17 (IL-17a (CTLA8); IL- |
| | | | 17b; IL-17c; IL-17d; IL-17f); II-23; |
| | | | Cx3cr1; ptpn22; TNFa; |
| | | | NOD2/CARD15 for IBD; IL-6; IL-12 |
| | | | (IL-12a; IL-12b); |
| | | | CTLA4; Cx3cl1 |
| Inflammatory Bowel Diseases | Gastrointestinal | Joints, skin | NOD2, IRGM, LRRK2, ATG5, |
| (e.g. Ulcerative Colitis and | | | ATG16L1, IRGM, GATM, ECM1, |
| Chron's Disease) | | | CDH1, LAMB1, HNF4A, GNA12, |
| | | | IL10, CARD9/15. CCR6, IL2RA, |
| | | | MST1, TNFSF15, REL, STAT3, |
| | | | IL23R, IL12B, FUT2 |
| Interstitial renal fibrosis | kidney | | TGF-β type II receptor |
| Job's Syndrome (aka Hyper IgE | Immune System | | STAT3, DOCK8 |
| Syndrome) | | | |
| Juvenile Retinoschisis | eye | | RS1, XLRS1 |
| Kabuki Syndrome 1 | | | MLL4, KMT2D |
| Kennedy Disease (aka | Muscles, brain, | | SBMA/SMAX1/AR |
| Spinobulbar Muscular Atrophy) | nervous system | | |
| Klinefelter syndrome | Various- | | Extra X chromosome in males |
| | particularly | | |
| | those involved | | |
| | in development | | |
| | of male | | |
| | characteristics | | |
| Lafora Disease | Brain, CNS | | EMP2A and EMP2B |
| Leber Congenital Amaurosis | eye | | CRB1, RP12, CORD2, CRD, CRX, |
| | | | IMPDH1, OTX2, AIPL1, CABP4, |
| | | | CCT2, CEP290, CLUAP1, CRB1, |
| | | | CRX, DTHD1, GDF6, GUCY2D, |
| | | | IFT140, IQCB1, KCNJ13, LCA5, |
| | | | LRAT, NMNAT1, PRPH2, RD3, |
| | | | RDH12, RPE65, RP20, RPGRIP1, |
| | | | SPATA7, TULP1, LCA1, LCA4, |
| | | | GUC2D, CORD6, LCA3, |
| Lesch-Nyhan Syndrome | Metabolism | Various - joints, | HPRT1 |
| | disease | cognitive, brain, | |
| | | nervous system | |
| Leukocyte deficiencies and | blood | | ITGB2, CD18, LCAMB, LAD, |
| disorders | | | EIF2B1, EIF2BA, EIF2B2, EIF2B3, |
| | | | EIF2B5, LVWM, CACH, CLE, |
| | | | EIF2B4 |
| Leukemia | Blood | | TAL1, TCL5, SCL, TAL2, FLT3, |
| | | | NBS1, NBS, ZNFN1A1, IK1, LYF1, |
| | | | HOXD4, HOX4B, BCR, CML, PHL, |
| | | | ALL, ARNT, KRAS2, RASK2, |
| | | | GMPS, AF10, ARHGEF12, LARG, |
| | | | KIAA0382, CALM, CLTH, CEBPA, |
| | | | CEBP, CHIC2, BTL, FLT3, KIT, |
| | | | PBT, LPP, NPM1, NUP214, D9S46E, |
| | | | CAN, CAIN, RUNX1, CBFA2, |
| | | | AML1, WHSC1L1, NSD3, FLT3, |
| | | | AF1Q, NPM1, NUMA1, ZNF145, |
| | | | PLZF, PML, MYL, STAT5B, AF10, |
| | | | CALM, CLTH, ARL11, ARLTS1, |
| | | | P2RX7, P2X7, BCR, CML, PHL, |
| | | | ALL, GRAF, NF1, VRNF, WSS, |
| | | | NFNS, PTPN11, PTP2C, SHP2, NS1, |
| | | | BCL2, CCND1, PRAD1, BCL1, |
| | | | TCRA, GATA1, GF1, ERYF1, |
| | | | NFE1, ABL1, NQO1, DIA4, |
| | | | NMOR1, NUP214, D9S46E, CAN, |
| | | | CAIN |
| Limb-girdle muscular dystrophy | muscle | | LGMD |
| diseases | | | |
| Lowe syndrome | brain, eyes, | | OCRL |
| | kidneys | | |
| Lupus glomerulo- nephritis | kidney | | MAPK1 |
| Machado-Joseph's Disease (also | Brain, CNS, | | ATX3 |
| known as Spinocerebellar | muscle | | |
| ataxia Type 3) | | | |
| Macular degeneration | eye | | ABC4, CBC1, CHM1, APOE, |
| | | | C1QTNF5, C2, C3, CCL2, CCR2, |
| | | | CD36, CFB, CFH, CFHR1, CFHR3, |
| | | | CNGB3, CP, CRP, CST3, CTSD, |
| | | | CX3CR1, ELOVL4, ERCC6, |
| | | | FBLN5, FBLN6, FSCN2, HMCN1, |
| | | | HTRA1, IL6, IL8, PLEKHA1, |
| | | | PROM1, PRPH2, RPGR, |
| | | | SERPING1, TCOF1, TIMP3, TLR3 |
| Macular Dystrophy | eye | | BEST1, C1QTNF5, CTNNA1, |
| | | | EFEMP1, ELOVL4, FSCN2, |
| | | | GUCA1B, HMCN1, IMPG1, OTX2, |
| | | | PRDM13, PROM1, PRPH2, RP1L1, |
| | | | TIMP3, ABCA4, CFH, DRAM2, |
| | | | IMG1, MFSD8, ADMD, STGD2, |
| | | | STGD3, RDS, RP7, PRPH, AVMD, |
| | | | AOFMD, VMD2 |
| Malattia Leventinesse | eye | | EFEMP1, FBLN3 |
| Maple Syrup Urine Disease | Metabolism | | BCKDHA, BCKDHB, and DBT |
| | disease | | |
| Marfan syndrome | Connective | Musculoskeletal | FBN1 |
| | tissue | | |
| Maroteaux-Lamy Syndrome | Musculoskeletal | Liver, spleen | ARSB |
| (aka MPS VI) | system, nervous | | |
| | system | | |
| McArdle's Disease (Glycogen | Glycogen | muscle | PYGM |
| Storage Disease Type V) | storage disease | | |
| Medullary cystic kidney disease | kidney | | UMOD, HNFJ, FJHN, MCKD2, |
| | | | ADMCKD2 |
| Metachromatic leukodystrophy | Lysosomal | Nervous system | ARSA |
| | storage disease | | |
| Methylmalonic acidemia | Metabolism | | MMAA, MMAB, MUT, MMACHC, |
| (MMA) | disease | | MMADHC, LMBRD1 |
| Morquio Syndrome (aka MPS | Connective | heart | GALNS |
| IV A and B) | tissue, skin, | | |
| | bone, eyes | | |
| Mucopolysaccharidosis diseases | Lysosomal | | See also Hurler/Scheie syndrome, |
| (Types I H/S, I H, II, III A B and | storage disease - | | Hurler disease, Sanfillipo syndrome, |
| C, I S, IVA and B, IX, VII, and | affects various | | Scheie syndrome, Morquio syndrome, |
| VI) | organs/tissues | | hyaluronidase deficiency, Sly |
| | | | syndrome, and Maroteaux-Lamy |
| | | | syndrome |
| Muscular Atrophy | muscle | | VAPB, VAPC, ALS8, SMN1, SMA1, |
| | | | SMA2, SMA3, SMA4, BSCL2, |
| | | | SPG17, GARS, SMAD1, CMT2D, |
| | | | HEXB, IGHMBP2, SMUBP2, |
| | | | CATF1, SMARD1 |
| Muscular dystrophy | muscle | | FKRP, MDC1C, LGMD2I, LAMA2, |
| | | | LAMM, LARGE, KIAA0609, |
| | | | MDC1D, FCMD, TTID, MYOT, |
| | | | CAPN3, CANP3, DYSF, LGMD2B, |
| | | | SGCG, LGMD2C, DMDA1, SCG3, |
| | | | SGCA, ADL, DAG2, LGMD2D, |
| | | | DMDA2, SGCB, LGMD2E, SGCD, |
| | | | SGD, LGMD2F, CMD1L, TCAP, |
| | | | LGMD2G, CMD1N, TRIM32, |
| | | | HT2A, LGMD2H, FKRP, MDC1C, |
| | | | LGMD2I, TTN, CMD1G, TMD, |
| | | | LGMD2J, POMT1, CAV3, |
| | | | LGMD1C, SEPN1, SELN, RSMD1, |
| | | | PLEC1, PLTN, EBS1 |
| Myotonic dystrophy (Type 1 and | Muscles | Eyes, heart, | CNBP (Type 2) and DMPK (Type 1) |
| Type 2) | | endocrine | |
| Neoplasia | | | PTEN; ATM; ATR; EGFR; ERBB2; |
| | | | ERBB3; ERBB4; |
| | | | Notch1; Notch2; Notch3; Notch4; |
| | | | AKT; AKT2; AKT3; HIF; |
| | | | HIF1a; HIF3a; Met; HRG; Bcl2; |
| | | | PPAR alpha; PPAR |
| | | | gamma; WT1 (Wilms Tumor); FGF |
| | | | Receptor Family |
| | | | members (5 members: 1, 2, 3, 4, 5); |
| | | | CDKN2a; APC; RB |
| | | | (retinoblastoma); MEN1; VHL; |
| | | | BRCA1; BRCA2; AR |
| | | | (Androgen Receptor); TSG101; IGF; |
| | | | IGF Receptor; Igf1 (4 |
| | | | variants); Igf2 (3 variants); Igf 1 |
| | | | Receptor, Igf 2 Receptor; |
| | | | Bax; Bcl2; caspases family (9 members: |
| | | | 1, 2, 3, 4, 6, 7, 8, 9, 12); Kras; Apc |
| Neurofibromatosis (NF) (NF1, | brain, spinal | | NF1, NF2 |
| formerly Recklinghausen's NF, | cord, nerves, | | |
| and NF2) | and skin | | |
| Niemann-Pick Lipidosis (Types | Lysosomal | Various- where | Types A and B: SMPD1; Type C: |
| A, B, and C) | Storage Disease | sphingomyelin | NPC1 or NPC2 |
| | | accumulates, | |
| | | particularly | |
| | | spleen, liver, | |
| | | blood, CNS | |
| Noonan Syndrome | Various - | | PTPN11, SOS1, RAF1 and KRAS |
| | musculoskeletal, | | |
| | heart, eyes, | | |
| | reproductive | | |
| | organs, blood | | |
| Norrie Disease or X-linked | eye | | NDP |
| Familial Exudative | | | |
| Vitreoretinopathy | | | |
| North Carolina Macular | eye | | MCDR1 |
| Dystrophy | | | |
| Osteogenesis imperfecta (OI) | bones, | | COL1A1, COL1A2, CRTAP, P3H |
| (Types I, II, III, IV, V, VI, VII) | musculoskeletal | | |
| Osteopetrosis | bones | | LRP5, BMND1, LRP7, LR3, OPPG, |
| | | | VBCH2, CLCN7, CLC7, OPTA2, |
| | | | OSTM1, GL, TCIRG1, TIRC7, |
| | | | OC116, OPTB1 |
| Patau's Syndrome | Brain, heart, | | Additional copy of chromosome 13 |
| (Trisomy 13) | skeletal system | | |
| Parkinson's disease (PD) | Brain, nervous | | SNCA (PARK1), UCHL1 (PARK 5), |
| | system | | and LRRK2 (PARK8), (PARK3), |
| | | | PARK2, PARK4, PARK7 (PARK7), |
| | | | PINK1 (PARK6); x-Synuclein, DJ-1, |
| | | | Parkin, NR4A2, NURR1, NOT, |
| | | | TINUR, SNCAIP, TBP, SCA17, |
| | | | NCAP, PRKN, PDJ, DBH, NDUFV2 |
| Pattern Dystrophy of the RPE | eye | | RDS/peripherin |
| Phenylketonuria (PKU) | Metabolism | Various due to | PAH, PKU1, QDPR, DHPR, PTS |
| | disorder | build-up of | |
| | | phenylalanine, | |
| | | phenyl ketones in | |
| | | tissues and CNS | |
| Polycystic kidney and hepatic | Kidney, liver | | FCYT, PKHD1, ARPKD, PKD1, |
| disease | | | PKD2, PKD4, PKDTS, PRKCSH, |
| | | | G19P1, PCLD, SEC63 |
| Pompe's Disease | Glycogen | Various - heart, | GAA |
| | storage disease | liver, spleen | |
| Porphyria (actually refers to a | Various- | | ALAD, ALAS2, CPOX, FECH, |
| group of different diseases all | wherever heme | | HMBS, PPOX, UROD, or UROS |
| having a specific heme | precursors | | |
| production process abnormality) | accumulate | | |
| posterior polymorphous corneal | eyes | | TCF4; COL8A2 |
| dystrophy | | | |
| Primary Hyperoxaluria (e.g. type | Various - eyes, | | LDHA (lactate dehydrogenase A) and |
| 1) | heart, kidneys, | | hydroxyacid oxidase 1 (HAO1) |
| | skeletal system | | |
| Primary Open Angle Glaucoma | eyes | | MYOC |
| (POAG) | | | |
| Primary sclerosing cholangitis | Liver, | | TCF4; COL8A2 |
| | gallbladder | | |
| Progeria (also called | All | | LMNA |
| Hutchinson-Gilford progeria | | | |
| syndrome) | | | |
| Prader-Willi Syndrome | Musculoskeletal | | Deletion of region of short arm of |
| | system, brain, | | chromosome 15, including UBE3A |
| | reproductive | | |
| | and endocrine | | |
| | system | | |
| Prostate Cancer | prostate | | HOXB13, MSMB, GPRC6A, TP53 |
| Pyruvate Dehydrogenase | Brain, nervous | | PDHA1 |
| Deficiency | system | | |
| Kidney/Renal carcinoma | kidney | | RLIP76, VEGF |
| Rett Syndrome | Brain | | MECP2, RTT, PPMX, MRX16, |
| | | | MRX79, CDKL5, STK9, MECP2, |
| | | | RTT, PPMX, MRX16, MRX79, x- |
| | | | Synuclein, DJ-1 |
| Retinitis pigmentosa (RP) | eye | | ADIPOR1, ABCA4, AGBL5, |
| | | | ARHGEF18, ARL2BP, ARL3, |
| | | | ARL6, BEST1, BBS1, BBS2, |
| | | | C2ORF71, C8ORF37, CA4, CERKL, |
| | | | CLRN1, CNGA1, CMGB1, CRB1, |
| | | | CRX, CYP4V2, DHDDS, DHX38, |
| | | | EMC1, EYS, FAM161A, FSCN2, |
| | | | GPR125, GUCA1B, HK1, HPRPF3, |
| | | | HGSNAT, IDH3B, IMPDH1, |
| | | | IMPG2, IFT140, IFT172, KLHL7, |
| | | | KIAA1549, KIZ, LRAT, MAK, |
| | | | MERTK, MVK, NEK2, NUROD1, |
| | | | NR2E3, NRL, OFD1, PDE6A, |
| | | | PDE6B, PDE6G, POMGNT1, PRCD, |
| | | | PROM1, PRPF3, PRPF4, PRPF6, |
| | | | PRPF8, PRPF31, PRPH2, RPB3, |
| | | | RDH12, REEP6, RP39, RGR, RHO, |
| | | | RLBP1, ROM1, RP1, RP1L1, RPY, |
| | | | RP2, RP9, RPE65, RPGR, SAMD11, |
| | | | SAG, SEMA4A, SLC7A14, |
| | | | SNRNP200, SPP2, SPATA7, |
| | | | TRNT1, TOPORS, TTC8, TULP1, |
| | | | USH2A, ZFN408, ZNF513, see also |
| | | | 20120204282 |
| Scheie syndrome (also known as | Various- liver, | | IDUA, α-L-iduronidase |
| mucopolysaccharidosis type I | spleen, eye, | | |
| S(MPS I-S)) | joint, heart, | | |
| | brain, skeletal | | |
| Schizophrenia | Brain | | Neuregulin1 (Nrg1); Erb4 (receptor |
| | | | for Neuregulin); |
| | | | Complexin1 (Cplx1); Tph1 |
| | | | Tryptophan hydroxylase; Tph2 |
| | | | Tryptophan hydroxylase 2; Neurexin |
| | | | 1; GSK3; GSK3a; |
| | | | GSK3b; 5-HTT (Slc6a4); COMT; |
| | | | DRD (Drd1a); SLC6A3; DAOA; |
| | | | DTNBP1; Dao (Dao1); TCF4; |
| | | | COL8A2 |
| Secretase Related Disorders | Various | | APH-1 (alpha and beta); PSEN1; |
| | | | NCSTN; PEN-2; Nos1, Parp1, Nat1, |
| | | | Nat2, CTSB, APP, APH1B, PSEN2, |
| | | | PSENEN, BACE1, ITM2B, CTSD, |
| | | | NOTCH1, TNF, INS, DYT10, |
| | | | ADAM17, APOE, ACE, STN, TP53, |
| | | | IL6, NGFR, IL1B, ACHE, CTNNB1, |
| | | | IGF1, IFNG, NRG1, CASP3, |
| | | | MAPK1, CDH1, APBB1, HMGCR, |
| | | | CREB1, PTGS2, HES1, CAT, |
| | | | TGFB1, ENO2, ERBB4, TRAPPC10, |
| | | | MAOB, NGF, MMP12, JAG1, |
| | | | CD40LG, PPARG, FGF2, LRP1, |
| | | | NOTCH4, MAPK8, PREP, |
| | | | NOTCH3, PRNP, CTSG, EGF, REN, |
| | | | CD44, SELP, GHR, ADCYAP1, |
| | | | INSR, GFAP, MMP3, MAPK10, |
| | | | SP1, MYC, CTSE, PPARA, JUN, |
| | | | TIMP1, IL5, IL1A, MMP9, HTR4, |
| | | | HSPG2, KRAS, CYCS, SMG1, |
| | | | IL1R1, PROK1, MAPK3, NTRK1, |
| | | | IL13, MME, TKT, CXCR2, CHRM1, |
| | | | ATXN1, PAWR, NOTCJ2, M6PR, |
| | | | CYP46A1, CSNK1D, MAPK14, |
| | | | PRG2, PRKCA, L1 CAM, CD40, |
| | | | NR1I2, JAG2, CTNND1, CMA1, |
| | | | SORT1, DLK1, THEM4, JUP, CD46, |
| | | | CCL11, CAV3, RNASE3, HSPA8, |
| | | | CASP9, CYP3A4, CCR3, TFAP2A, |
| | | | SCP2, CDK4, JOF1A, TCF7L2, |
| | | | B3GALTL, MDM2, RELA, CASP7, |
| | | | IDE, FANP4, CASK, ADCYAP1R1, |
| | | | ATF4, PDGFA, C21ORF33, SCG5, |
| | | | RMF123, NKFB1, ERBB2, CAV1, |
| | | | MMP7, TGFA, RXRA, STX1A, |
| | | | PSMC4, P2RY2, TNFRSF21, DLG1, |
| | | | NUMBL, SPN, PLSCR1, UBQLN2, |
| | | | UBQLN1, PCSK7, SPON1, SILV, |
| | | | QPCT, HESS, GCC1 |
| Selective IgA Deficiency | Immune system | | Type 1: MSH5; Type 2: TNFRSF13B |
| Severe Combined | Immune system | | JAK3, JAKL, DCLRE1C, ARTEMIS, |
| Immunodeficiency (SCID) and | | | SCIDA, RAG1, RAG2, ADA, |
| SCID-X1, and ADA-SCID | | | PTPRC, CD45, LCA, IL7R, CD3D, |
| | | | T3D, IL2RG, SCIDX1, SCIDX, |
| | | | IMD4, those identified in U.S. Pat. |
| | | | App. Pub. 20110225664, |
| | | | 20110091441, 20100229252, |
| | | | 20090271881 and 20090222937; |
| Sickle cell disease | blood | | HBB, BCL11A, BCL11Ae, cis- |
| | | | regulatory elements of the B-globin |
| | | | locus, HBG 1/2 promoter, HBG distal |
| | | | CCAAT box region between −92 and −130 |
| | | | of the HBG Transcription Start |
| | | | Site, those described in |
| | | | WO2015148863, WO 2013/126794, |
| | | | U.S. Pat. Pub. 20110182867 |
| Sly Syndrome (aka MPS VII) | | | GUSB |
| Spinocerebellar Ataxias (SCA | | | ATXN1, ATXN2, ATX3 |
| types 1, 2, 3, 6, 7, 8, 12 and 17) | | | |
| Sorsby Fundus Dystrophy | eye | | TIMP3 |
| Stargardt disease | eye | | ABCR, ELOVL4, ABCA4, PROM1 |
| Tay-Sachs Disease | Lysosomal | Various - CNS, | HEX-A |
| | Storage disease | brain, eye | |
| Thalassemia (Alpha, Beta, | blood | | HBA1, HBA2 (Alpha), HBB (Beta), |
| Delta) | | | HBB and HBD (delta), LCRB, |
| | | | BCL11A, BCL11Ae, cis-regulatory |
| | | | elements of the B-globin locus, HBG |
| | | | 1/2 promoter, those described in |
| | | | WO2015148860, U.S. Pat. Pub. |
| | | | 20110182867, 2015/148860 |
| Thymic Aplasia (DiGeorge | Immune system, | | deletion of 30 to 40 genes in the |
| Syndrome; 22q11.2 deletion | thymus | | middle of chromosome 22 at |
| syndrome) | | | a location known as 22q11.2, |
| | | | including TBX1, DGCR8 |
| Transthyretin amyloidosis | liver | | TTR (transthyretin) |
| (ATTR) | | | |
| trimethylaminuria | Metabolism | | FMO3 |
| | disease | | |
| Trinucleotide Repeat Disorders | Various | | HTT; SBMA/SMAX1/AR; |
| (generally) | | | FXN/X25 ATX3; |
| | | | ATXN1; ATXN2; |
| | | | DMPK; Atrophin-1 and Atn1 |
| | | | (DRPLA Dx); CBP (Creb-BP - global |
| | | | instability); VLDLR; Atxn7; Atxn10; |
| | | | FEN1, TNRC6A, PABPN1, JPH3, |
| | | | MED15, ATXN1, ATXN3, TBP, |
| | | | CACNA1A, ATXN80S, PPP2R2B, |
| | | | ATXN7, TNRC6B, TNRC6C, |
| | | | CELF3, MAB21L1, MSH2, |
| | | | TMEM185A, SIX5, CNPY3, RAXE, |
| | | | GNB2, RPL14, ATXN8, ISR, TTR, |
| | | | EP400, GIGYF2, OGG1, STC1, |
| | | | CNDP1, C10ORF2, MAML3, DKC1, |
| | | | PAXIP1, CASK, MAPT, SP1, POLG, |
| | | | AFF2, THBS1, TP53, ESR1, |
| | | | CGGBP1, ABT1, KLK3, PRNP, |
| | | | JUN, KCNN3, BAX, FRAXA, |
| | | | KBTBD10, MBNL1, RAD51, |
| | | | NCOA3, ERDA1, TSC1, COMP, |
| | | | GGLC, RRAD, MSH3, DRD2, |
| | | | CD44, CTCF, CCND1, CLSPN, |
| | | | MEF2A, PTPRU, GAPDH, TRIM22, |
| | | | WT1, AHR, GPX1, TPMT, NDP, |
| | | | ARX, TYR, EGR1, UNG, NUMBL, |
| | | | FABP2, EN2, CRYGC, SRP14, |
| | | | CRYGB, PDCD1, HOXA1, |
| | | | ATXN2L, PMS2, GLA, CBL, FTH1, |
| | | | IL12RB2, OTX2, HOXA5, POLG2, |
| | | | DLX2, AHRR, MANF, RMEM158, |
| | | | see also 20110016540 |
| Turner's Syndrome (XO) | Various - | | Monosomy X |
| | reproductive | | |
| | organs, and sex | | |
| | characteristics, | | |
| | vasculature | | |
| Tuberous Sclerosis | CNS, heart, | | TSC1, TSC2 |
| | kidneys | | |
| Usher syndrome (Types I, II, and | Ears, eyes | | ABHD12, CDH23, CIB2, CLRN1, |
| III) | | | DFNB31, GPR98, HARS, MYO7A, |
| | | | PCDH15, USH1C, USH1G, USH2A, |
| | | | USH11A, those described in |
| | | | WO2015134812A1 |
| Velocardiofacial syndrome (aka | Various - | | Many genes are deleted, COM, |
| 22q11.2 deletion syndrome, | skeletal, heart, | | TBX1, and other are associated with |
| DiGeorge syndrome, | kidney, immune | | symptoms |
| conotruncal anomaly face | system, brain | | |
| syndrome (CTAF), autosomal | | | |
| dominant Opitz G/BB syndrome | | | |
| or Cayler cardiofacial syndrome) | | | |
| Von Gierke's Disease (Glycogen | Glycogen | Various - liver, | G6PC and SLC37A4 |
| Storage Disease type I) | Storage disease | kidney | |
| Von Hippel-Lindau Syndrome | Various - cell | CNS, Kidney, | VHL |
| | growth | Eye, visceral | |
| | regulation | organs | |
| | disorder | | |
| Von Willebrand Disease (Types | blood | | VWF |
| I, II and III) | | | |
| Wilson Disease | Various - | Liver, brains, | ATP7B |
| | Copper Storage | eyes, other tissues | |
| | Disease | where copper | |
| | | builds up | |
| Wiskott-Aldrich Syndrome | Immune System | | WAS |
| Xeroderma Pigmentosum | Skin | Nervous system | POLH |
| XXX Syndrome | Endocrine, brain | | X chromosome trisomy |

[0822] In one embodiment, the compositions, systems, or components thereof can be used treat or prevent a disease in a subject by modifying one or more genes associated with one or more cellular functions, such as any one or more of those in Table 7. In one embodiment, the disease is a genetic disease or disorder. In some of embodiments, the composition, system, or component thereof can modify one or more genes or polynucleotides associated with one or more genetic diseases such as any set forth in Table 7.

TABLE 7
Exemplary Genes controlling Cellular Functions

| CELLULAR FUNCTION | GENES |
|---|---|
| PI3K/AKT Signaling | PRKCE; ITGAM; ITGA5; IRAK1; PRKAA2; EIF2AK2; PTEN; EIF4E; |
| | PRKCZ; GRK6; MAPK1; TSC1; PLK1; AKT2; IKBKB; PIK3CA; CDK8; |
| | CDKN1B; NFKB2; BCL2; PIK3CB; PPP2R1A; MAPK8; BCL2L1; MAPK3; |
| | TSC2; |
| | ITGA1; KRAS; EIF4EBP1; RELA; PRKCD; NOS3; |
| | PRKAA1; MAPK9; CDK2; PPP2CA; PIM1; ITGB7; |
| | YWHAZ; ILK; TP53; RAF1; IKBKG; RELB; DYRK1A; |
| | CDKN1A; ITGB1; MAP2K2; JAK1; AKT1; JAK2; PIK3R1; |
| | CHUK; PDPK1; PPP2R5C; CTNNB1; MAP2K1; NFKB1; |
| | PAK3; ITGB3; CCND1; GSK3A; FRAP1; SFN; ITGA2; |
| | TTK; CSNK1A1; BRAF; GSK3B; AKT3; FOXO1; SGK; |
| | HSP90AA1; RPS6KB1 |
| ERK/MAPK Signaling | PRKCE; ITGAM; ITGA5; HSPB1; IRAK1; PRKAA2; |
| | EIF2AK2; RAC1; RAP1A; TLN1; EIF4E; ELK1; GRK6; |
| | MAPK1; RAC2; PLK1; AKT2; PIK3CA; CDK8; CREB1; |
| | PRKCI; PTK2; FOS; RPS6KA4; PIK3CB; PPP2R1A; |
| | PIK3C3; MAPK8; MAPK3; ITGA1; ETS1; KRAS; MYCN; |
| | EIF4EBP1; PPARG; PRKCD; PRKAA1; MAPK9; SRC; |
| | CDK2; PPP2CA; PIM1; PIK3C2A; ITGB7; YWHAZ; |
| | PPP1CC; KSR1; PXN; RAF1; FYN; DYRK1A; ITGB1; |
| | MAP2K2; PAK4; PIK3R1; STAT3; PPP2R5C; MAP2K1; |
| | PAK3; ITGB3; ESR1; ITGA2; MYC; TTK; CSNK1A1; |
| | CRKL; BRAF; ATF4; PRKCA; SRF; STAT1; SGK |
| Glucocorticoid Receptor | RAC1; TAF4B; EP300; SMAD2; TRAF6; PCAF; ELK1; |
| Signaling | MAPK1; SMAD3; AKT2; IKBKB; NCOR2; UBE2I; |
| | PIK3CA; CREB1; FOS; HSPA5; NFKB2; BCL2; |
| | MAP3K14; STAT5B; PIK3CB; PIK3C3; MAPK8; BCL2L1; |
| | MAPK3; TSC22D3; MAPK10; NRIP1; KRAS; MAPK13; |
| | RELA; STAT5A; MAPK9; NOS2A; PBX1; NR3C1; |
| | PIK3C2A; CDKN1C; TRAF2; SERPINE1; NCOA3; |
| | MAPK14; TNF; RAF1; IKBKG; MAP3K7; CREBBP; |
| | CDKN1A; MAP2K2; JAK1; IL8; NCOA2; AKT1; JAK2; |
| | PIK3R1; CHUK; STAT3; MAP2K1; NFKB1; TGFBR1; |
| | ESR1; SMAD4; CEBPB; JUN; AR; AKT3; CCL2; MMP1; |
| | STAT1; IL6; HSP90AA1 |
| Axonal Guidance Signaling | PRKCE; ITGAM; ROCK1; ITGA5; CXCR4; ADAM12; |
| | IGF1; RAC1; RAP1A; EIF4E; PRKCZ; NRP1; NTRK2; |
| | ARHGEF7; SMO; ROCK2; MAPK1; PGF; RAC2; |
| | PTPN11; GNAS; AKT2; PIK3CA; ERBB2; PRKCI; PTK2; |
| | CFL1; GNAQ; PIK3CB; CXCL12; PIK3C3; WNT11; |
| | PRKD1; GNB2L1; ABL1; MAPK3; ITGA1; KRAS; RHOA; |
| | PRKCD; PIK3C2A; ITGB7; GLI2; PXN; VASP; RAF1; |
| | FYN; ITGB1; MAP2K2; PAK4; ADAM17; AKT1; PIK3R1; |
| | GLI1; WNT5A; ADAM10; MAP2K1; PAK3; ITGB3; |
| | CDC42; VEGFA; ITGA2; EPHA8; CRKL; RND1; GSK3B; |
| | AKT3; PRKCA |
| Ephrin Receptor Signaling | PRKCE; ITGAM; ROCK1; ITGA5; CXCR4; IRAK1; |
| Actin Cytoskeleton | PRKAA2; EIF2AK2; RAC1; RAP1A; GRK6; ROCK2; |
| Signaling | MAPK1; PGF; RAC2; PTPN11; GNAS; PLK1; AKT2; |
| | DOK1; CDK8; CREB1; PTK2; CFL1; GNAQ; MAP3K14; |
| | CXCL12; MAPK8; GNB2L1; ABL1; MAPK3; ITGA1; |
| | KRAS; RHOA; PRKCD; PRKAA1; MAPK9; SRC; CDK2; |
| | PIM1; ITGB7; PXN; RAF1; FYN; DYRK1A; ITGB1; |
| | MAP2K2; PAK4; AKT1; JAK2; STAT3; ADAM10; |
| | MAP2K1; PAK3; ITGB3; CDC42; VEGFA; ITGA2; |
| | EPHA8; TTK; CSNK1A1; CRKL; BRAF; PTPN13; ATF4; |
| | AKT3; SGK |
| | ACTN4; PRKCE; ITGAM; ROCK1; ITGA5; IRAK1; |
| | PRKAA2; EIF2AK2; RAC1; INS; ARHGEF7; GRK6; |
| | ROCK2; MAPK1; RAC2; PLK1; AKT2; PIK3CA; CDK8; |
| | PTK2; CFL1; PIK3CB; MYH9; DIAPH1; PIK3C3; MAPK8; |
| | F2R; MAPK3; SLC9A1; ITGA1; KRAS; RHOA; PRKCD; |
| | PRKAA1; MAPK9; CDK2; PIM1; PIK3C2A; ITGB7; |
| | PPP1CC; PXN; VIL2; RAF1; GSN; DYRK1A; ITGB1; |
| | MAP2K2; PAK4; PIP5K1A; PIK3R1; MAP2K1; PAK3; |
| | ITGB3; CDC42; APC; ITGA2; TTK; CSNK1A1; CRKL; |
| | BRAF; VAV3; SGK |
| Huntington's Disease | PRKCE; IGF1; EP300; RCOR1; PRKCZ; HDAC4; TGM2; |
| Signaling | MAPK1; CAPNS1; AKT2; EGFR; NCOR2; SP1; CAPN2; |
| | PIK3CA; HDAC5; CREB1; PRKCI; HSPA5; REST; |
| | GNAQ; PIK3CB; PIK3C3; MAPK8; IGF1R; PRKD1; |
| | GNB2L1; BCL2L1; CAPN1; MAPK3; CASP8; HDAC2; |
| | HDAC7A; PRKCD; HDAC11; MAPK9; HDAC9; PIK3C2A; |
| | HDAC3; TP53; CASP9; CREBBP; AKT1; PIK3R1; |
| | PDPK1; CASP1; APAF1; FRAP1; CASP2; JUN; BAX; |
| | ATF4; AKT3; PRKCA; CLTC; SGK; HDAC6; CASP3 |
| Apoptosis Signaling | PRKCE; ROCK1; BID; IRAK1; PRKAA2; EIF2AK2; BAK1; |
| | BIRC4; GRK6; MAPK1; CAPNS1; PLK1; AKT2; IKBKB; |
| | CAPN2; CDK8; FAS; NFKB2; BCL2; MAP3K14; MAPK8; |
| | BCL2L1; CAPN1; MAPK3; CASP8; KRAS; RELA; |
| | PRKCD; PRKAA1; MAPK9; CDK2; PIM1; TP53; TNF; |
| | RAF1; IKBKG; RELB; CASP9; DYRK1A; MAP2K2; |
| | CHUK; APAF1; MAP2K1; NFKB1; PAK3; LMNA; CASP2; |
| | BIRC2; TTK; CSNK1A1; BRAF; BAX; PRKCA; SGK; |
| | CASP3; BIRC3; PARP1 |
| B Cell Receptor Signaling | RAC1; PTEN; LYN; ELK1; MAPK1; RAC2; PTPN11; |
| | AKT2; IKBKB; PIK3CA; CREB1; SYK; NFKB2; CAMK2A; |
| | MAP3K14; PIK3CB; PIK3C3; MAPK8; BCL2L1; ABL1; |
| | MAPK3; ETS1; KRAS; MAPK13; RELA; PTPN6; MAPK9; |
| | EGR1; PIK3C2A; BTK; MAPK14; RAF1; IKBKG; RELB; |
| | MAP3K7; MAP2K2; AKT1; PIK3R1; CHUK; MAP2K1; |
| | NFKB1; CDC42; GSK3A; FRAP1; BCL6; BCL10; JUN; |
| | GSK3B; ATF4; AKT3; VAV3; RPS6KB1 |
| Leukocyte Extravasation | ACTN4; CD44; PRKCE; ITGAM; ROCK1; CXCR4; CYBA; |
| Signaling | RAC1; RAP1A; PRKCZ; ROCK2; RAC2; PTPN11; |
| | MMP14; PIK3CA; PRKCI; PTK2; PIK3CB; CXCL12; |
| | PIK3C3; MAPK8; PRKD1; ABL1; MAPK10; CYBB; |
| | MAPK13; RHOA; PRKCD; MAPK9; SRC; PIK3C2A; BTK; |
| | MAPK14; NOX1; PXN; VIL2; VASP; ITGB1; MAP2K2; |
| | CTNND1; PIK3R1; CTNNB1; CLDN1; CDC42; F11R; ITK; |
| | CRKL; VAV3; CTTN; PRKCA; MMP1; MMP9 |
| Integrin Signaling | ACTN4; ITGAM; ROCK1; ITGA5; RAC1; PTEN; RAP1A; |
| | TLN1; ARHGEF7; MAPK1; RAC2; CAPNS1; AKT2; |
| | CAPN2; PIK3CA; PTK2; PIK3CB; PIK3C3; MAPK8; |
| | CAV1; CAPN1; ABL1; MAPK3; ITGA1; KRAS; RHOA; |
| | SRC; PIK3C2A; ITGB7; PPP1CC; ILK; PXN; VASP; |
| | RAF1; FYN; ITGB1; MAP2K2; PAK4; AKT1; PIK3R1; |
| | TNK2; MAP2K1; PAK3; ITGB3; CDC42; RND3; ITGA2; |
| | CRKL; BRAF; GSK3B; AKT3 |
| Acute Phase Response | IRAK1; SOD2; MYD88; TRAF6; ELK1; MAPK1; PTPN11; |
| Signaling | AKT2; IKBKB; PIK3CA; FOS; NFKB2; MAP3K14; |
| | PIK3CB; MAPK8; RIPK1; MAPK3; IL6ST; KRAS; |
| | MAPK13; IL6R; RELA; SOCS1; MAPK9; FTL; NR3C1; |
| | TRAF2; SERPINE1; MAPK14; TNF; RAF1; PDK1; |
| | IKBKG; RELB; MAP3K7; MAP2K2; AKT1; JAK2; PIK3R1; |
| | CHUK; STAT3; MAP2K1; NFKB1; FRAP1; CEBPB; JUN; |
| | AKT3; IL1R1; IL6 |
| PTEN Signaling | ITGAM; ITGA5; RAC1; PTEN; PRKCZ; BCL2L11; |
| | MAPK1; RAC2; AKT2; EGFR; IKBKB; CBL; PIK3CA; |
| | CDKN1B; PTK2; NFKB2; BCL2; PIK3CB; BCL2L1; |
| | MAPK3; ITGA1; KRAS; ITGB7; ILK; PDGFRB; INSR; |
| | RAF1; IKBKG; CASP9; CDKN1A; ITGB1; MAP2K2; |
| | AKT1; PIK3R1; CHUK; PDGFRA; PDPK1; MAP2K1; |
| | NFKB1; ITGB3; CDC42; CCND1; GSK3A; ITGA2; |
| | GSK3B; AKT3; FOXO1; CASP3; RPS6KB1 |
| p53 Signaling | PTEN; EP300; BBC3; PCAF; FASN; BRCA1; GADD45A; |
| Aryl Hydrocarbon Receptor | BIRC5; AKT2; PIK3CA; CHEK1; TP53INP1; BCL2; |
| Signaling | PIK3CB; PIK3C3; MAPK8; THBS1; ATR; BCL2L1; E2F1; |
| | PMAIP1; CHEK2; TNFRSF10B; TP73; RB1; HDAC9; |
| | CDK2; PIK3C2A; MAPK14; TP53; LRDD; CDKN1A; |
| | HIPK2; AKT1; PIK3R1; RRM2B; APAF1; CTNNB1; |
| | SIRT1; CCND1; PRKDC; ATM; SFN; CDKN2A; JUN; |
| | SNAI2; GSK3B; BAX; AKT3 |
| | HSPB1; EP300; FASN; TGM2; RXRA; MAPK1; NQO1; |
| | NCOR2; SP1; ARNT; CDKN1B; FOS; CHEK1; |
| | SMARCA4; NFKB2; MAPK8; ALDH1A1; ATR; E2F1; |
| | MAPK3; NRIP1; CHEK2; RELA; TP73; GSTP1; RB1; |
| | SRC; CDK2; AHR; NFE2L2; NCOA3; TP53; TNF; |
| | CDKN1A; NCOA2; APAF1; NFKB1; CCND1; ATM; ESR1; |
| | CDKN2A; MYC; JUN; ESR2; BAX; IL6; CYP1B1; |
| | HSP90AA1 |
| Xenobiotic Metabolism | PRKCE; EP300; PRKCZ; RXRA; MAPK1; NQO1; |
| Signaling | NCOR2; PIK3CA; ARNT; PRKCI; NFKB2; CAMK2A; |
| | PIK3CB; PPP2R1A; PIK3C3; MAPK8; PRKD1; |
| | ALDH1A1; MAPK3; NRIP1; KRAS; MAPK13; PRKCD; |
| | GSTP1; MAPK9; NOS2A; ABCB1; AHR; PPP2CA; FTL; |
| | NFE2L2; PIK3C2A; PPARGC1A; MAPK14; TNF; RAF1; |
| | CREBBP; MAP2K2; PIK3R1; PPP2R5C; MAP2K1; |
| | NFKB1; KEAP1; PRKCA; EIF2AK3; IL6; CYP1B1; |
| | HSP90AA1 |
| SAPK/JNK Signaling | PRKCE; IRAK1; PRKAA2; EIF2AK2; RAC1; ELK1; |
| | GRK6; MAPK1; GADD45A; RAC2; PLK1; AKT2; PIK3CA; |
| | FADD; CDK8; PIK3CB; PIK3C3; MAPK8; RIPK1; |
| | GNB2L1; IRS1; MAPK3; MAPK10; DAXX; KRAS; |
| | PRKCD; PRKAA1; MAPK9; CDK2; PIM1; PIK3C2A; |
| | TRAF2; TP53; LCK; MAP3K7; DYRK1A; MAP2K2; |
| | PIK3R1; MAP2K1; PAK3; CDC42; JUN; TTK; CSNK1A1; |
| | CRKL; BRAF; SGK |
| PPAr/RXR Signaling | PRKAA2; EP300; INS; SMAD2; TRAF6; PPARA; FASN; |
| | RXRA; MAPK1; SMAD3; GNAS; IKBKB; NCOR2; |
| | ABCA1; GNAQ; NFKB2; MAP3K14; STAT5B; MAPK8; |
| | IRS1; MAPK3; KRAS; RELA; PRKAA1; PPARGC1A; |
| | NCOA3; MAPK14; INSR; RAF1; IKBKG; RELB; MAP3K7; |
| | CREBBP; MAP2K2; JAK2; CHUK; MAP2K1; NFKB1; |
| | TGFBR1; SMAD4; JUN; IL1R1; PRKCA; IL6; HSP90AA1; |
| | ADIPOQ |
| NF-KB Signaling | IRAK1; EIF2AK2; EP300; INS; MYD88; PRKCZ; TRAF6; |
| | TBK1; AKT2; EGFR; IKBKB; PIK3CA; BTRC; NFKB2; |
| | MAP3K14; PIK3CB; PIK3C3; MAPK8; RIPK1; HDAC2; |
| | KRAS; RELA; PIK3C2A; TRAF2; TLR4; PDGFRB; TNF; |
| | INSR; LCK; IKBKG; RELB; MAP3K7; CREBBP; AKT1; |
| | PIK3R1; CHUK; PDGFRA; NFKB1; TLR2; BCL10; |
| | GSK3B; AKT3; TNFAIP3; IL1R1 |
| Neuregulin Signaling | ERBB4; PRKCE; ITGAM; ITGA5; PTEN; PRKCZ; ELK1; |
| Wnt & Beta catenin | MAPK1; PTPN11; AKT2; EGFR; ERBB2; PRKCI; |
| Signaling | CDKN1B; STAT5B; PRKD1; MAPK3; ITGA1; KRAS; |
| | PRKCD; STAT5A; SRC; ITGB7; RAF1; ITGB1; MAP2K2; |
| | ADAM17; AKT1; PIK3R1; PDPK1; MAP2K1; ITGB3; |
| | EREG; FRAP1; PSEN1; ITGA2; MYC; NRG1; CRKL; |
| | AKT3; PRKCA; HSP90AA1; RPS6KB1 |
| | CD44; EP300; LRP6; DVL3; CSNK1E; GJA1; SMO; |
| | AKT2; PIN1; CDH1; BTRC; GNAQ; MARK2; PPP2R1A; |
| | WNT11; SRC; DKK1; PPP2CA; SOX6; SFRP2; ILK; |
| | LEF1; SOX9; TP53; MAP3K7; CREBBP; TCF7L2; AKT1; |
| | PPP2R5C; WNT5A; LRP5; CTNNB1; TGFBR1; CCND1; |
| | GSK3A; DVL1; APC; CDKN2A; MYC; CSNK1A1; GSK3B; |
| | AKT3; SOX2 |
| Insulin Receptor Signaling | PTEN; INS; EIF4E; PTPN1; PRKCZ; MAPK1; TSC1; |
| | PTPN11; AKT2; CBL; PIK3CA; PRKCI; PIK3CB; PIK3C3; |
| | MAPK8; IRS1; MAPK3; TSC2; KRAS; EIF4EBP1; |
| | SLC2A4; PIK3C2A; PPP1CC; INSR; RAF1; FYN; |
| | MAP2K2; JAK1; AKT1; JAK2; PIK3R1; PDPK1; MAP2K1; |
| | GSK3A; FRAP1; CRKL; GSK3B; AKT3; FOXO1; SGK; |
| | RPS6KB1 |
| IL-6 Signaling | HSPB1; TRAF6; MAPKAPK2; ELK1; MAPK1; PTPN11; |
| | IKBKB; FOS; NFKB2; MAP3K14; MAPK8; MAPK3; |
| | MAPK10; IL6ST; KRAS; MAPK13; IL6R; RELA; SOCS1; |
| | MAPK9; ABCB1; TRAF2; MAPK14; TNF; RAF1; IKBKG; |
| | RELB; MAP3K7; MAP2K2; IL8; JAK2; CHUK; STAT3; |
| | MAP2K1; NFKB1; CEBPB; JUN; IL1R1; SRF; IL6 |
| Hepatic Cholestasis | PRKCE; IRAK1; INS; MYD88; PRKCZ; TRAF6; PPARA; |
| | RXRA; IKBKB; PRKCI; NFKB2; MAP3K14; MAPK8; |
| | PRKD1; MAPK10; RELA; PRKCD; MAPK9; ABCB1; |
| | TRAF2; TLR4; TNF; INSR; IKBKG; RELB; MAP3K7; IL8; |
| | CHUK; NR1H2; TJP2; NFKB1; ESR1; SREBF1; FGFR4; |
| | JUN; IL1R1; PRKCA; IL6 |
| IGF-1 Signaling | IGF1; PRKCZ; ELK1; MAPK1; PTPN11; NEDD4; AKT2; |
| | PIK3CA; PRKCI; PTK2; FOS; PIK3CB; PIK3C3; MAPK8; |
| | IGF1R; IRS1; MAPK3; IGFBP7; KRAS; PIK3C2A; |
| | YWHAZ; PXN; RAF1; CASP9; MAP2K2; AKT1; PIK3R1; |
| | PDPK1; MAP2K1; IGFBP2; SFN; JUN; CYR61; AKT3; |
| | FOXO1; SRF; CTGF; RPS6KB1 |
| NRF2-mediated Oxidative | PRKCE; EP300; SOD2; PRKCZ; MAPK1; SQSTM1; |
| Stress Response | NQO1; PIK3CA; PRKCI; FOS; PIK3CB; PIK3C3; MAPK8; |
| | PRKD1; MAPK3; KRAS; PRKCD; GSTP1; MAPK9; FTL; |
| | NFE2L2; PIK3C2A; MAPK14; RAF1; MAP3K7; CREBBP; |
| | MAP2K2; AKT1; PIK3R1; MAP2K1; PPIB; JUN; KEAP1; |
| | GSK3B; ATF4; PRKCA; EIF2AK3; HSP90AA1 |
| Hepatic Fibrosis/Hepatic | EDN1; IGF1; KDR; FLT1; SMAD2; FGFR1; MET; PGF; |
| Stellate Cell Activation | SMAD3; EGFR; FAS; CSF1; NFKB2; BCL2; MYH9; |
| | IGF1R; IL6R; RELA; TLR4; PDGFRB; TNF; RELB; IL8; |
| | PDGFRA; NFKB1; TGFBR1; SMAD4; VEGFA; BAX; |
| | IL1R1; CCL2; HGF; MMP1; STAT1; IL6; CTGF; MMP9 |
| PPAR Signaling | EP300; INS; TRAF6; PPARA; RXRA; MAPK1; IKBKB; |
| | NCOR2; FOS; NFKB2; MAP3K14; STAT5B; MAPK3; |
| | NRIP1; KRAS; PPARG; RELA; STAT5A; TRAF2; |
| | PPARGC1A; PDGFRB; TNF; INSR; RAF1; IKBKG; |
| | RELB; MAP3K7; CREBBP; MAP2K2; CHUK; PDGFRA; |
| | MAP2K1; NFKB1; JUN; IL1R1; HSP90AA1 |
| Fc Epsilon RI Signaling | PRKCE; RAC1; PRKCZ; LYN; MAPK1; RAC2; PTPN11; |
| | AKT2; PIK3CA; SYK; PRKCI; PIK3CB; PIK3C3; MAPK8; |
| | PRKD1; MAPK3; MAPK10; KRAS; MAPK13; PRKCD; |
| | MAPK9; PIK3C2A; BTK; MAPK14; TNF; RAF1; FYN; |
| | MAP2K2; AKT1; PIK3R1; PDPK1; MAP2K1; AKT3; |
| | VAV3; PRKCA |
| G-Protein Coupled | PRKCE; RAP1A; RGS16; MAPK1; GNAS; AKT2; IKBKB; |
| Receptor Signaling | PIK3CA; CREB1; GNAQ; NFKB2; CAMK2A; PIK3CB; |
| | PIK3C3; MAPK3; KRAS; RELA; SRC; PIK3C2A; RAF1; |
| | IKBKG; RELB; FYN; MAP2K2; AKT1; PIK3R1; CHUK; |
| | PDPK1; STAT3; MAP2K1; NFKB1; BRAF; ATF4; AKT3; |
| | PRKCA |
| Inositol Phosphate | PRKCE; IRAK1; PRKAA2; EIF2AK2; PTEN; GRK6; |
| Metabolism | MAPK1; PLK1; AKT2; PIK3CA; CDK8; PIK3CB; PIK3C3; |
| | MAPK8; MAPK3; PRKCD; PRKAA1; MAPK9; CDK2; |
| | PIM1; PIK3C2A; DYRK1A; MAP2K2; PIP5K1A; PIK3R1; |
| | MAP2K1; PAK3; ATM; TTK; CSNK1A1; BRAF; SGK |
| PDGF Signaling | EIF2AK2; ELK1; ABL2; MAPK1; PIK3CA; FOS; PIK3CB; |
| | PIK3C3; MAPK8; CAV1; ABL1; MAPK3; KRAS; SRC; |
| | PIK3C2A; PDGFRB; RAF1; MAP2K2; JAK1; JAK2; |
| | PIK3R1; PDGFRA; STAT3; SPHK1; MAP2K1; MYC; |
| | JUN; CRKL; PRKCA; SRF; STAT1; SPHK2 |
| VEGF Signaling | ACTN4; ROCK1; KDR; FLT1; ROCK2; MAPK1; PGF; |
| | AKT2; PIK3CA; ARNT; PTK2; BCL2; PIK3CB; PIK3C3; |
| | BCL2L1; MAPK3; KRAS; HIF1A; NOS3; PIK3C2A; PXN; |
| | RAF1; MAP2K2; ELAVL1; AKT1; PIK3R1; MAP2K1; SFN; |
| | VEGFA; AKT3; FOXO1; PRKCA |
| Natural Killer Cell Signaling | PRKCE; RAC1; PRKCZ; MAPK1; RAC2; PTPN11; |
| | KIR2DL3; AKT2; PIK3CA; SYK; PRKCI; PIK3CB; |
| | PIK3C3; PRKD1; MAPK3; KRAS; PRKCD; PTPN6; |
| | PIK3C2A; LCK; RAF1; FYN; MAP2K2; PAK4; AKT1; |
| | PIK3R1; MAP2K1; PAK3; AKT3; VAV3; PRKCA |
| Cell Cycle: G1/S | HDAC4; SMAD3; SUV39H1; HDAC5; CDKN1B; BTRC; |
| Checkpoint Regulation | ATR; ABL1; E2F1; HDAC2; HDAC7A; RB1; HDAC11; |
| | HDAC9; CDK2; E2F2; HDAC3; TP53; CDKN1A; CCND1; |
| | E2F4; ATM; RBL2; SMAD4; CDKN2A; MYC; NRG1; |
| | GSK3B; RBL1; HDAC6 |
| T Cell Receptor Signaling | RAC1; ELK1; MAPK1; IKBKB; CBL; PIK3CA; FOS; |
| | NFKB2; PIK3CB; PIK3C3; MAPK8; MAPK3; KRAS; |
| | RELA; PIK3C2A; BTK; LCK; RAF1; IKBKG; RELB; FYN; |
| | MAP2K2; PIK3R1; CHUK; MAP2K1; NFKB1; ITK; BCL10; |
| | JUN; VAV3 |
| Death Receptor Signaling | CRADD; HSPB1; BID; BIRC4; TBK1; IKBKB; FADD; |
| | FAS; NFKB2; BCL2; MAP3K14; MAPK8; RIPK1; CASP8; |
| | DAXX; TNFRSF10B; RELA; TRAF2; TNF; IKBKG; RELB; |
| | CASP9; CHUK; APAF1; NFKB1; CASP2; BIRC2; CASP3; |
| | BIRC3 |
| FGF Signaling | RAC1; FGFR1; MET; MAPKAPK2; MAPK1; PTPN11; |
| | AKT2; PIK3CA; CREB1; PIK3CB; PIK3C3; MAPK8; |
| | MAPK3; MAPK13; PTPN6; PIK3C2A; MAPK14; RAF1; |
| | AKT1; PIK3R1; STAT3; MAP2K1; FGFR4; CRKL; ATF4; |
| | AKT3; PRKCA; HGF |
| GM-CSF Signaling | LYN; ELK1; MAPK1; PTPN11; AKT2; PIK3CA; CAMK2A; |
| | STAT5B; PIK3CB; PIK3C3; GNB2L1; BCL2L1; MAPK3; |
| | ETS1; KRAS; RUNX1; PIM1; PIK3C2A; RAF1; MAP2K2; |
| | AKT1; JAK2; PIK3R1; STAT3; MAP2K1; CCND1; AKT3; |
| | STAT1 |
| Amyotrophic Lateral | BID; IGF1; RAC1; BIRC4; PGF; CAPNS1; CAPN2; |
| Sclerosis Signaling | PIK3CA; BCL2; PIK3CB; PIK3C3; BCL2L1; CAPN1; |
| | PIK3C2A; TP53; CASP9; PIK3R1; RAB5A; CASP1; |
| | APAF1; VEGFA; BIRC2; BAX; AKT3; CASP3; BIRC3 |
| JAK/Stat Signaling | PTPN1; MAPK1; PTPN11; AKT2; PIK3CA; STAT5B; |
| | PIK3CB; PIK3C3; MAPK3; KRAS; SOCS1; STAT5A; |
| | PTPN6; PIK3C2A; RAF1; CDKN1A; MAP2K2; JAK1; |
| | AKT1; JAK2; PIK3R1; STAT3; MAP2K1; FRAP1; AKT3; |
| | STAT1 |
| Nicotinate and Nicotinamide | PRKCE; IRAK1; PRKAA2; EIF2AK2; GRK6; MAPK1; |
| Metabolism | PLK1; AKT2; CDK8; MAPK8; MAPK3; PRKCD; PRKAA1; |
| | PBEF1; MAPK9; CDK2; PIM1; DYRK1A; MAP2K2; |
| | MAP2K1; PAK3; NT5E; TTK; CSNK1A1; BRAF; SGK |
| Chemokine Signaling | CXCR4; ROCK2; MAPK1; PTK2; FOS; CFL1; GNAQ; |
| | CAMK2A; CXCL12; MAPK8; MAPK3; KRAS; MAPK13; |
| | RHOA; CCR3; SRC; PPP1CC; MAPK14; NOX1; RAF1; |
| | MAP2K2; MAP2K1; JUN; CCL2; PRKCA |
| IL-2 Signaling | ELK1; MAPK1; PTPN11; AKT2; PIK3CA; SYK; FOS; |
| | STAT5B; PIK3CB; PIK3C3; MAPK8; MAPK3; KRAS; |
| | SOCS1; STAT5A; PIK3C2A; LCK; RAF1; MAP2K2; |
| | JAK1; AKT1; PIK3R1; MAP2K1; JUN; AKT3 |
| Synaptic Long Term | PRKCE; IGF1; PRKCZ; PRDX6; LYN; MAPK1; GNAS; |
| Depression | PRKCI; GNAQ; PPP2R1A; IGF1R; PRKD1; MAPK3; |
| | KRAS; GRN; PRKCD; NOS3; NOS2A; PPP2CA; |
| | YWHAZ; RAF1; MAP2K2; PPP2R5C; MAP2K1; PRKCA |
| Estrogen Receptor | TAF4B; EP300; CARM1; PCAF; MAPK1; NCOR2; |
| Signaling | SMARCA4; MAPK3; NRIP1; KRAS; SRC; NR3C1; |
| | HDAC3; PPARGC1A; RBM9; NCOA3; RAF1; CREBBP; |
| | MAP2K2; NCOA2; MAP2K1; PRKDC; ESR1; ESR2 |
| Protein Ubiquitination | TRAF6; SMURF1; BIRC4; BRCA1; UCHL1; NEDD4; |
| Pathway | CBL; UBE2I; BTRC; HSPA5; USP7; USP10; FBXW7; |
| | USP9X; STUB1; USP22; B2M; BIRC2; PARK2; USP8; |
| | USP1; VHL; HSP90AA1; BIRC3 |
| IL-10 Signaling | TRAF6; CCR1; ELK1; IKBKB; SP1; FOS; NFKB2; |
| | MAP3K14; MAPK8; MAPK13; RELA; MAPK14; TNF; |
| | IKBKG; RELB; MAP3K7; JAK1; CHUK; STAT3; NFKB1; |
| | JUN; IL1R1; IL6 |
| VDR/RXR Activation | PRKCE; EP300; PRKCZ; RXRA; GADD45A; HES1; |
| | NCOR2; SP1; PRKCI; CDKN1B; PRKD1; PRKCD; |
| | RUNX2; KLF4; YY1; NCOA3; CDKN1A; NCOA2; SPP1; |
| | LRP5; CEBPB; FOXO1; PRKCA |
| TGF-beta Signaling | EP300; SMAD2; SMURF1; MAPK1; SMAD3; SMAD1; |
| | FOS; MAPK8; MAPK3; KRAS; MAPK9; RUNX2; |
| | SERPINE1; RAF1; MAP3K7; CREBBP; MAP2K2; |
| | MAP2K1; TGFBR1; SMAD4; JUN; SMAD5 |
| Toll-like Receptor Signaling | IRAK1; EIF2AK2; MYD88; TRAF6; PPARA; ELK1; |
| | IKBKB; FOS; NFKB2; MAP3K14; MAPK8; MAPK13; |
| | RELA; TLR4; MAPK14; IKBKG; RELB; MAP3K7; CHUK; |
| | NFKB1; TLR2; JUN |
| p38 MAPK Signaling | HSPB1; IRAK1; TRAF6; MAPKAPK2; ELK1; FADD; FAS; |
| | CREB1; DDIT3; RPS6KA4; DAXX; MAPK13; TRAF2; |
| | MAPK14; TNF; MAP3K7; TGFBR1; MYC; ATF4; IL1R1; |
| | SRF; STAT1 |
| Neurotrophin/TRK Signaling | NTRK2; MAPK1; PTPN11; PIK3CA; CREB1; FOS; |
| | PIK3CB; PIK3C3; MAPK8; MAPK3; KRAS; PIK3C2A; |
| | RAF1; MAP2K2; AKT1; PIK3R1; PDPK1; MAP2K1; |
| | CDC42; JUN; ATF4 |
| FXR/RXR Activation | INS; PPARA; FASN; RXRA; AKT2; SDC1; MAPK8; |
| | APOB; MAPK10; PPARG; MTTP; MAPK9; PPARGC1A; |
| | TNF; CREBBP; AKT1; SREBF1; FGFR4; AKT3; FOXO1 |
| Synaptic Long Term | PRKCE; RAP1A; EP300; PRKCZ; MAPK1; CREB1; |
| Potentiation | PRKCI; GNAQ; CAMK2A; PRKD1; MAPK3; KRAS; |
| | PRKCD; PPP1CC; RAF1; CREBBP; MAP2K2; MAP2K1; |
| | ATF4; PRKCA |
| Calcium Signaling | RAP1A; EP300; HDAC4; MAPK1; HDAC5; CREB1; |
| | CAMK2A; MYH9; MAPK3; HDAC2; HDAC7A; HDAC11; |
| | HDAC9; HDAC3; CREBBP; CALR; CAMKK2; ATF4; |
| | HDAC6 |
| EGF Signaling | ELK1; MAPK1; EGFR; PIK3CA; FOS; PIK3CB; PIK3C3; |
| | MAPK8; MAPK3; PIK3C2A; RAF1; JAK1; PIK3R1; |
| | STAT3; MAP2K1; JUN; PRKCA; SRF; STAT1 |
| Hypoxia Signaling in the | EDN1; PTEN; EP300; NQO1; UBE2I; CREB1; ARNT; |
| Cardiovascular System | HIF1A; SLC2A4; NOS3; TP53; LDHA; AKT1; ATM; |
| | VEGFA; JUN; ATF4; VHL; HSP90AA1 |
| LPS/IL-1 Mediated Inhibition | IRAK1; MYD88; TRAF6; PPARA; RXRA; ABCA1; |
| of RXR Function | MAPK8; ALDH1A1; GSTP1; MAPK9; ABCB1; TRAF2; |
| | TLR4; TNF; MAP3K7; NR1H2; SREBF1; JUN; IL1R1 |
| LXR/RXR Activation | FASN; RXRA; NCOR2; ABCA1; NFKB2; IRF3; RELA; |
| | NOS2A; TLR4; TNF; RELB; LDLR; NR1H2; NFKB1; |
| | SREBF1; IL1R1; CCL2; IL6; MMP9 |
| Amyloid Processing | PRKCE; CSNK1E; MAPK1; CAPNS1; AKT2; CAPN2; |
| | CAPN1; MAPK3; MAPK13; MAPT; MAPK14; AKT1; |
| | PSEN1; CSNK1A1; GSK3B; AKT3; APP |
| IL-4 Signaling | AKT2; PIK3CA; PIK3CB; PIK3C3; IRS1; KRAS; SOCS1; |
| | PTPN6; NR3C1; PIK3C2A; JAK1; AKT1; JAK2; PIK3R1; |
| | FRAP1; AKT3; RPS6KB1 |
| Cell Cycle: G2/M DNA | EP300; PCAF; BRCA1; GADD45A; PLK1; BTRC; |
| Damage Checkpoint | CHEK1; ATR; CHEK2; YWHAZ; TP53; CDKN1A; |
| Regulation | PRKDC; ATM; SFN; CDKN2A |
| Nitric Oxide Signaling in the | KDR; FLT1; PGF; AKT2; PIK3CA; PIK3CB; PIK3C3; |
| Cardiovascular System | CAV1; PRKCD; NOS3; PIK3C2A; AKT1; PIK3R1; |
| | VEGFA; AKT3; HSP90AA1 |
| Purine Metabolism | NME2; SMARCA4; MYH9; RRM2; ADAR; EIF2AK4; |
| | PKM2; ENTPD1; RAD51; RRM2B; TJP2; RAD51C; |
| | NT5E; POLD1; NME1 |
| cAMP-mediated Signaling | RAP1A; MAPK1; GNAS; CREB1; CAMK2A; MAPK3; |
| | SRC; RAF1; MAP2K2; STAT3; MAP2K1; BRAF; ATF4 |
| Mitochondrial Dysfunction | SOD2; MAPK8; CASP8; MAPK10; MAPK9; CASP9; |
| Notch Signaling | PARK7; PSEN1; PARK2; APP; CASP3 |
| | HES1; JAG1; NUMB; NOTCH4; ADAM17; NOTCH2; |
| | PSEN1; NOTCH3; NOTCH1; DLL4 |
| Endoplasmic Reticulum | HSPA5; MAPK8; XBP1; TRAF2; ATF6; CASP9; ATF4; |
| Stress Pathway | EIF2AK3; CASP3 |
| Pyrimidine Metabolism | NME2; AICDA; RRM2; EIF2AK4; ENTPD1; RRM2B; |
| | NT5E; POLD1; NME1 |
| Parkinson's Signaling | UCHL1; MAPK8; MAPK13; MAPK14; CASP9; PARK7; |
| | PARK2; CASP3 |
| Cardiac & Beta Adrenergic | GNAS; GNAQ; PPP2R1A; GNB2L1; PPP2CA; PPP1CC; |
| Signaling | PPP2R5C |
| Glycolysis/Gluconeogenesis | HK2; GCK; GPI; ALDH1A1; PKM2; LDHA; HK1 |
| Interferon Signaling | IRF1; SOCS1; JAK1; JAK2; IFITM1; STAT1; IFIT3 |
| Sonic Hedgehog Signaling | ARRB2; SMO; GLI2; DYRK1A; GLI1; GSK3B; DYRK1B |
| Glycerophospholipid | PLD1; GRN; GPAM; YWHAZ; SPHK1; SPHK2 |
| Metabolism | |
| Phospholipid Degradation | PRDX6; PLD1; GRN; YWHAZ; SPHK1; SPHK2 |
| Tryptophan Metabolism | SIAH2; PRMT5; NEDD4; ALDH1A1; CYP1B1; SIAH1 |
| Lysine Degradation | SUV39H1; EHMT2; NSD1; SETD7; PPP2R5C |
| Nucleotide Excision Repair | ERCC5; ERCC4; XPA; XPC; ERCC1 |
| Pathway | |
| Starch and Sucrose | UCHL1; HK2; GCK; GPI; HK1 |
| Metabolism | |
| Aminosugars Metabolism | NQO1; HK2; GCK; HK1 |
| Arachidonic Acid | PRDX6; GRN; YWHAZ; CYP1B1 |
| Metabolism | |
| Circadian Rhythm Signaling | CSNK1E; CREB1; ATF4; NR1D1 |
| Coagulation System | BDKRB1; F2R; SERPINE1; F3 |
| Dopamine Receptor | PPP2R1A; PPP2CA; PPP1CC; PPP2R5C |
| Signaling | |
| Glutathione Metabolism | IDH2; GSTP1; ANPEP; IDH1 |
| Glycerolipid Metabolism | ALDH1A1; GPAM; SPHK1; SPHK2 |
| Linoleic Acid Metabolism | PRDX6; GRN; YWHAZ; CYP1B1 |
| Methionine Metabolism | DNMT1; DNMT3B; AHCY; DNMT3A |
| Pyruvate Metabolism | GLO1; ALDH1A1; PKM2; LDHA |
| Arginine and Proline | ALDH1A1; NOS3; NOS2A |
| Metabolism | |
| Eicosanoid Signaling | PRDX6; GRN; YWHAZ |
| Fructose and Mannose | HK2; GCK; HK1 |
| Metabolism | |
| Galactose Metabolism | HK2; GCK; HK1 |
| Stilbene, Coumarine and | PRDX6; PRDX1; TYR |
| Lignin Biosynthesis | |
| Antigen Presentation | CALR; B2M |
| Pathway | |
| Biosynthesis of Steroids | NQO1; DHCR7 |
| Butanoate Metabolism | ALDH1A1; NLGN1 |
| Citrate Cycle | IDH2; IDH1 |
| Fatty Acid Metabolism | ALDH1A1; CYP1B1 |
| Glycerophospholipid | PRDX6; CHKA |
| Metabolism | |
| Histidine Metabolism | PRMT5; ALDH1A1 |
| Inositol Metabolism | ERO1L; APEX1 |
| Metabolism of Xenobiotics | GSTP1; CYP1B1 |
| by Cytochrome p450 | |
| Methane Metabolism | PRDX6; PRDX1 |
| Phenylalanine Metabolism | PRDX6; PRDX1 |
| Propanoate Metabolism | ALDH1A1; LDHA |
| Selenoamino Acid | PRMT5; AHCY |
| Metabolism | |
| Sphingolipid Metabolism | SPHK1; SPHK2 |
| Aminophosphonate | PRMT5 |
| Metabolism | |
| Androgen and Estrogen | PRMT5 |
| Metabolism | |
| Ascorbate and Aldarate | ALDH1A1 |
| Metabolism | |
| Bile Acid Biosynthesis | ALDH1A1 |
| Cysteine Metabolism | LDHA |
| Fatty Acid Biosynthesis | FASN |
| Glutamate Receptor | GNB2L1 |
| Signaling | |
| NRF2-mediated Oxidative | PRDX1 |
| Stress Response | |
| Pentose Phosphate | GPI |
| Pathway | |
| Pentose and Glucuronate | UCHL1 |
| Interconversions | |
| Retinol Metabolism | ALDH1A1 |
| Riboflavin Metabolism | TYR |
| Tyrosine Metabolism | PRMT5, TYR |
| Ubiquinone Biosynthesis | PRMT5 |
| Valine, Leucine and | ALDH1A1 |
| Isoleucine Degradation | |
| Glycine, Serine and | CHKA |
| Threonine Metabolism | |
| Lysine Degradation | ALDH1A1 |
| Pain/Taste | TRPM5; TRPA1 |
| Pain | TRPM7; TRPC5; TRPC6; TRPC1; Cnr1; cnr2; Grk2; |
| | Trpa1; Pomc; Cgrp; Crf; Pka; Era; Nr2b; TRPM5; Prkaca; |
| | Prkacb; Prkar1a; Prkar2a |
| Mitochondrial Function | AIF; CytC; SMAC (Diablo); Aifm-1; Aifm-2 |
| Developmental Neurology | BMP-4; Chordin (Chrd); Noggin (Nog); WNT (Wnt2; |
| | Wnt2b; Wnt3a; Wnt4; Wnt5a; Wnt6; Wnt7b; Wnt8b; |
| | Wnt9a; Wnt9b; Wnt10a; Wnt10b; Wnt16); beta-catenin; |
| | Dkk-1; Frizzled related proteins; Otx-2; Gbx2; FGF-8; |
| | Reelin; Dab1; unc-86 (Pou4f1 or Brn3a); Numb; Reln |

[0823] In an aspect, the invention provides a method of individualized or personalized treatment of a genetic disease in a subject in need of such treatment comprising: (a) introducing one or more mutations ex vivo in a tissue, organ or a cell line, or in vivo in a transgenic non-human mammal, comprising delivering to cell(s) of the tissue, organ, cell or mammal a composition comprising the particle delivery system or the delivery system or the virus particle of any one of the above embodiment or the cell of any one of the above embodiment, wherein the specific mutations or precise sequence substitutions are or have been correlated to the genetic disease; (b) testing treatment(s) for the genetic disease on the cells to which the vector has been delivered that have the specific mutations or precise sequence substitutions correlated to the genetic disease; and (c) treating the subject based on results from the testing of treatment(s) of step (b).

### Infectious Diseases

[0824] In one embodiment, the composition, system(s), or component(s) thereof can be used to diagnose, prognose, treat, and/or prevent an infectious disease caused by a microorganism, such as bacteria, virus, fungi, parasites, or combinations thereof.

[0825] In one embodiment, the system(s) or component(s) thereof can be capable of targeting specific microorganism within a mixed population. Exemplary methods of such techniques are described in e.g., Gomaa A A, Klumpe H E, Luo M L, Selle K, Barrangou R, Beisel C L. 2014. Programmable removal of bacterial strains by use of genome-targeting composition, systems, mBio 5: e00928-13; Citorik R J, Mimee M, Lu T K. 2014. Sequence-specific antimicrobials using efficiently delivered RNA-guided nucleases. Nat Biotechnol 32:1141-1145, the teachings of which can be adapted for use with the compositions, systems, and components thereof described herein.

[0826] In one embodiment, the composition, system(s), and/or components thereof can be capable of targeting pathogenic and/or drug-resistant microorganisms, such as bacteria, virus, parasites, and fungi. In one embodiment, the composition, system(s), and/or components thereof can be capable of targeting and modifying one or more polynucleotides in a pathogenic microorganism such that the microorganism is less virulent, killed, inhibited, or is otherwise rendered incapable of causing disease and/or infecting and/or replicating in a host cell.

[0827] In one embodiment, the pathogenic bacteria that can be targeted and/or modified by the composition, system(s), and/or component(s) thereof described herein include, but are not limited to, those of the genus Actinomyces (e.g., A. israelii), Bacillus (e.g., B. anthracis, B. cereus), Bactereoides (e.g., B. fragilis), Bartonella (B. henselae, B. quintana), Bordetella (B. pertussis), Borrelia (e.g., B. burgdorferi, B. garinii, B. afzelii, and B. recurreentis), Brucella (e.g., B. abortus, B. canis, B. melitensis, and B. suis), Campylobacter (e.g., C. jejuni), Chlamydia (e.g., C. pneumoniae and C. trachomatis), Chlamydophila (e.g., C. psittaci), Clostridium (e.g., C. botulinum, C. difficile, C. perfringens. C. tetani), Corynebacterium (e.g., C. diptheriae), Enterococcus (e.g., E. faecalis, E. faecium), Ehrlichia (E. canis and E. chaffensis) Escherichia (e.g., E. coli), Francisella (e.g,. F. tularensis), Haemophilus (e.g., H. influenzae), Helicobacter (H. pylori), Klebsiella (e.g., K. pneumoniae), Legionella (e.g., L. pneumophila), Leptospira (e.g., L. interrogans, L. santarosai, L. weilii, L. noguchii), Listereia (e.g., L. monocytogeenes), Mycobacterium (e.g., M. leprae, M. tuberculosis, M. ulcerans), Mycoplasma (M. pneumoniae), Neisseria (N. gonorrhoeae and N. menigitidis), Nocardia (e.g., N. asteeroides), Pseudomonas (P. aeruginosa), Rickettsia (R. rickettsia), Salmonella (S. typhi and S. typhimurium), Shigella (S. sonnei and S. dysenteriae), Staphylococcus (S. aureus, S. epidermidis, and S. saprophyticus), Streeptococcus (S. agalactiaee, S. pneumoniae, S. pyogenes), Treponema (T. pallidum), Ureaplasma (e.g., (J. urealyticum), Vibrio (e.g., V. cholerae), Yersinia (e.g., Y. pestis, Y. enterocolitica, and Y. pseudotuberculosis).

[0828] In one embodiment, the pathogenic virus that can be targeted and/or modified by the composition, system(s), and/or component(s) thereof described herein include, but are not limited to, a double-stranded DNA virus, a partly double-stranded DNA virus, a single-stranded DNA virus, a positive single-stranded RNA virus, a negative single-stranded RNA virus, or a double stranded RNA virus. In one embodiment, the pathogenic virus can be from the family Adenoviridae (e.g., Adenovirus), Herpeesviridae (e.g., Herpes simplex, type 1, Herpes simplex, type 2, Varicella-zoster virus, Epstein-Barr virus, Human cytomegalovirus, Human herpesvirus, type 8), Papillomaviridae (e.g., Human papillomavirus), Polyomaviridae (e.g., BK virus, JC virus), Poxviridae (e.g., smallpox), Hepadnaviridae (e.g., Hepatitis B), Parvoviridae (e.g., Parvovirus B19), Astroviridae (e.g., Human astrovirus), Caliciviridae (e.g., Norwalk virus), Picornaviridae (e.g., coxsackievirus, hepatitis A virus, poliovirus, rhinovirus), Coronaviridae (e.g., Severe acute respiratory syndrome-related coronavirus, strains: Severe acute respiratory syndrome virus, Severe acute respiratory syndrome coronavirus 2 (COVID-19)), Flaviviridae (e.g., Hepatitis C virus, yellow fever virus, dengue virus, West Nile virus, TBE virus), Togaviridae (e.g., Rubella virus), Hepeviridae (e.g., Hepatitis E virus), Retroviridae (Human immunodeficiency virus (HIV)), Orthomyxoviridae (e.g., Influenza virus), Arenaviridae (e.g., Lassa virus), Bunyaviridae (e.g., Crimean-Congo hemorrhagic fever virus, Hantaan virus), Filoviridae (e.g., Ebola virus and Marburg virus), Paramyxoviridae (e.g., Measles virus, Mumps virus, Parainfluenza virus, Respiratory syncytial virus), Rhabdoviridae (Rabies virus), Hepatits D virus, Reoviridae (e.g., Rotavirus, Orbivirus, Coltivirus, Banna virus).

[0829] In one embodiment, the pathogenic fungi that can be targeted and/or modified by the composition, system(s), and/or component(s) thereof described herein include, but are not limited to, those of the genus Candida (e.g., C. albicans), Aspergillus (e.g., A. fumigatus, A. flavus, A. clavatus), Cryptococcus (e.g., C. neoformans, C. gattii), Histoplasma (H. capsulatum), Pneumocystis (e.g., P. jiroveecii), Stachybotrys (e.g., S. chartarum).

[0830] In one embodiment, the pathogenic parasites that can be targeted and/or modified by the composition, system(s), and/or component(s) thereof described herein include, but are not limited to, protozoa, helminths, and ectoparasites. In one embodiment, the pathogenic protozoa that can be targeted and/or modified by the composition, system(s), and/or component(s) thereof described herein include, but are not limited to, those from the groups Sarcodina (e.g., ameba such as Entamoeba), Mastigophora (e.g., flagellates such as Giardia and Leishmania), Cilophora (e.g., ciliates such as Balantidum), and sporozoa (e.g., plasmodium and cryptosporidium). In one embodiment, the pathogenic helminths that can be targeted and/or modified by the composition, system(s), and/or component(s) thereof described herein include, but are not limited to, flatworms (platyhelminths), thorny-headed worms (acanthoceephalins), and roundworms (nematodes). In one embodiment, the pathogenic ectoparasites that can be targeted and/or modified by the composition, system(s), and/or component(s) thereof described herein include, but are not limited to, ticks, fleas, lice, and mites.

[0831] In one embodiment, the pathogenic parasite that can be targeted and/or modified by the composition, system(s), and/or component(s) thereof described herein include, but are not limited to, Acanthamoeba spp., Balamuthia mandrillaris, Babesiosis spp. (e.g., Babesia B. divergens, B. bigemina, B. equi, B. microfti, B. duncani), Balantidiasis spp. (e.g., Balantidium coli), Blastocystis spp., Cryptosporidium spp., Cyclosporiasis spp. (e.g., Cyclospora cayetanensis), Dientamoebiasis spp. (e.g., Dientamoeba fragilis), Amoebiasis spp. (e.g., Entamoeba histolytica), Giardiasis spp. (e.g., Giardia lamblia), Isosporiasis spp. (e.g., Isospora belli), Leishmania spp., Naegleria spp. (e.g., Naegleria fowleri), Plasmodium spp. (e.g., Plasmodium falciparum, Plasmodium vivax, Plasmodium ovale curtisi, Plasmodium ovale wallikeri, Plasmodium malariae, Plasmodium knowlesi), Rhinosporidiosis spp. (e.g., Rhinosporidium seeberi), Sarcocystosis spp. (e.g., Sarcocystis bovihominis, Sarcocystis suihominis), Toxoplasma spp. (e.g., Toxoplasma gondii), Trichomonas spp. (e.g., Trichomonas vaginalis), Trypanosoma spp. (e.g., Trypanosoma brucei), Trypanosoma spp. (e.g., Trypanosoma cruzi), Tapeworm (e.g., Cestoda, Taenia multiceps, Taenia saginata, Taenia solium), Diphyllobothrium latum spp., Echinococcus spp. (e.g., Echinococcus granulosus, Echinococcus multilocularis, E. vogeli, E. oligarthrus), Hymenolepis spp. (e.g., Hymenolepis nana, Hymenolepis diminuta), Bertiella spp. (e.g., Bertiella mucronata, Bertiella studeri), Spirometra (e.g., Spirometra erinaceieuropaei), Clonorchis spp. (e.g., Clonorchis sinensis; Clonorchis viverrini), Dicrocoelium spp. (e.g., Dicrocoelium dendriticum), Fasciola spp. (e.g., Fasciola hepatica, Fasciola gigantica), Fasciolopsis spp. (e.g., Fasciolopsis buski), Metagonimus spp. (e.g., Metagonimus yokogawai), Metorchis spp. (e.g., Metorchis conjunctus), Opisthorchis spp. (e.g., Opisthorchis viverrini, Opisthorchis felineus), Clonorchis spp. (e.g., (Monorchis sinensis), Paragonimus spp. (e.g., Paragonimus westermani; Paragonimus africanus; Paragonimus caliensis; Paragonimus kellicotti; Paragonimus skrjabini; Paragonimus uterobilateralis), Schistosoma sp., Schistosoma spp. (e.g., Schistosoma mansoni, Schistosoma haematobium, Schistosoma japonicum, Schistosoma mekongi, and Schistosoma intercalatum), Echinostoma spp. (e.g., E. echinatum), Trichobilharzia spp. (e.g., Trichobilharzia regent), Ancylostoma spp. (e.g., Ancylostoma duodenale), Necator spp. (e.g., Necator americanus), Angiostrongylus spp., Anisakis spp., Ascaris spp. (e.g., Ascaris lumbricoides), Baylisascaris spp. (e.g., Baylisascaris procyonis), Brugia spp. (e.g., Brugia malayi, Brugia timori), Dioctophyme spp. (e.g., Dioctophyme renale), Dracunculus spp. (e.g., Dracunculus medinensis), Enterobius spp. (e.g., Enterobius vermicularis, Enterobius gregorii), Gnathostoma spp. (e.g., Gnathostoma spinigerum, Gnathostoma hispidum), Halicephalobus spp. (e.g., Halicephalobus gingivalis), Loa loa spp. (e.g. Loa loa filaria), Mansonella spp. (e.g., Mansonella streptocerca), Onchocerca spp. (e.g., Onchocerca volvulus), Strongyloides spp. (e.g., Strongyloides stercoralis), Thelazia spp. (e.g., Thelazia californiensis, Thelazia callipaeda), Toxocara spp. (e.g., Toxocara canis, Toxocara cati, Toxascaris leonine), Trichinella spp. (e.g., Trichinella spiralis, Trichinella britovi, Trichinella nelsoni, Trichinella nativa), Trichuris spp. (e.g., Trichuris trichiura, Trichuris vulpis), Wuchereria spp. (e.g., Wuchereria bancrofti), Dermatobia spp. (e.g., Dermatobia hominis), Tunga spp. (e.g., Tunga penetrans), Cochliomyia spp. (e.g., Cochliomyia hominivorax), Linguatula spp. (e.g., Linguatula serrata), Archiacanthocephala sp., Moniliformis sp. (e.g., Moniliformis moniliformis), Pediculus spp. (e.g., Pediculus humanus capitis, Pediculus humanus humanus), Pthirus spp. (e.g., Pthirus pubis), Arachnida spp. (e.g., Trombiculidae, Ixodidae, Argaside), Siphonaptera spp (e.g., Siphonaptera: Pulicinae), Cimicidae spp. (e.g., Cimex lectularius and Cimex hemipterus), Diptera spp., Demodex spp. (e.g., Demodex folliculorum brevis canis), Sarcoptes spp. (e.g., Sarcoptes scabiei), Dermanyssus spp. (e.g., Dermanyssus gallinae), Ornithonyssus spp. (e.g., Ornithonyssus sylviarum, Ornithonyssus bursa, Ornithonyssus bacoti), Laelaps spp. (e.g., Laelaps echidnina), Liponyssoides spp. (e.g., Liponyssoides sanguineus).

[0832] In one embodiment, the gene targets can be any of those as set forth in Table 1 of Strich and Chertow. 2019. J. Clin. Microbio. 57:4 e01307-18, which is incorporated herein as if expressed in its entirety herein.

[0833] In one embodiment, the method can include delivering a composition, system, and/or component thereof to a pathogenic organism described herein, allowing the composition, system, and/or component thereof to specifically bind and modify one or more targets in the pathogenic organism, whereby the modification kills, inhibits, reduces the pathogenicity of the pathogenic organism, or otherwise renders the pathogenic organism non-pathogenic. In one embodiment, delivery of the composition, system, and/or component thereof occurs in vivo (i.e., in the subject being treated). In one embodiment, delivery of the composition, system, and/or component thereof occurs by an intermediary, such as microorganism or phage that is non-pathogenic to the subject but is capable of transferring polynucleotides and/or infecting the pathogenic microorganism. In one embodiment, the intermediary microorganism can be an engineered bacteria, virus, or phage that contains the composition, system(s), and/or component(s) thereof and/or vectors and/or vector systems. The method can include administering an intermediary microorganism containing the composition, system(s), and/or component(s) thereof and/or vectors and/or vector systems to the subject to be treated. The intermediary microorganism can then produce the compositions and/or component thereof or transfer a composition, system, polynucleotide to the pathogenic organism. In embodiments, where the compositions and/or component thereof, vector, or vector system is transferred to the pathogenic microorganism, the composition, system, or component thereof is then produced in the pathogenic microorganism and modifies the pathogenic microorganism such that it is less virulent, killed, inhibited, or is otherwise rendered incapable of causing disease and/or infecting and/or replicating in a host or cell thereof.

[0834] In one embodiment, where the pathogenic microorganism inserts its genetic material into the host cell's genome (e.g., a virus), the composition, system, can be designed such that it modifies the host cell's genome such that the viral DNA or cDNA cannot be replicated by the host cell's machinery into a functional virus. In one embodiment, where the pathogenic microorganism inserts its genetic material into the host cell's genome (e.g., a virus), the composition, system, can be designed such that it modifies the host cell's genome such that the viral DNA or cDNA is deleted from the host cell's genome.

[0835] It will be appreciated that inhibiting or killing the pathogenic microorganism, the disease and/or condition that its infection causes in the subject can be treated or prevented. Thus, also provided herein are methods of treating and/or preventing one or more diseases or symptoms thereof caused by any one or more pathogenic microorganisms, such as any of those described herein.

### Mitochondrial Diseases

[0836] Some of the most challenging mitochondrial disorders arise from mutations in mitochondrial DNA (mtDNA), a high copy number genome that is maternally inherited. In one embodiment, mtDNA mutations can be modified using a composition, system, described herein. In one embodiment, the mitochondrial disease that can be diagnosed, prognosed, treated, and/or prevented can be MELAS (mitochondrial myopathy encephalopathy, and lactic acidosis and stroke-like episodes), CPEO/PEO (chronic progressive external ophthalmoplegia syndrome/progressive external ophthalmoplegia), KSS (Kearns-Sayre syndrome), MIDD (maternally inherited diabetes and deafness), MERRF (myoclonic epilepsy associated with ragged red fibers), NIDDM (noninsulin-dependent diabetes mellitus), LHON (Leber hereditary optic neuropathy), LS (Leigh Syndrome) an aminoglycoside induced hearing disorder, NARP (neuropathy, ataxia, and pigmentary retinopathy), Extrapyramidal disorder with akinesia-rigidity, psychosis and SNHL, Nonsyndromic hearing loss a cardiomyopathy, an encephalomyopathy, Pearson's syndrome, or a combination thereof.

[0837] In one embodiment, the mtDNA of a subject can be modified in vivo or ex vivo. In one embodiment, where the mtDNA is modified ex vivo, after modification the cells containing the modified mitochondria can be administered back to the subject. In one embodiment, the composition, system, or component thereof can be capable of correcting an mtDNA mutation, or a combination thereof.

[0838] In one embodiment, at least one of the one or more mtDNA mutations is selected from the group consisting of: A3243G, C3256T, T3271C, G1019A, A1304T, A15533G, C1494T, C4467A, T1658C, G12315A, A3421G, A8344G, T8356C, G8363A, A13042T, T3200C, G3242A, A3252G, T3264C, G3316A, T3394C, T14577C, A4833G, G3460A, G9804A, G11778A, G14459A, A14484G, G15257A, T8993C, T8993G, G10197A, G13513A, T1095C, C1494T, A1555G, G1541A, C1634T, A3260G, A4269G, T7587C, A8296G, A8348G, G8363A, T9957C, T9997C, G12192A, C12297T, A14484G, G15059A, duplication of CCCCCTCCCC-tandem (SEQ ID NO: 25200) repeats at positions 305-314 and/or 956-965, deletion at positions from 8,469-13,447, 4,308-14,874, and/or 4,398-14,822, 961ins/delC, the mitochondrial common deletion (e.g., mtDNA 4,977 bp deletion), and combinations thereof.

[0839] In one embodiment, the mitochondrial mutation can be any mutation as set forth in or as identified by use of one or more bioinformatic tools available at Mitomap available at mitomap.org. Such tools include, but are not limited to, “Variant Search, aka Market Finder”, Find Sequences for Any Haplogroup, aka “Sequence Finder”, “Variant Info”, “POLG Pathogenicity Prediction Server”, “MITOMASTER”, “Allele Search”, “Sequence and Variant Downloads”, “Data Downloads”. MitoMap contains reports of mutations in mtDNA that can be associated with disease and maintains a database of reported mitochondrial DNA Base Substitution Diseases: rRNA/tRNA mutations.

[0840] In one embodiment, the method includes delivering a composition, system, and/or a component thereof to a cell, and more specifically one or more mitochondria in a cell, allowing the composition, system, and/or component thereof to modify one or more target polynucleotides in the cell, and more specifically one or more mitochondria in the cell. The target polynucleotides can correspond to a mutation in the mtDNA, such as any one or more of those described herein. In one embodiment, the modification can alter a function of the mitochondria such that the mitochondria functions normally or at least is/are less dysfunctional as compared to an unmodified mitochondria. Modification can occur in vivo or ex vivo. Where modification is performed ex vivo, cells containing modified mitochondria can be administered to a subject in need thereof in an autologous or allogenic manner.

### Microbiome Modification

[0841] Microbiomes play important roles in health and disease. For example, the gut microbiome can play a role in health by controlling digestion, preventing growth of pathogenic microorganisms and have been suggested to influence mood and emotion. Imbalanced microbiomes can promote disease and are suggested to contribute to weight gain, unregulated blood sugar, high cholesterol, cancer, and other disorders. A healthy microbiome has a series of joint characteristics that can be distinguished from non-healthy individuals, thus detection and identification of the disease-associated microbiome can be used to diagnose and detect disease in an individual. The compositions, systems, and components thereof can be used to screen the microbiome cell population and be used to identify a disease associated microbiome. Cell screening methods utilizing compositions, systems, and components thereof are described elsewhere herein and can be applied to screening a microbiome, such as a gut, skin, vagina, and/or oral microbiome, of a subject.

[0842] In one embodiment, the microbe population of a microbiome in a subject can be modified using a composition, system, and/or component thereof described herein. In one embodiment, the composition, system, and/or component thereof can be used to identify and select one or more cell types in the microbiome and remove them from the microbiome population. Exemplary methods of selecting cells using a composition, system, and/or component thereof are described elsewhere herein. In this way the make-up or microorganism profile of the microbiome can be altered. In one embodiment, the alteration causes a change from a diseased microbiome composition to a healthy microbiome composition. In this way the ratio of one type or species of microorganism to another can be modified, such as going from a diseased ratio to a healthy ratio. In one embodiment, the cells selected are pathogenic microorganisms.

[0843] In one embodiment, the compositions and systems described herein can be used to modify a polynucleotide in a microorganism of a microbiome in a subject. In one embodiment, the microorganism is a pathogenic microorganism. In one embodiment, the microorganism is a commensal and non-pathogenic microorganism. Methods of modifying polynucleotides in a cell in the subject are described elsewhere herein and can be applied to these embodiments.

### Models of Diseases and Conditions

[0844] In an aspect, the invention provides a method of modeling a disease associated with a genomic locus in a eukaryotic organism or a non-human organism comprising manipulation of a target sequence within a coding, non-coding or regulatory element of said genomic locus comprising delivering a non-naturally occurring or engineered composition comprising a viral vector system comprising one or more viral vectors operably encoding a composition for expression thereof, wherein the composition comprises particle delivery system or the delivery system or the virus particle of any one of the above embodiments or the cell of any one of the above embodiment.

[0845] In one aspect, the invention provides a method of generating a model eukaryotic cell that can include one or more a mutated disease genes and/or infectious microorganisms. In one embodiment, a disease gene is any gene associated an increase in the risk of having or developing a disease. In one embodiment, the method includes (a) introducing one or more vectors into a eukaryotic cell, wherein the one or more vectors comprise a composition, system, and/or component thereof and/or a vector or vector system that is capable of driving expression of a composition, system, and/or component thereof including, but not limited to: a guide sequence, one or more IscB polypeptide nucleases, and combinations thereof and (b) allowing a composition, system, or complex to bind to one or more target polynucleotides, e.g., to effect cleavage, nicking, or other modification of the target polynucleotide within said disease gene, wherein the composition, system, or complex is composed of one or more IscB polypeptide or CRISPR-associated IscB polypeptide nuclease complexed with (1) one or more ωRNAs or guide sequences that is/are hybridized to the target sequence(s) within the target polynucleotide(s), and optionally (2) the ωRNA scaffold sequence(s), thereby generating a model eukaryotic cell comprising one or more mutated disease gene(s). Thus, in one embodiment, the composition and system contains nucleic acid molecules for and drives expression of one or more of: an IscB polypeptide or CRISPR-associated IscB polypeptide nuclease, a guide sequence and/or a Homologous Recombination template and/or a stabilizing ligand if the IscB polypeptide or CRISPR-associated IscB polypeptide nuclease has a destabilization domain. In one embodiment, said cleavage comprises cleaving one or two strands at the location of the target sequence by the IscB polypeptide or CRISPR-associated IscB polypeptide nuclease. In one embodiment, nicking comprises nicking one or two strands at the location of the target sequence by the IscB polypeptide or CRISPR-associated IscB polypeptide nuclease. In one embodiment, said cleavage or nicking results in modified transcription of a target polynucleotide. In one embodiment, modification results in decreased transcription of the target polynucleotide. In one embodiment, the method further comprises repairing said cleaved or nicked target polynucleotide by homologous recombination with a recombination template polynucleotide, wherein said repair results in a mutation comprising an insertion, deletion, or substitution of one or more nucleotides of said target polynucleotide. In one embodiment, said mutation results in one or more amino acid changes in a protein expression from a gene comprising the target sequence.

[0846] The disease modeled can be any disease with a genetic or epigenetic component. In one embodiment, the disease modeled can be any as discussed elsewhere herein.

### In Situ Disease Detection

[0847] The compositions, systems, and/or components thereof can be used for diagnostic methods of detection such as in CASFISH (see e.g., Deng et al. 2015. PNAS USA 112(38): 11870-11875), CRISPR-Live FISH (see e.g., Wang et al. 2020. Science; 365(6459): 1301-1305), sm-FISH (Lee and Jefcoate. 2017. Front. Endocrinol. doi.org/10.3389/fendo.2017.00289), sequential FISH CRISPRainbow (Ma et al. Nat Biotechnol, 34(2016), pp. 528-530), CRISPR-Sirius (Nat Methods, 15(2018), pp. 928-931), Casilio (Cheng et al. Cell Res, 26(2016), pp. 254-257), Halo-Tag based genomic loci visualization techniques (e.g., Deng et al. 2015. PNAS USA 112(38): 11870-11875; Knight et al., Science, 350(2015), pp. 823-826), RNA-aptamer based methods (e.g., Ma et al., J Cell Biol, 214(2016), pp. 529-537), molecular beacon-based methods (e.g., Zhao et al. Biomaterials, 100(2016), pp. 172-183; Wu et al. Nucleic Acids Res (2018)), Quantum Dot-based systems (e.g., Ma et al. Anal Chem, 89(2017), pp. 12896-12901), multiplexed methods (e.g., Ma et al., Proc Natl Acad Sci USA, 112(2015), pp. 3002-3007; Fu et al. Nat Commun, 7(2016), p. 11707; Ma et al. Nat Biotechnol, 34(2016), pp. 528-530; Shao et al. Nucleic Acids Res, 44(2016), Article e86); Wang et al. Sci Rep, 6(2016), p. 26857), ç, and other in situ CRISPR-hybridization based methods (e.g., Chen et al. Cell, 155(2013), pp. 1479-1491; Gu et al. Science, 359(2018), pp. 1050-1055; Tanebaum et al. Cell, 159(2014), pp. 635-646; Ye et al. Protein Cell, 8(2017), pp. 853-855; Chen et al. Nat Commun, 9(2018), p. 5065; Shao et al. ACS Synth Biol (2017); Fu et al. Nat Commun, 7(2016), p. 11707; Shao et al. Nucleic Acids Res, 44(2016), Article e86; Wang et al., Sci Rep, 6(2016), p. 26857), all of which are incorporated by reference herein as if expressed in their entirety and whose teachings can be adapted to the compositions, systems, and components thereof described herein in view of the description herein.

[0848] In one embodiment, the composition, system, or component thereof can be used in a detection method, such as an in-situ detection method described herein. In one embodiment, the composition, system, or component thereof can include a catalytically inactivate IscB polypeptide nuclease described herein and use this system in detection methods such as fluorescence in situ hybridization (FISH) or any other described herein. In one embodiment, the inactivated IscB polypeptide nuclease, which lacks the ability to produce DNA double-strand breaks may be fused with a marker, such as fluorescent protein, such as the enhanced green fluorescent protein (eEGFP) and co-expressed with small guide RNAs to target pericentric, centric and telomeric repeats in vivo. The dead IscB polypeptide or CRISPR-associated IscB polypeptide nuclease or system thereof can be used to visualize both repetitive sequences and individual genes in the human genome. Such new applications of labelled dead IscB polypeptide or CRISPR-associated IscB polypeptide nuclease and compositions, systems, thereof can be important in imaging cells and studying the functional nuclear architecture, especially in cases with a small nucleus volume or complex 3-D structures.

### Cell Selection

[0849] In one embodiment, the compositions, systems, and/or components thereof described herein can be used in a method to screen and/or select cells. In one embodiment, composition, system-based screening/selection method can be used to identify diseased cells in a cell population. In one embodiment, selection of the cells results in a modification in the cells such that the selected cells die. In this way, diseased cells can be identified, and removed from the healthy cell population. In one embodiment, the diseased cells can be a cancer cell, pre-cancerous cell, a virus or other pathogenic organism infected cells, or otherwise abnormal cell. In one embodiment, the modification can impart another detectable change in the cells to be selected (e.g., a functional change and/or genomic barcode) that facilitates selection of the desired cells. In one embodiment a negative selection scheme can be used to obtain a desired cell population. In these embodiments, the cells to be selected against are modified, thus can be removed from the cell population based on their death or identification or sorting based the detectable change imparted on the cells. Thus, in these embodiments, the remaining cells after selection are the desired cell population.

[0850] In one embodiment, a method of selecting one or more cell(s) containing a polynucleotide modification can include: introducing one or more composition, system, (s) and/or components thereof, and/or vectors or vector systems into the cell(s), wherein the composition, system(s), and/or components thereof, and/or vectors or vector systems contains and/or is capable of expressing one or more of: a IscB polypeptide or CRISPR-associated IscB polypeptide nuclease, an ωRNA sequence, and an recombination template; wherein, for example that which is being expressed is within and expressed in vivo by the composition, system, vector or vector system and/or the recombination template comprises the one or more mutations that abolish IscB polypeptide or CRISPR-associated IscB polypeptide nuclease cleavage; allowing homologous recombination of the recombination template with the target polynucleotide in the cell(s) to be selected; allowing a composition, system, or complex to bind to a target polynucleotide to effect cleavage of the target polynucleotide within said gene, wherein the AAV-complex comprises the IscB polypeptide or CRISPR-associated IscB polypeptide nuclease complexed with (1) the ωRNA or guide sequence that is hybridized to the target sequence within the target polynucleotide, and (2) the ωRNA scaffold, wherein binding of the complex to the target polynucleotide induces cell death or imparts some other detectable change to the cell, thereby allowing one or more cell(s) in which one or more mutations have been introduced to be selected. In one embodiment, the cell to be selected may be a eukaryotic cell. In one embodiment, the cell to be selected may be a prokaryotic cell. Selection of specific cells via the methods herein can be performed without requiring a selection marker or a two-step process that may include a counter-selection system.

### Therapeutic Agent Development

[0851] The compositions, systems, and components thereof described herein can be used to develop IscB polypeptide nuclease-based biologically active agents, such as small molecule therapeutics. Thus, described herein are methods for developing a biologically active agent that modulates a cell function and/or signaling event associated with a disease and/or disease gene. In one embodiment, the method comprises (a) contacting a test compound with a diseased cell and/or a cell containing a disease gene cell; and (b) detecting a change in a readout that is indicative of a reduction or an augmentation of a cell signaling event or other cell functionality associated with said disease or disease gene, thereby developing said biologically active agent that modulates said cell signaling event or other functionality associated with said disease gene. In one embodiment, the diseased cell is a model cell described elsewhere herein. In one embodiment, the diseased cell is a diseased cell isolated from a subject in need of treatment. In one embodiment, the test compound is a small molecule agent. In one embodiment, test compound is a small molecule agent. In one embodiment, the test compound is a biologic molecule agent.

[0852] In one embodiment, the method involves developing a therapeutic based on the composition, system, described herein. In one embodiment, the therapeutic comprises a IscB polypeptide or CRISPR-associated IscB polypeptide nuclease and/or a ωRNA with a reprogrammable spacer capable of hybridizing to a target sequence of interest. In one embodiment, the therapeutic is a vector or vector system that can contain a) a first regulatory element operably linked to a nucleotide sequence encoding the IscB polypeptide or CRISPR-associated IscB polypeptide nuclease; and b) a second regulatory element operably linked to one or more nucleotide sequences encoding one or more nucleic acid molecules comprising a ωRNA comprising a reprogrammable spacer sequence, a conserved RNA sequence; wherein components (a) and (b) are located on same or different vectors. In one embodiment, the biologically active agent is a composition comprising a delivery system operably configured to deliver composition, system, or components thereof, and/or or one or more polynucleotide sequences, vectors, or vector systems containing or encoding said components into a cell and capable of forming a complex with the components of the composition and system herein, and wherein said complex is operable in the cell. In one embodiment, the complex can include the IscB polypeptide, or CRISPR-associated IscB polypeptide nuclease as described herein, ωRNA scaffold comprising the guide sequence (reprogrammable spacer sequence), and a conserved nucleotide sequence. In any such compositions, the delivery system can be a yeast system, a lipofection system, a microinjection system, a biolistic system, virosomes, liposomes, immunoliposomes, polycations, lipid: nucleic acid conjugates or artificial virions, or any other system as described herein. In one embodiment, the delivery is via a particle, a nanoparticle, a lipid or a cell penetrating peptide (CPP).

[0853] Also described herein are methods for developing or designing a composition, system,, optionally a composition, system, based therapy or therapeutic, comprising (a) selecting for a (therapeutic) locus of interest ωRNA target sites, wherein said target sites have minimal sequence variation across a population, and from said selected target sites sub selecting target sites, wherein a ωRNA directed against said target sites recognizes a minimal number of off-target sites across said population, or (b) selecting for a (therapeutic) locus of interest ωRNA target sites, wherein said target sites have minimal sequence variation across a population, or selecting for a (therapeutic) locus of interest ωRNA target sites, wherein a ωRNA directed against said target sites recognizes a minimal number of off-target sites across said population, and optionally estimating the number of (sub)selected target sites needed to treat or otherwise modulate or manipulate a population, and optionally validating one or more of the (sub)selected target sites for an individual subject, optionally designing one or more ωRNA recognizing one or more of said (sub)selected target sites.

[0854] In one embodiment, the method for developing or designing a ωRNA for use in a composition, system, optionally a composition, system, based therapy or therapeutic, can include (a) selecting for a (therapeutic) locus of interest ωRNA target sites, wherein said target sites have minimal sequence variation across a population, and from said selected target sites sub selecting target sites, wherein a gRNA directed against said target sites recognizes a minimal number of off-target sites across said population, or (b) selecting for a (therapeutic) locus of interest gRNA target sites, wherein said target sites have minimal sequence variation across a population, or selecting for a (therapeutic) locus of interest gRNA target sites, wherein a gRNA directed against said target sites recognizes a minimal number of off-target sites across said population, and optionally estimating the number of (sub)selected target sites needed to treat or otherwise modulate or manipulate a population, optionally validating one or more of the (sub)selected target sites for an individual subject, optionally designing one or more gRNA recognizing one or more of said (sub)selected target sites.

[0855] In one embodiment, thee method for developing or designing a composition, system, optionally a composition, system, based therapy or therapeutic in a population, can include (a) selecting for a (therapeutic) locus of interest reprogrammable spacer target sites, wherein said target sites have minimal sequence variation across a population, and from said selected target sites sub selecting target sites, wherein a ωRNA directed against said target sites recognizes a minimal number of off-target sites across said population, or (b) selecting for a (therapeutic) locus of interest ωRNA reprogrammable spacer target sites, wherein said target sites have minimal sequence variation across a population, or selecting for a (therapeutic) locus of interest ωRNA reprogrammable spacer target sites, wherein a ωRNA directed against said target sites recognizes a minimal number of off-target sites across said population, and optionally estimating the number of (sub)selected target sites needed to treat or otherwise modulate or manipulate a population, optionally validating one or more of the (sub)selected target sites for an individual subject, optionally designing one or more ωRNA recognizing one or more of said (sub)selected target sites.

[0856] In one embodiment, the method for developing or designing a gRNA for use in a composition, system,, optionally a composition, system, based therapy or therapeutic in a population, can include (a) selecting for a (therapeutic) locus of interest gRNA target sites, wherein said target sites have minimal sequence variation across a population, and from said selected target sites sub selecting target sites, wherein a gRNA directed against said target sites recognizes a minimal number of off-target sites across said population, or (b) selecting for a (therapeutic) locus of interest gRNA target sites, wherein said target sites have minimal sequence variation across a population, or selecting for a (therapeutic) locus of interest gRNA target sites, wherein a gRNA directed against said target sites recognizes a minimal number of off-target sites across said population, and optionally estimating the number of (sub)selected target sites needed to treat or otherwise modulate or manipulate a population, optionally validating one or more of the (sub)selected target sites for an individual subject, optionally designing one or more ωRNA reprogrammable spacer recognizing one or more of said (sub)selected target sites.

[0857] In one embodiment, the method for developing or designing a composition, system, such as a composition, system, based therapy or therapeutic, optionally in a population; or for developing or designing a ωRNA reprogrammable spacer for use in a composition, system, optionally a composition, system, based therapy or therapeutic, optionally in a population, can include selecting a set of target sequences for one or more loci in a target population, wherein the target sequences do not contain variants occurring above a threshold allele frequency in the target population (i.e., platinum target sequences); removing from said selected (platinum) target sequences any target sequences having high frequency off-target candidates (relative to other (platinum) targets in the set) to define a final target sequence set; preparing one or more, such as a set of compositions, systems, based on the final target sequence set, optionally wherein a number of composition prepared is based (at least in part) on the size of a target population.

[0858] In an embodiment, off-target candidates/off-targets, TAM restrictiveness, target cleavage efficiency, or effector protein specificity is identified or determined using a sequencing-based double-strand break (DSB) detection assay, such as described herein elsewhere. In an embodiment, off-target candidates/off-targets are identified or determined using a sequencing-based double-strand break (DSB) detection assay, such as described herein elsewhere. In an embodiment, off-targets, or off target candidates have at least 1, preferably 1-3, mismatches or (distal) TAM mismatches, such as 1 or more, such as 1, 2, 3, or more (distal) TAM mismatches. In an embodiment, sequencing-based DSB detection assay comprises labeling a site of a DSB with an adapter comprising a primer binding site, labeling a site of a DSB with a barcode or unique molecular identifier, or combination thereof, as described herein elsewhere.

[0859] It will be understood that the reprogrammable spacer sequence of the ωRNA is 100% complementary to the target site, i.e., does not comprise any mismatch with the target site. It will be further understood that “recognition” of an (off-)target site by a reprogrammable spacer presupposes composition, system, functionality, i.e., an (off-)target site is only recognized by a reprogrammable spacer RNA if binding of the reprogrammable spacer RNA to the (off-)target site leads to composition, system, activity (such as induction of single or double strand DNA cleavage, transcriptional modulation, etc.).

[0860] In an embodiment, the target sites having minimal sequence variation across a population are characterized by absence of sequence variation in at least 99%, preferably at least 99.9%, more preferably at least 99.99% of the population. In an embodiment, optimizing target location comprises selecting target sequences or loci having an absence of sequence variation in at least 99%, preferably at least 99.9%, more preferably at least 99.99% of a population. These targets are referred to herein elsewhere also as “platinum targets”. In an embodiment, said population comprises at least 1000 individuals, such as at least 5000 individuals, such as at least 10000 individuals, such as at least 50000 individuals.

[0861] In an embodiment, the off-target sites are characterized by at least one mismatch between the off-target site and the ωRNA. In an embodiment, the off-target sites are characterized by at most five, preferably at most four, more preferably at most three mismatches between the off-target site and the ωRNA. In an embodiment, the off-target sites are characterized by at least one mismatch between the off-target site and the ωRNA and by at most five, preferably at most four, more preferably at most three mismatches between the off-target site and the ωRNA.

[0862] In an embodiment, said minimal number of off-target sites across said population is determined for high-frequency haplotypes in said population. In an embodiment, said minimal number of off-target sites across said population is determined for high-frequency haplotypes of the off-target site locus in said population. In an embodiment, said minimal number of off-target sites across said population is determined for high-frequency haplotypes of the target site locus in said population. In an embodiment, the high-frequency haplotypes are characterized by occurrence in at least 0.1% of the population.

[0863] In an embodiment, the number of (sub)selected target sites needed to treat a population is estimated based on based low frequency sequence variation, such as low frequency sequence variation captured in large scale sequencing datasets. In an embodiment, the number of (sub)selected target sites needed to treat a population of a given size is estimated.

[0864] In an embodiment, the method further comprises obtaining genome sequencing data of a subject to be treated; and treating the subject with a composition, system, selected from the set of compositions, systems, wherein the composition, system, selected is based (at least in part) on the genome sequencing data of the individual. In an embodiment, the ((sub)selected) target is validated by genome sequencing, preferably whole genome sequencing.

[0865] In an embodiment, target sequences or loci as described herein are (further) selected based on optimization of one or more parameters, such as TAM type (natural or modified), TAM nucleotide content, TAM length, target sequence length, TAM restrictiveness, target cleavage efficiency, and target sequence position within a gene, a locus or other genomic region. Methods of optimization are discussed in greater detail elsewhere herein.

[0866] In an embodiment, target sequences or loci as described herein are (further) selected based on optimization of one or more of target loci location, target length, target specificity, and TAM characteristics. As used herein, TAM characteristics may comprise for instance TAM sequence, TAM length, and/or TAM GC contents. In an embodiment, optimizing TAM characteristics comprises optimizing nucleotide content of a TAM. In an embodiment, optimizing nucleotide content of TAM is selecting a TAM with a motif that maximizes abundance in the one or more target loci, minimizes mutation frequency, or both. Minimizing mutation frequency can for instance be achieved by selecting TAM sequences devoid of or having low or minimal CpG.

[0867] In an embodiment, the effector protein for each composition and system, in the set of compositions, systems, is selected based on optimization of one or more parameters selected from the group consisting of; effector protein size, ability of effector protein to access regions of high chromatin accessibility, degree of uniform enzyme activity across genomic targets, epigenetic tolerance, mismatch/budge tolerance, effector protein specificity, effector protein stability or half-life, effector protein immunogenicity or toxicity. Methods of optimization are discussed in greater detail elsewhere herein.

### Optimization of the Systems

[0868] The methods of the present invention can involve optimization of selected parameters or variables associated with the composition, system, and/or its functionality, as described herein further elsewhere. Optimization of the composition, system, in the methods as described herein may depend on the target(s), such as the therapeutic target or therapeutic targets, the mode or type of composition, system, modulation, such as composition, system, based therapeutic target(s) modulation, modification, or manipulation, as well as the delivery of the composition, system, components. One or more targets may be selected, depending on the genotypic and/or phenotypic outcome. For instance, one or more therapeutic targets may be selected, depending on (genetic) disease etiology or the desired therapeutic outcome. The (therapeutic) target(s) may be a single gene, locus, or other genomic site, or may be multiple genes, loci or other genomic sites. As is known in the art, a single gene, locus, or other genomic site may be targeted more than once, such as by use of multiple ωRNAs, or ωRNA scaffold and multiple reprogrammable spacers.

[0869] The activity of the composition and/or system, such as IscB polypeptide nuclease-based therapy or therapeutics may involve target disruption, such as target mutation, such as leading to gene knockout. The activity of the composition and/or system, such as IscB polypeptide nuclease-based therapy or therapeutics may involve replacement of particular target sites, such as leading to target correction. IscB polypeptide or CRISPR-associated IscB polypeptide nuclease-based therapy or therapeutics may involve removal of particular target sites, such as leading to target deletion. The activity of the composition and/or system, such as IscB polypeptide or CRISPR-associated IscB polypeptide nuclease-based therapy or therapeutics may involve modulation of target site functionality, such as target site activity or accessibility, leading for instance to (transcriptional and/or epigenetic) gene or genomic region activation or gene or genomic region silencing. The skilled person will understand that modulation of target site functionality may involve IscB polypeptide or CRISPR-associated IscB polypeptide nuclease mutation (such as for instance generation of a catalytically inactive IscB polypeptide or CRISPR-associated IscB polypeptide nuclease) and/or functionalization (such as for instance fusion of the IscB polypeptide or CRISPR-associated IscB polypeptide nuclease with a heterologous functional domain, such as a transcriptional activator or repressor), as described herein elsewhere.

[0870] Accordingly, in an aspect, the invention relates to a method as described herein, comprising selection of one or more (therapeutic) target, selecting one or more functionality of the composition and/or system, and optimization of selected parameters or variables associated with the composition and/or its functionality. In a related aspect, the invention relates to a method as described herein, comprising (a) selecting one or more (therapeutic) target loci, (b) selecting one or more composition functionalities, (c) optionally selecting one or more modes of delivery, and preparing, developing, or designing a composition herein selected based on steps (a)-(c).

[0871] In an embodiment, the functionality of the composition and/or system comprises genomic mutation. In an embodiment, the functionality of the composition and/or system comprises single genomic mutation. In an embodiment, the functionality of the composition and/or system functionality comprises multiple genomic mutation. In an embodiment, the functionality of the composition and/or system comprises gene knockout. In an embodiment, the functionality of the composition and/or system comprises single gene knockout. In an embodiment, the functionality of the composition and/or system comprises multiple gene knockout. In an embodiment, the functionality of the composition and/or system comprises gene correction. In an embodiment, the functionality of the composition and/or system comprises single gene correction. In an embodiment, the functionality of the composition and/or system comprises multiple gene correction. In an embodiment, the functionality of the composition and/or system comprises genomic region correction. In an embodiment, the functionality of the composition and/or system comprises single genomic region correction. In an embodiment, the functionality of the composition and/or system comprises multiple genomic region correction. In an embodiment, the functionality of the composition and/or system comprises gene deletion. In an embodiment, the functionality of the composition and/or system comprises single gene deletion. In an embodiment, the functionality of the composition and/or system comprises multiple gene deletion. In an embodiment, the functionality of the composition and/or system comprises genomic region deletion. In an embodiment, the functionality of the composition and/or system comprises single genomic region deletion. In an embodiment, the functionality of the composition and/or system comprises multiple genomic region deletion. In an embodiment, the functionality of the composition and/or system comprises modulation of gene or genomic region functionality. In an embodiment, the functionality of the composition and/or system comprises modulation of single gene or genomic region functionality. In an embodiment, the functionality of the composition and/or system comprises modulation of multiple gene or genomic region functionality. In an embodiment, the functionality of the composition and/or system comprises gene or genomic region functionality, such as gene or genomic region activity. In an embodiment, the functionality of the composition and/or system comprises single gene or genomic region functionality, such as gene or genomic region activity. In an embodiment, the functionality of the composition and/or system comprises multiple gene or genomic region functionality, such as gene or genomic region activity. In an embodiment, the functionality of the composition and/or system comprises modulation gene activity or accessibility optionally leading to transcriptional and/or epigenetic gene or genomic region activation or gene or genomic region silencing. In an embodiment, the functionality of the composition and/or system comprises modulation single gene activity or accessibility optionally leading to transcriptional and/or epigenetic gene or genomic region activation or gene or genomic region silencing. In an embodiment, the functionality of the composition and/or system comprises modulation multiple gene activity or accessibility optionally leading to transcriptional and/or epigenetic gene or genomic region activation or gene or genomic region silencing.

[0872] Optimization of selected parameters or variables in the methods as described herein may result in optimized or improved the system, such as IscB polypeptide or CRISPR-associated IscB polypeptide nuclease-based therapy or therapeutic, specificity, efficacy, and/or safety. In an embodiment, one or more of the following parameters or variables are taken into account, are selected, or are optimized in the methods of the invention as described herein: IscB polypeptide or CRISPR-associated IscB polypeptide nuclease allosteric interactions, IscB polypeptide nuclease functional domains and functional domain interactions, IscB polypeptide or CRISPR-associated IscB polypeptide nuclease specificity, hRNA specificity, composition specificity, TAM restrictiveness, TAM type (natural or modified), TAM nucleotide content, TAM length, IscB polypeptide or CRISPR-associated IscB polypeptide nuclease activity, hRNA activity, IscB polypeptide or CRISPR-associated IscB polypeptide nuclease/guide complex activity, target cleavage efficiency, target site selection, target sequence length, ability of effector protein to access regions of high chromatin accessibility, degree of uniform enzyme activity across genomic targets, epigenetic tolerance, mismatch/budge tolerance, IscB polypeptide or CRISPR-associated IscB polypeptide nuclease stability, IscB polypeptide or CRISPR-associated IscB polypeptide or CRISPR-associated IscB polypeptide nuclease mRNA stability, gRNA stability, IscB polypeptide or CRISPR-associated IscB polypeptide nuclease complex stability, IscB polypeptide or CRISPR-associated IscB polypeptide nuclease protein or mRNA immunogenicity or toxicity, gRNA immunogenicity or toxicity, IscB polypeptide or CRISPR-associated IscB polypeptide nuclease immunogenicity or toxicity, IscB polypeptide or CRISPR-associated IscB polypeptide nuclease or mRNA dose or titer, gRNA dose or titer, dose or titer, IscB polypeptide nuclease protein size, IscB polypeptide nuclease expression level, gRNA expression level, IscB polypeptide or CRISPR-associated IscB polypeptide nuclease expression level, IscB polypeptide or CRISPR-associated IscB polypeptide nuclease spatiotemporal expression, gRNA spatiotemporal expression, IscB polypeptide or CRISPR-associated IscB polypeptide nuclease/hRNA spatiotemporal expression.

[0873] By means of example, and without limitation, parameter or variable optimization may be achieved as follows. IscB polypeptide nuclease specificity may be optimized by selecting the most specific IscB polypeptide or CRISPR-associated IscB polypeptide nuclease, e.g. IscB polypeptide or CRISPR-associated IscB polypeptide. This may be achieved for instance by selecting the most specific IscB polypeptide nuclease orthologue or by specific IscB polypeptide or CRISPR-associated IscB polypeptide or CRISPR-associated IscB polypeptide nuclease mutations which increase specificity. ωRNA specificity may be optimized by selecting the most specific ωRNA. This can be achieved for instance by selecting ωRNA having low homology, i.e., at least one or preferably more, such as at least 2, or preferably at least 3, mismatches to off-target sites. The specificity may be optimized by increasing IscB polypeptide or CRISPR-associated IscB polypeptide nuclease specificity and/or ωRNA specificity as above. TAM restrictiveness may be optimized by selecting a IscB polypeptide or CRISPR-associated IscB polypeptide nuclease having to most restrictive TAM recognition. This can be achieved for instance by selecting a IscB polypeptide or CRISPR-associated IscB polypeptide nuclease ortholog having more restrictive TAM recognition or by specific IscB polypeptide or CRISPR-associated IscB polypeptide or CRISPR-associated IscB polypeptide mutations which increase or alter TAM restrictiveness. TAM type may be optimized for instance by selecting the appropriate IscB polypeptide or CRISPR-associated IscB polypeptide nuclease, such as the appropriate IscB polypeptide or CRISPR-associated IscB polypeptide nuclease recognizing a desired TAM type. The IscB polypeptide or CRISPR-associated IscB polypeptide nuclease or TAM type may be naturally occurring or may for instance be optimized based on IscB polypeptide or CRISPR-associated IscB polypeptide nuclease mutants having an altered TAM recognition, or TAM recognition repertoire. TAM nucleotide content may for instance be optimized by selecting the appropriate IscB polypeptide or CRISPR-associated IscB polypeptide nuclease, such as the appropriate IscB polypeptide or CRISPR-associated IscB polypeptide nuclease recognizing a desired TAM nucleotide content. The IscB polypeptide or CRISPR-associated IscB polypeptide nuclease or TAM type may be naturally occurring or may for instance be optimized based on IscB polypeptide or CRISPR-associated IscB polypeptide nuclease mutants having an altered TAM recognition, or TAM recognition repertoire. TAM length may for instance be optimized by selecting the appropriate IscB polypeptide nuclease, such as the appropriate IscB polypeptide or CRISPR-associated IscB polypeptide nuclease recognizing a desired TAM nucleotide length. The IscB polypeptide or CRISPR-associated IscB polypeptide nuclease or TAM type may be naturally occurring or may for instance be optimized based on IscB polypeptide nuclease mutants having an altered TAM recognition, or TAM recognition repertoire.

[0874] Target length or target sequence length may be optimized, for instance, by selecting the appropriate IscB polypeptide or CRISPR-associated IscB polypeptide nuclease, such as the appropriate IscB polypeptide nuclease recognizing a desired target or target sequence nucleotide length. Alternatively, or in addition, the target (sequence) length may be optimized by providing a target having a length deviating from the target (sequence) length typically associated with the IscB polypeptide nuclease, such as the naturally occurring IscB polypeptide or CRISPR-associated IscB polypeptide nuclease. The IscB polypeptide or CRISPR-associated IscB polypeptide nuclease or target (sequence) length may be naturally occurring or may for instance be optimized based on IscB polypeptide or CRISPR-associated IscB polypeptide nuclease mutants having an altered target (sequence) length recognition, or target (sequence) length recognition repertoire. For instance, increasing or decreasing target (sequence) length may influence target recognition and/or off-target recognition. IscB polypeptide or CRISPR-associated IscB polypeptide nuclease activity may be optimized by selecting the most active IscB polypeptide or CRISPR-associated IscB polypeptide nuclease. This may be achieved for instance by selecting the most active IscB polypeptide or CRISPR-associated IscB polypeptide nuclease ortholog or by specific IscB polypeptide or CRISPR-associated IscB polypeptide nuclease mutations which increase activity. The ability of the IscB polypeptide or CRISPR-associated IscB polypeptide nuclease protein to access regions of high chromatin accessibility, may be optimized by selecting the appropriate IscB polypeptide or CRISPR-associated IscB polypeptide nuclease or mutant thereof, and can consider the size of the IscB polypeptide or CRISPR-associated IscB polypeptide nuclease, charge, or other dimensional variables etc. The degree of uniform IscB polypeptide or CRISPR-associated IscB polypeptide nuclease activity may be optimized by selecting the appropriate IscB polypeptide nuclease or mutant thereof, and can consider IscB polypeptide or CRISPR-associated IscB polypeptide or CRISPR-associated IscB polypeptide nuclease specificity and/or activity, TAM specificity, target length, mismatch tolerance, epigenetic tolerance, IscB polypeptide or CRISPR-associated IscB polypeptide nuclease and/or ωRNA stability and/or half-life, IscB polypeptide or CRISPR-associated IscB polypeptide nuclease and/or ωRNA immunogenicity and/or toxicity, etc. ωRNA activity may be optimized by selecting the most active ωRNA. In one embodiment, this can be achieved by increasing ωRNA stability through RNA modification. compositions activity may be optimized by increasing IscB polypeptide or CRISPR-associated IscB polypeptide or CRISPR-associated IscB polypeptide nuclease activity and/or ωRNA activity as above.

[0875] The target site selection may be optimized by selecting the optimal position of the target site within a gene, locus or other genomic region. The target site selection may be optimized by optimizing target location comprises selecting a target sequence with a gene, locus, or other genomic region having low variability. This may be achieved for instance by selecting a target site in an early and/or conserved exon or domain (i.e., having low variability, such as polymorphisms, within a population).

[0876] In an embodiment, optimizing target (sequence) length comprises selecting a target sequence within one or more target loci between 5 and 25 nucleotides. In an embodiment, a target sequence is 20 nucleotides.

[0877] In an embodiment, optimizing target specificity comprises selecting targets loci that minimize off-target candidates.

[0878] In one embodiment, the target site may be selected by minimization of off-target effects (e.g., off-targets qualified as having 1-5, 1-4, or preferably 1-3 mismatches compared to target and/or having one or more TAM mismatches, such as distal TAM mismatches), preferably also considering variability within a population. IscB polypeptide nuclease stability may be optimized by selecting IscB polypeptide nuclease having appropriate half-life, such as preferably a short half-life while still capable of maintaining sufficient activity. In one embodiment, this can be achieved by selecting an appropriate IscB polypeptide nuclease orthologue having a specific half-life or by specific IscB polypeptide nuclease mutations or modifications which affect half-life or stability, such as inclusion (e.g., fusion) of stabilizing or destabilizing domains or sequences. IscB polypeptide nuclease mRNA stability may be optimized by increasing or decreasing IscB polypeptide nuclease mRNA stability. In one embodiment, this can be achieved by increasing or IscB polypeptide or CRISPR-associated IscB polypeptide nuclease mRNA stability through mRNA modification. hRNA stability may be optimized by increasing or decreasing ωRNA stability. In one embodiment, this can be achieved by increasing or decreasing ωRNA stability through RNA modification. The stability may be optimized by increasing or decreasing IscB polypeptide or CRISPR-associated IscB polypeptide nuclease stability and/or gRNA stability as above. IscB polypeptide nuclease protein or mRNA immunogenicity or toxicity may be optimized by decreasing IscB polypeptide or CRISPR-associated IscB polypeptide nuclease or mRNA immunogenicity or toxicity. In one embodiment, this can be achieved by mRNA or protein modifications. Similarly, in case of DNA based expression systems, DNA immunogenicity or toxicity may be decreased. ωRNA immunogenicity or toxicity may be optimized by decreasing hRNA immunogenicity or toxicity. In one embodiment, this can be achieved by ωRNA modifications. Similarly, in case of DNA based expression systems, DNA immunogenicity or toxicity may be decreased. The immunogenicity or toxicity may be optimized by decreasing IscB polypeptide or CRISPR-associated IscB polypeptide nuclease immunogenicity or toxicity and/or ωRNA immunogenicity or toxicity as above, or by selecting the least immunogenic or toxic IscB polypeptide or CRISPR-associated IscB polypeptide nuclease/hRNA combination. Similarly, in case of DNA based expression systems, DNA immunogenicity or toxicity may be decreased. IscB polypeptide or CRISPR-associated IscB polypeptide nuclease protein or mRNA dose or titer may be optimized by selecting dosage or titer to minimize toxicity and/or maximize specificity and/or efficacy. ωRNA dose or titer may be optimized by selecting dosage or titer to minimize toxicity and/or maximize specificity and/or efficacy. The composition dose or titer may be optimized by selecting dosage or titer to minimize toxicity and/or maximize specificity and/or efficacy. The IscB polypeptide or CRISPR-associated IscB polypeptide nuclease size may be optimized by selecting minimal protein size to increase efficiency of delivery, in particular for virus mediated delivery. IscB polypeptide or CRISPR-associated IscB polypeptide nuclease, ωRNA, or complex thereof expression level may be optimized by limiting (or extending) the duration of expression and/or limiting (or increasing) expression level. This may be achieved for instance by using self-inactivating compositions, systems,, such as including a self-targeting (e.g., IscB polypeptide or CRISPR-associated IscB polypeptide nuclease targeting) gRNA, by using viral vectors having limited expression duration, by using appropriate promoters for low (or high) expression levels, by combining different delivery methods for individual IscB polypeptide or CRISPR-associated IscB polypeptide system components, such as virus mediated delivery of IscB polypeptide or CRISPR-associated IscB polypeptide nuclease encoding nucleic acid combined with non-virus mediated delivery of ωRNA, or virus mediated delivery of ωRNA combined with non-virus mediated delivery of IscB polypeptide or CRISPR-associated IscB polypeptide or CRISPR-associated IscB polypeptide nuclease or mRNA. IscB polypeptide nuclease, ωRNA, or IscB polypeptide or CRISPR-associated IscB polypeptide complex spatiotemporal expression may be optimized by appropriate choice of conditional and/or inducible expression systems, including controllable IscB polypeptide or CRISPR-associated IscB polypeptide nuclease activity optionally a destabilized IscB polypeptide or CRISPR-associated IscB polypeptide nuclease and/or a split IscB polypeptide or CRISPR-associated IscB polypeptide nuclease, and/or cell- or tissue-specific expression systems.

[0879] In an aspect, the invention relates to a method as described herein, comprising selection of one or more (therapeutic) target, selecting the functionality of the composition and/or system, selecting composition mode of delivery, selecting composition delivery vehicle or expression system, and optimization of selected parameters or variables associated with the composition and/or its functionality, optionally wherein the parameters or variables are one or more selected from IscB polypeptide or CRISPR-associated IscB polypeptide nuclease specificity, ωRNA specificity, IscB polypeptide or CRISPR-associated IscB polypeptide complex specificity, TAM restrictiveness, TAM type (natural or modified), TAM nucleotide content, TAM length, IscB polypeptide or CRISPR-associated IscB polypeptide nuclease activity, gRNA activity, IscB polypeptide or CRISPR-associated IscB polypeptide nuclease/hRNA complex activity, target cleavage efficiency, target site selection, target sequence length, ability of effector protein to access regions of high chromatin accessibility, degree of uniform enzyme activity across genomic targets, epigenetic tolerance, mismatch/budge tolerance, IscB polypeptide or CRISPR-associated IscB polypeptide or CRISPR-associated IscB polypeptide nuclease stability, IscB polypeptide nuclease mRNA stability, ωRNA stability, IscB polypeptide or CRISPR-associated IscB polypeptide complex stability, IscB polypeptide or CRISPR-associated IscB polypeptide nuclease protein or mRNA immunogenicity or toxicity, ωRNA immunogenicity or toxicity, IscB polypeptide or CRISPR-associated IscB polypeptide nuclease/ωRNA complex immunogenicity or toxicity, IscB polypeptide or CRISPR-associated IscB polypeptide nuclease protein or mRNA dose or titer, ωRNA dose or titer, IscB polypeptide or CRISPR-associated IscB polypeptide complex dose or titer, IscB polypeptide or CRISPR-associated IscB polypeptide nuclease protein size, IscB polypeptide or CRISPR-associated IscB polypeptide nuclease expression level, ωRNA expression level, IscB polypeptide or CRISPR-associated IscB polypeptide nuclease/ωRNA molecule complex expression level, IscB polypeptide or CRISPR-associated IscB polypeptide nuclease spatiotemporal expression, ωRNA spatiotemporal expression, IscB polypeptide or CRISPR-associated IscB polypeptide nuclease/ωRNA complex spatiotemporal expression.

[0880] It will be understood that the parameters or variables to be optimized as well as the nature of optimization may depend on the (therapeutic) target, the functionality of the composition and/or system, the system mode of delivery, and/or the composition delivery vehicle or expression system.

[0881] In an aspect, the invention relates to a method as described herein, comprising optimization of ωRNA specificity at the population level. Preferably, said optimization of ωRNA specificity comprises minimizing ωRNA target site sequence variation across a population and/or minimizing ωRNA off-target incidence across a population.

[0882] In one embodiment, optimization can result in selection of a IscB polypeptide or CRISPR-associated IscB polypeptide nuclease that is naturally occurring or is modified. In one embodiment, optimization can result in selection of a IscB polypeptide or CRISPR-associated IscB polypeptide nuclease that has nuclease, nickase, deaminase, transposase, and/or has one or more effector functionalities deactivated or eliminated. In one embodiment, optimizing a TAM specificity can include selecting a IscB polypeptide or CRISPR-associated IscB polypeptide nuclease with a modified TAM specificity. In one embodiment, optimizing can include selecting a IscB polypeptide or CRISPR-associated IscB polypeptide nuclease having a minimal size. In an embodiment, optimizing effector protein stability comprises selecting an effector protein having a short half-life while maintaining sufficient activity, such as by selecting an appropriate IscB polypeptide nuclease orthologue having a specific half-life or stability. In an embodiment, optimizing immunogenicity or toxicity comprises minimizing effector protein immunogenicity or toxicity by protein modifications. In an embodiment, optimizing functional specific comprises selecting a protein effector with reduced tolerance of mismatches and/or bulges between the guide RNA and one or more target loci.

[0883] In an embodiment, optimizing efficacy comprises optimizing overall efficiency, epigenetic tolerance, or both. In an embodiment, maximizing overall efficiency comprises selecting an effector protein with uniform enzyme activity across target loci with varying chromatin complexity, selecting an effector protein with enzyme activity limited to areas of open chromatin accessibility. In an embodiment, chromatin accessibility is measured using one or more of ATAC-seq, or a DNA-proximity ligation assay. In an embodiment, optimizing epigenetic tolerance comprises optimizing methylation tolerance, epigenetic mark competition, or both. In an embodiment, optimizing methylation tolerance comprises selecting an effector protein that modify methylated DNA. In an embodiment, optimizing epigenetic tolerance comprises selecting an effector protein unable to modify silenced regions of a chromosome, selecting an effector protein able to modify silenced regions of a chromosome, or selecting target loci not enriched for epigenetic markers.

[0884] In an embodiment, selecting an optimized guide RNA comprises optimizing gRNA stability, gRNA immunogenicity, or both, or other gRNA associated parameters or variables as described herein elsewhere.

[0885] In an embodiment, optimizing gRNA stability and/or gRNA immunogenicity comprises RNA modification, or other gRNA associated parameters or variables as described herein elsewhere. In an embodiment, the modification comprises removing 1-3 nucleotides form the 3′ end of a target complementarity region of the gRNA. In an embodiment, modification comprises an extended gRNA and/or trans RNA/DNA element that create stable structures in the gRNA that compete with gRNA base pairing at a target of off-target loci, or extended complimentary nucleotides between the gRNA and target sequence, or both.

[0886] In an embodiment, the mode of delivery comprises delivering gRNA and/or IscB polypeptide or CRISPR-associated IscB polypeptide nuclease, delivering gRNA and/or IscB polypeptide or CRISPR-associated IscB polypeptide nuclease mRNA, or delivery gRNA and/or IscB polypeptide nuclease as a DNA based expression system. In an embodiment, the mode of delivery further comprises selecting a delivery vehicle and/or expression systems from the group consisting of liposomes, lipid particles, nanoparticles, biolistics, or viral-based expression/delivery systems. In an embodiment, expression is spatiotemporal expression is optimized by choice of conditional and/or inducible expression systems, including controllable IscB polypeptide nuclease activity optionally a destabilized IscB polypeptide or CRISPR-associated IscB polypeptide or CRISPR-associated IscB polypeptide and/or a split IscB polypeptide nuclease, and/or cell- or tissue-specific expression system.

[0887] The methods as described herein may further involve selection of the mode of delivery. In an embodiment, ωRNA and/or IscB polypeptide or CRISPR-associated IscB polypeptide nuclease are or are to be delivered. In an embodiment, ωRNA and/or IscB polypeptide or CRISPR-associated IscB polypeptide nuclease mRNA are or are to be delivered. In an embodiment, ωRNA and/or IscB polypeptide or CRISPR-associated IscB polypeptide nuclease provided in a DNA-based expression system are or are to be delivered. In an embodiment, delivery of the individual system components comprises a combination of the above modes of delivery. In an embodiment, delivery comprises delivering ωRNA and/or IscB polypeptide or CRISPR-associated IscB polypeptide nuclease protein, delivering ωRNA and/or IscB polypeptide or CRISPR-associated IscB polypeptide nuclease mRNA, or delivering ωRNA and/or IscB polypeptide or CRISPR-associated IscB polypeptide nuclease as a DNA based expression system.

[0888] The methods as described herein may further involve selection of the composition delivery vehicle and/or expression system. Delivery vehicles and expression systems are described herein elsewhere. By means of example, delivery vehicles of nucleic acids and/or proteins include nanoparticles, liposomes, etc. Delivery vehicles for DNA, such as DNA-based expression systems include for instance biolistics, viral based vector systems (e.g., adenoviral, AAV, lentiviral), etc. the skilled person will understand that selection of the mode of delivery, as well as delivery vehicle or expression system may depend on for instance the cell or tissues to be targeted. In an embodiment, the delivery vehicle and/or expression system for delivering the compositions, systems, or components thereof comprises liposomes, lipid particles, nanoparticles, biolistics, or viral-based expression/delivery systems.

### Considerations for Therapeutic Applications

[0889] A consideration in genome editing therapy is the choice of sequence-specific nuclease, such as a variant of a IscB polypeptide nuclease. Each nuclease variant may possess its own unique set of strengths and weaknesses, many of which must be balanced in the context of treatment to maximize therapeutic benefit. For a specific editing therapy to be efficacious, a sufficiently high level of modification must be achieved in target cell populations to reverse disease symptoms. This therapeutic modification ‘threshold’ is determined by the fitness of edited cells following treatment and the amount of gene product necessary to reverse symptoms. With regard to fitness, editing creates three potential outcomes for treated cells relative to their unedited counterparts: increased, neutral, or decreased fitness. In the case of increased fitness, corrected cells may be able and expand relative to their diseased counterparts to mediate therapy. In this case, where edited cells possess a selective advantage, even low numbers of edited cells can be amplified through expansion, providing a therapeutic benefit to the patient. Where the edited cells possess no change in fitness, an increase the therapeutic modification threshold can be warranted. As such, significantly greater levels of editing may be needed to treat diseases, where editing creates a neutral fitness advantage, relative to diseases where editing creates increased fitness for target cells. If editing imposes a fitness disadvantage, as would be the case for restoring function to a tumor suppressor gene in cancer cells, modified cells would be outcompeted by their diseased counterparts, causing the benefit of treatment to be low relative to editing rates. This may be overcome with supplemental therapies to increase the potency and/or fitness of the edited cells relative to the diseased counterparts.

[0890] In addition to cell fitness, the amount of gene product necessary to treat disease can also influence the minimal level of therapeutic genome editing that can treat or prevent a disease or a symptom thereof. In cases where a small change in the gene product levels can result in significant changes in clinical outcome, the minimal level of therapeutic genome editing is less relative to cases where a larger change in the gene product levels are needed to gain a clinically relevant response. In one embodiment, the minimal level of therapeutic genome editing can range from 0.1 to 1%, 1-5%, 5-10%, 10-15%, 15-20%, 20-25%, 25-30%, 30-35%, 35-40%, 40-45%. 45-50%, or 50-55%. Thus, where a small change in gene product levels can influence clinical outcomes and diseases where there is a fitness advantage for edited cells, are ideal targets for genome editing therapy, as the therapeutic modification threshold is low enough to permit a high chance of success.

[0891] The activity of NHEJ and HDR DSB repair can vary by cell type and cell state. NHEJ is not highly regulated by the cell cycle and is efficient across cell types, allowing for high levels of gene disruption in accessible target cell populations. In contrast, HDR acts primarily during S/G2 phase, and is therefore restricted to cells that are actively dividing, limiting treatments that require precise genome modifications to mitotic cells [Ciccia, A. & Elledge, S. J. Molecular cell 40, 179-204 (2010); Chapman, J. R., et al. Molecular cell 47, 497-510 (2012)].

[0892] The efficiency of correction via HDR may be controlled by the epigenetic state or sequence of the targeted locus, or the specific repair template configuration (single vs. double stranded, long vs. short homology arms) used [Hacein-Bey-Abina, S., et al. The New England journal of medicine 346, 1185-1193 (2002); Gaspar, H. B., et al. Lancet 364, 2181-2187 (2004); Beumer, K. J., et al. G3 (2013)]. The relative activity of NHEJ and HDR machineries in target cells may also affect gene correction efficiency, as these pathways may compete to resolve DSBs [Beumer, K. J., et al. Proceedings of the National Academy of Sciences of the United States of America 105, 19821-19826 (2008)]. HDR also imposes a delivery challenge not seen with NHEJ strategies, as it uses the concurrent delivery of nucleases and repair templates. Thus, these differences can be kept in mind when designing, optimizing, and/or selecting a IscB polypeptide nuclease based therapeutic as described in greater detail elsewhere herein.

[0893] IscB polypeptide or CRISPR-associated IscB polypeptide nuclease-based polynucleotide modification application can include combinations of proteins, small RNA molecules, and/or repair templates, and can make, In one embodiment, delivery of these multiple parts substantially more challenging than, for example, traditional small molecule therapeutics. Two main strategies for delivery of compositions, systems, and components thereof have been developed: ex vivo and in vivo. In one embodiment of ex vivo treatments, diseased cells are removed from a subject, edited and then transplanted back into the patient. In other embodiments, cells from a healthy allogeneic donor are collected, modified using a composition or component thereof, to impart various functionalities and/or reduce immunogenicity, and administered to an allogeneic recipient in need of treatment. Ex vivo editing has the advantage of allowing the target cell population to be well defined and the specific dosage of therapeutic molecules delivered to cells to be specified. The latter consideration may be particularly important when off-target modifications are a concern, as titrating the amount of nuclease may decrease such mutations (Hsu et al., 2013). Another advantage of ex vivo approaches is the typically high editing rates that can be achieved, due to the development of efficient delivery systems for proteins and nucleic acids into cells in culture for research and gene therapy applications.

[0894] In vivo polynucleotide modification via compositions, systems, and/or components thereof involves direct delivery of the compositions, systems, and/or components thereof to cell types in their native tissues. In vivo polynucleotide modification via compositions, systems, and/or components thereof allows diseases in which the affected cell population is not amenable to ex vivo manipulation to be treated. Furthermore, delivering compositions, systems, and/or components thereof to cells in situ allows for the treatment of multiple tissue and cell types.

[0895] In one embodiment, such as those where viral vector systems are used to generate viral particles to deliver the composition and/or component thereof to a cell, the total cargo size of the composition and/or component thereof should be considered as vector systems can have limits on the size of a polynucleotide that can be expressed therefrom and/or packaged into cargo inside of a viral particle. In one embodiment, the tropism of a vector system, such as a viral vector system, should be considered as it can impact the cell type to which the composition or component thereof can be efficiently and/or effectively delivered.

[0896] When delivering a system or component thereof via a viral-based system, it can be important to consider the amount of viral particles that will be needed to achieve a therapeutic effect so as to account for the potential immune response that can be elicited by the viral particles when delivered to a subject or cell(s). When delivering a system or component thereof via a viral based system, it can be important to consider mechanisms of controlling the distribution and/or dosage of the system in vivo. Generally, to reduce the potential for off-target effects, it is optimal but not necessarily required, that the amount of the system be as close to the minimum or least effective dose. In practice this can be challenging to do.

[0897] In one embodiment, it can be important to consider the immunogenicity of the system or component thereof. In embodiments, where the immunogenicity of the system or component thereof is of concern, the immunogenicity system or component thereof can be reduced. By way of example only, the immunogenicity of the system or component thereof can be reduced using the approach set out in Tangri et al. Accordingly, directed evolution or rational design may be used to reduce the immunogenicity of the IscB polypeptide nuclease in the host species (human or other species).

### Xenotransplantation

[0898] The present invention also contemplates use of the composition described herein, e.g., IscB polypeptide nuclease protein systems, to provide RNA-guided DNA nucleases adapted to be used to provide modified tissues for transplantation. For example, RNA-guided DNA nucleases may be used to knockout, knockdown or disrupt selected genes in an animal, such as a transgenic pig (such as the human heme oxygenase-1 transgenic pig line), for example by disrupting expression of genes that encode epitopes recognized by the human immune system, i.e., xenoantigen genes. Candidate porcine genes for disruption may for example include α(1,3)-galactosyltransferase and cytidine monophosphate-N-acetylneuraminic acid hydroxylase genes (see PCT Patent Publication WO 2014/066505). In addition, genes encoding endogenous retroviruses may be disrupted, for example the genes encoding all porcine endogenous retroviruses (see Yang et al., 2015, Genome-wide inactivation of porcine endogenous retroviruses (PERVs), Science 27 Nov. 2015: Vol. 350 no. 6264 pp. 1101-1104). In addition, RNA-guided DNA nucleases may be used to target a site for integration of additional genes in xenotransplant donor animals, such as a human CD55 gene to improve protection against hyperacute rejection.

[0899] Embodiments of the invention also relate to methods and compositions related to knocking out genes, amplifying genes and repairing particular mutations associated with DNA repeat instability and neurological disorders (Robert D. Wells, Tetsuo Ashizawa, Genetic Instabilities and Neurological Diseases, Second Edition, Academic Press, Oct. 13, 2011-Medical). Specific aspects of tandem repeat sequences have been found to be responsible for more than twenty human diseases (New insights into repeat instability: role of RNA·DNA hybrids. McIvor E I, Polak U, Napierala M. RNA Biol. 2010 September-October; 7(5): 551-8). The present effector protein systems may be harnessed to correct these defects of genomic instability.

[0900] Several further aspects of the invention relate to correcting defects associated with a wide range of genetic diseases which are further described on the website of the National Institutes of Health under the topic subsection Genetic Disorders (website at health.nih.gov/topic/GeneticDisorders). The genetic brain diseases may include but are not limited to Adrenoleukodystrophy, Agenesis of the Corpus Callosum, Aicardi Syndrome, Alpers' Disease, Alzheimer's Disease, Barth Syndrome, Batten Disease, CADASIL, Cerebellar Degeneration, Fabry's Disease, Gerstmann-Straussler-Scheinker Disease, Huntington's Disease and other Triplet Repeat Disorders, Leigh's Disease, Lesch-Nyhan Syndrome, Menkes Disease, Mitochondrial Myopathies and NINDS Colpocephaly. These diseases are further described on the website of the National Institutes of Health under the subsection Genetic Brain Disorders.

### Applications in Plants and Fungi

[0901] The compositions, systems, and methods described herein can be used to perform gene or genome interrogation or editing or manipulation in plants and fungi. For example, the applications include investigation and/or selection and/or interrogations and/or comparison and/or manipulations and/or transformation of plant genes or genomes, e.g., to create, identify, develop, optimize, or confer trait(s) or characteristic(s) to plant(s) or to transform a plant or fugus genome. There can accordingly be improved production of plants, new plants with new combinations of traits or characteristics or new plants with enhanced traits. The compositions, systems, and methods can be used with regard to plants in Site-Directed Integration (SDI) or Gene Editing (GE) or any Near Reverse Breeding (NRB) or Reverse Breeding (RB) techniques.

[0902] The compositions, systems, and methods herein may be used to confer desired traits (e.g., enhanced nutritional quality, increased resistance to diseases and resistance to biotic and abiotic stress, and increased production of commercially valuable plant products or heterologous compounds) on essentially any plants and fungi, and their cells and tissues. The compositions, systems, and methods may be used to modify endogenous genes or to modify their expression without the permanent introduction into the genome of any foreign gene.

[0903] In one embodiment, compositions, systems, and methods may be used in genome editing in plants or where RNAi or similar genome editing techniques have been used previously; see, e.g., Nekrasov, “Plant genome editing made easy: targeted mutagenesis in model and crop plants using the CRISPR-Cas system,” Plant Methods 2013, 9:39 (doi: 10.1186/1746-4811-9-39); Brooks, “Efficient gene editing in tomato in the first generation using the CRISPR-Cas9 system,” Plant Physiology September 2014 pp 114247577; Shan, “Targeted genome modification of crop plants using a CRISPR-Cas system,” Nature Biotechnology 31, 686-688 (2013); Feng, “Efficient genome editing in plants using a CRISPR/Cas system,” Cell Research (2013) 23:1229-1232. doi: 10.1038/cr.2013.114; published online 20 Aug. 2013; Xie, “RNA-guided genome editing in plants using a CRISPR-Cas system,” Mol Plant. 2013 November; 6(6): 1975-83. doi: 10.1093/mp/sst119. Epub 2013 Aug. 17; Xu, “Gene targeting using the Agrobacterium tumefaciens-mediated CRISPR-Cas system in rice,” Rice 2014, 7:5(2014), Zhou et al., “Exploiting SNPs for biallelic CRISPR mutations in the outcrossing woody perennial Populus reveals 4-coumarate: CoA ligase specificity and Redundancy,” New Phytologist (2015) (Forum) 1-4 (available online only at www.newphytologist.com); Caliando et al, “Targeted DNA degradation using a CRISPR device stably carried in the host genome, NATURE COMMUNICATIONS 6:6989, DOI: 10.1038/ncomms7989, www.nature.com/naturecommunications DOI: 10.1038/ncomms7989; U.S. Pat. No. 6,603,061—Agrobacterium-Mediated Plant Transformation Method; U.S. Pat. No. 7,868,149—Plant Genome Sequences and Uses Thereof and US 2009/0100536—Transgenic Plants with Enhanced Agronomic Traits, Morrell et al “Crop genomics: advances and applications,” Nat Rev Genet. 2011 Dec. 29; 13(2): 85-96, all the contents and disclosure of each of which are herein incorporated by reference in their entirety. Aspects of utilizing the compositions, systems, and methods may be analogous to the use of the composition in plants, and mention is made of the University of Arizona website “CRISPR-PLANT” (genome.arizona.edu/crispr/) (supported by Penn State and AGI).

[0904] The compositions, systems, and methods may also be used on protoplasts. A “protoplast” refers to a plant cell that has had its protective cell wall completely or partially removed using, for example, mechanical or enzymatic means resulting in an intact biochemical competent unit of living plant that can reform their cell wall, proliferate and regenerate grow into a whole plant under proper growing conditions.

[0905] The compositions, systems, and methods may be used for screening genes (e.g., endogenous, mutations) of interest. In some examples, genes of interest include those encoding enzymes involved in the production of a component of added nutritional value or generally genes affecting agronomic traits of interest, across species, phyla, and plant kingdom. By selectively targeting e.g., genes encoding enzymes of metabolic pathways, the genes responsible for certain nutritional aspects of a plant can be identified. Similarly, by selectively targeting genes which may affect a desirable agronomic trait, the relevant genes can be identified. Accordingly, the present invention encompasses screening methods for genes encoding enzymes involved in the production of compounds with a particular nutritional value and/or agronomic traits.

[0906] It is also understood that reference herein to animal cells may also apply, mutatis mutandis, to plant or fungal cells unless otherwise apparent, and the enzymes herein having reduced off-target effects and systems employing such enzymes can be used in plant applications, including those mentioned herein.

[0907] In some cases, nucleic acids introduced to plants and fungi may be codon optimized for expression in the plants and fungi. Methods of codon optimization include those described in Kwon K C, et al., Codon Optimization to Enhance Expression Yields Insights into Chloroplast Translation, Plant Physiol. 2016 September; 172(1): 62-77.

[0908] The components (e.g., IscB polypeptide nuclease) in the compositions and systems may further comprise one or more functional domains described herein. In some examples, the functional domains may be an exonuclease. Such exonuclease may increase the efficiency of the IscB polypeptide nuclease' function, e.g., mutagenesis efficiency. An example of the functional domain is Trex2, as described in Weiss T et al., www.biorxiv.org/content/10.1101/2020.04.11.037572v1, doi: doi.org/10.1101/2020.04.11.037572.

### Examples of Plants

[0909] The compositions, systems, and methods herein can be used to confer desired traits on essentially any plant. A wide variety of plants and plant cell systems may be engineered for the desired physiological and agronomic characteristics. In general, the term “plant” relates to any various photosynthetic, eukaryotic, unicellular or multicellular organism of the kingdom Plantae characteristically growing by cell division, containing chloroplasts, and having cell walls comprised of cellulose. The term plant encompasses monocotyledonous and dicotyledonous plants.

[0910] The compositions, systems, and methods may be used over a broad range of plants, such as for example with dicotyledonous plants belonging to the orders Magniolales, Illiciales, Laurales, Piperales, Nymphaeales, Aristochiales, Ranunculales, Papeverales, Sarraceniaceae, Trochodendrales, Hamamelidales, Eucomiales, Leitneriales, Myricales, Fagales, Casuarinales, Caryophyllales, Batales, Polygonales, Plumbaginales, Dilleniales, Theales, Malvales, Urticales, Lecythidales, Violales, Salicales, Capparales, Ericales, Diapensales, Ebenales, Primulales, Rosales, Fabales, Podostemales, Haloragales, Myrtales, Cornales, Proteales, San tales, Rafflesiales, Celastrales, Euphorbiales, Rhamnales, Sapindales, Juglandales, Geraniales, Polygalales, Umbellales, Gentianales, Polemoniales, Lamiales, Plantaginales, Scrophulariales, Campanulales, Rubiales, Dipsacales, and Asterales; monocotyledonous plants such as those belonging to the orders Alismatales, Hydrocharitales, Najadales, Triuridales, Commelinales, Eriocaulales, Restionales, Poales, Juncales, Cyperales, Typhales, Bromeliales, Zingiberales, Arecales, Cyclanthales, Pandanales, Arales, Lilliales, and Orchid ales, or with plants belonging to Gymnospermae, e.g., those belonging to the orders Pinales, Ginkgoales, Cycadales, Araucariales, Cupressales and Gnetales.

[0911] The compositions, systems, and methods herein can be used over a broad range of plant species, included in the non-limitative list of dicot, monocot or gymnosperm genera hereunder: Atropa, Alseodaphne, Anacardium, Arachis, Beilschmiedia, Brassica, Carthamus, Cocculus, Croton, Cucumis, Citrus, Citrullus, Capsicum, Catharanthus, Cocos, Coffea, Cucurbita, Daucus, Duguetia, Eschscholzia, Ficus, Fragaria, Glaucium, Glycine, Gossypium, Helianthus, Hevea, Hyoscyamus, Lactuca, Landolphia, Linum, Litsea, Lycopersicon, Lupinus, Manihot, Majorana, Malus, Medicago, Nicotiana, Olea, Parthenium, Papaver, Persea, Phaseolus, Pistacia, Pisum, Pyrus, Prunus, Raphanus, Ricinus, Senecio, Sinomenium, Stephania, Sinapis, Solanum, Theobroma, Trifolium, Trigonella, Vicia, Vinca, Vilis, and Vigna; and the genera Allium, Andropogon, Aragrostis, Asparagus, Avena, Cynodon, Elaeis, Festuca, Festulolium, Heterocallis, Hordeum, Lemna, Lolium, Musa, Oryza, Panicum, Pannesetum, Phleum, Poa, Secale, Sorghum, Triticum, Zea, Abies, Cunninghamia, Ephedra, Picea, Pinus, and Pseudotsuga.

[0912] In one embodiment, target plants and plant cells for engineering include those monocotyledonous and dicotyledonous plants, such as crops including grain crops (e.g., wheat, maize, rice, millet, barley), fruit crops (e.g., tomato, apple, pear, strawberry, orange), forage crops (e.g., alfalfa), root vegetable crops (e.g., carrot, potato, sugar beets, yam), leafy vegetable crops (e.g., lettuce, spinach); flowering plants (e.g., petunia, rose, chrysanthemum), conifers and pine trees (e.g., pine fir, spruce); plants used in phytoremediation (e.g., heavy metal accumulating plants); oil crops (e.g., sunflower, rape seed) and plants used for experimental purposes (e.g., Arabidopsis). Specifically, the plants are intended to comprise without limitation angiosperm and gymnosperm plants such as acacia, alfalfa, amaranth, apple, apricot, artichoke, ash tree, asparagus, avocado, banana, barley, beans, beet, birch, beech, blackberry, blueberry, broccoli, Brussel's sprouts, cabbage, canola, cantaloupe, carrot, cassava, cauliflower, cedar, a cereal, celery, chestnut, cherry, Chinese cabbage, citrus, clementine, clover, coffee, corn, cotton, cowpea, cucumber, cypress, eggplant, elm, endive, eucalyptus, fennel, figs, fir, geranium, grape, grapefruit, groundnuts, ground cherry, gum hemlock, hickory, kale, kiwifruit, kohlrabi, larch, lettuce, leek, lemon, lime, locust, pine, maidenhair, maize, mango, maple, melon, millet, mushroom, mustard, nuts, oak, oats, oil palm, okra, onion, orange, an ornamental plant or flower or tree, papaya, palm, parsley, parsnip, pea, peach, peanut, pear, peat, pepper, persimmon, pigeon pea, pine, pineapple, plantain, plum, pomegranate, potato, pumpkin, radicchio, radish, rapeseed, raspberry, rice, rye, sorghum, safflower, sallow, soybean, spinach, spruce, squash, strawberry, sugar beet, sugarcane, sunflower, sweet potato, sweet corn, tangerine, tea, tobacco, tomato, trees, triticale, turf grasses, turnips, vine, walnut, watercress, watermelon, wheat, yams, yew, and zucchini.

[0913] The term plant also encompasses Algae, which are mainly photoautotrophs unified primarily by their lack of roots, leaves and other organs that characterize higher plants. The compositions, systems, and methods can be used over a broad range of “algae” or “algae cells.” Examples of algae include eukaryotic phyla, including the Rhodophyta (red algae), Chlorophyta (green algae), Phaeophyta (brown algae), Bacillariophyta (diatoms), Eustigmatophyta and dinoflagellates as well as the prokaryotic phylum Cyanobacteria (blue-green algae). Examples of algae species include those of Amphora, Anabaena, Anikstrodesmis, Botryococcus, Chaetoceros, Chlamydomonas, Chlorella, Chlorococcum, Cyclotella, Cylindrotheca, Dunaliella, Emiliana, Euglena, Hematococcus, Isochrysis, Monochrysis, Monoraphidium, Nannochloris, Nannnochloropsis, Navicula, Nephrochloris, Nephroselmis, Nitzschia, Nodularia, Nostoc, Oochromonas, Oocystis, Oscillartoria, Pavlova, Phaeodactylum, Playtmonas, Pleurochrysis, Porhyra, Pseudoanabaena, Pyramimonas, Stichococcus, Synechococcus, Synechocystis, Tetraselmis, Thalassiosira, and Trichodesmium.

### Plant Promoters

[0914] In order to ensure appropriate expression in a plant cell, the components of the components and systems herein may be placed under control of a plant promoter. A plant promoter is a promoter operable in plant cells. A plant promoter is capable of initiating transcription in plant cells, whether or not its origin is a plant cell. The use of different types of promoters is envisaged.

[0915] In some examples, the plant promoter is a constitutive plant promoter, which is a promoter that is able to express the open reading frame (ORF) that it controls in all or nearly all of the plant tissues during all or nearly all developmental stages of the plant (referred to as “constitutive expression”). One example of a constitutive promoter is the cauliflower mosaic virus 35S promoter. In some examples, the plant promoter is a regulated promoter, which directs gene expression not constitutively, but in a temporally- and/or spatially-regulated manner, and includes tissue-specific, tissue-preferred and inducible promoters. Different promoters may direct the expression of a gene in different tissues or cell types, or at different stages of development, or in response to different environmental conditions. In some examples, the plant promoter is a tissue-preferred promoters, which can be utilized to target enhanced expression in certain cell types within a particular plant tissue, for instance vascular cells in leaves or roots or in specific cells of the seed.

[0916] Exemplary plant promoters include those obtained from plants, plant viruses, and bacteria such as Agrobacterium or Rhizobium which comprise genes expressed in plant cells. Additional examples of promoters include those described in Kawamata et al., (1997) Plant Cell Physiol 38:792-803; Yamamoto et al., (1997) Plant J 12:255-65; Hire et al, (1992) Plant Mol Biol 20:207-18, Kuster et al, (1995) Plant Mol Biol 29:759-72, and Capana et al., (1994) Plant Mol Biol 25:681-91.

[0917] In some examples, a plant promoter may be an inducible promoter, which is inducible and allows for spatiotemporal control of gene editing or gene expression may use a form of energy. The form of energy may include sound energy, electromagnetic radiation, chemical energy and/or thermal energy. Examples of inducible systems include tetracycline inducible promoters (Tet-On or Tet-Off), small molecule two-hybrid transcription activations systems (FKBP, ABA, etc.), or light inducible systems (Phytochrome, LOV domains, or cryptochrome), such as a Light Inducible Transcriptional Effector (LITE) that direct changes in transcriptional activity in a sequence-specific manner. In a particular example, of the components of a light inducible system include an IscB polypeptide nuclease, a light-responsive cytochrome heterodimer (e.g., from Arabidopsis thaliana), and a transcriptional activation/repression domain.

[0918] In some examples, the promoter may be a chemical-regulated promotor (where the application of an exogenous chemical induces gene expression) or a chemical-repressible promoter (where application of the chemical represses gene expression). Examples of chemical-inducible promoters include maize In2-2 promoter (activated by benzene sulfonamide herbicide safeners), the maize GST promoter (activated by hydrophobic electrophilic compounds used as pre-emergent herbicides), the tobacco PR-1 a promoter (activated by salicylic acid), promoters regulated by antibiotics (such as tetracycline-inducible and tetracycline-repressible promoters).

### Stable Integration in the Genome of Plants

[0919] In one embodiment, polynucleotides encoding the components of the compositions and systems may be introduced for stable integration into the genome of a plant cell. In some cases, vectors or expression systems may be used for such integration. The design of the vector or the expression system can be adjusted depending on for when, where and under what conditions the guide RNA and/or the IscB polypeptide or CRISPR-associated IscB polypeptide nuclease gene are expressed. In some cases, the polynucleotides may be integrated into an organelle of a plant, such as a plastid, mitochondrion or a chloroplast. The elements of the expression system may be on one or more expression constructs which are either circular such as a plasmid or transformation vector, or non-circular such as linear double stranded DNA.

[0920] In one embodiment, the method of integration generally comprises the steps of selecting a suitable host cell or host tissue, introducing the construct(s) into the host cell or host tissue, and regenerating plant cells or plants therefrom. In some examples, the expression system for stable integration into the genome of a plant cell may contain one or more of the following elements: a promoter element that can be used to express the RNA and/or IscB polypeptide nuclease in a plant cell; a 5′ untranslated region to enhance expression; an intron element to further enhance expression in certain cells, such as monocot cells; a multiple-cloning site to provide convenient restriction sites for inserting the guide RNA and/or the IscB polypeptide nuclease gene sequences and other desired elements; and a 3′ untranslated region to provide for efficient termination of the expressed transcript.

### Transient Expression in Plants

[0921] In one embodiment, the components of the compositions and systems may be transiently expressed in the plant cell. In some examples, the compositions and systems may modify a target nucleic acid only when both the guide RNA and the IscB polypeptide or CRISPR-associated IscB polypeptide or CRISPR-associated IscB polypeptide nuclease are present in a cell, such that genomic modification can further be controlled. As the expression of the IscB polypeptide or CRISPR-associated IscB polypeptide nuclease is transient, plants regenerated from such plant cells typically contain no foreign DNA. In certain examples, the IscB polypeptide or CRISPR-associated IscB polypeptide is stably expressed and the guide sequence is transiently expressed.

[0922] DNA and/or RNA (e.g., mRNA) may be introduced to plant cells for transient expression. In such cases, the introduced nucleic acid may be provided in sufficient quantity to modify the cell but do not persist after a contemplated period of time has passed or after one or more cell divisions.

[0923] The transient expression may be achieved using suitable vectors. Exemplary vectors that may be used for transient expression include a pEAQ vector (may be tailored for Agrobacterium-mediated transient expression) and Cabbage Leaf Curl virus (CaLCuV), and vectors described in Sainsbury F. et al., Plant Biotechnol J. 2009 September; 7(7):682-93; and Yin K et al., Scientific Reports volume 5, Article number: 14926 (2015).

[0924] Combinations of the different methods described above are also envisaged.

Translocation to and/or Expression in Specific Plant Organelles

[0925] The compositions and systems herein may comprise elements for translocation to and/or expression in a specific plant organelle.

### Chloroplast Targeting

[0926] In one embodiment, it is envisaged that the compositions and systems are used to specifically modify chloroplast genes or to ensure expression in the chloroplast. The compositions and systems (e.g., IscB polypeptide or CRISPR-associated IscB polypeptide nuclease, ωRNAs, or their encoding polynucleotides) may be transformed, compartmentalized, and/or targeted to the chloroplast. In an example, the introduction of genetic modifications in the plastid genome can reduce biosafety issues such as gene flow through pollen.

[0927] Examples of methods of chloroplast transformation include Particle bombardment, PEG treatment, and microinjection, and the translocation of transformation cassettes from the nuclear genome to the plastid. In some examples, targeting of chloroplasts may be achieved by incorporating in chloroplast localization sequence, and/or the expression construct a sequence encoding a chloroplast transit peptide (CTP) or plastid transit peptide, operably linked to the 5′ region of the sequence encoding the components of the compositions and systems. Additional examples of transforming, targeting and localization of chloroplasts include those described in WO2010061186, Protein Transport into Chloroplasts, 2010, Annual Review of Plant Biology, Vol. 61:157-180, and US20040142476, which are incorporated by reference herein in their entireties.

### Exemplary Applications in Plants

[0928] The compositions, systems, and methods may be used to generate genetic variation(s) in a plant (e.g., crop) of interest. One or more, e.g., a library of, ωRNAs targeting one or more locations in a genome may be provided and introduced into plant cells together with the IscB polypeptide nuclease. For example, a collection of genome-scale point mutations and gene knock-outs can be generated. In some examples, the compositions, systems, and methods may be used to generate a plant part or plant from the cells so obtained and screening the cells for a trait of interest. The target genes may include both coding and non-coding regions. In some cases, the trait is stress tolerant and the method is a method for the generation of stress-tolerant crop varieties.

[0929] In one embodiment, the compositions, systems, and methods are used to modify endogenous genes or to modify their expression. The expression of the components may induce targeted modification of the genome, either by direct activity of the IscB polypeptide or CRISPR-associated IscB polypeptide nuclease and optionally introduction of recombination template DNA, or by modification of genes targeted. The different strategies described herein above allow IscB polypeptide or CRISPR-associated IscB polypeptide nuclease-mediated targeted genome editing without requiring the introduction of the components into the plant genome.

[0930] In some cases, the modification may be performed without the permanent introduction into the genome of the plant of any foreign gene, including those encoding components of the composition herein, so as to avoid the presence of foreign DNA in the genome of the plant. This can be of interest as the regulatory requirements for non-transgenic plants are less rigorous. Components which are transiently introduced into the plant cell are typically removed upon crossing.

[0931] For example, the modification may be performed by transient expression of the components of the compositions and systems. The transient expression may be performed by delivering the components of the compositions and systems with viral vectors, delivery into protoplasts, with the aid of particulate molecules such as nanoparticles or CPPs.

Generation of Plants with Desired Traits

[0932] The compositions, systems, and methods herein may be used to introduce desired traits to plants. The approaches include introduction of one or more foreign genes to confer a trait of interest, editing or modulating endogenous genes to confer a trait of interest.

### Agronomic Traits

[0933] In one embodiment, crop plants can be improved by influencing specific plant traits. Examples of the traits include improved agronomic traits such as herbicide resistance, disease resistance, abiotic stress tolerance, high yield, and superior quality, pesticide-resistance, disease resistance, insect and nematode resistance, resistance against parasitic weeds, drought tolerance, nutritional value, stress tolerance, self-pollination voidance, forage digestibility biomass, and grain yield.

[0934] In one embodiment, genes that confer resistance to pests or diseases may be introduced to plants. In cases there are endogenous genes that confer such resistance in a plants, their expression and function may be enhanced (e.g., by introducing extra copies, modifications that enhance expression and/or activity).

[0935] Examples of genes that confer resistance include plant disease resistance genes (e.g., Cf-9, Pto, RSP2, SIDMR6-1), genes conferring resistance to a pest (e.g., those described in WO96/30517), Bacillus thuringiensis proteins, lectins, Vitamin-binding proteins (e.g., avidin), enzyme inhibitors (e.g., protease or proteinase inhibitors or amylase inhibitors), insect-specific hormones or pheromones (e.g., ecdysteroid or a juvenile hormone, variant thereof, a mimetic based thereon, or an antagonist or agonist thereof) or genes involved in the production and regulation of such hormone and pheromones, insect-specific peptides or neuropeptide, Insect-specific venom (e.g., produced by a snake, a wasp, etc., or analog thereof), Enzymes responsible for a hyperaccumulation of a monoterpene, a sesquiterpene, a steroid, hydroxamic acid, a phenylpropanoid derivative or another nonprotein molecule with insecticidal activity, Enzymes involved in the modification of biologically active molecule (e.g., a glycolytic enzyme, a proteolytic enzyme, a lipolytic enzyme, a nuclease, a cyclase, a transaminase, an esterase, a hydrolase, a phosphatase, a kinase, a phosphorylase, a polymerase, an elastase, a chitinase and a glucanase, whether natural or synthetic), molecules that stimulates signal transduction, Viral-invasive proteins or a complex toxin derived therefrom, Developmental-arrestive proteins produced in nature by a pathogen or a parasite, a developmental-arrestive protein produced in nature by a plant, or any combination thereof.

[0936] The compositions, systems, and methods may be used to identify, screen, introduce or remove mutations or sequences lead to genetic variability that give rise to susceptibility to certain pathogens, e.g., host specific pathogens. Such approach may generate plants that are non-host resistance, e.g., the host and pathogen are incompatible or there can be partial resistance against all races of a pathogen, typically controlled by many genes and/or also complete resistance to some races of a pathogen but not to other races.

[0937] In one embodiment, the compositions, systems, and methods may be used to modify genes involved in plant diseases. Such genes may be removed, inactivated, or otherwise regulated or modified. Examples of plant diseases include those described in [0045]-[0080] of US20140213619A1, which is incorporated by reference herein in its entirety.

[0938] In one embodiment, genes that confer resistance to herbicides may be introduced to plants. Examples of genes that confer resistance to herbicides include genes conferring resistance to herbicides that inhibit the growing point or meristem, such as an imidazolinone or a sulfonylurea, genes conferring glyphosate tolerance (e.g., resistance conferred by, e.g., mutant 5-enolpyruvylshikimate-3-phosphate synthase genes, aroA genes and glyphosate acetyl transferase (GAT) genes, respectively), or resistance to other phosphono compounds such as by glufosinate (phosphinothricin acetyl transferase (PAT) genes from Streptomyces species, including Streptomyces hygroscopicus and Streptomyces viridichromogenes), and to pyridinoxy or phenoxy proprionic acids and cyclohexones by ACCase inhibitor-encoding genes), genes conferring resistance to herbicides that inhibit photosynthesis (such as a triazine (psbA and gs+ genes) or a benzonitrile (nitrilase gene), and glutathione S-transferase), genes encoding enzymes detoxifying the herbicide or a mutant glutamine synthase enzyme that is resistant to inhibition, genes encoding a detoxifying enzyme is an enzyme encoding a phosphinothricin acetyltransferase (such as the bar or pat protein from Streptomyces species), genes encoding hydroxyphenylpyruvatedioxygenases (HPPD) inhibitors, e.g., naturally occurring HPPD resistant enzymes, and genes encoding a mutated or chimeric HPPD enzyme.

[0939] In one embodiment, genes involved in Abiotic stress tolerance may be introduced to plants. Examples of genes include those capable of reducing the expression and/or the activity of poly(ADP-ribose) polymerase (PARP) gene, transgenes capable of reducing the expression and/or the activity of the PARG encoding genes, genes coding for a plant-functional enzyme of the nicotineamide adenine dinucleotide salvage synthesis pathway including nicotinamidase, nicotinate phosphoribosyltransferase, nicotinic acid mononucleotide adenyl transferase, nicotinamide adenine dinucleotide synthetase or nicotine amide phosphorybosyltransferase, enzymes involved in carbohydrate biosynthesis, enzymes involved in the production of polyfructose (e.g., the inulin and levan-type), the production of alpha-1,6 branched alpha-1,4-glucans, the production of alternan, the production of hyaluronan.

[0940] In one embodiment, genes that improve drought resistance may be introduced to plants. Examples of genes Ubiquitin Protein Ligase protein (UPL) protein (UPL3), DR02, DR03, ABC transporter, and DREB1A.

### Nutritionally Improved Plants

[0941] In one embodiment, the compositions, systems, and methods may be used to produce nutritionally improved plants. In some examples, such plants may provide functional foods, e.g., a modified food or food ingredient that may provide a health benefit beyond the traditional nutrients it contains. In certain examples, such plants may provide nutraceuticals foods, e.g., substances that may be considered a food or part of a food and provides health benefits, including the prevention and treatment of disease. The nutraceutical foods may be useful in the prevention and/or treatment of diseases in animals and humans, e.g., cancers, diabetes, cardiovascular disease, and hypertension.

[0942] An improved plant may naturally produce one or more desired compounds and the modification may enhance the level or activity or quality of the compounds. In some cases, the improved plant may not naturally produce the compound(s), while the modification enables the plant to produce such compound(s). In some cases, the compositions, systems, and methods used to modify the endogenous synthesis of these compounds indirectly, e.g., by modifying one or more transcription factors that controls the metabolism of this compound.

[0943] Examples of nutritionally improved plants include plants comprising modified protein quality, content and/or amino acid composition, essential amino acid contents, oils and fatty acids, carbohydrates, vitamins and carotenoids, functional secondary metabolites, and minerals. In some examples, the improved plants may comprise or produce compounds with health benefits. Examples of nutritionally improved plants include those described in Newell-McGloughlin, Plant Physiology, July 2008, Vol. 147, pp. 939-953.

[0944] Examples of compounds that can be produced include carotenoids (e.g., α-Carotene or β-Carotene), lutein, lycopene, Zeaxanthin, Dietary fiber (e.g., insoluble fibers, β-Glucan, soluble fibers, fatty acids (e.g., ω-3 fatty acids, Conjugated linoleic acid, GLA,), Flavonoids (e.g., Hydroxycinnamates, flavonols, catechins and tannins), Glucosinolates, indoles, isothiocyanates (e.g., Sulforaphane), Phenolics (e.g., stilbenes, caffeic acid and ferulic acid, epicatechin), Plant stanols/sterols, Fructans, inulins, fructo-oligosaccharides, Saponins, Soybean proteins, Phytoestrogens (e.g., isoflavones, lignans), Sulfides and thiols such as diallyl sulphide, Allyl methyl trisulfide, dithiolthiones, Tannins, such as proanthocyanidins, or any combination thereof.

[0945] The compositions, systems, and methods may also be used to modify protein/starch functionality, shelf life, taste/aesthetics, fiber quality, and allergen, antinutrient, and toxin reduction traits.

[0946] Examples of genes and nucleic acids that can be modified to introduce the traits include stearyl-ACP desaturase, DNA associated with the single allele which may be responsible for maize mutants characterized by low levels of phytic acid, Tf RAP2.2 and its interacting partner SINAT2, Tf Dof1, and DOF Tf AtDof1.1 (OBP2).

### Modification of Polyploid Plants

[0947] The compositions, systems, and methods may be used to modify polyploid plants. Polyploid plants carry duplicate copies of their genomes (e.g., as many as six, such as in wheat). In some cases, the compositions, systems, and methods may be/can be multiplexed to affect all copies of a gene, or to target dozens of genes at once. For instance, the compositions, systems, and methods may be used to simultaneously ensure a loss of function mutation in different genes responsible for suppressing defenses against a disease. The modification may be simultaneous suppression the expression of the TaMLO-Al, TaMLO-Bl and TaMLO-Dl nucleic acid sequence in a wheat plant cell and regenerating a wheat plant therefrom, in order to ensure that the wheat plant is resistant to powdery mildew (e.g., as described in WO2015109752).

### Regulation of Fruit-Ripening

[0948] The compositions, systems, and methods may be used to regulate ripening of fruits. Ripening is a normal phase in the maturation process of fruits and vegetables. Only a few days after it starts it may render a fruit or vegetable inedible, which can bring significant losses to both farmers and consumers.

[0949] In one embodiment, the compositions, systems, and methods are used to reduce ethylene production. In some examples, the compositions, systems, and methods may be used to suppress the expression and/or activity of ACC synthase, insert a ACC deaminase gene or a functional fragment thereof, insert a SAM hydrolase gene or functional fragment thereof, suppress ACC oxidase gene expression

[0950] Alternatively, or additionally, the compositions, systems, and methods may be used to modify ethylene receptors (e.g., suppressing ETR1) and/or Polygalacturonase (PG). Suppression of a gene may be achieved by introducing a mutation, an antisense sequence, and/or a truncated copy of the gene to the genome.

### Increasing Storage Life of Plants

[0951] In one embodiment, the compositions, systems, and methods are used to modify genes involved in the production of compounds which affect storage life of the plant or plant part. The modification may be in a gene that prevents the accumulation of reducing sugars in potato tubers. Upon high-temperature processing, these reducing sugars react with free amino acids, resulting in brown, bitter-tasting products and elevated levels of acrylamide, which is a potential carcinogen. In one embodiment, the methods provided herein are used to reduce or inhibit expression of the vacuolar invertase gene (VInv), which encodes a protein that breaks down sucrose to glucose and fructose.

### Reducing Allergens in Plants

[0952] In one embodiment, the compositions, systems, and methods are used to generate plants with a reduced level of allergens, making them safer for consumers. To this end, the compositions, systems, and methods may be used to identify and modify (e.g., suppress) one or more genes responsible for the production of plant allergens. Examples of such genes include Lol p5, as well as those in peanuts, soybeans, lentils, peas, lupin, green beans, mung beans, such as those described in Nicolaou et al., Current Opinion in Allergy and Clinical Immunology 2011; 11(3): 222), which is incorporated by reference herein in its entirety.

### Generation of Male Sterile Plants

[0953] The compositions, systems, and methods may be used to generate male sterile plants. Hybrid plants typically have advantageous agronomic traits compared to inbred plants. However, for self-pollinating plants, the generation of hybrids can be challenging. In different plant types (e.g., maize and rice), genes have been identified which are important for plant fertility, more particularly male fertility. Plants that are as such genetically altered can be used in hybrid breeding programs.

[0954] The compositions, systems, and methods may be used to modify genes involved male fertility, e.g., inactivating (such as by introducing mutations to) genes required for male fertility. Examples of the genes involved in male fertility include cytochrome P450-like gene (MS26) or the meganuclease gene (MS45), and those described in Wan X et al., Mol Plant. 2019 Mar. 4; 12(3): 321-342; and Kim Y J, et al., Trends Plant Sci. 2018 January; 23(1): 53-65.

### Increasing the Fertility Stage in Plants

[0955] In one embodiment, the compositions, systems, and methods may be used to prolong the fertility stage of a plant such as of a rice. For instance, a rice fertility stage gene such as Ehd3 can be targeted in order to generate a mutation in the gene and plantlets can be selected for a prolonged regeneration plant fertility stage.

### Production of Early Yield of Products

[0956] In one embodiment, the compositions, systems, and methods may be used to produce early yield of the product. For example, flowering process may be modulated, e.g., by mutating flowering repressor gene such as SP5G. Examples of such approaches include those described in Soyk S, et al., Nat Genet. 2017 January; 49(1):162-168.

### Oil and Biofuel Production

[0957] The compositions, systems, and methods may be used to generate plants for oil and biofuel production. Biofuels include fuels made from plant and plant-derived resources. Biofuels may be extracted from organic matter whose energy has been obtained through a process of carbon fixation or are made through the use or conversion of biomass. This biomass can be used directly for biofuels or can be converted to convenient energy containing substances by thermal conversion, chemical conversion, and biochemical conversion. This biomass conversion can result in fuel in solid, liquid, or gas form. Biofuels include bioethanol and biodiesel. Bioethanol can be produced by the sugar fermentation process of cellulose (starch), which may be derived from maize and sugar cane. Biodiesel can be produced from oil crops such as rapeseed, palm, and soybean. Biofuels can be used for transportation.

### Generation of Plants for Production of Vegetable Oils and Biofuels

[0958] The compositions, systems, and methods may be used to generate algae (e.g., diatom) and other plants (e.g., grapes) that express or overexpress high levels of oil or biofuels.

[0959] In some cases, the compositions, systems, and methods may be used to modify genes involved in the modification of the quantity of lipids and/or the quality of the lipids. Examples of such genes include those involved in the pathways of fatty acid synthesis, e.g., acetyl-CoA carboxylase, fatty acid synthase, 3-ketoacyl_acyl-carrier protein synthase III, glycerol-3-phospate deshydrogenase (G3PDH), Enoyl-acyl carrier protein reductase (Enoyl-ACP-reductase), glycerol-3-phosphate acyltransferase, lysophosphatidic acyl transferase or diacylglycerol acyltransferase, phospholipid: diacylglycerol acyltransferase, phoshatidate phosphatase, fatty acid thioesterase such as palmitoyi protein thioesterase, or malic enzyme activities.

[0960] In further embodiments, it is envisaged to generate diatoms that have increased lipid accumulation. This can be achieved by targeting genes that decrease lipid catabolization. Examples of genes include those involved in the activation of triacylglycerol and free fatty acids, β-oxidation of fatty acids, such as genes of acyl-CoA synthetase, 3-ketoacyl-CoA thiolase, acyl-CoA oxidase activity and phosphoglucomutase.

[0961] In some examples, algae may be modified for production of oil and biofuels, including fatty acids (e.g., fatty esters such as acid methyl esters (FAME) and fatty acid ethyl esters (FAEE)). Examples of methods of modifying microalgae include those described in Stovicek et al. Metab. Eng. Comm., 2015; 2:1; U.S. Pat. No. 8,945,839; and International Patent Publication No. WO 2015/086795.

[0962] In some examples, one or more genes may be introduced (e.g., overexpressed) to the plants (e.g., algae) to produce oils and biofuels (e.g., fatty acids) from a carbon source (e.g., alcohol). Examples of the genes include genes encoding acyl-CoA synthases, ester synthases, thioesterases (e.g., tesA, ′tesA, tesB, fatB, fatB2, fatB3, fatAl, or fatA), acyl-CoA synthases (e.g., fadD, JadK, BH3103, pfl-4354, EAV15023, fadDl, fadD2, RPC_4074,fadDD35, fadDD22, faa39), ester synthases (e.g., synthase/acyl-CoA:diacylglycerl acyltransferase from Simmondsia chinensis, Acinetobacter sp. ADP, Alcanivorax borkumensis, Pseudomonas aeruginosa, Fundibacter jadensis, Arabidopsis thaliana, or Alkaligenes eutrophus, or variants thereof).

[0963] Additionally, or alternatively, one or more genes in the plants (e.g., algae) may be inactivated (e.g., expression of the genes is decreased). For examples, one or more mutations may be introduced to the genes. Examples of such genes include genes encoding acyl-CoA dehydrogenases (e.g., fade), outer membrane protein receptors, and transcriptional regulator (e.g., repressor) of fatty acid biosynthesis (e.g., fabR), pyruvate formate lyases (e.g., pflB), lactate dehydrogenases (e.g., IdhA).

### Organic Acid Production

[0964] In one embodiment, plants may be modified to produce organic acids such as lactic acid. The plants may produce organic acids using sugars, pentose or hexose sugars. To this end, one or more genes may be introduced (e.g., and overexpressed) in the plants. An example of such genes includes LDH gene.

[0965] In some examples, one or more genes may be inactivated (e.g., expression of the genes is decreased). For examples, one or more mutations may be introduced to the genes. The genes may include those encoding proteins involved an endogenous metabolic pathway which produces a metabolite other than the organic acid of interest and/or wherein the endogenous metabolic pathway consumes the organic acid.

[0966] Examples of genes that can be modified or introduced include those encoding pyruvate decarboxylases (pdc), fumarate reductases, alcohol dehydrogenases (adh), acetaldehyde dehydrogenases, phosphoenolpyruvate carboxylases (ppc), D-lactate dehydrogenases (d-ldh), L-lactate dehydrogenases (l-ldh), lactate 2-monooxygenases, lactate dehydrogenase, cytochrome-dependent lactate dehydrogenases (e.g., cytochrome B2-dependent L-lactate dehydrogenases).

### Enhancing Plant Properties for Biofuel Production

[0967] In one embodiment, the compositions, systems, and methods are used to alter the properties of the cell wall of plants to facilitate access by key hydrolyzing agents for a more efficient release of sugars for fermentation. By reducing the proportion of lignin in a plant the proportion of cellulose can be increased. In one embodiment, lignin biosynthesis may be downregulated in the plant so as to increase fermentable carbohydrates.

[0968] In some examples, one or more lignin biosynthesis genes may be down regulated. Examples of such genes include 4-coumarate 3-hydroxylases (C3H), phenylalanine ammonia-lyases (PAL), cinnamate 4-hydroxylases (C4H), hydroxycinnamoyl transferases (HCT), caffeic acid O-methyltransferases (COMT), caffeoyl CoA 3-O-methyltransferases (CCoAOMT), ferulate 5-hydroxylases (F5H), cinnamyl alcohol dehydrogenases (CAD), cinnamoyl CoA-reductases (CCR), 4-coumarate-CoA ligases (4CL), monolignol-lignin-specific glycosyltransferases, and aldehyde dehydrogenases (ALDH), and those described in WO 2008064289.

[0969] In some examples, plant mass that produces lower level of acetic acid during fermentation may be reduced. To this end, genes involved in polysaccharide acetylation (e.g., Cas1L and those described in WO 2010096488) may be inactivated.

### Other Microorganisms for Oils and Biofuel Production

[0970] In one embodiment, microorganisms other than plants may be used for production of oils and biofuels using the compositions, systems, and methods herein. Examples of the microorganisms include those of the genus of Escherichia, Bacillus, Lactobacillus, Rhodococcus, Synechococcus, Synechoystis, Pseudomonas, Aspergillus, Trichoderma, Neurospora, Fusarium, Humicola, Rhizomucor, Kluyveromyces, Pichia, Mucor, Myceliophtora, Penicillium, Phanerochaete, Pleurotus, Trametes, Chrysosporium, Saccharomyces, Stenotrophamonas, Schizosaccharomyces, Yarrowia, or Streptomyces.

### Plant Cultures and Regeneration

[0971] In one embodiment, the modified plants or plant cells may be cultured to regenerate a whole plant which possesses the transformed or modified genotype and thus the desired phenotype. Examples of regeneration techniques include those relying on manipulation of certain phytohormones in a tissue culture growth medium, relying on a biocide and/or herbicide marker which has been introduced together with the desired nucleotide sequences, obtaining from cultured protoplasts, plant callus, explants, organs, pollens, embryos or parts thereof.

### Detecting Modifications in the Plant Genome-Selectable Markers

[0972] When the compositions, systems, and methods are used to modify a plant, suitable methods may be used to confirm and detect the modification made in the plant. In some examples, when a variety of modifications are made, one or more desired modifications or traits resulting from the modifications may be selected and detected. The detection and confirmation may be performed by biochemical and molecular biology techniques such as Southern analysis, PCR, Northern blot, S1 RNase protection, primer-extension or reverse transcriptase-PCR, enzymatic assays, ribozyme activity, gel electrophoresis, Western blot, immunoprecipitation, enzyme-linked immunoassays, in situ hybridization, enzyme staining, and immunostaining.

[0973] In some cases, one or more markers, such as selectable and detectable markers, may be introduced to the plants. Such markers may be used for selecting, monitoring, isolating cells and plants with desired modifications and traits. A selectable marker can confer positive or negative selection and is conditional or non-conditional on the presence of external substrates. Examples of such markers include genes and proteins that confer resistance to antibiotics, such as hygromycin (hpt) and kanamycin (nptII), and genes that confer resistance to herbicides, such as phosphinothricin (bar) and chlorosulfuron (als), enzyme capable of producing or processing a colored substances (e.g., the β-glucuronidase, luciferase, B or C1 genes).

### Applications in Fungi

[0974] The compositions, systems, and methods described herein can be used to perform efficient and cost-effective gene or genome interrogation or editing or manipulation in fungi or fungal cells, such as yeast. The approaches and applications in plants may be applied to fungi as well.

[0975] A fungal cell may be any type of eukaryotic cell within the kingdom of fungi, such as phyla of Ascomycota, Basidiomycota, Blastocladiomycota, Chytridiomycota, Glomeromycota, Microsporidia, and Neocallimastigomycota. Examples of fungi or fungal cells in include yeasts, molds, and filamentous fungi.

[0976] In one embodiment, the fungal cell is a yeast cell. A yeast cell refers to any fungal cell within the phyla Ascomycota and Basidiomycota. Examples of yeasts include budding yeast, fission yeast, and mold, S. cerervisiae, Kluyveromyces marxianus, Issatchenkia orientalis, Candida spp. (e.g., Candida albicans), Yarrowia spp. (e.g., Yarrowia lipolytica), Pichia spp. (e.g., Pichia pastoris), Kluyveromyces spp. (e.g., Kluyveromyces lactis and Kluyveromyces marxianus), Neurospora spp. (e.g., Neurospora crassa), Fusarium spp. (e.g., Fusarium oxysporum), and Issatchenkia spp. (e.g., Issatchenkia orientalis, Pichia kudriavzevii and Candida acidothermophilum).

[0977] In one embodiment, the fungal cell is a filamentous fungal cell, which grow in filaments, e.g., hyphae or mycelia. Examples of filamentous fungal cells include Aspergillus spp. (e.g., Aspergillus niger), Trichoderma spp. (e.g., Trichoderma reesei), Rhizopus spp. (e.g., Rhizopus oryzae), and Mortierella spp. (e.g., Mortierella isabellina).

[0978] In one embodiment, the fungal cell is of an industrial strain. Industrial strains include any strain of fungal cell used in or isolated from an industrial process, e.g., production of a product on a commercial or industrial scale. Industrial strain may refer to a fungal species that is typically used in an industrial process, or it may refer to an isolate of a fungal species that may be also used for non-industrial purposes (e.g., laboratory research). Examples of industrial processes include fermentation (e.g., in production of food or beverage products), distillation, biofuel production, production of a compound, and production of a polypeptide. Examples of industrial strains include, without limitation, JAY270 and ATCC4124.

[0979] In one embodiment, the fungal cell is a polyploid cell whose genome is present in more than one copy. Polyploid cells include cells naturally found in a polyploid state, and cells that has been induced to exist in a polyploid state (e.g., through specific regulation, alteration, inactivation, activation, or modification of meiosis, cytokinesis, or DNA replication). A polyploid cell may be a cell whose entire genome is polyploid, or a cell that is polyploid in a particular genomic locus of interest. In some examples, the abundance of guide RNA may more often be a rate-limiting component in genome engineering of polyploid cells than in haploid cells, and thus the methods using the composition described herein may take advantage of using certain fungal cell types.

[0980] In one embodiment, the fungal cell is a diploid cell, whose genome is present in two copies. Diploid cells include cells naturally found in a diploid state, and cells that have been induced to exist in a diploid state (e.g., through specific regulation, alteration, inactivation, activation, or modification of meiosis, cytokinesis, or DNA replication). A diploid cell may refer to a cell whose entire genome is diploid, or it may refer to a cell that is diploid in a particular genomic locus of interest.

[0981] In one embodiment, the fungal cell is a haploid cell, whose genome is present in one copy. Haploid cells include cells naturally found in a haploid state, or cells that have been induced to exist in a haploid state (e.g., through specific regulation, alteration, inactivation, activation, or modification of meiosis, cytokinesis, or DNA replication). A haploid cell may refer to a cell whose entire genome is haploid, or it may refer to a cell that is haploid in a particular genomic locus of interest.

[0982] The compositions and systems, and nucleic acid encoding thereof may be introduced to fungi cells using the delivery systems and methods herein. Examples of delivery systems include lithium acetate treatment, bombardment, electroporation, and those described in Kawai et al., 2010, Bioeng Bugs. 2010 November-December; 1(6): 395-403.

[0983] In some examples, a yeast expression vector (e.g., those with one or more regulatory elements) may be used. Examples of such vectors include a centromeric (CEN) sequence, an autonomous replication sequence (ARS), a promoter, such as an RNA Polymerase III promoter, operably linked to a sequence or gene of interest, a terminator such as an RNA polymerase III terminator, an origin of replication, and a marker gene (e.g., auxotrophic, antibiotic, or other selectable markers). Examples of expression vectors for use in yeast may include plasmids, yeast artificial chromosomes, 2μ plasmids, yeast integrative plasmids, yeast replicative plasmids, shuttle vectors, and episomal plasmids.

### Biofuel and Materials Production by Fungi

[0984] In one embodiment, the compositions, systems, and methods may be used for generating modified fungi for biofuel and material productions. For instance, the modified fungi for production of biofuel or biopolymers from fermentable sugars and optionally to be able to degrade plant-derived lignocellulose derived from agricultural waste as a source of fermentable sugars. Foreign genes required for biofuel production and synthesis may be introduced into fungi. In some examples, the genes may encode enzymes involved in the conversion of pyruvate to ethanol or another product of interest, degrade cellulose (e.g., cellulase), endogenous metabolic pathways which compete with the biofuel production pathway.

[0985] In some examples, the compositions, systems, and methods may be used for generating and/or selecting yeast strains with improved xylose or cellobiose utilization, isoprenoid biosynthesis, and/or lactic acid production. One or more genes involved in the metabolism and synthesis of these compounds may be modified and/or introduced to yeast cells. Examples of the methods and genes include lactate dehydrogenase, PDC1 and PDC5, and those described in Ha, S. J., et al. (2011) Proc. Natl. Acad. Sci. USA 108(2): 504-9 and Galazka, J. M., et al. (2010) Science 330(6000): 84-6; Jakočiūnas T et al., Metab Eng. 2015 March; 28:213-222; Stovicek V, et al., FEMS Yeast Res. 2017 Aug. 1; 17(5).

### Improved Plants and Yeast Cells

[0986] The present disclosure further provides improved plants and fungi. The improved and fungi may comprise one or more genes introduced, and/or one or more genes modified by the compositions, systems, and methods herein. The improved plants and fungi may have increased food or feed production (e.g., higher protein, carbohydrate, nutrient or vitamin levels), oil and biofuel production (e.g., methanol, ethanol), tolerance to pests, herbicides, drought, low or high temperatures, excessive water, etc.

[0987] The plants or fungi may have one or more parts that are improved, e.g., leaves, stems, roots, tubers, seeds, endosperm, ovule, and pollen. The parts may be viable, nonviable, regeneratable, and/or non-regeneratable.

[0988] The improved plants and fungi may include gametes, seeds, embryos, either zygotic or somatic, progeny and/or hybrids of improved plants and fungi. The progeny may be a clone of the produced plant or fungi or may result from sexual reproduction by crossing with other individuals of the same species to introgress further desirable traits into their offspring. The cell may be in vivo or ex vivo in the cases of multicellular organisms, particularly plants.

### Further Applications in Plants

[0989] Further applications of the compositions, systems, and methods on plants and fungi include visualization of genetic element dynamics (e.g., as described in Chen B, et al., Cell. 2013 Dec. 19; 155(7): 1479-91), targeted gene disruption positive-selection in vitro and in vivo (as described in Malina A et al., Genes Dev. 2013 Dec. 1; 27(23): 2602-14), epigenetic modification such as using fusion of IscB polypeptide nuclease and histone-modifying enzymes (e.g., as described in Rusk N, Nat Methods. 2014 January; 11(1): 28), identifying transcription regulators (e.g., as described in Waldrip Z J, Epigenetics. 2014 September; 9(9): 1207-11), anti-virus treatment for both RNA and DNA viruses (e.g., as described in Price A A, et al., Proc Natl Acad Sci USA. 2015 May 12; 112(19): 6164-9; Ramanan V et al., Sci Rep. 2015 Jun. 2; 5:10833), alteration of genome complexity such as chromosome numbers (e.g., as described in Karimi-Ashtiyani R et al., Proc Natl Acad Sci USA. 2015 Sep. 8; 112(36): 11211-6; Anton T, et al., Nucleus. 2014 March-April; 5(2): 163-72), self-cleavage of the composition for controlled inactivation/activation (e.g., as described Sugano S S et al., Plant Cell Physiol. 2014 March; 55(3): 475-81), multiplexed gene editing (as described in Kabadi A M et al., Nucleic Acids Res. 2014 Oct. 29; 42(19): e147), development of kits for multiplex genome editing (as described in Xing H L et al., BMC Plant Biol. 2014 Nov. 29; 14:327), starch production (as described in Hebelstrup K H et al., Front Plant Sci. 2015 Apr. 23; 6:247), targeting multiple genes in a family or pathway (e.g., as described in Ma X et al., Mol Plant. 2015 August; 8(8): 1274-84), regulation of non-coding genes and sequences (e.g., as described in Lowder L G, et al., Plant Physiol. 2015 October; 169(2): 971-85), editing genes in trees (e.g., as described in Belhaj K et al., Plant Methods. 2013 Oct. 11; 9(1): 39; Harrison M M, et al., Genes Dev. 2014 Sep. 1; 28(17): 1859-72; Zhou X et al., New Phytol. 2015 October; 208(2): 298-301), introduction of mutations for resistance to host-specific pathogens and pests.

[0990] Additional examples of modifications of plants and fungi that may be performed using the compositions, systems, and methods include analogous modifications described in International Patent Publication Nos. WO2016/099887, WO2016/025131, WO2016/073433, WO2017/066175, WO2017/100158, WO 2017/105991, WO2017/106414, WO2016/100272, WO2016/100571, WO 2016/100568, WO 2016/100562, and WO 2017/019867.

### Applications in Non-Human Animals

[0991] The compositions, systems, and methods may be used to study and modify non-human animals, e.g., introducing desirable traits and disease resilience, treating diseases, facilitating breeding, etc. In one embodiment, the compositions, systems, and methods may be used to improve breeding and introducing desired traits, e.g., increasing the frequency of trait-associated alleles, introgression of alleles from other breeds/species without linkage drag, and creation of de novo favorable alleles. Genes and other genetic elements that can be targeted may be screened and identified. Examples of application and approaches include those described in Tait-Burkard C, et al., Livestock 2.0—genome editing for fitter, healthier, and more productive farmed animals. Genome Biol. 2018 Nov. 26; 19(1): 204; Lillico S, Agricultural applications of genome editing in farmed animals. Transgenic Res. 2019 August; 28 (Suppl 2): 57-60; Houston R D, et al., Harnessing genomics to fast-track genetic improvement in aquaculture. Nat Rev Genet. 2020 Apr. 16. doi: 10.1038/s41576-020-0227-y, which are incorporated herein by reference in their entireties. Applications described in other sections such as therapeutic, diagnostic, etc. can also be used on the animals herein.

[0992] The compositions, systems, and methods may be used on animals such as fish, amphibians, reptiles, mammals, and birds. The animals may be farm and agriculture animals, or pets. Examples of farm and agriculture animals include horses, goats, sheep, swine, cattle, llamas, alpacas, and birds, e.g., chickens, turkeys, ducks, and geese. The animals may be a non-human primate, e.g., baboons, capuchin monkeys, chimpanzees, lemurs, macaques, marmosets, tamarins, spider monkeys, squirrel monkeys, and vervet monkeys. Examples of pets include dogs, cats, horses, wolfs, rabbits, ferrets, gerbils, hamsters, chinchillas, fancy rats, guinea pigs, canaries, parakeets, and parrots.

[0993] In one embodiment, one or more genes may be introduced (e.g., overexpressed) in the animals to obtain or enhance one or more desired traits. Growth hormones, insulin-like growth factors (IGF-1) may be introduced to increase the growth of the animals, e.g., pigs or salmon (such as described in Pursel V G et al., J Reprod Fertil Suppl. 1990; 40:235-45; Waltz E, Nature. 2017; 548:148). Fat-1 gene (e.g., from C elegans) may be introduced for production of larger ratio of n-3 to n-6 fatty acids may be induced, e.g., in pigs (such as described in Li M, et al., Genetics. 2018; 8:1747-54). Phytase (e.g., from E coli) xylanase (e.g., from Aspergillus niger), beta-glucanase (e.g., from bacillus lichenformis) may be introduced to reduce the environmental impact through phosphorous and nitrogen release reduction, e.g., in pigs (such as described in Golovan S P, et al., Nat Biotechnol. 2001; 19:741-5; Zhang X et al., elife. 2018). shRNA decoy may be introduced to induce avian influenza resilience e.g., in chicken (such as described in Lyall et al., Science. 2011; 331:223-6). Lysozyme or lysostaphin may be introduced to induce mastitis resilience e.g., in goat and cow (such as described in Maga E A et al., Foodborne Pathog Dis. 2006; 3:384-92; Wall R J, et al., Nat Biotechnol. 2005; 23:445-51). Histone deacetylase such as HDAC6 may be introduced to induce PRRSV resilience, e.g., in pig (such as described in Lu T., et al., PLoS One. 2017; 12: e0169317). CD163 may be modified (e.g., inactivated or removed) to introduce PRRSV resilience in pigs (such as described in Prather R S et al., Sci Rep. 2017 Oct. 17; 7(1): 13371). Similar approaches may be used to inhibit or remove viruses and bacteria (e.g., Swine Influenza Virus (SIV) strains which include influenza C and the subtypes of influenza A known as H1N1, H1N2, H2N1, H3N1, H3N2, and H2N3, as well as pneumonia, meningitis and oedema) that may be transmitted from animals to humans.

[0994] In one embodiment, one or more genes may be modified or edited for disease resistance and production traits. Myostatin (e.g., GDF8) may be modified to increase muscle growth, e.g., in cow, sheep, goat, catfish, and pig (such as described in Crispo M et al., PLoS One. 2015; 10: e0136690; Wang X, et al., Anim Genet. 2018; 49:43-51; Khalil K, et al., Sci Rep. 2017; 7:7301; Kang J-D, et al., RSC Adv. 2017; 7:12541-9). Pc POLLED may be modified to induce horlessness, e.g., in cow (such as described in Carlson D F et al., Nat Biotechnol. 2016; 34:479-81). KISS1R may be modified to induce boretaint (hormone release during sexual maturity leading to undesired meat taste), e.g., in pigs. Dead end protein (dnd) may be modified to induce sterility, e.g., in salmon (such as described in Wargelius A, et al., Sci Rep. 2016; 6:21284). Nano2 and DDX may be modified to induce sterility (e.g., in surrogate hosts), e.g., in pigs and chicken (such as described Park K-E, et al., Sci Rep. 2017; 7:40176; Taylor L et al., Development. 2017; 144:928-34). CD163 may be modified to induce PRRSV resistance, e.g., in pigs (such as described in Whitworth K M, et al., Nat Biotechnol. 2015; 34:20-2). RELA may be modified to induce ASFV resilience, e.g., in pigs (such as described in Lillico S G, et al., Sci Rep. 2016; 6:21645). CD18 may be modified to induce Mannheimia (Pasteurella) haemolytica resilience, e.g., in cows (such as described in Shanthalingam S, et al., roc Natl Acad Sci USA. 2016; 113:13186-90). NRAMP1 may be modified to induce tuberculosis resilience, e.g., in cows (such as described in Gao Y et al., Genome Biol. 2017; 18:13). Endogenous retrovirus genes may be modified or removed for xenotransplantation such as described in Yang L, et al. Science. 2015; 350:1101-4; Niu D et al., Science. 2017; 357:1303-7). Negative regulators of muscle mass (e.g., Myostatin) may be modified (e.g., inactivated) to increase muscle mass, e.g., in dogs (as described in Zou Q et al., J Mol Cell Biol. 2015 December; 7(6): 580-3).

[0995] Animals such as pigs with severe combined immunodeficiency (SCID) may generated (e.g., by modifying RAG2) to provide useful models for regenerative medicine, xenotransplantation (discussed also elsewhere herein), and tumor development. Examples of methods and approaches include those described Lee K, et al., Proc Natl Acad Sci USA. 2014 May 20; 111(20): 7260-5; and Schomberg et al. FASEB Journal, April 2016; 30(1): Suppl 571.1.

[0996] SNPs in the animals may be modified. Examples of methods and approaches include those described Tan W. et al., Proc Natl Acad Sci USA. 2013 Oct. 8; 110(41): 16526-31; Mali P, et al., Science. 2013 Feb. 15; 339(6121): 823-6.

[0997] Stem cells (e.g., induced pluripotent stem cells) may be modified and differentiated into desired progeny cells, e.g., as described in Heo Y T et al., Stem Cells Dev. 2015 Feb. 1; 24(3): 393-402.

[0998] Profile analysis (such as Igenity) may be performed on animals to screen and identify genetic variations related to economic traits. The genetic variations may be modified to introduce or improve the traits, such as carcass composition, carcass quality, maternal and reproductive traits and average daily gain.

### Kits

[0999] In one aspect, the invention provides kits containing any one or more of the elements disclosed in the above methods and compositions. In one aspect, the invention provides a kit comprising one or more of the components described herein. In one embodiment, the kit comprises the compositions herein and instructions for using the kit. In one embodiment, the kit comprises a vector system and instructions for using the kit. In one embodiment, the kit comprises a delivery system and instructions for using the kit. In one embodiment, the kit comprises a vector system and instructions for using the kit. Elements may be provided individually or in combinations, and may be provided in any suitable container, such as a vial, a bottle, or a tube. The kits may include the ωRNA and optionally an unbound protector strand as described herein. The kits may include the ωRNA with a protector strand bound to at least partially to a reprogrammable spacer portion of the ωRNA sequence (i.e., phRNA). Thus, the kits may include the phRNA in the form of a partially double stranded nucleotide sequence as described here. In one embodiment, the kit includes instructions in one or more languages, for example in more than one language. The instructions may be specific to the applications and methods described herein.

[1000] In one embodiment, a kit comprises one or more reagents for use in a process utilizing one or more of the elements described herein. Reagents may be provided in any suitable container. For example, a kit may provide one or more reaction or storage buffers. Reagents may be provided in a form that is usable in a particular assay, or in a form that requires addition of one or more other components before use (e.g., in concentrate or lyophilized form). A buffer can be any buffer, including but not limited to a sodium carbonate buffer, a sodium bicarbonate buffer, a borate buffer, a Tris buffer, a MOPS buffer, a HEPES buffer, and combinations thereof. In one embodiment, the buffer is alkaline. In one embodiment, the buffer has a pH from about 7 to about 10. In one embodiment, the kit comprises one or more oligonucleotides corresponding to a ωRNA scaffold, reprogrammable sequence for insertion into a vector so as to operably link the ωRNA sequence and a regulatory element. In one embodiment, the kit comprises a homologous recombination template polynucleotide. In one embodiment, the kit comprises one or more of the vectors and/or one or more of the polynucleotides described herein. The kit may advantageously allow to provide all elements of the systems of the invention.

[1001] The invention is further described in the following examples, which do not limit the scope of the invention described in the claims.

[1002] Further embodiments are illustrated in the following Examples which are given for illustrative purposes only and are not intended to limit the scope of the invention.

### EXAMPLES

### Example 1

[1003] FIG. 1 shows the IscB cleavage of an endogenous target and a non-endogenous target sequence, with sequences comprising TAMs 1-3 showing cleavage when using a complementary spacer using the K. racemifer IscB protein, ωRNA scaffold and spacers for endogenous target Kr (FIG. 1, left) and non-endogenous target Fn (FIG. 1, right). Cleavage with TAM sequences 1-3 agrees with TAM weblogo identified for K. racmifer IscB in FIG. 2.

[1004] FIG. 2 shows determination of TAM for an IscB polypeptide Polypeptide.

### Sequences Utilized in the Experiment

>IscB protein sequence (from K. racemifer)
(SEQ ID NO: 2059)
MNVVYVLSPERTPLMPCQPAIARLLLKQGKAKVRHRTPFTIQLLAQPEH
VYTQPLTHGVDTGSSIIGSAVANEHGHVVYLSEVEIRNDIANTMKERAR
ARRNRRQRKTRYRPARWL
NRKKSIKTGRFSPTMRSKIDTHLREIRFIRSLLPITSTILETGSFDPYA
LRNPEVLQKKWLYQRGINYGFANTKAYVLTRDGYLCQQCKGKSKDRRLE
VHHIIFRSRNGSDEEANLLTLCKTCHDGLHAGTITLKLTGKKKGTLQHA
TQMNSIRIQLLKRVEAEETWGFVTKEHRLLVGLPKEHIFDAAVIATRGV
KPTFYTTSVLSKHCVSDGDYKQTKGKHGQQRVNTGKIMGFRKFDKVYYL
GKEYFIKGRMSTGYAILMDIDGNKIEFKPLPKFDKMKRVSAR
SSWMMKQRTTPNPSFSITSSLSASAGKNV*
>ωRNA scaffold sequence
(SEQ ID NO: 2060)
GTGAACTACCACTGAGCTGAAGACGCAGTGGCTTCTTCGGAAGTCACTG
AAGACGCAGACCAGGAGCTCCTTCGGAAGCTTGAGTTCACCAGACTCGT
TTCCAGAAATGGGAACAGCGTTCGATTGGTCATGACACCTGCGGTTGAC
GCATCAGACCGCTGCTCTGTCGCTGAGGGTTAAGTAGGCTTGAGGAAAG
GGCCGGTGCTCTCAGCGCAA
AAAGCCTTTTGAACACTGTCGAGATGAAGCCGGATTCCCTTCGTGGTCA
CAGCGAAGGGATACGCACCACCCGGCGCTTGCCGGAGCATTTTCCGAAA
GGAGTTTT
>Kr spacer sequence (endogenous spacer)
(SEQ ID NO: 2061)
GAAGAAGAGGCCGCACCCGTTTGAGGCCGCACCAAAT
>Fn spacer sequence
(SEQ ID NO: 2062)
CAAGCTTTTTAACAGTGGCCTTATTAAATGACTTCTC

[1005] FIG. 3 provides a sequence logo of the N terminal domain from an alignment of the 1004 representative IscB loci with conserved motifs boxed and annotated. While exact residues and domain size may vary, there are identified conserved motifs in the cluster of loci of IscBs at 60% identity and 70% coverage.

[1006] FIG. 4 includes a sequence alignment of this cluster of IscB loci, that span a majority of existing IscB sequences. Provided in the table are approximate conserved portions of the ω R̅NA scaffold without the reprogrammable spacer, and IscB protein. The conserved region on the 5′ region may vary, but generally identifies the approximate location where the spacer and conserved hRNA scaffold region would meet. The hRNA scaffold region and the IscB protein, along with identifying IscB loci information are detailed in Table 1.

[1007] FIG. 5 shows the consensus sequence from IscB loci of Table 1.

### Example 2—IscB Genome Editing Methods

[1008] Mammalian cell culture experiments were performed in the HEK293FT line (American Type Culture Collection (ATCC)), which was grown in Dulbecco's Modified Eagle Medium with high glucose, sodium pyruvate, and GlutaMAX (Thermo Fisher Scientific), additionally supplemented with 1× penicillin-streptomycin (Thermo Fisher Scientific) and 10% fetal bovine serum (VWR Seradigm). Transfections were performed with Lipofectamine 2000 (Thermo Fisher Scientific) in 96-well plates. Cells were plated at approximately 20,000 cells/well 16 hours prior to transfection to ensure 90% confluency at the time of transfection.

[1009] For each well on the plate, 300 ng guideRNA expression plasmid, pHS0812_Isc_large_27 (FIG. 8A) and 150 ng IscB expression plasmid, pHS0810_IscB_large_27 (FIG. 8B) were combined with OptiMEM I Reduced Serum Medium (Thermo Fisher) to a total of 10 μl. Separately, 9.2 μl of OptiMEM was combined with 0.8 μl of Lipofectamine 2000. Plasmid and Lipofectamine solutions were then combined and incubated for 5 minutes, after which they were pipetted onto cells.

[1010] After 72 hours, genomic DNA was harvested from the cells by adding 50 μL of QuickExtract DNA Extraction Solution (Lucigen) and incubating at 65C for 15 min, 68C for 15 min and 95C for 10 min. The extracted genomic DNA was then subjected to two rounds of PCR to amplify the target site and add Illumina adaptors and sample barcodes using NEBNext High-Fidelity 2×PCR Master Mix (New England Biolabs). The library was then subjected to next generation sequencing on an Illumina MiSeq. Indel rate was evaluated using the CRISPResso2 pipeline (Clement et. al., Nat. Biotech. 2019) using a quantification window center of −8 and size 5.

[1011] FIG. 6A-6C shows (6A) Weblogo indicating the TAMs identified in this study; (6B) Indel frequency compared to negative control condition at VEGFA site 2; and (6C) Representative indels at VEGFA site 2.

[1012] FIG. 7A-7B. IscB Protein sequence utilized in this example and the studies shown in FIG. 6A-6C, and (7A) OGEU01000025.1 MMAVVYVISKSGKPLMPTTRCGHVRILLKEGKARVVERKPFTIQLTYESAEETQPLV LGIDPGRTNIGMSVVTESGESVFNAQIETRNKDVPKLMKDRKQYRMAHRRLKRRCK RRRRAKAAGTAFEEGEKQRLLPGCFKPITCKSIRNKEARFNNRKRPVGWLTPTANHL LVTHLNVVKKVQKILPVAKVVLELNRFSFMAMNNPKVQRWQYQRGPLYGKGSVEE AVSMQQDGHCLFCKHGIDHYHHVVPRRKNGSETLENRVGLCEEHHRLVHTDKEWE ANLASKKSGMNKKYHALSVLNQIIPYLADQLADMFPGNFCVTSGQDTYLFREEHGIP KDHYLDAYCIACSALTDAKKVSSPKGRPYMVHQFRRHDRQACHKANLNRSYYMG GKLVATNRHKAMDQKTDSLEEYRAAHSAADVSKLTVKHPSAQYKDMSRIMPGSIL VSGEGKLFTLSRSEGRNKGQVNYFVSTEGIKYWARKCQYLRNNGGLQIYV* (SEQ ID NO: 2063) and (7B) its>ωRNA scaffold sequence GGCTCTTCCAACTTTATGGTTGCGACCGTAGGTTGAAAGAGCACAGGCTGAGAC ATTCGTAAGGCCGAAAGACCGGACGCACCCTGGGATTTCCCCAGTCCCCGGAAC TGCATAGCGGATGCCAGTTGATGGAGCAATCTATCAGATAAGCCAGGGGGAACA ATCACCTCTCTGTATCAGAGAGAGTTTTACAAAAGGAGGAACGG. (SEQ ID NO: 2064)

### Example 3—The Widespread IS200/605 Transposon Family Encodes Diverse Re-Targetable RNA-Guided Endonucleases

[1013] The prokaryotic RNA-guided defense system CRISPR-Cas9 (type II CRISPR-Cas), which has been adopted for genome editing in eukaryotic cells (Zhang, F. (2019), Quarterly Reviews of Biophysics 52; Hille, F, et al. (2018), Cell 172:1239-1259), is thought to have evolved from IscB proteins (3). Despite its wide distribution across prokaryotes and shared domain composition and architecture with Cas9, the function of IscB remains unknown (FIG. 43). Moreover, given that IscB has not been reported to be associated with non-coding RNA (ncRNA) or CRISPR arrays, the evolutionary origins of the RNA-guided activity in Cas9 systems are unclear. IscB is encoded by a distinct subset of IS200/605 superfamily transposons that also include transposons encoding tnpB, a putative endonuclease distantly related to iscB and thought to be the ancestor of Cas12, the type V CRISPR effector (Kapitonav, V. et al. (2015), J. Bacteriol. 198, 797-807; Siguir, P. et al. (2014), FEMS Microbiol. Rev. 38, 865-891; S. Shmakov, S. et al. (2017), Nat. Rev. Microbiol. 15, 169-182). Using phylogenetic analysis, RNA-seq, and biochemical experiments, Applicants sought to elucidate the functions of these proteins and the origin of RNA-guided activity in class 2 CRISPR systems.

IscB is Associated with an Evolutionarily Conserved Non-Coding RNA

[1014] IscB is ˜400 amino acids (aa) long and contains a RuvC endonuclease domain split by the insertion of a bridge helix (BH) and an HNH endonuclease domain, an architecture that is shared with Cas9 (FIG. 1A) (Kapitonav, V. et al. (2015), J. Bacteriol. 198, 797-807). Applicants performed a comprehensive search for proteins containing an HNH or a split RuvC endonuclease domain and found that Cas9 and IscB were the only proteins that contained both domains. This search also showed that IscB contains a previously unidentified N-terminus that lacks clear homology to known domains and is absent in Cas9, which is denoted PLMP after its conserved sequence motifs (FIG. 9A, FIG. 10). Clustering and phylogenetic analysis of the combined RuvC, BH, and HNH domains strongly suggests that all extant Cas9s descended from a single ancestral IscB (FIG. 9B). Applicants searched for CRISPR arrays adjacent to iscB genes from each cluster and found 6 distinct groups of IscB, containing 16 clusters (of 603 total), that were CRISPR-associated, contrary to previous observations (Kapitonav, V. et al. (2015), J. Bacteriol. 198, 797-807). CRISPR-associated IscBs were scattered around the IscB phylogenetic tree, suggesting they evolved independently, with one association event leading to the Cas9 lineage (FIG. 9B). In total, Applicants identified 31 unique CRISPR-associated iscB loci (of 2811 total).

[1015] Given their association with CRISPR arrays, Applicants suspected that the rarely occurring CRISPR-associated IscBs may be RNA-guided nucleases. Applicants first examined a cluster of CRISPR-associated IscBs similar to non-CRISPR associated IscBs (at ˜50% aa identity). Applicants heterologously expressed a representative locus from this clade in E. coli and performed small RNA-seq, which showed expression of not only the CRISPR array, but also a 329-bp intergenic region between the CRISPR array and the IscB open reading frame (ORF) (FIG. 9C). Applicants purified the IscB protein and sequenced the co-purified RNA, demonstrating that this protein interacts with a single ncRNA component, encompassing both the CRISPR array and this intergenic region (FIG. 9C).

[1016] Given its interaction with a ncRNA that includes the CRISPR direct repeat (DR) and spacer, as well as its similar domain architecture to Cas9, Applicants tested this IscB for RNA-guided endonuclease activity. Using a previously established protospacer adjacent motif (PAM)-discovery assay (Table 12) (Zetsche, B. et al. (2015), Cell. 163, 759-771), Applicants observed depletion of specific PAM sequences (FIG. 9D, FIG. 46A-C), indicating that CRISPR-associated IscBs are reprogrammable RNA-guided nucleases. Applicants confirmed this enzymatic activity with an in vitro cleavage assay using recombinant ribonucleoprotein (RNP) complexes (FIG. 9E).

[1017] Our finding that IscB functionally associated with CRISPR at least once, and likely on additional occasions, suggested that IscB systems more generally share a core ancestral ncRNA gene that is prone to evolving into a CRISPR array and in some cases a separate trans-acting tracrRNA (Deltcheva, E, et al. (2011), Nature. 471, 602-607). To test this hypothesis, Applicants aligned 563 non-redundant iscB loci and searched for conserved nucleotide (nt) sequences either upstream or downstream of the iscB ORF. This analysis revealed a highly conserved intergenic region ˜300 bp in length upstream of the ORF with a drop in conservation at the 5′ end, which corresponds to an IS200/605 transposon end. Secondary structure predictions for individual sequences revealed the presence of multiple G: U pairs (FIG. 11), suggesting that the conserved region encodes an ncRNA containing functionally important hairpins, which Applicants named ωRNA. Small RNA-seq on a sample of Ktedonobacter racemifer strain SOSP1-21, a soil bacterium that harbors 49 IscB loci in its genome (Kapitonav, V. et al. (2015), J. Bacteriol. 198, 797-807), demonstrated expression of the predicted ωRNA in many of these loci (FIG. 9F, FIGS. 12, 13A). Moreover, Applicants observed that the transcripts consistently extended beyond the conservation boundary at the 5′ end.

[1018] An RFAM search for potential homologs of the ωRNA showed that the conserved region of the ωRNA partially matched the previously reported HEARO RNA, a ncRNA that was found upstream of HNH domain-containing proteins, which at the time were thought to be homing endonucleases (Kalvari E, et al. (2021), Nucleic Acids Res. 49, D192-D200; Weinberg, Z. et al. (2009), Nature. 462, 656-659). However, the RFAM search did not provide any clues about the nature of the 5′-terminal non-conserved portion of these transcripts. Comparison of the consensus CRISPR-associated IscB ncRNA and the covariance folded ωRNA secondary structures revealed high degrees of structural and sequence similarity, particularly in shared multi-stem regions and pseudoknots (FIG. 9G, FIG. 47A-B, Supplementary Text). Most importantly, Applicants inferred that the 5′-most non-conserved sequence in the ωRNA might function as a guide sequence, because the sequence immediately downstream was predicted to form hairpins that structurally resembled the hairpins formed by the DR/anti-repeat duplex in the CRISPR-associated IscB ncRNA (FIG. 9G).

TABLE 8
Expression plasmids used in this study.

| Plasmid name | Description | Associated FIGS. |
|---|---|---|
| Expression plasmids | | |
| pHS0570 | pET45b(+) T7/LacO His14- | FIG. 9C, E |
| | MBP-bdSUMO-CRISPR | |
| | associated IscB-TwinStrep | |
| pHS0578 | CRISPR associated IscB non- | FIG. 9C |
| | coding locus in pColA-Duet | |
| pHS0663 | pET45b(+) KraIscB-1 | FIG. 13A |
| | TwinStrep | |
| pHS0667 | KraIscB-1 non-coding locus in | FIG. 13A |
| | pCOLADuet-1 | |
| pHS0781 | pcDNA3.1(+) CMV-SV40 | |
| | NLS-AwaIscB-nucleoplasmin | |
| | NLS-3xHA | |
| pHS0806 | pET45b(+) His14-bdSUMO- | FIG. 15E-G; FIG. 17; FIG. 18; |
| | AwaIscB | FIG. 19 |
| pHS0810 | pcDNA3.1(+) CMV-SV40 | FIG. 39F-G; FIG. 40 |
| | NLS-OgeuIscB-nucleoplasmin | |
| | NLS-3xHA | |
| pHS0812 | hU6-BpiI-OgeuIscB | FIG. 39F-G; FIG. 40 |
| | omegaRNA scaffold | |
| pHS0766 | pET45b(+) His14-MBP-TEV- | FIG. 61A |
| | AloTnpB-2 3′ extension | |
| Locus plasmids | | |
| pHS0537 | CRISPR-associated IscB locus | FIG. 9C-D |
| | (Delaware Bay) in pBR322 | |
| | with Fn spacer | |
| pHS0535 | CRISPR-associated IscB | FIG. 46A-46C |
| | (Chesapeake Bay) in pBR322 | |
| | with Fn spacer | |
| PAM/TAM libraries | | |
| pUC19 Fn 8N library | Fn | FIG. 15B-D; FIG. 39D, E, I, H; |
| | | FIG. 48; FIG. 61B |
| pACYC Fn 8N library | Fn | FIG. 1D; FIG. 46A-46C |
| pACYC KraIscB-1 | KraIscB-1 endogenous target | FIG. 15B-C |
| endogenous target 8N library | | |

### IscB is a Reprogrammable RNA-Guided DNA Endonuclease

[1019] To test whether IscB was capable of cleaving DNA complementary to the putative ωRNA guide, Applicants performed an in vitro plasmid cleavage assay with KraIscB-1 using an in vitro transcription/translation (IVTT) expression system (FIG. 15A, 15B). Applicants found that KraIscB-1 cleaved the target in an ωRNA-dependent manner, with an ATAAA 3′ target-adjacent motif (TAM) (FIG. 2C). Retargeting of KraIscB-1 using a different guide (Fn guide) (Zetsche, B. et al. (2015), Cell. 163, 759-771) also mediated cleavage of the cognate target (FIG. 15C, FIG. 13B), implying that IscB is a reprogrammable RNA-guided nuclease.

[1020] Next, Applicants biochemically characterized IscB in vitro. Applicants identified activity in 57/86(66%) selected phylogenetically diverse systems (Table 9) as determined by the identification of a TAM (FIG. 48). Of these 57 functional IscBs, 5 could be reconstituted with the respective RNA in vitro to achieve efficient target cleavage, and from those, Applicants selected AwaIscB (from Allochromatium warmingii) for detailed biochemical characterization (FIG. 15D-15G).

[1021] Applicants confirmed the ability of recombinant AwaIscB to cleave multiple dsDNA targets in a programmable manner (FIG. 15E) and showed that the activity of AwaIscB is magnesium-dependent with a temperature optimum from 35-40° C. (FIG. 17A, B). Appreciable activity was observed in vitro with guide lengths between 15 and 45 nt (FIG. 17D). Mutation of the catalytic RuvC-II residue (E157A) abolished the nucleolytic activity on the non-target DNA strand, whereas the HNH domain catalytic mutant H212A abolished the nucleolytic activity on the target strand (FIG. 15F). Combination of the E157A and H212A mutations (dAwaIscB) abolished all dsDNA nucleolytic activity (FIG. 15F) (Jinek, M, et al. (2012), Science 337, 816-821; Gasiunas, G. et al. (2020), Nat. Commun. 11, 55). Sequencing of the cleavage products showed that AwaIscB cleaves the target strand 3 nt upstream of the TAM, similar to Cas9s (GasiunasG, et al. (2020), Nat. Commun. 11, 5512).

[1022] Cleavage of the non-target strand occurred 8 or 12 nt upstream of the TAM, generating 5- or 9-nt long 5′ overhangs (FIG. 15G, FIG. 18). Exonuclease III mapping of a target substrate engaged by the dAwaIscB-ωRNA RNP showed that the RNP hindered exonuclease III treatment 19 nt upstream of the TAM on the target strand and 6 nt downstream of the targeted sequence on the non-target strand (FIG. 19) (Jinek, M. et al. (2014), Science. 343, 1247997). Applicants also found that truncation of more than 4 aa of the PLMP domain of AwaIscB abolished cleavage activity (FIG. 49). Amino acid sequences for the proteins of Table 9 and the DNA sequences of their omegaRNAs correspond to SEQ ID NOs. 2059 to 2530.

TABLE 9
Contig accessions and sequence information for experimentally tested IscBs.

| | | | | Consensus TAM |
|---|---|---|---|---|
| Contig Accession | Cluster ID | Key name | Source organism/taxonomy (if applicable) | (if functional) |
| ADVG01000004 | | KraIscB-1 | Ktedonobacter racemifer DSM 44963 | ATAAA |
| ADVG01000001.1 | 44123 | KraIscB-2 | Ktedonobacter racemifer DSM 44963 | N/A |
| ADVG01000001.1 | 52169 | KraIscB-3 | Ktedonobacter racemifer DSM 44963 | ATG |
| ADVG01000001.1 | 30772 | KraIscB-4 | Ktedonobacter racemifer DSM 44963 | ATMAA |
| ADVG01000004.1 | 31896 | KraIscB-5 | Ktedonobacter racemifer DSM 44963 | GTGAA |
| ADVG01000004.1 | 30772 | KraIscB-6 | Ktedonobacter racemifer DSM 44963 | N/A |
| AZFH01000048.1 | 41499 | LeqIscB1 | Lactobacillus equi DSM 15833 = JCM 10991 | N/A |
| AZRL01000003.1 | 20578 | PolIscB1 | Petrotoga olearia DSM 13574 | NTGAD |
| AZRL01000004.1 | 49815 | PolIscB2 | Petrotoga olearia DSM 13574 | VTGA |
| AZRM01000012.1 | 41273 | PmiIscB1 | Petrotoga miotherma DSM 10691 | TTRA |
| BAMK01000010.1 | 26262 | LcoIscB1 | Lactobacillus composti DSM 18527 | TTRA |
| BBBW01000007.1 | 40542 | LecIscB1 | Lactobacillus equicursoris DSM 19284 = JCM 14600 | TTGAA |
| CP001393.1 | 23802 | CbeIscB1 | Caldicellulosiruptor bescii DSM 6725 | GBGDDD |
| CP001393.1 | 36486 | CbeIscB2 | Caldicellulosiruptor bescii DSM 6725 | N/A |
| CP001814.1 | 12901 | SroIscB1 | Streptosporangium roseum DSM 43021 | DTG |
| CP001896.1 | 29247 | AviIscB1 | Allochromatium vinosum DSM 180 | RTG |
| CP015439.1 | 49704 | AamIscB1 | Anoxybacillus amylolyticus strain DSM 15939 | ATGAH |
| | | | plasmid pDSM15939_1 | |
| CP026105.1 | 44770 | PhoIscB1 | Paraburkholderia hospita strain DSM 17164 | ATG |
| CP026105.1 | 44770 | PhoIscB2 | Paraburkholderia hospita strain DSM 17164 | ATGA |
| FMXB01000023.1 | 65074 | MmiIscB1 | Methanobrevibacter millerae strain DSM 16643 | ATGA |
| FMXR01000006.1 | 46359 | EoxIscB1 | Eubacterium oxidoreducens strain DSM 3217 | ATGA |
| FNDL01000011.1 | 18054 | FchIscB1 | Fervidobacterium changbaicum strain DSM 17883 | N/A |
| FNDL01000023.1 | 32003 | FchIscB2 | Fervidobacterium changbaicum strain DSM 17883 | GTGA |
| FNOW01000019.1 | 44770 | AwaIscB1 | Allochromatium warmingii strain DSM 173 | ATGA |
| FOXR01000041.1 | 18054 | CfaIscB1 | Caldicoprobacter faecalis strain DSM 20678 | ATGAH |
| FPAI01000021.1 | 27545 | HmiIscB1 | Halolactibacillus miurensis strain DSM 17074 | N/A |
| FPBV01000023.1 | 47441 | AmaIscB1 | Alicyclobacillus macrosporangiidus strain DSM 17980 | RTGG |
| FQZM01000035.1 | 36667 | DthIscB1 | Desulfotomaculum thermosubterraneum DSM 16057 | GTGA |
| FRDJ01000006.1 | 18054 | FgoIscB1 | Fervidobacterium gondwanense DSM 13020 | ATGAH |
| FWXY01000026.1 | 22166 | DvaIscB1 | Desulfobacterium vacuolatum DSM 3385 | NTAAA |
| JAAGRP010000061.1 | 53804 | DhyIscB1 | Desulfobacter hydrogenophilus strain DSM 3380 | NNGA |
| JAFA01000051.1 | 44770 | PnoIscB1 | Paraburkholderia nodosa DSM 21604 | ATGA |
| JFHC01000001.1 | 44770 | CglIscB1 | Caballeronia glathei strain DSM 50014 | ATGA |
| JMKS01000001.1 | 71441 | EanIscB1 | Exiguobacterium antarcticum DSM 14480 | ATGA |
| JQSG02000004.1 | 44770 | AprIscB1 | Acidihalobacter prosperus strain DSM 5130 | ATGA |
| KE386494.1 | 36667 | CpoIscB1 | Caldanaerobius polysaccharolyticus DSM 13641 | GTGA |
| KE387209.1 | 17533 | AauIscB1 | Azohydromonas australica DSM 1124 | ATG |
| KI535313.1 | 58923 | EceIscB1 | Enterococcus cecorum DSM 20682 = ATCC 43198 | ATG |
| LMBW01000001.1 | 30772 | BhuIscB1 | Bacillus humi strain DSM 16318 | ATAAA |
| LT607411.1 | 34693 | MviIscB 1 | Micromonospora viridifaciens strain DSM 43909 | ATGA |
| LT607751.1 | 34693 | MsiIscB1 | Micromonospora siamensis strain DSM 45097 | NTG |
| LWAE01000002.1 | 54479 | CmaIscB1 | Clostridium magnum DSM 2767 | N/A |
| LWAE01000013.1 | 54479 | CmaIscB2 | Clostridium magnum DSM 2767 | N/A |
| NWBQ01000011.1 | 44770 | MbiIscB1 | Macromonas bipunctata strain DSM 12705 | VTGA |
| NWBQ01000013.1 | 44770 | MbiIscB2 | Macromonas bipunctata strain DSM 12705 | VTG |
| SAUN01000001.1 | 51289 | NpoIScB1 | Nonomuraea polychroma strain DSM 43925 | N/A |
| SMBX01000003.1 | 44770 | PsoIscB1 | Paracandidimonas soli strain DSM 100048 | ATGA |
| SMKY01000017.1 | 12901 | AdaIscB1 | Actinomadura darangshiensis strain DSM 45941 | GTGAA |
| SMKY01000166.1 | 12901 | AdaIscB2 | Actinomadura darangshiensis strain DSM 45941 | NTGAA |
| UESZ01000001.1 | 865 | BheIscB1 | Branchiibius hedensis strain DSM 22951 | GGGGHG |
| VFEU01000027.1 | 44683 | PrhIscB1 | Pseudomonas rhodesiae strain DSM 14020 | ATGA |
| QUIR01000011.1 | 21516 | QuirIscB1 | Ruminococcus sp. AM40-10AC | ATGA |
| JH724136.1 | 14084 | BdoIscB1 | Bacteroides dorei CL02T12C06 | N/A |
| QSPK01000009.1 | 32498 | EstIscB1 | Eubacterium sp. TM05-53 | N/A |
| FMDX01000002.1 | 29934 | FmdxIscB1 | uncultured Clostridium sp. isolate 2789STDY5834874 | N/A |
| CP027167.1 | 44683 | PaeIscB1 | Pseudomonas aeruginosa strain AR_0356 plasmid | ATGA |
| | | | unnamed3 | |
| FMGK01000008.1 | 58923 | FmgkIscB1 | uncultured Clostridium sp. isolate 2789STDY5834935 | ATMAA |
| QULK01000019.1 | 58923 | RsoIscB1 | Ruminococcus sp. OM05-10BH | N/A |
| KB976725.1 | 60626 | BceIscB1 | Bacillus cereus VD136 | TTRA |
| RCAL01000070.1 | 40565 | EcoIscB1 | Escherichia coli strain B8110 | N/A |
| QUIP01000016.1 | 6379 | QuipIscB1 | Ruminococcus sp. AM42-10AC | N/A |
| CP006668.1 | 44770 | RpiIscB1 | Ralstonia pickettii DTP0602 | N/A |
| UKSF01000002.1 | 39989 | KpnIscB1 | Klebsiella pneumoniae strain EuSCAPE_IT215 | NBRA |
| QUIS01000016.1 | 21516 | QuisIscB1 | Ruminococcus sp. AM36-17 | NTGA |
| OEZH01000093.1 | 63259 | CdiIscB1 | Clostridioides difficile strain 173070 | NTAAR |
| QTWT01000019.1 | 1420 | QtwtIscB1 | Ruminococcus sp. AF18 | N/A |
| CABVRB010000040.1 | 61670 | AbuIscB1 | Arcobacter butzleri isolate Ab_1711 | ATGADRD |
| LFOD01000003.1 | 24531 | McoIscB1 | Mycolicibacterium conceptionense strain MLE | N/A |
| QUIO01000086.1 | 26022 | QuioIscB1 | Ruminococcus sp. AM42-11 | N/A |
| DEGM01000152.1 | 69876 | DegmIscB1 | Lachnospiraceae bacterium UBA2826 | N/A |
| OWZO01000071.1 | 6594 | OwzoIscB1 | human gut metagenome genome assembly, contig: | NTAAA |
| | | | NODE_724_length_33230_cov_4.750505, whole | |
| | | | genome shotgun sequence \| SOURCE: WGS DATE: | |
| | | | 2019 Jan. 27 GENOME_ID: 10741 CONTIG_ID: 723 | |
| | | | GENOME_ACC: ORRM01.1 | |
| UPEL01000159.1 | 54268 | UpelIscB1 | human gut metagenome genome assembly, contig: | N/A |
| | | | NODE_159_length_75563_cov_9.847632 | |
| OIZI01004561.1 | 1922 | OiziIscB1 | human gut metagenome genome assembly, contig: | NNAAA |
| | | | NODE_4561_length_4588_cov_3.294066 | |
| OWFL01000025.1 | 2221 | OwflIscB1 | human gut metagenome genome assembly, contig: | NNAAA |
| | | | NODE_25_length_213871_cov_13.923256, whole | |
| | | | genome shotgun sequence \| SOURCE: WGS DATE: | |
| | | | 2019 Jan. 27 GENOME_ID: 11957 CONTIG_ID: 24 | |
| | | | GENOME_ACC: OWFL01.1 | |
| UPFJ01002787.1 | 14824 | UpfjIscB1 | human gut metagenome genome assembly, contig: | NTAAA |
| | | | NODE_2787_length_13531_cov_3.087266 | |
| ORVI01000029.1 | 11690 | OrviIscB1 | human gut metagenome genome assembly, contig: | N/A |
| | | | NODE_29_length_154150_cov_4.224790, whole | |
| | | | genome shotgun sequence \| SOURCE: WGS DATE: | |
| | | | 2019 Jan. 27 GENOME_ID: 10841 CONTIG_ID: 28 | |
| | | | GENOME_ACC: ORVI01.1 | |
| UWST01001880.1 | 26698 | UwstIscB1 | mouse gut metagenome genome assembly, contig: | ATAA |
| | | | NODE_1880_length_30065_cov_4.990836, whole | |
| | | | genome shotgun sequence \| SOURCE: WGS DATE: | |
| | | | 2019 Jun. 6 GENOME_ID: 279225 CONTIG_ID: | |
| | | | 1879 GENOME_ACC: UWST01.1 | |
| OMBG01000014.1 | 52299 | OmbgIscB1 | human gut metagenome genome assembly, contig: | N/A |
| | | | NODE_14_length_122693_cov_23.179227 | |
| OGEU01000025.1 | 11690 | OgeuIscB1 | metagenome genome assembly, contig: | NWRRNA |
| | | | NODE_25_length_150080_cov_8.882980 | |
| AP019309.1 | 22690 | EbaIscB1 | Erysipelotrichaceae bacterium SG0102 DNA, complete | N/A |
| | | | genome \| SOURCE: NCBI_Prokaryotes DATE: 2019 | |
| | | | Jan. 27 GENOME_ID: 208690 CONTIG_ID: 0 | |
| | | | GENOME_ACC: | |
| | | | GCA_003925875.1_ASM392587v1_genomic | |
| OIXA01.1 | 46682 | HgmIscB1 | human gut metagenome genome assembly, contig: | N/A |
| | | | NODE_137_length_98666_cov_9.003610, whole | |
| | | | genome shotgun sequence \| SOURCE: WGS DATE: | |
| | | | 2019 Jan. 27 GENOME_ID: 6111 CONTIG_ID: 136 | |
| | | | GENOME_ACC: OIXA01.1 | |
| OPXW01000461.1 | 49070 | OpxwIscB1 | human gut metagenome genome assembly, contig: | N/A |
| | | | NODE_461_length_28699_cov_2.357946, whole | |
| | | | genome shotgun sequence \| SOURCE: WGS DATE: | |
| | | | 2019 Jan. 27 GENOME_ID: 9575 CONTIG_ID: 460 | |
| | | | GENOME_ACC: OPXW01.1 | |
| OMGI01003682.1 | 49070 | OmgiIscB1 | human gut metagenome genome assembly, contig: | N/A |
| | | | NODE_3682_length_6100_cov_3.653598, whole | |
| | | | genome shotgun sequence \| SOURCE: WGS DATE: | |
| | | | 2019-01-27 GENOME_ID: 8314 CONTIG_ID: 3681 | |
| | | | GENOME ACC: OMGI01.1 | |
| QUKU01000013.1 | 6594 | QukuIscB1 | Ruminococcus sp. OM08-7 OM08-7.Scaf13, whole | N/A |
| | | | genome shotgun sequence \| SOURCE: | |
| | | | NCBI_Prokaryotes DATE: 2019 Jan. 27 GENOME_ID: | |
| | | | 172916 CONTIG_ID: 4 GENOME_ACC: | |
| | | | GCA_003481515.1_ASM348151v1_genomic | |
| QUIS01000025.1 | 21516 | QuisIscB2 | Ruminococcus sp. AM36-17 AM36-17.Scaf25, whole | N/A |
| | | | genome shotgun sequence \| SOURCE: | |
| | | | NCBI_Prokaryotes DATE: 2019 Jan. 27 GENOME_ID: | |
| | | | 172850 CONTIG_ID: 17 GENOME_ACC: | |
| | | | GCA_003480205.1_ASM348020v1_genomic | |
| JACBGJ010000050 | 4393 | LasIscB1 | Lactobacillus salivarius strain KZ-NCB | NTGA |
| | | | Lactobacillus_salivarius_contig_50, whole genome | |
| | | | shotgun sequence \| SOURCE: NCBI_Prokaryotes | |
| | | | DATE: 2020 Oct. 27 GENOME_ID: 358408 | |
| | | | CONTIG_ID: 45 GENOME_ACC: | |
| | | | GCA_013391745.1_ASM1339174v1_genomic | |
| ORRM01000724.1 | 10049 | OrrmIscB1 | human gut metagenome genome assembly, contig: | NNGNNR |
| | | | NODE_724_length_33230_cov_4.750505, whole | |
| | | | genome shotgun sequence \| SOURCE: WGS DATE: | |
| | | | 2019 Jan. 27 GENOME_ID: 10741 CONTIG_ID: 723 | |
| | | | GENOME_ACC: ORRM01.1 | |
| Eukaryotic | | | | |
| KY407659 | | IteIscB1 | Ignatius tetrasporus culture UTEX: 2012 chloroplast, | NG |
| | | | complete genome | |
| CRISPR-associated IscB | | | | |
| Ga0348337_018242 | | | Delaware Bay aquatic sample metagenome | NAC |

### IscB Employ Multiple Guide-Encoding Mechanisms

[1023] A distinct advantage of RNA-guided systems is that they allow an effector to target many substrates by simply reprogramming the RNA guide. One-way IscB evolved to use multiple guides is association with CRISPR arrays (FIG. 16A). However, given that iscB loci typically encode a single ωRNA, it is unclear how or even whether these systems achieve such modularity in general. By searching for ωRNAs not directly adjacent to iscB ORFs, Applicants uncovered three additional potential mechanisms for guide encoding and switching: ωRNA arrays, transposon expansion, and standalone, trans-acting ωRNAs (FIG. 16A). ωRNA arrays consist of multiple ωRNAs, each encompassing a distinct guide, separated by up to 200 bp, and are found in 15/3356 unique IscB/IsrB loci (0.4%). Transposon expansion involves the insertion of nearly identical IS200/605 superfamily transposons in multiple locations, resulting in multiple loci per genome, each capable of expressing a nearly identical ωRNA scaffold with a unique guide (FIG. 20). By contrast, standalone ωRNAs, which show no detectable genomic associations with iscB, were more common and were found in multiple copies in some genomes. Cis ωRNAs from 95/3356(2.8%) unique IscB/IsrB loci were nearly identical (≥95% sequence identity) to distally encoded standalone ωRNAs (FIG. 50), implying that these standalone ωRNAs could encode guides used by trans-encoded IscBs.

[1024] Applicants tested this possibility by examining 10 standalone ωRNAs in the K. racemifer genome, (FIG. 16B), 9 of which were found to be expressed (FIG. 16C, FIG. 21). Of the 6 standalone ωRNAs tested, Applicants found that 5 could mediate RNA-guided DNA cleavage with a distally encoded IscB from the same genome (FIG. 16D), demonstrating that a single IscB can use multiple trans-encoded ωRNAs. Guides from many ωRNAs, both IscB-adjacent and trans-encoded, mostly target prokaryotic genomic sequences (61.5% genomic, 0.7% plasmid, 2.0% phage, 35.8% unmatched, N=36323), suggesting a non-defense function for IscB systems (FIG. 50). In particular, Applicants found that more than a third of the ωRNAs (34.1%) targeted the same locus without the IS200/605 transposon insertion (FIG. 51).

### Evolution and Diversity of IscB Systems

[1025] Applicants next investigated the evolutionary relationships between IscB, Cas9, and other homologous proteins to gain a broader insight into the evolution of RNA-guided mechanisms. In our search for proteins containing split RuvC domains, Applicants detected another group of shorter, ˜350 aa IscB homologs that are also encoded in IS200/605 superfamily transposons. These proteins contain a PLMP domain and split RuvC but lack the HNH domain. Applicants renamed these proteins IsrB (Insertion sequence RuvC-like OrfB) to emphasize their distinct domain architecture, replacing the previous designation, IscB1 (Kapitonov, V. et al. (2015), J. Bacteriol. 198, 797-807). In addition to IscB and IsrB, Applicants identified a family of even smaller (˜180 aa) proteins that only contained the PLMP domain and HNH domain but no RuvC domain, which Applicants named IshB (Insertion sequence HNH-like OrfB).

[1026] To investigate the relationships between these proteins, Applicants built a maximum likelihood (ML) tree from a multiple alignment of the split RuvC nuclease and BH domains using IQ-TREE 2 (FIGS. 22, 31A, 52, Table 11) (Mihn, B. et al (2020), Mol. Biol. Evol. 37, 1530-1534). The topology of the resulting tree was supported by several additional ML and Bayesian phylogenetic and robustness analyses ((FIGS. 22, 32-33, 35, 52-56), see Supplementary Text for details). In the resulting tree, IsrB, IscB, and Cas9 formed distinct, strongly supported clades, suggesting that each of these nucleases originated from a unique evolutionary event (FIGS. 31A, 32, 33A, 33C, 35, 54C-54D, and Supplementary Text). Applicants then analyzed the associations between each protein cluster and IS200/605 mpA genes (Kapitonov, V. et al. (2015), J. Bacteriol. 198, 797-807), ωRNAs, CRISPR-Cas adaptation genes (cas1, cas2, cas4, and csn2), CRISPR arrays upstream and downstream of the respective ORF, and CRISPR anti-repeats (FIG. 31A). As discussed above, IscB and isrB were rarely associated with CRISPR arrays and were not found to be associated with CRISPR-Cas adaptation genes. The isrBs are associated with structurally distinct ωRNAs. The iscBs are flanked by transposon ends similar to those mobilized by TnpA (Kapitonov, V. et al. (2015), J. Bacteriol. 198, 797-807), but are only found near tnpA in 56/2811 of unique IscB loci (2.0%) (FIGS. 31A, 57D).

[1027] Additionally, Applicants identified two distinct groups of Cas9s. The first is a new subtype, II-D, a group of relatively small cas9s (˜700aa) that are not associated with any other known cas genes (Makarova, K., et al. (2020), Nat. Rev. Microbiol. 18, 67-83). The second is a distinct clade branching from within the II-C subtype, which includes exceptionally large cas9s (>1700aa) that are associated with mpA (FIG. 31A, FIG. 57). The tnpA-associated II-C loci often encompass unusually long DRs (more than 42 bp in length) and in some cases encode HIRAN domain proteins between the cas9 and other cas genes (FIG. 31A, FIG. 44). Predicted transposon ends surround various combinations of the tnpA, cas acquisition genes, and CRISPR arrays in these loci.

[1028] These phylogenetic and association analyses confirm that IS200/605 transposon-encoded IscBs and IsrBs share a common evolutionary history with Cas9 (Supplementary Text). Given the deep position of the IsrB clade in the tree (FIG. 31A) and the lack of the HNH domain, IsrBs likely represent the ancestral state, probably having evolved from the compact RuvC endonuclease (Majorek, K. et al. (2014), Nucleic Acids Res. 42, 4160-4179). Almost all isrBs are associated with an ωRNA, suggesting that these systems became RNA-guided at an early stage of evolution, concomitantly with the insertions in the RuvC-like domain that are likely to be involved in complex formation with ωRNA. IsrB subsequently gained the HNH domain, possibly through insertion of another mobile element or recombination with a gene encoding an IshB-like protein, founding the IscB family (gray squares, FIG. 31A-31B, Supplementary Text).

[1029] CRISPR arrays emerged within IscB systems on multiple, independent occasions (black circles, FIG. 31A-31B). These short arrays consist of repeats that could have evolved by duplication of segments of the ancestral ωRNA. The resulting systems encompass a hybrid CRISPR-ωRNA that consists of a CRISPR array preceding a partial ωRNA. These CRISPR-associated IscB proteins likely also gained REC-like insertions between the RuvC-I and RuvC-II subdomains on a number of occasions, often contemporaneously with or shortly after the CRISPR association (white squares, FIG. 31A-31B, FIG. 58). In particular, one CRISPR-associated IscB cluster (cluster 2089) apparently founded the Cas9 family (FIG. 35) upon the loss of the hallmark PLMP domain (gray square, FIG. 31A-31B, FIG. 58). Moreover, the tracrRNAs of Subtype II-D, a deep branch in the Cas9 subtree (ML branch support: ≥97/100, Bayesian posterior probability: 100%, FIG. 54B-D, FIG. 35), shows significant similarity to IscB ωRNAs (E-value 4.1e-8), suggesting that the Cas9 tracrRNA originally evolved from ωRNA (FIG. 36). The continued evolution of Cas9 apparently involved the gain of additional REC-like insertions between the bridge helix and the RuvC-II domains resulting in increased protein size (FIG. 58). Finally, upon the association with the CRISPR adaptation machinery (cas1, cas2, and possibly cas4) (light blue circles, FIG. 31A-B), a burst of Cas9 diversification and widespread dispersion among bacteria via horizontal gene transfer followed, resulting in the evolution of multiple type II CRISPR subtypes.

[1030] Applicants also explored the evolutionary history of ωRNAs. By iteratively building a set of ωRNA profiles that spanned all major groups of ωRNAs associated with iscBs and isrBs, Applicants found that diverse ωRNAs are associated with almost all iscBs and isrBs. Moreover, different IsrB and IscB clades are associated with distinct ωRNA structures (FIG. 4A, 4C, FIG. 37, FIG. 38A, FIG. 52A). The transition from isrB to iscB was likely accompanied by loss of a second pseudoknot, the adaptor pseudoknot, between the transposon end region and the multi-stem loop in isrB-associated ωRNAs (light gray square, FIG. 31A-31C). The inverse relationship between the complexity of the ωRNA structure and the associated protein size is also reflected by the simplified ωRNA structures associated with clades of large IscBs and the even smaller tracrRNAs associated with large Cas9s (FIG. 31C, FIG. 38). Accession numbers and natural targets search data are shown in Table 10.

### Table 10A-H. Accession Numbers and Natural Taregt Searh Data

TABLE 10A
RuvC BH
N sites 208
N proteins 1853

| Model | −LnL | df | AIC | AICc | BIC |
|---|---|---|---|---|---|
| LG | 503754.123 | 3703 | 1014914.25 | 28446738.2 | 1027273.15 |
| LG + I | 501031.081 | 3704 | 1009470.16 | 28456110.2 | 1021832.4 |
| LG + G4 | 484701.308 | 3704 | 976810.616 | 28423450.6 | 989172.857 |
| LG + I + G4 | 484248.917 | 3705 | 975907.834 | 28437367.8 | 988273.413 |
| LG + F + I + G4 | 486649.626 | 3724 | 980747.252 | 28724547.3 | 993176.243 |
| WAG + I + G4 | 485319.069 | 3705 | 978048.137 | 28439508.1 | 990413.716 |
| WAG + F + I + G4 | 486966.711 | 3724 | 981381.423 | 28725181.4 | 993810.414 |
| JTT + I + G4 | 492218.062 | 3705 | 991846.123 | 28453306.1 | 1004211.7 |
| JTT + F + I + G4 | 493619.025 | 3724 | 994686.05 | 28738486.1 | 1007115.04 |
| JTTDCMut + I + G4 | 492121.288 | 3705 | 991652.576 | 28453112.6 | 1004018.15 |
| JTTDCMut + F + I + G4 | 493571.492 | 3724 | 994590.984 | 28738391 | 1007019.98 |
| DCMut + I + G4 | 495427.634 | 3705 | 998265.269 | 28459725.3 | 1010630.85 |
| DCMut + F + I + G4 | 493953.2 | 3724 | 995354.4 | 28739154.4 | 1007783.39 |
| VT + I + G4 | 484911.291 | 3705 | 977232.583 | 28438692.6 | 989598.161 |
| VT + F + I + G4 | 486476.96 | 3724 | 980401.921 | 28724201.9 | 992830.913 |
| PMB + I + G4 | 485970.164 | 3705 | 979350.329 | 28440810.3 | 991715.907 |
| PMB + F + I + G4 | 487425.47 | 3724 | 982298.94 | 28726098.9 | 994727.932 |
| Blosum62 + I + G4 | 485128.966 | 3705 | 977667.933 | 28439127.9 | 990033.511 |
| Blosum62 + F + I + G4 | 487231.102 | 3724 | 981910.204 | 28725710.2 | 994339.195 |
| Dayhoff + I + G4 | 495468.881 | 3705 | 998347.761 | 28459807.8 | 1010713.34 |
| Dayhoff + F + I + G4 | 494003.659 | 3724 | 995455.317 | 28739255.3 | 1007884.31 |
| mtREV + I + G4 | 517365.999 | 3705 | 1042142 | 28503602 | 1054507.58 |
| mtREV + F + I + G4 | 497460.523 | 3724 | 1002369.05 | 28746169 | 1014798.04 |
| mtART + I + G4 | 525196.939 | 3705 | 1057803.88 | 28519263.9 | 1070169.46 |
| mtART + F + I + G4 | 502278.647 | 3724 | 1012005.29 | 28755805.3 | 1024434.29 |
| mtZOA + I + G4 | 510552.349 | 3705 | 1028514.7 | 28489974.7 | 1040880.28 |
| mtZOA + F + I + G4 | 496519.09 | 3724 | 1000486.18 | 28744286.2 | 1012915.17 |
| mtMet + I + G4 | 517023.603 | 3705 | 1041457.21 | 28502917.2 | 1053822.79 |
| mtMet + F + I + G4 | 498462.685 | 3724 | 1004373.37 | 28748173.4 | 1016802.36 |
| mtVer + I + G4 | 525831.436 | 3705 | 1059072.87 | 28520532.9 | 1071438.45 |
| mtVer + F + I + G4 | 509246.342 | 3724 | 1025940.69 | 28769740.7 | 1038369.68 |
| mtInv + I + G4 | 516516.275 | 3705 | 1040442.55 | 28501902.6 | 1052808.13 |
| mtInv + F + I + G4 | 493117.244 | 3724 | 993682.487 | 28737482.5 | 1006111.48 |
| mtMAM + I + G4 | 534945.189 | 3705 | 1077300.38 | 28538760.4 | 1089665.96 |
| mtMAM + F + I + G4 | 513646.512 | 3724 | 1034741.02 | 28778541 | 1047170.02 |
| HIVb + I + G4 | 507589.225 | 3705 | 1022588.45 | 28484048.4 | 1034954.03 |
| HIVb + F + I + G4 | 510843.95 | 3724 | 1029135.9 | 28772935.9 | 1041564.89 |
| HIVw + I + G4 | 529355.482 | 3705 | 1066120.96 | 28527581 | 1078486.54 |
| HIVw + F + I + G4 | 526209.981 | 3724 | 1059867.96 | 28803668 | 1072296.95 |
| FLU + I + G4 | 503465.942 | 3705 | 1014341.88 | 28475801.9 | 1026707.46 |
| FLU + F + I + G4 | 506544.44 | 3724 | 1020536.88 | 28764336.9 | 1032965.87 |
| rtREV + I + G4 | 488028.849 | 3705 | 983467.697 | 28444927.7 | 995833.276 |
| rtREV + F + I + G4 | 486920.363 | 3724 | 981288.725 | 28725088.7 | 993717.717 |
| cpREV + I + G4 | 488546.347 | 3705 | 984502.694 | 28445962.7 | 996868.272 |
| cpREV + F + I + G4 | 492889.794 | 3724 | 993227.587 | 28737027.6 | 1005656.58 |

TABLE 10B
RuvC BH HNH
N sites 315
N proteins 1710

| Model | −LnL | df | AIC | AICc | BIC |
|---|---|---|---|---|---|
| LG | 729020.94 | 3417 | 1464875.88 | 24823487.9 | 1477698.42 |
| LG + I | 725636.107 | 3418 | 1458108.21 | 24830392.2 | 1470934.51 |
| LG + G4 | 700605.149 | 3418 | 1408046.3 | 24780330.3 | 1420872.59 |
| LG + I + G4 | 699919.215 | 3419 | 1406676.43 | 24792636.4 | 1419506.48 |
| LG + F + I + G4 | 701771.88 | 3438 | 1410419.76 | 25056983.8 | 1423321.1 |
| WAG + I + G4 | 701096.463 | 3419 | 1409030.93 | 24794990.9 | 1421860.97 |
| WAG + F + I + G4 | 701889.424 | 3438 | 1410654.85 | 25057218.8 | 1423556.19 |
| JTT + I + G4 | 710934.601 | 3419 | 1428707.2 | 24814667.2 | 1441537.25 |
| JTT + F + I + G4 | 710823.602 | 3438 | 1428523.2 | 25075087.2 | 1441424.55 |
| JTTDCMut + I + G4 | 710751.156 | 3419 | 1428340.31 | 24814300.3 | 1441170.36 |
| JTTDCMut + F + I + G4 | 710735.814 | 3438 | 1428347.63 | 25074911.6 | 1441248.97 |
| DCMut + I + G4 | 714711.037 | 3419 | 1436260.07 | 24822220.1 | 1449090.12 |
| DCMut + F + I + G4 | 711284.014 | 3438 | 1429444.03 | 25076008 | 1442345.37 |
| VT + I + G4 | 700737.235 | 3419 | 1408312.47 | 24794272.5 | 1421142.52 |
| VT + F + I + G4 | 701335.287 | 3438 | 1409546.58 | 25056110.6 | 1422447.92 |
| PMB + I + G4 | 702726.44 | 3419 | 1412290.88 | 24798250.9 | 1425120.93 |
| PMB + F + I + G4 | 702772.429 | 3438 | 1412420.86 | 25058984.9 | 1425322.2 |
| Blosum62 + I + G4 | 701617.707 | 3419 | 1410073.42 | 24796033.4 | 1422903.46 |
| Blosum62 + F + I + G4 | 702611.837 | 3438 | 1412099.67 | 25058663.7 | 1425001.02 |
| Dayhoff + I + G4 | 714770.68 | 3419 | 1436379.36 | 24822339.4 | 1449209.41 |
| Dayhoff + F + I + G4 | 711355.685 | 3438 | 1429587.37 | 25076151.4 | 1442488.72 |
| mtREV + I + G4 | 749028.617 | 3419 | 1504895.23 | 24890855.2 | 1517725.28 |
| mtREV + F + I + G4 | 720238.257 | 3438 | 1447352.51 | 25093916.5 | 1460253.86 |
| mtART + I + G4 | 761576.069 | 3419 | 1529990.14 | 24915950.1 | 1542820.18 |
| mtART + F + I + G4 | 728240.83 | 3438 | 1463357.66 | 25109921.7 | 1476259 |
| mtZOA + I + G4 | 739982.765 | 3419 | 1486803.53 | 24872763.5 | 1499633.58 |
| mtZOA + F + I + G4 | 718607.263 | 3438 | 1444090.53 | 25090654.5 | 1456991.87 |
| mtMet + I + G4 | 748088.976 | 3419 | 1503015.95 | 24888976 | 1515846 |
| mtMet + F + I + G4 | 719959.273 | 3438 | 1446794.55 | 25093358.5 | 1459695.89 |
| mtVer + I + G4 | 758904.234 | 3419 | 1524646.47 | 24910606.5 | 1537476.51 |
| mtVer + F + I + G4 | 735119.819 | 3438 | 1477115.64 | 25123679.6 | 1490016.98 |
| mtInv + I + G4 | 748323.791 | 3419 | 1503485.58 | 24889445.6 | 1516315.63 |
| mtInv + F + I + G4 | 713020.322 | 3438 | 1432916.64 | 25079480.6 | 1445817.99 |
| mtMAM + I + G4 | 772787.688 | 3419 | 1552413.38 | 24938373.4 | 1565243.42 |
| mtMAM + F + I + G4 | 742830.414 | 3438 | 1492536.83 | 25139100.8 | 1505438.17 |
| HIVb + I + G4 | 731661.086 | 3419 | 1470160.17 | 24856120.2 | 1482990.22 |
| HIVb + F + I + G4 | 733746.26 | 3438 | 1474368.52 | 25120932.5 | 1487269.86 |
| HIVw + I + G4 | 764429.124 | 3419 | 1535696.25 | 24921656.2 | 1548526.29 |
| HIVw + F + I + G4 | 755850.659 | 3438 | 1518577.32 | 25165141.3 | 1531478.66 |
| FLU + I + G4 | 726306.5 | 3419 | 1459451 | 24845411 | 1472281.05 |
| FLU + F + I + G4 | 726675.548 | 3438 | 1460227.1 | 25106791.1 | 1473128.44 |
| rtREV + I + G4 | 705812.59 | 3419 | 1418463.18 | 24804423.2 | 1431293.23 |
| rtREV + F + I + G4 | 703074.234 | 3438 | 1413024.47 | 25059588.5 | 1425925.81 |
| cpREV + I + G4 | 706531.046 | 3419 | 1419900.09 | 24805860.1 | 1432730.14 |
| cpREV + F + I + G4 | 711884.209 | 3438 | 1430644.42 | 25077208.4 | 1443545.76 |

TABLE 10C
RuvC BH HINH No IIB Domain
N sites 315
N proteins 1671

| Model | −LnL | df | AIC | AICc | BIC |
|---|---|---|---|---|---|
| LG | 710639.991 | 3339 | 1427957.98 | 23732478 | 1440487.82 |
| LG + I | 707348.838 | 3340 | 1421377.68 | 23739257.7 | 1433911.27 |
| LG + G4 | 682599.624 | 3340 | 1371879.25 | 23689759.2 | 1384412.84 |
| LG + I + G4 | 681961.367 | 3341 | 1370604.74 | 23701848.7 | 1383142.08 |
| LG + F + I + G4 | 683776.089 | 3360 | 1374272.18 | 23960192.2 | 1386880.82 |
| WAG + I + G4 | 683029.053 | 3341 | 1372740.11 | 23703984.1 | 1385277.45 |
| WAG + F + I + G4 | 683787.589 | 3360 | 1374295.18 | 23960215.2 | 1386903.82 |
| JTT + I + G4 | 692546.409 | 3341 | 1391774.82 | 23723018.8 | 1404312.16 |
| JTT + F + I + G4 | 692512.293 | 3360 | 1391744.59 | 23977664.6 | 1404353.23 |
| JTTDCMut + I + G4 | 692373.142 | 3341 | 1391428.28 | 23722672.3 | 1403965.63 |
| JTTDCMut + F + I + G4 | 692433.37 | 3360 | 1391586.74 | 23977506.7 | 1404195.38 |
| DCMut + I + G4 | 696327.276 | 3341 | 1399336.55 | 23730580.6 | 1411873.9 |
| DCMut + F + I + G4 | 692986.323 | 3360 | 1392692.65 | 23978612.6 | 1405301.29 |
| VT + I + G4 | 682678.293 | 3341 | 1372038.59 | 23703282.6 | 1384575.93 |
| VT + F + I + G4 | 683276.456 | 3360 | 1373272.91 | 23959192.9 | 1385881.56 |
| PMB + I + G4 | 684667.591 | 3341 | 1376017.18 | 23707261.2 | 1388554.53 |
| PMB + F + I + G4 | 684710.622 | 3360 | 1376141.24 | 23962061.2 | 1388749.89 |
| Blosum62 + I + G4 | 683517.3 | 3341 | 1373716.6 | 23704960.6 | 1386253.95 |
| Blosum62 + F + I + G4 | 684507.936 | 3360 | 1375735.87 | 23961655.9 | 1388344.52 |
| Dayhoff + I + G4 | 696385.628 | 3341 | 1399453.26 | 23730697.3 | 1411990.6 |
| Dayhoff + F + I + G4 | 693056.563 | 3360 | 1392833.13 | 23978753.1 | 1405441.77 |
| mtREV + I + G4 | 729901.526 | 3341 | 1466485.05 | 23797729.1 | 1479022.4 |
| mtREV + F + I + G4 | 701737.505 | 3360 | 1410195.01 | 23996115 | 1422803.65 |
| mtART + I + G4 | 742286.815 | 3341 | 1491255.63 | 23822499.6 | 1503792.98 |
| mtART + F + I + G4 | 709647.414 | 3360 | 1426014.83 | 24011934.8 | 1438623.47 |
| mtZOA + I + G4 | 721038.084 | 3341 | 1448758.17 | 23780002.2 | 1461295.51 |
| mtZOA + F + I + G4 | 700219.93 | 3360 | 1407159.86 | 23993079.9 | 1419768.5 |
| mtMet + I + G4 | 729039.574 | 3341 | 1464761.15 | 23796005.1 | 1477298.49 |
| mtMet + F + I + G4 | 701509.141 | 3360 | 1409738.28 | 23995658.3 | 1422346.93 |
| mtVer + I + G4 | 739625.403 | 3341 | 1485932.81 | 23817176.8 | 1498470.15 |
| mtVer + F + I + G4 | 716440.076 | 3360 | 1439600.15 | 24025520.2 | 1452208.8 |
| mtInv + I + G4 | 729219.014 | 3341 | 1465120.03 | 23796364 | 1477657.37 |
| mtInv + F + I + G4 | 694761.665 | 3360 | 1396243.33 | 23982163.3 | 1408851.97 |
| mtMAM + I + G4 | 753025.909 | 3341 | 1512733.82 | 23843977.8 | 1525271.16 |
| mtMAM + F + I + G4 | 723890.679 | 3360 | 1454501.36 | 24040421.4 | 1467110 |
| HIVb + I + G4 | 712957.289 | 3341 | 1432596.58 | 23763840.6 | 1445133.92 |
| HIVb + F + I + G4 | 715070.081 | 3360 | 1436860.16 | 24022780.2 | 1449468.81 |
| HIVw + I + G4 | 744863.94 | 3341 | 1496409.88 | 23827653.9 | 1508947.23 |
| HIVw + F + I + G4 | 736648.004 | 3360 | 1480016.01 | 24065936 | 1492624.65 |
| FLU + I + G4 | 707623.242 | 3341 | 1421928.49 | 23753172.5 | 1434465.83 |
| FLU + F + I + G4 | 708080.883 | 3360 | 1422881.77 | 24008801.8 | 1435490.41 |
| rtREV + I + G4 | 687596.012 | 3341 | 1381874.02 | 23713118 | 1394411.37 |
| rtREV + F + I + G4 | 684941.592 | 3360 | 1376603.18 | 23962523.2 | 1389211.83 |
| cpREV + I + G4 | 688288.268 | 3341 | 1383258.54 | 23714502.5 | 1395795.88 |
| cpREV + F + I + G4 | 693509.306 | 3360 | 1393738.61 | 23979658.6 | 1406347.26 |

TABLE 10D
RuvC BH HNH IscB Plus early Cas
N sites 315
N proteins 736

| Model | −LnL | df | AIC | AICc | BIC |
|---|---|---|---|---|---|
| LG | 268338.373 | 1469 | 539614.746 | 4858474.75 | 545127.276 |
| LG + I | 267002.735 | 1470 | 536945.47 | 4861685.47 | 542461.751 |
| LG + G4 | 257727.26 | 1470 | 518394.521 | 4843134.52 | 523910.803 |
| LG + I + G4 | 257519.901 | 1471 | 517981.802 | 4848605.8 | 523501.836 |
| LG + F + I + G4 | 258407.475 | 1490 | 519794.951 | 4962974.95 | 525386.284 |
| WAG + I + G4 | 257657.092 | 1471 | 518256.185 | 4848880.19 | 523776.219 |
| WAG + F + I + G4 | 258102.487 | 1490 | 519184.974 | 4962364.97 | 524776.307 |
| JTT + I + G4 | 261401.16 | 1471 | 525744.319 | 4856368.32 | 531264.353 |
| JTT + F + I + G4 | 261844.307 | 1490 | 526668.614 | 4969848.61 | 532259.948 |
| JTTDCMut + I + G4 | 261316.21 | 1471 | 525574.42 | 4856198.42 | 531094.454 |
| JTTDCMut + F + I + G4 | 261773.035 | 1490 | 526526.07 | 4969706.07 | 532117.403 |
| DCMut + I + G4 | 262678.146 | 1471 | 528298.293 | 4858922.29 | 533818.327 |
| DCMut + F + I + G4 | 261705.074 | 1490 | 526390.147 | 4969570.15 | 531981.48 |
| VT + I + G4 | 257755.118 | 1471 | 518452.237 | 4849076.24 | 523972.271 |
| VT + F + I + G4 | 258222.769 | 1490 | 519425.537 | 4962605.54 | 525016.871 |
| PMB + I + G4 | 258496.869 | 1471 | 519935.738 | 4850559.74 | 525455.773 |
| PMB + F + I + G4 | 258629.856 | 1490 | 520239.713 | 4963419.71 | 525831.046 |
| Blosum62 + I + G4 | 258168.988 | 1471 | 519279.977 | 4849903.98 | 524800.011 |
| Blosum62 + F + I + G4 | 258604.889 | 1490 | 520189.778 | 4963369.78 | 525781.111 |
| Dayhoff + I + G4 | 262698.376 | 1471 | 528338.752 | 4858962.75 | 533858.786 |
| Dayhoff + F + I + G4 | 261728.954 | 1490 | 526437.907 | 4969617.91 | 532029.24 |
| mtREV + I + G4 | 276586.333 | 1471 | 556114.665 | 4886738.67 | 561634.7 |
| mtREV + F + I + G4 | 265541.934 | 1490 | 534063.868 | 4977243.87 | 539655.201 |
| mtART + I + G4 | 282239.447 | 1471 | 567420.895 | 4898044.9 | 572940.929 |
| mtART + F + I + G4 | 269280.548 | 1490 | 541541.095 | 4984721.1 | 547132.429 |
| mtZOA + I + G4 | 273850.752 | 1471 | 550643.504 | 4881267.5 | 556163.539 |
| mtZOA + F + I + G4 | 265474.249 | 1490 | 533928.499 | 4977108.5 | 539519.832 |
| mtMet + I + G4 | 277072.239 | 1471 | 557086.478 | 4887710.48 | 562606.512 |
| mtMet + F + I + G4 | 265967.258 | 1490 | 534914.516 | 4978094.52 | 540505.849 |
| mtVer + I + G4 | 280924.716 | 1471 | 564791.432 | 4895415.43 | 570311.466 |
| mtVer + F + I + G4 | 271340.385 | 1490 | 545660.77 | 4988840.77 | 551252.103 |
| mtInv + I + G4 | 277013.161 | 1471 | 556968.322 | 4887592.32 | 562488.357 |
| mtInv + F + I + G4 | 263129.733 | 1490 | 529239.466 | 4972419.47 | 534830.799 |
| mtMAM + I + G4 | 286245.798 | 1471 | 575433.597 | 4906057.6 | 580953.631 |
| mtMAM + F + I + G4 | 274328.526 | 1490 | 551637.051 | 4994817.05 | 557228.385 |
| HIVb + I + G4 | 269657.388 | 1471 | 542256.775 | 4872880.78 | 547776.81 |
| HIVb + F + I + G4 | 270846.891 | 1490 | 544673.782 | 4987853.78 | 550265.115 |
| HIVw + I + G4 | 281628.722 | 1471 | 566199.444 | 4896823.44 | 571719.478 |
| HIVw + F + I + G4 | 278988.827 | 1490 | 560957.654 | 5004137.65 | 566548.987 |
| FLU + I + G4 | 267371.953 | 1471 | 537685.905 | 4868309.91 | 543205.94 |
| FLU + F + I + G4 | 267438.659 | 1490 | 537857.319 | 4981037.32 | 543448.652 |
| rtREV + I + G4 | 259334.306 | 1471 | 521610.613 | 4852234.61 | 527130.647 |
| rtREV + F + I + G4 | 258979.685 | 1490 | 520939.371 | 4964119.37 | 526530.704 |
| cpREV + I + G4 | 260311.41 | 1471 | 523564.819 | 4854188.82 | 529084.853 |
| cpREV + F + I + G4 | 261757.896 | 1490 | 526495.792 | 4969675.79 | 532087.125 |

TABLE 10E
Early Cas9 Amino Acid
N sites 1048
N proteins 128

| Model | −LnL | df | AIC | AICc | BIC |
|---|---|---|---|---|---|
| LG | 158546.793 | 253 | 317599.586 | 317761.456 | 318853.11 |
| LG + I | 158165.737 | 254 | 316839.474 | 317002.828 | 318097.952 |
| LG + G4 | 153534.28 | 254 | 307576.559 | 307739.914 | 308835.037 |
| LG + I + G4 | 153450.975 | 255 | 307411.95 | 307576.798 | 308675.383 |
| LG + F + I + G4 | 153344.18 | 274 | 307236.361 | 307431.316 | 308593.932 |
| WAG + I + G4 | 153438.079 | 255 | 307386.158 | 307551.006 | 308649.59 |
| WAG + F + I + G4 | 153281.497 | 274 | 307110.994 | 307305.949 | 308468.565 |
| JTT + I + G4 | 154955.321 | 255 | 310420.642 | 310585.491 | 311684.075 |
| JTT + F + I + G4 | 154753.553 | 274 | 310055.105 | 310250.06 | 311412.676 |
| JTTDCMut + I + G4 | 154922.992 | 255 | 310355.983 | 310520.832 | 311619.416 |
| JTTDCMut + F + I + G4 | 154725.109 | 274 | 309998.219 | 310193.173 | 311355.79 |
| DCMut + I + G4 | 155870.3 | 255 | 312250.6 | 312415.448 | 313514.032 |
| DCMut + F + I + G4 | 155113.884 | 274 | 310775.767 | 310970.722 | 312133.338 |
| VT + I + G4 | 153592.848 | 255 | 307695.696 | 307860.544 | 308959.128 |
| VT + F + I + G4 | 153448.997 | 274 | 307445.995 | 307640.95 | 308803.566 |
| PMB + I + G4 | 154434.683 | 255 | 309379.365 | 309544.214 | 310642.798 |
| PMB + F + I + G4 | 154055.781 | 274 | 308659.563 | 308854.517 | 310017.134 |
| Blosum62 + I + G4 | 154250.423 | 255 | 309010.846 | 309175.695 | 310274.279 |
| Blosum62 + F + I + G4 | 153937.508 | 274 | 308423.015 | 308617.97 | 309780.586 |
| Dayhoff + I + G4 | 155873.824 | 255 | 312257.649 | 312422.497 | 313521.082 |
| Dayhoff + F + I + G4 | 155119.656 | 274 | 310787.312 | 310982.267 | 312144.883 |
| mtREV + I + G4 | 165269.973 | 255 | 331049.945 | 331214.794 | 332313.378 |
| mtREV + F + I + G4 | 157064.584 | 274 | 314677.168 | 314872.123 | 316034.739 |
| mtART + I + G4 | 169405.3 | 255 | 339320.601 | 339485.449 | 340584.034 |
| mtART + F + I + G4 | 159787.176 | 274 | 320122.351 | 320317.306 | 321479.923 |
| mtZOA + I + G4 | 163921.253 | 255 | 328352.507 | 328517.355 | 329615.94 |
| mtZOA + F + I + G4 | 157454.96 | 274 | 315457.92 | 315652.874 | 316815.491 |
| mtMet + I + G4 | 166109.582 | 255 | 332729.164 | 332894.013 | 333992.597 |
| mtMet + F + I + G4 | 157397.596 | 274 | 315343.191 | 315538.146 | 316700.762 |
| mtVer + I + G4 | 167284.318 | 255 | 335078.637 | 335243.485 | 336342.07 |
| mtVer + F + I + G4 | 159774.207 | 274 | 320096.413 | 320291.368 | 321453.984 |
| mtInv + I + G4 | 166773.594 | 255 | 334057.187 | 334222.036 | 335320.62 |
| mtInv + F + I + G4 | 156166.225 | 274 | 312880.451 | 313075.405 | 314238.022 |
| mtMAM + I + G4 | 170224.016 | 255 | 340958.033 | 341122.881 | 342221.466 |
| mtMAM + F + I + G4 | 161394.78 | 274 | 323337.56 | 323532.515 | 324695.131 |
| HIVb + I + G4 | 158770.796 | 255 | 318051.592 | 318216.441 | 319315.025 |
| HIVb + F + I + G4 | 158521.047 | 274 | 317590.094 | 317785.049 | 318947.665 |
| HIVw + I + G4 | 165646.002 | 255 | 331802.005 | 331966.853 | 333065.438 |
| HIVw + F + I + G4 | 162883.131 | 274 | 326314.262 | 326509.217 | 327671.833 |
| FLU + I + G4 | 158550.963 | 255 | 317611.926 | 317776.774 | 318875.359 |
| FLU + F + I + G4 | 157457.023 | 274 | 315462.047 | 315657.001 | 316819.618 |
| rtREV + I + G4 | 154713.716 | 255 | 309937.431 | 310102.28 | 311200.864 |
| rtREV + F + I + G4 | 153762.52 | 274 | 308073.04 | 308267.995 | 309430.611 |
| cpREV + I + G4 | 154803.199 | 255 | 310116.399 | 310281.247 | 311379.832 |
| cpREV + F + I + G4 | 154747.45 | 274 | 310042.901 | 310237.855 | 311400.472 |

TABLE 10F
Early Cas9 DNA
N sites 3039
N proteins 128

| | | | | | |
|---|---|---|---|---|---|
| GTR + F | 292394.76 | 261 | 585311.52 | 585360.769 | 586882.553 |
| GTR + F + I | 291454.796 | 262 | 583433.591 | 583483.235 | 585010.644 |
| GTR + F + G4 | 279093.787 | 262 | 558711.574 | 558761.218 | 560288.626 |
| GTR + F + I + G4 | 278956.868 | 263 | 558439.736 | 558489.777 | 560022.808 |
| SYM + I + G4 | 279352.506 | 260 | 559225.011 | 559273.867 | 560790.025 |
| TVM + F + I + G4 | 278968.492 | 262 | 558460.983 | 558510.627 | 560038.036 |
| TVMe + I + G4 | 279407.399 | 259 | 559332.797 | 559381.261 | 560891.792 |
| TIM3 + F + I + G4 | 279049.294 | 261 | 558620.588 | 558669.837 | 560191.621 |
| TIM3e + I + G4 | 279401.196 | 258 | 559318.391 | 559366.465 | 560871.367 |
| TIM2 + F + I + G4 | 279352.841 | 261 | 559227.682 | 559276.931 | 560798.715 |
| TIM2e + I + G4 | 280434.163 | 258 | 561384.325 | 561432.399 | 562937.3 |
| TIM + F + I + G4 | 279440.534 | 261 | 559403.068 | 559452.317 | 560974.101 |
| TIMe + I + G4 | 280499.184 | 258 | 561514.369 | 561562.442 | 563067.344 |
| TPM3u + F + I + G4 | 279064.274 | 260 | 558648.548 | 558697.403 | 560213.562 |
| TPM3 + F + I + G4 | 279064.274 | 260 | 558648.548 | 558697.403 | 560213.562 |
| TPM2u + F + I + G4 | 279363.223 | 260 | 559246.446 | 559295.301 | 560811.459 |
| TPM2 + F + I + G4 | 279362.542 | 260 | 559245.084 | 559293.939 | 560810.097 |
| K3Pu + F + I + G4 | 279454.965 | 260 | 559429.93 | 559478.785 | 560994.943 |
| K3P + I + G4 | 280559.351 | 257 | 561632.702 | 561680.387 | 563179.657 |
| TN + F + I + G4 | 279455.636 | 260 | 559431.272 | 559480.128 | 560996.286 |
| TNe + I + G4 | 280496.481 | 257 | 561506.961 | 561554.646 | 563053.917 |
| HKY + F + I + G4 | 279465.418 | 259 | 559448.837 | 559497.3 | 561007.831 |
| K2P + I + G4 | 280565.775 | 256 | 561643.549 | 561690.848 | 563184.486 |
| F81 + F + I + G4 | 281411.443 | 258 | 563338.885 | 563386.958 | 564891.86 |
| JC + I + G4 | 282299.492 | 255 | 565108.984 | 565155.897 | 566643.901 |

TABLE 10G
Omega RNA.
N sites 522
NRNAS 711

| Model | −LnL | df | AIC | AICc | BIC |
|---|---|---|---|---|---|
| GTR + F | 137969.864 | 1427 | 278793.729 | 4354305.73 | 284869.42 |
| GTR + F + ASC | 137969.861 | 1427 | 278793.721 | 4354305.72 | 284869.413 |
| GTR + F + G4 | 132814.717 | 1428 | 268485.434 | 4349709.43 | 274565.383 |
| GTR + F + ASC + G4 | 132814.709 | 1428 | 268485.418 | 4349709.42 | 274565.367 |
| SYM + G4 | 132847.753 | 1425 | 268545.507 | 4332645.51 | 274612.683 |
| SYM + ASC + G4 | 132847.753 | 1425 | 268545.507 | 4332645.51 | 274612.683 |
| TVM + F + G4 | 132918.625 | 1427 | 268691.251 | 4344203.25 | 274766.942 |
| TVM + F + ASC + G4 | 132918.625 | 1427 | 268691.251 | 4344203.25 | 274766.942 |
| TVMe + G4 | 132862.651 | 1424 | 268573.302 | 4326973.3 | 274636.22 |
| TVMe + ASC + G4 | 132862.651 | 1424 | 268573.302 | 4326973.3 | 274636.22 |
| TIM3 + F + G4 | 132865.718 | 1426 | 268583.436 | 4338387.44 | 274654.87 |
| TIM3 + F + ASC + G4 | 132865.718 | 1426 | 268583.436 | 4338387.44 | 274654.87 |
| TIM3e + G4 | 132931.537 | 1423 | 268709.074 | 4321413.07 | 274767.735 |
| TIM3e + ASC + G4 | 132931.537 | 1423 | 268709.074 | 4321413.07 | 274767.735 |
| TIM2 + F + G4 | 132882.127 | 1426 | 268616.255 | 4338420.26 | 274687.689 |
| TIM2 + F + ASC + G4 | 132882.127 | 1426 | 268616.255 | 4338420.26 | 274687.689 |
| TIM2e + G4 | 132910.507 | 1423 | 268667.013 | 4321371.01 | 274725.674 |
| TIM2e + ASC + G4 | 132910.507 | 1423 | 268667.013 | 4321371.01 | 274725.674 |
| TIM + F + G4 | 132882.794 | 1426 | 268617.588 | 4338421.59 | 274689.022 |
| TIM + F + ASC + G4 | 132882.794 | 1426 | 268617.588 | 4338421.59 | 274689.022 |
| TIMe + G4 | 132943.006 | 1423 | 268732.012 | 4321436.01 | 274790.673 |
| TIMe + ASC + G4 | 132943.006 | 1423 | 268732.012 | 4321436.01 | 274790.673 |
| TPM3u + F + G4 | 132975.699 | 1425 | 268801.399 | 4332901.4 | 274868.575 |
| TPM3u + F + ASC + G4 | 132975.699 | 1425 | 268801.399 | 4332901.4 | 274868.575 |
| TPM3 + F + G4 | 132975.699 | 1425 | 268801.399 | 4332901.4 | 274868.575 |
| TPM3 + F + ASC + G4 | 132975.699 | 1425 | 268801.399 | 4332901.4 | 274868.575 |
| TPM2u + F + G4 | 132989.627 | 1425 | 268829.254 | 4332929.25 | 274896.43 |
| TPM2u + F + ASC + G4 | 132989.627 | 1425 | 268829.254 | 4332929.25 | 274896.43 |
| TPM2 + F + G4 | 132989.627 | 1425 | 268829.254 | 4332929.25 | 274896.43 |
| TPM2 + F + ASC + G4 | 132989.627 | 1425 | 268829.254 | 4332929.25 | 274896.43 |
| K3Pu + F + G4 | 132994.102 | 1425 | 268838.203 | 4332938.2 | 274905.379 |
| K3Pu + F + ASC + G4 | 132994.102 | 1425 | 268838.203 | 4332938.2 | 274905.379 |
| K3P + G4 | 132958.903 | 1422 | 268761.806 | 4315773.81 | 274816.21 |
| K3P + ASC + G4 | 132958.903 | 1422 | 268761.806 | 4315773.81 | 274816.21 |
| TN + F + G4 | 132909.484 | 1425 | 268668.968 | 4332768.97 | 274736.145 |
| TN + F + ASC + G4 | 132909.484 | 1425 | 268668.968 | 4332768.97 | 274736.145 |
| TNe + G4 | 132969.855 | 1422 | 268783.709 | 4315795.71 | 274838.113 |
| TNe + ASC + G4 | 132969.857 | 1422 | 268783.714 | 4315795.71 | 274838.117 |
| HKY + F + G4 | 133021.421 | 1424 | 268890.843 | 4327290.84 | 274953.761 |
| HKY + F + ASC + G4 | 133021.421 | 1424 | 268890.843 | 4327290.84 | 274953.761 |
| K2P + G4 | 132985.807 | 1421 | 268813.613 | 4310137.61 | 274863.759 |
| K2P + ASC + G4 | 132985.807 | 1421 | 268813.613 | 4310137.61 | 274863.759 |
| F81 + F + G4 | 135134.431 | 1423 | 273114.861 | 4325818.86 | 279173.522 |
| F81 + F + ASC + G4 | 135134.431 | 1423 | 273114.861 | 4325818.86 | 279173.522 |
| JC + G4 | 135161.994 | 1420 | 273163.988 | 4308803.99 | 279209.876 |
| JC + ASC + G4 | 135161.994 | 1420 | 273163.988 | 4308803.99 | 279209.876 |

TABLE 10H
PLMP Domain
N sites 49
N proteins 2050

| Model | −LnL | df | AIC | AICc | BIC |
|---|---|---|---|---|---|
| LG | 122204.458 | 4071 | 252550.916 | 33406774.9 | 260252.517 |
| LG + G4 | 118284.816 | 4072 | 244713.633 | 33415225.6 | 252417.125 |
| LG + F + G4 | 118726.584 | 4091 | 245635.168 | 33726379.2 | 253374.605 |
| WAG + G4 | 118217.215 | 4072 | 244578.43 | 33415090.4 | 252281.922 |
| WAG + F + G4 | 118513.55 | 4091 | 245209.1 | 33725953.1 | 252948.536 |
| JTT + G4 | 119140.743 | 4072 | 246425.487 | 33416937.5 | 254128.979 |
| JTT + F + G4 | 119731.465 | 4091 | 247644.929 | 33728388.9 | 255384.366 |
| JTTDCMut + G4 | 119116.725 | 4072 | 246377.451 | 33416889.5 | 254080.943 |
| JTTDCMut + F + G4 | 119688.426 | 4091 | 247558.851 | 33728302.9 | 255298.288 |
| DCMut + G4 | 120403.011 | 4072 | 248950.023 | 33419462 | 256653.515 |
| DCMut + F + G4 | 120243.902 | 4091 | 248669.803 | 33729413.8 | 256409.24 |
| VT + G4 | 117974.209 | 4072 | 244092.419 | 33414604.4 | 251795.911 |
| VT + F + G4 | 118386.151 | 4091 | 244954.302 | 33725698.3 | 252693.739 |
| PMB + G4 | 118297.184 | 4072 | 244738.368 | 33415250.4 | 252441.86 |
| PMB + F + G4 | 118922.423 | 4091 | 246026.846 | 33726770.8 | 253766.283 |
| Blosum62 + G4 | 118283.672 | 4072 | 244711.344 | 33415223.3 | 252414.836 |
| Blosum62 + F + G4 | 118856.612 | 4091 | 245895.224 | 33726639.2 | 253634.661 |
| Dayhoff + G4 | 120429.145 | 4072 | 249002.29 | 33419514.3 | 256705.782 |
| Dayhoff + F + G4 | 120262.14 | 4091 | 248706.279 | 33729450.3 | 256445.716 |
| mtREV + G4 | 127008.803 | 4072 | 262161.606 | 33432673.6 | 269865.098 |
| mtREV + F + G4 | 121622.94 | 4091 | 251427.88 | 33732171.9 | 259167.317 |
| mtART + G4 | 130752.472 | 4072 | 269648.944 | 33440160.9 | 277352.436 |
| mtART + F + G4 | 124656.265 | 4091 | 257494.53 | 33738238.5 | 265233.967 |
| mtZOA + G4 | 126309.547 | 4072 | 260763.094 | 33431275.1 | 268466.586 |
| mtZOA + F + G4 | 122039.936 | 4091 | 252261.873 | 33733005.9 | 260001.31 |
| mtMet + G4 | 127023.696 | 4072 | 262191.392 | 33432703.4 | 269894.884 |
| mtMet + F + G4 | 121736.553 | 4091 | 251655.106 | 33732399.1 | 259394.542 |
| mtVer + G4 | 129268.339 | 4072 | 266680.678 | 33437192.7 | 274384.171 |
| mtVer + F + G4 | 124100.301 | 4091 | 256382.601 | 33737126.6 | 264122.038 |
| mtInv + G4 | 126775.212 | 4072 | 261694.425 | 33432206.4 | 269397.917 |
| mtInv + F + G4 | 120370.355 | 4091 | 248922.709 | 33729666.7 | 256662.146 |
| mtMAM + G4 | 131950.378 | 4072 | 272044.757 | 33442556.8 | 279748.249 |
| mtMAM + F + G4 | 126196.539 | 4091 | 260575.079 | 33741319.1 | 268314.515 |
| HIVb + G4 | 122513.558 | 4072 | 253171.116 | 33423683.1 | 260874.608 |
| HIVb + F + G4 | 123247.507 | 4091 | 254677.014 | 33735421 | 262416.451 |
| HIVw + G4 | 127543.628 | 4072 | 263231.256 | 33433743.3 | 270934.749 |
| HIVw + F + G4 | 126951.314 | 4091 | 262084.629 | 33742828.6 | 269824.066 |
| FLU + G4 | 122300.586 | 4072 | 252745.171 | 33423257.2 | 260448.663 |
| FLU + F + G4 | 123081.967 | 4091 | 254345.934 | 33735089.9 | 262085.371 |
| rtREV + G4 | 119057.976 | 4072 | 246259.953 | 33416772 | 253963.445 |
| rtREV + F + G4 | 119052.974 | 4091 | 246287.948 | 33727031.9 | 254027.385 |
| cpREV + G4 | 119089.943 | 4072 | 246323.886 | 33416835.9 | 254027.378 |
| cpREV + F + G4 | 119416.158 | 4091 | 247014.317 | 33727758.3 | 254753.754 |

### IS200/IS605 Elements Encode Diverse RNA-Guided Nucleases

[1031] In addition to the distinct succession of evolutionary events that yielded the abundant and diverse type II CRISPR systems, our phylogenetic analysis revealed several other events in the evolution of IscB and related proteins that led to the extant diversity, which Applicants sought to experimentally explore.

[1032] First, Applicants searched for IscB homologs in eukaryotic genomes and identified multiple iscB loci in the chloroplast genome of Ignatius tetrasporus UTEX B 2012, a terrestrial green alga (FIG. 39A-B, FIG. 59). Although the ORF is disrupted by multiple stop codons in most of these loci, one locus encodes an intact IscB (˜50% aa identity to related prokaryotic IscBs) and a transcriptionally active ωRNA (FIG. 39C). This eukaryotic IscB cleaves DNA with a minimal NNG TAM (FIG. 39D), which differs from other characterized IscB TAMs (FIG. 48).

[1033] Second, Applicants investigated the clade of large IscBs, which contain a BH domain that is split in two by REC domain-like insertions (white squares, FIGS. 31A, 39A). Applicants hypothesized that these insertions might enhance DNA unwinding, similarly to the REC lobe of Cas9 (Nishimisu, H. et al. (2014), Cell. 156, 935-949) and would therefore facilitate genome editing in the complex landscape of eukaryotic chromatin structure. Applicants screened 6 large IscB proteins, using a pool of 12 guides each, for their ability to generate insertions/deletions (indels) in HEK293FT cells (see Methods, Table 11); one (OgeuIscB) produced appreciable indels (FIG. 39E-F, FIG. 40A). To further examine OgeuIscB activity, Applicants tested a range of guide lengths targeting 3 loci in the human genome and found that OgeuIscB achieved the maximum indel rate with a 16 nt guide (FIG. 40B). On a panel of 46 sites in the human genome, Applicants found that OgeuIscB induced indels at 28 of these sites with varying efficiency up to 4.4% (FIG. 39G, FIG. 40C, Table 11). Thus, OgeuIscB seems a promising candidate for further development of IscB-based genome editing tools.

[1034] Third, Applicants experimentally characterized the putative nuclease activity of IsrB, the apparent ancestor of IscB (FIG. 39A). K. racemifer contains 5 isrBs associated with ωRNAs that are natively expressed (FIG. 39H, FIG. 41). Applicants found that the IsrB-ωRNA RNP nicks the non-target strand of a dsDNA substrate in a guide- and TAM-specific manner (FIG. 39I-J, FIG. 42), which is analogous to the activity of IscB upon inactivation of the HNH domain (FIG. 15F).

[1035] Finally, Applicants sought to determine if IS200/605 transposons in general harbor RNA-guided nucleases. In addition to the distinct IscB and IsrB families, most IS200/IS605 transposons encode RuvC-like endonucleases of another family, TnpB, which is thought to be the ancestor of Cas12s, the type V CRISPR effectors (FIG. 39A) (Shmakov, S. et al. (2017), Nat. Rev. Microbiol. 15, 169-182). Additionally, TnpB is the likely ancestor of larger proteins, Fanzors, encoded in diverse eukaryotic transposons (FIG. 39A) (Bao, W. et al (2013), Mob. DNA 4, 12). The TnpB family, including Fanzor, is an order of magnitude more diverse than the IscB family; an HMMER search identified more than a million tnpB loci in publicly available prokaryotic genomes.

[1036] Applicants identified conserved non-coding regions immediately downstream of the CDS of many tnpBs, suggesting the presence of associated ncRNAs that could function as RNA guides (FIG. 60). Previous work has identified ncRNAs overlapping the 3′-end of tnpB genes in archaea and bacteria (Gomes-Filho, J. et al. (2015), RNA Biol. 12, 490-500; Weinberg, Z., et al. (2017), Nucleic Acids Res. 45, 10811-10823), but the function of these ncRNAs has not been characterized. Small RNA-seq of K. racemifer revealed native expression of a ncRNA overlapping the 3′ end of the associated tnpB ORF (FIG. 39K), which Applicants classified as a distinct group of ωRNAs. The reverse complement of the KraTnpB ωRNA 3′ end is nearly identical to the 5′ of the ωRNA associated with some KraIscBs, a region that corresponds to the predicted transposon end in each locus.

[1037] Analysis of non-redundant loci containing tnpB genes that clustered with KraTnpB showed a drop of sequence conservation at the 3′ end of the loci (FIG. 60), corresponding to the IS200/605 transposon end. Comparison to the small RNA-seq trace revealed expression beyond the conservation drop, indicating possible presence of a guide sequence in the transcript (FIG. 39M). In vitro plasmid cleavage assays for multiple TnpB proteins from this cluster using a reprogrammed guide demonstrated RNA-guided cleavage with a 5′ TAM (FIG. 39N, FIG. 61). Applicants recombinantly purified a TnpB from Alicyclobacillus macrosporangiidus (AmaTnpB) and confirmed its reprogrammable RNA-guided dsDNA endonuclease activity (FIG. 39O, FIG. 61). Applicants also observed that Ama TnpB robustly cleaved target-containing ssDNA substrates (FIG. 39P) and non-specifically cleaved a collateral substrate upon recognition of dsDNA or ssDNA substrates (FIG. 39Q). Sequences corresponding to the 12-guide pooled experiments for OgeuIscB, OwzoIscB, OiziIscB, OwfIIscB, UpfjIscB, and UwstIscB guides targeting human EMX1, DNMT1, VEGFA and FANCF genes in Table 11 are provided as SEQ ID NOs: 2551-2574 in the Sequence Listing.

### Tables 11A-D. Guide Sequences and Statistical Analysis Relating to Mammalian Genome Editing Experiments

TABLE 11A
Guides and statistical analysis pertaining to Figure 40.

| | | | | | | p value |
|---|---|---|---|---|---|---|
| | | | | | | (2-tailed |
| Guide | Sequence | Rep 1 | Rep 2 | Rep 3 | Rep 4 | T test) |
| DNMT1 12 | gAACATATGAGTG | 0. | 0 | 0. | 0. | 0. |
| bp | (SEQ ID NO: 2065) | 001906505 | | 009962144 | 014548629 | 723631176 |
| DNMT1 14 | gTTAACATATGAGTG | 0. | 0. | 0. | 0. | 5.29219E− |
| bp | (SEQ ID NO: 2066) | 077547934 | 067019273 | 084919567 | 060092543 | 05 |
| DNMT1 16 | gGTTTAACATATGAGTG | 0. | 0. | 0. | 0. | 3.72633E− |
| bp | (SEQ ID NO: 2067) | 458614455 | 437795105 | 497773537 | 456562279 | 08 |
| DNMT1 18 | gAAGTTTAACATATGAGTG | 0. | 0. | 0. | 0. | 0. |
| bp | (SEQ ID NO: 2068) | 098899209 | 065241889 | 047588542 | 057594754 | 001774195 |
| DNMT1 20 | gACAAGTTTAACATATGAGTG | 0. | 0. | 0. | 0. | 0. |
| bp | (SEQ ID NO: 2069) | 030587276 | 029461899 | 031764077 | 062483728 | 008582107 |
| DNMT1 22 | gAAACAAGTTTAACATATGAGTG | 0. | 0. | 0. | 0. | 0. |
| bp | (SEQ ID NO: 2070) | 043732575 | 03300502 | 046676261 | 007673861 | 02686037 |
| DNMT1 24 | gACAAACAAGTTTAACATATGAGTG | 0. | 0. | 0. | 0. | 0. |
| bp | (SEQ ID NO: 2071) | 013979822 | 01884336 | 009703792 | 038013616 | 078758296 |
| DNMT1 26 | gACACAAACAAGTTTAACATATGAGT | 0. | 0. | 0. | 0. | 0. |
| bp | G (SEQ ID NO: 2072) | 027471899 | 011556304 | 018715493 | 015009256 | 037924487 |
| Non- | gATGTCTTCCTGGGACGAAGACAA | 0 | 0. | 0 | 0. | |
| targeting | (SEQ ID NO: 2073) | | 003144011 | | 015752063 | |
| TTLL11 12 | gTAGGCATATGTC | 0 | 0 | 0. | 0. | 0. |
| bp | (SEQ ID NO: 2074) | | | 012709306 | 008514503 | 146337514 |
| TTLL11 14 | gTCTAGGCATATGTC | 0. | 0. | 0. | 0. | 3.25846E− |
| bp | (SEQ ID NO: 2075) | 627943485 | 785402618 | 633681552 | 611796195 | 06 |
| TTLL11 16 | gATTCTAGGCATATGTC | 0. | 0. | 0. | 0. | 5.34844E− |
| bp | (SEQ ID NO: 2076) | 746360468 | 772388627 | 60119664 | 606760197 | 06 |
| TTLL11 18 | gAAATTCTAGGCATATGTC | 0. | 0. | 0. | 0. | 0. |
| bp | (SEQ ID NO: 2077) | 590834854 | 38052957 | 391436718 | 37120723 | 000172577 |
| TTLL11 20 | gCAAAATTCTAGGCATATGTC | 0. | 0. | 0. | 0. | 0. |
| bp | (SEQ ID NO: 2078) | 473175608 | 37771732 | 258312202 | 284159823 | 000384218 |
| TTLL11 22 | gACCAAAATTCTAGGCATATGTC | 0. | 0. | 0. | 0. | 8.35011E− |
| bp | (SEQ ID NO: 2079) | 503107428 | 475723677 | 534404067 | 594416729 | 07 |
| TTLL11 24 | gGCACCAAAATTCTAGGCATATGTC | 0. | 0. | 0. | 0. | 2.03162E− |
| bp | (SEQ ID NO: 2080) | 664339872 | 535442787 | 521896007 | 565888659 | 06 |
| TTLL11 26 | gAAGCACCAAAATTCTAGGCATATGT | 0. | 0. | 0. | 0. | 2.35984E− |
| bp | C (SEQ ID NO: 2081) | 482984511 | 397657213 | 441831108 | 521148952 | 06 |
| Non- | gATGTCTTCCTGGGACGAAGACAA | 0 | 0 | 0 | 0 | |
| targeting | (SEQ ID NO: 2082) | | | | | |
| VEGFA 12 | gGAGTGAACGAGA | 0. | 0. | 0. | 0. | 0. |
| bp | (SEQ ID NO: 2083) | 020806087 | 010516629 | 005556482 | 027097648 | 01682896 |
| VEGFA 14 | gAAGAGTGAACGAGA | 3. | 5. | 4. | 4. | 4.40473E− |
| bp | (SEQ ID NO: 2084) | 750390016 | 007405318 | 862240882 | 29670913 | 06 |
| VEGFA 16 | gAAAAGAGTGAACGAGA | 3. | 5. | 4. | 4. | 3.03492E− |
| bp | (SEQ ID NO: 2085) | 937613652 | 037626945 | 71507566 | 029523838 | 06 |
| VEGFA 18 | gCAAAAAGAGTGAACGAGA | 3. | 4. | 4. | 4. | 6.17349E− |
| bp | (SEQ ID NO: 2086) | 013126492 | 913294798 | 708655706 | 563681991 | 05 |
| VEGFA 20 | gATCAAAAAGAGTGAACGAGA | 2. | 3. | 4. | 3. | 0. |
| bp | (SEQ ID NO: 2087) | 61686747 | 960702406 | 613233924 | 3221303 | 000147162 |
| VEGFA 22 | gTCATCAAAAAGAGTGAACGAGA | 3. | 5. | 4. | 4. | 1.71866E− |
| bp | (SEQ ID NO: 2088) | 347833504 | 021651323 | 349930621 | 429301533 | 05 |
| VEGFA 24 | gCATCATCAAAAAGAGTGAACGAGA | 2. | 3. | 4. | 3. | 7.8654E− |
| bp | (SEQ ID NO: 2089) | 717800404 | 867531264 | 314221941 | 037901182 | 05 |
| VEGFA 26 | gAGCATCATCAAAAAGAGTGAACGAG | 2. | 3. | 3. | 2. | 8.82134E− |
| bp | A (SEQ ID NO: 2090) | 229058873 | 562953421 | 555705185 | 759688398 | 05 |
| Non- | gATGTCTTCCTGGGACGAAGACAA | 0 | 0 | 0 | 0 | |
| targeting | (SEQ ID NO: 2091) | | | | | |

TABLE 11B
Guides and statistical analysis pertaining to FIG. 39.

| | | | | | | p value (2- |
|---|---|---|---|---|---|---|
| | | Targeting | Targeting | Targeting | Targeting | tailed T |
| Guide | Sequence | Rep 1 | Rep 2 | Rep 3 | Rep 4 | test) |
| DNMT1_g1 | gAAAAGACGAGGATGA | 1. | 0. | | 0. | 0. |
| | A (SEQ ID NO: 2092) | 072633964 | 65965914 | | 827668403 | 000373076 |
| DNMT1_g2 | gAGACAGCTTAACAGA | 0. | 0. | 0. | 0. | 3.73442E− |
| | A (SEQ ID NO: 2093) | 314819763 | 304418458 | 260612729 | 242899 | 06 |
| DNMT1_g3 | gGTTTAACATATGAGT | 0. | 0. | 0. | 0. | 0. |
| | G (SEQ ID NO: 2094) | 278377062 | 273855622 | 162021476 | 111194092 | 003153651 |
| DNMT1_g4 | gCCTAAGGCCCCTTTTC | 0. | 0. | 0. | 0. | 0. |
| | (SEQ ID NO: 2095) | 177124959 | 164299743 | 171190645 | 131435982 | 000102901 |
| DNMT1_g5 | gAGAAAAAGAACCTGA | 0. | 0. | 0. | 0. | 1.03199E− |
| | A (SEQ ID NO: 2096) | 163750933 | 143394874 | 203416045 | 178246635 | 05 |
| DNMT1_g6 | gCCCCGGTTGGTCTTAC | 0. | 0. | 0. | 0. | 0. |
| | (SEQ ID NO: 2097) | 061835518 | 038334611 | 027352765 | 027261752 | 165463548 |
| VEGFA_g1 | gAAAAGAGTGAACGAG | 2. | 1. | 2. | 1. | 3.70939E− |
| | A (SEQ ID NO: 2098) | 256517612 | 908146202 | 280491183 | 766814372 | 06 |
| VEGFA_g2 | gATAGAGCAAGACAAG | 0. | 0. | 0. | 0. | 5.81344E− |
| | A (SEQ ID NO: 2099) | 710804855 | 60404738 | 564880423 | 431536468 | 05 |
| VEGFA_g3 | gGGAGGCTCAAAGAGG | 0. | 0. | 0. | 0. | 4.63616E− |
| | C (SEQ ID NO: 2100) | 04783926 | 049239138 | 046950456 | 048631681 | 07 |
| VEGFA_g4 | gCCCTTCAGATCAGCTT | 0 | 0. | 0 | 0. | 0. |
| | (SEQ ID NO: 2101) | | 007052311 | | 005182958 | 141402755 |
| VEGFA_g5 | gGCTGTTCAGGTCTCTG | 0. | 0. | 0. | 0. | 0. |
| | (SEQ ID NO: 2102) | 030619936 | 005038799 | 014452259 | 020447807 | 020315011 |
| VEGFA_g6 | gAAGGCCGCACAGCTA | 0 | 0 | 0. | 0 | 0. |
| | G (SEQ ID NO: 2103) | | | 007665038 | | 070664369 |
| EMX1_g1 | gAATGGTGGAAACACA | 1. | 1. | 1. | 1. | 3.06047E− |
| | G (SEQ ID NO: 2104) | 958384333 | 548672566 | 803849158 | 533513564 | 06 |
| EMX1_g2 | gGGACATGGCAGATAA | 0. | 0. | 0. | 0. | 3.92584E− |
| | T (SEQ ID NO: 2105) | 263425281 | 265922336 | 264294907 | 372616029 | 05 |
| EMX1_g3 | gCCTGACTCTGCAAAG | 0. | 0. | 0. | 0. | 0. |
| | C (SEQ ID NO: 2106) | 116292592 | 175527426 | 078441216 | 123543357 | 000951497 |
| EMX1_g4 | gAATAGCAGATTATTC | 0. | 0. | 0. | 0. | 0. |
| | C (SEQ ID NO: 2107) | 045621533 | 02685562 | 040665904 | 074069854 | 003261575 |
| EMX1_g5 | gCTAGTCCCTTCCCTTT | 0. | 0. | 0. | 0. | 0. |
| | (SEQ ID NO: 2108) | 027511578 | 096091149 | 043548834 | 030868281 | 029757632 |
| EMX1_g6 | gAGCTTTTTCCCTGCAG | 0. | 0. | 0. | 0. | 0. |
| | (SEQ ID NO: 2109) | 016334309 | 017236246 | 013600122 | 004832941 | 017822346 |
| RNF2_g1 | gTATTATACCTGCACGA | 0. | 0. | 0. | 0. | 0. |
| | (SEQ ID NO: 2110) | 154957248 | 17890002 | 227125243 | 143247385 | 002072584 |
| RNF2_g2 | gAGAATAAGTTGAGAA | 0. | 0. | 0. | 0. | 0. |
| | A (SEQ ID NO: 2111) | 022168736 | 035699574 | 024923671 | 028511961 | 000204006 |
| RNF2_g3 | gCTTCCTTCCAAGGTCA | 0. | 0 | 0. | 0 | 0. |
| | (SEQ ID NO: 2112) | 011156564 | | 006029727 | | 116248624 |
| RNF2_g4 | gTTTCTATCTGTAAAAT | 0. | 0. | 0. | 0. | 0. |
| | (SEQ ID NO: 2113) | 012779961 | 01581878 | 003229766 | 003604123 | 410974349 |
| RNF2_g5 | gATTTTACCTTTTTCAA | 0. | 0. | 0. | 0. | 0. |
| | (SEQ ID NO: 2114) | 012835323 | 023784041 | 032782407 | 01409344 | 000267325 |
| RNF2_g6 | gAATTTACTTTTTGAAA | 0. | 0. | 0. | 0. | 0. |
| | (SEQ ID NO: 2115) | 011674878 | 028580851 | 014731446 | 017115961 | 000118098 |
| CXCR4_g1 | gCAAAGCCCAAAGTGG | 0. | 0. | 0. | 0. | 6.4896E− |
| | T (SEQ ID NO: 2116) | 134122288 | 108800774 | 108800774 | 100255195 | 06 |
| CXCR4_g2 | gAGTGAATCACGTAAA | 0. | 0. | 0. | 0. | 0. |
| | G (SEQ ID NO: 2117) | 07815553 | 121625552 | 068431478 | 068431478 | 000784235 |
| CXCR4_g3 | gTTACAAAATTCTTTGT | 0 | 0. | 0. | 0. | 0. |
| | (SEQ ID NO: 2118) | | 006548038 | 006548038 | 017648443 | 080595539 |
| TTLL11_g1 | gATTCTAGGCATATGTC | 0. | 0. | 0. | 0. | 2.41477E- |
| | (SEQ ID NO: 2119) | 366022099 | 437177085 | 429769392 | 403901093 | 07 |
| TTLL11_g2 | gCAAGGCAGAGCCACG | 0. | 0. | 0. | 0. | 0. |
| | G (SEQ ID NO: 2120) | 051463966 | 039233636 | 053996591 | 039527112 | 014096134 |
| TTLL11_g3 | gATTCAATTACTACCCA | 0 | 0. | 0. | 0 | 0. |
| | (SEQ ID NO: 2121) | | 023314099 | 004305983 | | 260846138 |
| TTLL11_g4 | gTTTCTATGACATATGC | 0 | 0 | 0 | 0 | N/A |
| | (SEQ ID NO: 2122) | | | | | |
| TTLL11_g5 | gATAATTGTTTCTATTC | 0. | 0 | 0 | 0 | 0. |
| | (SEQ ID NO: 2123) | 004805613 | | | | 99710752 |
| TTLL11_g6 | gAGGAGGCTGTAAATC | 0 | 0. | 0. | 0. | 0. |
| | T (SEQ ID NO: 2124) | | 01531941 | 008456302 | 00873744 | 286942892 |
| DYNC1H1_g1 | gCATAAAGTAACAAAA | 0. | 0. | 0. | 0. | 6.7371E- |
| | C (SEQ ID NO: 2125) | 166073072 | 156347128 | 164880462 | 151315555 | 08 |
| DYNC1H1_g2 | gATGTTCACAAGATAG | 0. | 0. | 0. | 0. | 2.65811E- |
| | T (SEQ ID NO: 2126) | 103883537 | 106560636 | 09729619 | 140374957 | 05 |
| DYNC1H1_g3 | gAGTCTGGCAAGGCAG | 0. | 0. | 0. | 0. | 0. |
| | A (SEQ ID NO: 2127) | 084957968 | 040483004 | 043899639 | 03806735 | 0047032 |
| DYNC1H1_g4 | gACCTGCCCTAGAAAT | 0. | 0. | 0. | 0. | 0. |
| | A (SEQ ID NO: 2128) | 084638172 | 035884094 | 07242628 | 08841733 | 003420442 |
| DYNC1H1_g5 | gCTAAAACTAACCTGC | 0. | 0. | 0. | 0. | 0. |
| | C (SEQ ID NO: 2129) | 024642681 | 060848401 | 035064343 | 035799523 | 018308875 |
| DYNC1H1_g6 | gGCAGTGCATTTCACTA | 0. | 0. | 0. | 0. | 0. |
| | (SEQ ID NO: 2130) | 005725082 | 003175309 | 003395586 | 00561435 | 229661813 |
| DYNC1H1_g7 | gTTAATGGTTTTCACAT | 0. | 0. | 0. | 0. | 0. |
| | (SEQ ID NO: 2131) | 003866527 | 008701706 | 01677782 | 020944602 | 103120809 |
| ALDH1A3_g1 | gAGTGGAAGAAGGAGA | 1. | 1. | 0. | 1. | 0. |
| | T (SEQ ID NO: 2132) | 137739046 | 119515885 | 916630292 | 940891045 | 001319886 |
| ALDH1A3_g2 | gGCTCTGCAGGAACAG | 0. | 0. | 0. | 0. | 4.93864E- |
| | G (SEQ ID NO: 2133) | 234226321 | 184977578 | 221238938 | 14900909 | 05 |
| ALDH1A3_g3 | gTAAAATAAATTTGCTC | 0. | 0. | 0. | 0. | 0. |
| | (SEQ ID NO: 2134) | 171969046 | 154294531 | 067773636 | 022326412 | 026244571 |
| ALDH1A3_g4 | gAGAAGGCAGCTTTCT | 0 | 0 | 0 | 0 | N/A |
| | G (SEQ ID NO: 2135) | | | | | |
| ALDH1A3_g5 | gTCTGGCAGAAGACAC | 0.004161119 | 0. | 0. | 0. | 0. |
| | T (SEQ ID NO: 2136) | | 011395579 | 00623571 | 016026497 | 598222613 |
| ALDH1A3_g6 | gCCAGATTTCTTTTCTC | 0. | 0. | 0 | 0. | 0. |
| | (SEQ ID NO: 2137) | 021824928 | 018056653 | | 006874742 | 463508461 |

TABLE 11C
Guides and statistical analysis for Figure 40.

| | | Non- | Non- | Non- | Non- | p value |
|---|---|---|---|---|---|---|
| | | targeting | targeting | targeting | targeting | (2-tailed |
| Guide | Sequence | Rep 1 | Rep 2 | Rep 3 | Rep 4 | T test) |
| DNMT1_g1 | gAAAAGACGAGGATGAA | 0.002401768 | 0.002041608 | 0 | 0.002784042 | 0.000373 |
| | (SEQ ID NO: 2138) | | | | | |
| DNMT1_g2 | gAGACAGCTTAACAGAA | 0.003923415 | 0 | 0.006171982 | 0.004663309 | 3.73E-06 |
| | (SEQ ID NO: 2139) | | | | | |
| DNMT1_g3 | gGTTTAACATATGAGTG | 0.00784683 | 0.002726653 | 0.012343965 | 0.010881055 | 0.003154 |
| | (SEQ ID NO: 2140) | | | | | |
| DNMT1_g4 | gCCTAAGGCCCCTTTTC | 0.062927552 | 0.042503864 | 0.066338785 | 0.046841399 | 0.000103 |
| | (SEQ ID NO: 2141) | | | | | |
| DNMT1_g5 | gAGAAAAAGAACCTGAA | 0.002401768 | 0.002041608 | 0 | 0.002784042 | 1.03E-05 |
| | (SEQ ID NO: 2142) | | | | | |
| DNMT1_g6 | gCCCCGGTTGGTCTTAC | 0.071047236 | 0.042503864 | 0.073201418 | 0.04258309 | 0.165464 |
| | (SEQ ID NO: 2143) | | | | | |
| VEGFA_g1 | gAAAAGAGTGAACGAGA | 0.002895529 | 0 | 0 | 0 | 3.71E-06 |
| | (SEQ ID NO: 2144) | | | | | |
| VEGFA_g2 | gATAGAGCAAGACAAGA | 0.001232666 | 0.003634381 | 0 | 0 | 5.81E-05 |
| | (SEQ ID NO: 2145) | | | | | |
| VEGFA_g3 | gGGAGGCTCAAAGAGGC | 0.010686615 | 0.004547625 | 0.004950863 | 0.01059294 | 4.64E-07 |
| | (SEQ ID NO: 2146) | | | | | |
| VEGFA_g4 | gCCCTTCAGATCAGCTT | 0 | 0 | 0 | 0 | 0.141403 |
| | (SEQ ID NO: 2147) | | | | | |
| VEGFA_g5 | gGCTGTTCAGGTCTCTG | 0 | 0.002814048 | 0 | 0 | 0.020315 |
| | (SEQ ID NO: 2148) | | | | | |
| VEGFA_g6 | gAAGGCCGCACAGCTAG | 0.024044884 | 0.006821438 | 0.004950863 | 0.013241175 | 0.070664 |
| | (SEQ ID NO: 2149) | | | | | |
| EMX1_g1 | gAATGGTGGAAACACAG | 0 | 0 | 0 | 0 | 3.06E-06 |
| | (SEQ ID NO: 2150) | | | | | |
| EMX1_g2 | gGGACATGGCAGATAAT | 0 | 0.005596911 | 0 | 0.002355713 | 3.93E-05 |
| | (SEQ ID NO: 2151) | | | | | |
| EMX1_g3 | gCCTGACTCTGCAAAGC | 0 | 0 | 0.009628655 | 0 | 0.000951 |
| | (SEQ ID NO: 2152) | | | | | |
| EMX1_g4 | gAATAGCAGATTATTCC | 0 | 0 | 0 | 0 | 0.003262 |
| | (SEQ ID NO: 2153) | | | | | |
| EMX1_g5 | gCTAGTCCCTTCCCTTT | 0 | 0 | 0.00947538 | 0.006171506 | 0.029758 |
| | (SEQ ID NO: 2154) | | | | | |
| EMX1_g6 | gAGCTTTTTCCCTGCAG | 0.005697194 | 0.003893828 | 0.002665849 | 0 | 0.017822 |
| | (SEQ ID NO: 2155) | | | | | |
| RNF2_g1 | gTATTATACCTGCACGA | 0.05907765 | 0.083386145 | 0.08737758 | 0.063398845 | 0.002073 |
| | (SEQ ID NO: 2156) | | | | | |
| RNF2_g2 | gAGAATAAGTTGAGAAA | 0.05907765 | 0.073379807 | 0.076455383 | 0.063398845 | 0.000204 |
| | (SEQ ID NO: 2157) | | | | | |
| RNF2_g3 | gCTTCCTTCCAAGGTCA | 0.028760426 | 0 | 0.023276564 | 0.015143485 | 0.116249 |
| | (SEQ ID NO: 2158) | | | | | |
| RNF2_g4 | gTTTCTATCTGTAAAAT | 0.017975266 | 0 | 0.023276564 | 0.015143485 | 0.410974 |
| | (SEQ ID NO: 2159) | | | | | |
| RNF2_g5 | gATTTTACCTTTTTCAA | 0.062770003 | 0.080050699 | 0.083736848 | 0.066735627 | 0.000267 |
| | (SEQ ID NO: 2160) | | | | | |
| RNF2_g6 | gAATTTACTTTTTGAAA | 0.062770003 | 0.080050699 | 0.083736848 | 0.066735627 | 0.000118 |
| | (SEQ ID NO: 2161) | | | | | |
| CXCR4_g1 | gCAAAGCCCAAAGTGGT | 0.008136697 | 0 | 0 | 0 | 6.49E-06 |
| | (SEQ ID NO: 2162) | | | | | |
| CXCR4_g2 | gAGTGAATCACGTAAAG | 0.008136697 | 0 | 0 | 0.006918261 | 0.000784 |
| | (SEQ ID NO: 2163) | | | | | |
| CXCR4_g3 | gTTACAAAATTCTTTGT | 0 | 0 | 0 | 0 | 0.080596 |
| | (SEQ ID NO: 2164) | | | | | |
| TTLL11_g1 | gATTCTAGGCATATGTC | 0 | 0 | 0 | 0 | 2.41E-07 |
| | (SEQ ID NO: 2165) | | | | | |
| TTLL11_g2 | gCAAGGCAGAGCCACGG | 0.035417518 | 0.010157647 | 0.01585504 | 0.028010551 | 0.014096 |
| | (SEQ ID NO: 2166) | | | | | |
| TTLL11_g3 | gATTCAATTACTACCCA | 0 | 0 | 0 | 0 | 0.260846 |
| | (SEQ ID NO: 2167) | | | | | |
| TTLL11_g4 | gTTTCTATGACATATGC | 0 | 0 | 0 | 0 | N/A |
| | (SEQ ID NO: 2168) | | | | | |
| TTLL11_g5 | gATAATTGTTTCTATTC | 0 | 0 | 0 | 0.00478 | 0.997108 |
| | (SEQ ID NO: 2169) | | | | | |
| TTLL11_g6 | gAGGAGGCTGTAAATCT | 0.029968669 | 0.008126117 | 0.004530011 | 0.021007913 | 0.286943 |
| | (SEQ ID NO: 2170) | | | | | |
| DYNC1H1_ | gCATAAAGTAACAAAAC | 0.021546236 | 0.022641199 | 0.015949281 | 0.028466374 | 6.74E-08 |
| g1 | (SEQ ID NO: 2171) | | | | | |
| DYNC1H1_ | gATGTTCACAAGATAGT | 0.001451948 | 0.001450074 | 0.001473796 | 0.001739584 | 2.66E-05 |
| g2 | (SEQ ID NO: 2172) | | | | | |
| DYNC1H1_ | gAGTCTGGCAAGGCAGA | 0.001451948 | 0.004350222 | 0.001473796 | 0.005218753 | 0.004703 |
| g3 | (SEQ ID NO: 2173) | | | | | |
| DYNC1H1_ | gACCTGCCCTAGAAATA | 0.010387991 | 0.018835939 | 0.014041493 | 0.011356324 | 0.00342 |
| g4 | (SEQ ID NO: 2174) | | | | | |
| DYNC1H1_ | gCTAAAACTAACCTGCC | 0.010387991 | 0.018835939 | 0.014041493 | 0.011356324 | 0.018309 |
| g5 | (SEQ ID NO: 2175) | | | | | |
| DYNC1H1_ | gGCAGTGCATTTCACTA | 0 | 0.011301563 | 0.010531119 | 0.011356324 | 0.229662 |
| g6 | (SEQ ID NO: 2176) | | | | | |
| DYNC1H1_ | gTTAATGGTTTTCACAT | 0.019587488 | 0.022641199 | 0.015949281 | 0.026094176 | 0.103121 |
| g7 | (SEQ ID NO: 2177) | | | | | |
| ALDH1A3_ | gAGTGGAAGAAGGAGAT | 0 | 0 | 0 | 0 | 0.00132 |
| g1 | (SEQ ID NO: 2178) | | | | | |
| ALDH1A3_ | gGCTCTGCAGGAACAGG | 0 | 0 | 0 | 0 | 4.94E-05 |
| g2 | (SEQ ID NO: 2179) | | | | | |
| ALDHIA3_ | gTAAAATAAATTTGCTC | 0 | 0 | 0 | 0 | 0.026245 |
| g3 | (SEQ ID NO: 2180) | | | | | |
| ALDH1A3_ | gAGAAGGCAGCTTTCTG | 0 | 0 | 0 | 0 | N/A |
| g4 | (SEQ ID NO: 2181) | | | | | |
| ALDH1A3_ | gTCTGGCAGAAGACACT | 0.004822996 | 0.006558524 | 0.014718509 | 0.022568269 | 0.598223 |
| g5 | (SEQ ID NO: 2182) | | | | | |
| ALDH1A3_ | gCCAGATTTCTTTTCTC | 0 | 0.004372349 | 0.009812339 | 0.014105168 | 0.463508 |
| g6 | (SEQ ID NO: 2183) | | | | | |

TABLE 11D
12-Guide Pool Methods

| | | | | Guide Sequence | | | | | |
|---|---|---|---|---|---|---|---|---|---|
| | | | | (OwzoIscB, | | | | | |
| | | | | OiziIscB, | | | | | |
| | | | OgeuIscB | OwflIscB, | OwzoIscB | OiziIscB | OwflIscB | UpfjIscB | UwstIscB |
| | | Guide Sequence | indel | UpfjIscB, | indel | indel | indel | indel | indel |
| Key | Gene | (OgeuIscB) | rate (%) | UwstIscB) | rate (%) | rate (%) | rate (%) | rate (%) | rate (%) |
| 1 | EMX1 | CGGTTCCGCA | 0.017386913 | CCCCCTTCCC | 0.018779343 | 0.045248869 | 0 | 0 | 0 |
| | | GGACCCAGGG | | TATGGGAATA | | | | | |
| | | (SEQ ID NO: | | (SEQ ID NO: | | | | | |
| | | 2184) | | 2185) | | | | | |
| 2 | EMX1 | AGTGGTGCCTG | 0.032829941 | ACTACAGTGG | 0.018779343 | 0.045248869 | 0 | 0.012954207 | 0 |
| | | GAAAATAAA | | TGCCTGGAAA | | | | | |
| | | (SEQ ID NO: | | (SEQ ID NO: | | | | | |
| | | 2186) | | 2187) | | | | | |
| 3 | EMX1 | CCCCCTTCCC | 0.049244911 | ATGCATATAC | 0.003716336 | 0.003555359 | 0.003713492 | 0.00391324 | 0.003742 |
| | | TATGGGAATA | | CAGTTTGTGG | | | | | |
| | | (SEQ ID NO: | | (SEQ ID NO: | | | | | |
| | | 2188) | | 2189) | | | | | |
| 4 | DNMT1 | ACCGGGAAGT | 0.069069859 | ACGAATTTCT | 0.004224489 | 0.00526556 | 0.003445751 | 0.001942936 | 0.00568 |
| | | GAATGGACGT | | GCAAACAGAA | | | | | |
| | | (SEQ ID NO: | | (SEQ ID NO: | | | | | |
| | | 2190) | | 2191) | | | | | |
| 5 | DNMT1 | CTCCAAGGAC | 0.062491777 | TTTATTTTAGC | 0.005869406 | 0.006949578 | 0.004543917 | 0.008654182 | 0.004322 |
| | | AAATCTTTAT | | TGAAGGGAA | | | | | |
| | | (SEQ ID NO: | | (SEQ ID NO: | | | | | |
| | | 2192) | | 2193) | | | | | |
| 6 | DNMT1 | CCAAGCAAGA | 0.05810639 | TTTATTTCCCT | 0.005869406 | 0.006949578 | 0.004543917 | 0.008654182 | 0.004322 |
| | | AGTGAAGCCC | | TCAGCTAAA | | | | | |
| | | (SEQ ID NO: | | (SEQ ID NO: | | | | | |
| | | 2194) | | 2195) | | | | | |
| 7 | VEGFA | TCCCAAAGAT | 0.026608274 | GAGAGCAAAA | 0 | 0 | 0 | 0.775193798 | 0 |
| | | GCCCACCTGC | | GATACATCTC | | | | | |
| | | (SEQ ID NO: | | (SEQ ID NO: | | | | | |
| | | 2196) | | 2197) | | | | | |
| 8 | VEGFA | ATCAAAAAGA | 0.19699036 | ATTTGTACCG | 0 | 0 | 0 | 0.775193798 | 0 |
| | | GTGAACGAGA | | GTTTTTGTAT | | | | | |
| | | (SEQ ID NO: | | (SEQ ID NO: | | | | | |
| | | 2198) | | 2199) | | | | | |
| 9 | VEGFA | TGGTGGTCTG | 0.181254444 | TGTGCCCATT | 0.006639886 | 0.003995481 | 0.007802074 | 0.00517844 | 0.01231 |
| | | GATAAAAGAA | | GGTGGTCTGG | | | | | |
| | | (SEQ ID NO: | | (SEQ ID NO: | | | | | |
| | | 2200) | | 2201) | | | | | |
| 10 | FANCF | CGCAGAGAGT | 0.001424547 | TATTCCTGAC | 0 | 0.018749232 | 0 | 0.017373176 | 0.003696 |
| | | CGCCGTCTCC | | ACTGCCAGGA | | | | | |
| | | (SEQ ID NO: | | (SEQ ID NO: | | | | | |
| | | 2202) | | 2203) | | | | | |
| 11 | FANCF | TTTAAAGAAA | 0.064947114 | GGGACAGAAA | 0 | 0.021335333 | 0 | 0.018952555 | 0.011088 |
| | | AAGCAGCTTT | | ACCTAGAAAA | | | | | |
| | | (SEQ ID NO: | | (SEQ ID NO: | | | | | |
| | | 2204) | | 2205) | | | | | |
| 12 | FANCF | TCTGTCCCTCC | 0.041751716 | TTTAAGAGCAT | 0 | 0 | 0 | 0 | 0 |
| | | CTCAGTAGT | | CGAACAATA | | | | | |
| | | (SEQ ID NO: | | (SEQ ID NO: | | | | | |
| | | 2206) | | 2207) | | | | | |

### Tables 12A-G. Accession Numbers and Position Information for Loci Displayed in Figures.

TABLE 12A
Pertains to FIG. 9C, 9F.

| Subpanel | Contig accession | Feature of interest | start | end | strand |
|---|---|---|---|---|---|
| 9C | Ga0348337_018242 | CRISPR-associated | 802 | 2175 | 1 |
| | | IscB | | | |
| 9F | NZ_ADVG01000001 | IscB | 305647 | 306958 | −1 |

TABLE 12B
Pertains to FIG. 16A.

| | | Feature of | | | |
|---|---|---|---|---|---|
| Figure Subpanel | Contig accession | interest | start | end | strand |
| 16A (P. excrementihominis strain BIOML-A6) | WNCH01000015.1 | IscB | 57970 | 59260 | 1 |
| 16A (Prevotellaceae bacterium UBA3839) | DGHV01000076.1 | IscB | 29502 | 30768 | −1 |
| 16A (K. racemifer - transposon expansion, left) | NZ_ADVG01000003 | IscB | 1805791 | 1807081 | −1 |
| 16A (K. racemifer - transposon expansion, right) | NZ_ADVG01000001 | IscB | 2708268 | 2709558 | 1 |
| 16A (K. racemifer - cis ωRNA) | NZ_ADVG01000001 | IscB | 2516461 | 2517751 | −1 |
| 16A (K. racemifer - trans ωRNA), B | NZ_ADVG01000001 | ωRNA | 704325 | 704688 | 1 |

TABLE 12C
Pertains to FIG. 31B.

| | | Feature of | | | |
|---|---|---|---|---|---|
| Figure Subpanel | Contig accession | interest | start | end | strand |
| 31B (K. racemifer - IsrB) | NZ_ADVG01000004 | IsrB | 697010 | 698075 | 1 |
| 31B (K. racemifer - IscB) | NZ_ADVG01000003 | IscB | 1400692 | 1401982 | 1 |
| 31B (Bacteriodales RUG11478) | CACXPM010000003.1 | IscB | 91847 | 93110 | −1 |
| 31B (Tissierellia AS22ysBPME_61) | JAAZKS010000250.1 | IscB | 1343 | 2939 | −1 |
| 31B (Armatimonadota) | Ga0315277_10040887 | Cas9 | 1829 | 3848 | 1 |
| 31B (Nitrospirae RBG_13_39_12) | MHEF01000135.1 | Cas9 | 1737 | 4026 | 1 |
| 31B (C. jejuni strain NCTC 11168) | SZUC01000003.1 | Cas9 | 186809 | 189764 | −1 |

TABLE 12D
Pertains to FIG. 39C, H.

| | | Feature | | | |
|---|---|---|---|---|---|
| Figure | | of | | | |
| Subpanel | Contig accession | interest | start | end | strand |
| 39C | KY407659 | IscB | 21119 | 22433 | −1 |
| 39H | NZ_ADVG01000001 | IsrB | 97894 | 980013 | −1 |

TABLE 12E
Pertains to FIG. 51A-C

| Figure Subpanel | Contig accession | Feature of interest | start | end | strand |
|---|---|---|---|---|---|
| 51A, B, C (top locus) | NDEV01000101 | class III alcohol | 5301 | 6411 | 1 |
| | | dehydrogenase | | | |
| 51A, B, C (bottom | RCAL01000070 | IscB | 14393 | 15798 | 1 |
| locus) | | | | | |
| 51A, B, C (bottom | RCAL01000070 | class III alcohol | 15794 | 16904 | 1 |
| locus) | | dehydrogenase | | | |

TABLE 12F
Pertains to FIG. 44.

| From | | Feature | | | |
|---|---|---|---|---|---|
| top to | | of | | | |
| bottom | Contig accession | interest | start | end | strand |
| Locus 1 | FZOK01000004.1 | Cas9 | 172500 | 177072 | −1 |
| Locus 2 | CP003281.1 | Cas9 | 3445310 | 3449369 | −1 |
| Locus 3 | FNXE01000009.1 | Cas9 | 43590 | 47886 | 1 |
| Locus 4 | AQHR01000065.1 | Cas9 | 18175 | 22762 | 1 |
| Locus 5 | QQBA01000002.1 | Cas9 | 136771 | 141220 | −1 |
| Locus 6 | CP007035.1 | Cas9 | 301950 | 306231 | 1 |

TABLE 12G
Pertains to FIG. 61A.

| Figure | | | | | | |
|---|---|---|---|---|---|---|
| Subpanel | Database | Contig accession | Feature of interest | start | end | strand |
| 61A | NCBI | JACHNC010000001 | tnpB | 9479671 | 9480832 | −1 |

### DISCUSSION

[1038] Naturally programmable biological systems offer an efficient solution for diverse organisms to achieve scalable complexity via modularity of their components. RNA-guided defense and regulatory systems, which are widespread in prokaryotes and eukaryotes, are a prominent case in point, and have served as the basis of numerous biotechnology applications thanks to the ease with which they can be engineered and reprogrammed (Hüttenhofer, A., et al. (2006), Nat. Rev. Genet. 7, 475-482; Schneider, A. et al. (2020), EMBO Rep. 21, e51918; Koonin, E. et al. (2017), Biol. Direct. 12 e51918).

[1039] Here, through the exploration of Cas9 evolution, Applicants discovered the programmable RNA-guided mechanism of 3 highly abundant but previously uncharacterized transposon-encoded nucleases: IscB, IsrB, and TnpB, which Applicants collectively refer to as Ω (OMEGA: Obligate Mobile Element Guided Activity) (FIG. 45) because the mobile element localization and movement likely determines the identity of their guides. Although the biological functions of Ω systems remain unknown, several hypotheses are compatible with the available evidence, including roles in facilitating TnpA-catalyzed, RNA-guided transposition, or acting as a toxin, with the transposon acting as the antitoxin, securing maintenance of IS200/605 insertions (Supplementary Text).

[1040] The broad distribution of the 22 systems characterized here indicates that RNA-guided mechanisms are more widespread in prokaryotes than previously suspected and suggests that RNA-guided activities are likely ancient and evolved on multiple, independent occasions, of which only the most common ones have likely been identified so far. The TnpB family is far more abundant and diverse than the IscB family; indeed, Applicants identified more than a million putative tnpB loci in bacterial and archaeal genomes, making it one of the most common prokaryotic genes altogether. These TnpBs might represent an untapped wealth of diverse RNA-guided mechanisms present not only in prokaryotes, but also in eukaryotes. Combined with our identification of a chloroplast-encoded IscB, these findings suggest that the expansion of RNA-guided systems into eukaryotic genomes could be a general phenomenon, and more broadly, that RNA-guided systems are functionally diverse and permeate all domains of life.

### REFERENCES AND NOTES

[1041] 1. F. Zhang, Development of CRISPR-Cas systems for genome editing and beyond. Quarterly Reviews of Biophysics. 52(2019).
[1042] 2. F. Hille, H. Richter, S. P. Wong, M. Bratovič, S. Ressel, E. Charpentier, The biology of CRISPR-Cas: Backward and forward. Cell. 172, 1239-1259(2018).
[1043] 3. V. V. Kapitonov, K. S. Makarova, E. V. Koonin, ISC, a novel group of bacterial and Archaeal DNA transposons that encode Cas9 homologs. J. Bacteriol. 198, 797-807 (2015).
[1044] 4. P. Siguier, E. Gourbeyre, M. Chandler, Bacterial insertion sequences: their genomic impact and diversity. FEMS Microbiol. Rev. 38, 865-891(2014).
[1045] 5. S. Shmakov, A. Smargon, D. Scott, D. Cox, N. Pyzocha, W. Yan, O. O. Abudayyeh, J. S. Gootenberg, K. S. Makarova, Y. I. Wolf, K. Severinov, F. Zhang, E. V. Koonin, Diversity and evolution of class 2 CRISPR-Cas systems. Nat. Rev. Microbiol. 15, 169-182(2017).
[1046] 6. B. Zetsche, J. S. Gootenberg, O. O. Abudayyeh, I. M. Slaymaker, K. S. Makarova, P. Essletzbichler, S. E. Volz, J. Joung, J. van der Oost, A. Regev, E. V. Koonin, F. Zhang, Cpf1 is a single RNA-guided endonuclease of a class 2 CRISPR-Cas system. Cell. 163, 759-771(2015).
[1047] 7. E. Deltcheva, K. Chylinski, C. M. Sharma, K. Gonzales, Y. Chao, Z. A. Pirzada, M. R. Eckert, J. Vogel, E. Charpentier, CRISPR RNA maturation by trans-encoded small RNA and host factor RNase III. Nature. 471, 602-607(2011).
[1048] 8. I. Kalvari, E. P. Nawrocki, N. Ontiveros-Palacios, J. Argasinska, K. Lamkiewicz, M. Marz, S. Griffiths-Jones, C. Toffano-Nioche, D. Gautheret, Z. Weinberg, E. Rivas, S. R. Eddy, R. D. Finn, A. Bateman, A. I. Petrov. Rfam 14: expanded coverage of metagenomic, viral and microRNA families. Nucleic Acids Res. 49, D192-D200(2021).
[1049] 9. Z. Weinberg, J. Perreault, M. M. Meyer, R. R. Breaker, Exceptional structured noncoding RNAs revealed by bacterial metagenome analysis. Nature. 462, 656-659 (2009).
[1050] 10. M. Jinek, K. Chylinski, I. Fonfara, M. Hauer, J. A. Doudna, E. Charpentier, A programmable dual-RNA-guided DNA endonuclease in adaptive bacterial immunity. Science. 337, 816-821(2012).
[1051] 11. G. Gasiunas, R. Barrangou, P. Horvath, V. Siksnys, Cas9-crRNA ribonucleoprotein complex mediates specific DNA cleavage for adaptive immunity in bacteria. Proc. Natl. Acad. Sci. U.S.A 109, E2579-86(2012).
[1052] 12. G. Gasiunas, J. K. Young, T. Karvelis, D. Kazlauskas, T. Urbaitis, M. Jasnauskaite, M. M. Grusyte, S. Paulraj, P.-H. Wang, Z. Hou, S. K. Dooley, M. Cigan, C. Alarcon, N. D. Chilcoat, G. Bigelyte, J. L. Curcuru, M. Mabuchi, Z. Sun, R. T. Fuchs, E. Schildkraut, P. R. Weigele, W. E. Jack, G. B. Robb, Č. Venclovas, V. Siksnys, A catalogue of biochemically diverse CRISPR-Cas9 orthologs. Nat. Commun. 11, 5512(2020).
[1053] 13. M. Jinek, F. Jiang, D. W. Taylor, S. H. Sternberg, E. Kaya, E. Ma, C. Anders, M. Hauer, K. Zhou, S. Lin, M. Kaplan, A. T. Iavarone, E. Charpentier, E. Nogales, J. A. Doudna, Structures of Cas9 endonucleases reveal RNA-mediated conformational activation. Science. 343, 1247997(2014).
[1054] 14. B. Q. Minh, H. A. Schmidt, O. Chernomor, D. Schrempf, M. D. Woodhams, A. von Haeseler, R. Lanfear, IQ-TREE 2: New Models and Efficient Methods for Phylogenetic Inference in the Genomic Era. Mol. Biol. Evol. 37, 1530-1534(2020).
[1055] 15. K. S. Makarova, Y. I. Wolf, J. Iranzo, S. A. Shmakov, O. S. Alkhnbashi, S. J. J. Brouns, E. Charpentier, D. Cheng, D. H. Haft, P. Horvath, S. Moineau, F. J. M. Mojica, D. Scott, S. A. Shah, V. Siksnys, M. P. Terns, Č. Venclovas, M. F. White, A. F. Yakunin, W. Yan, F. Zhang, R. A. Garrett, R. Backofen, J. van der Oost, R. Barrangou, E. V. Koonin, Evolutionary classification of CRISPR-Cas systems: a burst of class 2 and derived variants. Nat. Rev. Microbiol. 18, 67-83(2020).
[1056] 16. K. A. Majorek, S. Dunin-Horkawicz, K. Steczkiewicz, A. Muszewska, M. Nowotny, K. Ginalski, J. M. Bujnicki, The RNase H-like superfamily: new members, comparative structural analysis and evolutionary classification. Nucleic Acids Res. 42, 4160-4179 (2014).
[1057] 17. H. Nishimasu, F. A. Ran, P. D. Hsu, S. Konermann, S. I. Shehata, N. Dohmae, R. Ishitani, F. Zhang, O. Nureki, Crystal structure of Cas9 in complex with guide RNA and target DNA. Cell. 156, 935-949(2014).
[1058] 18. W. Bao, J. Jurka, Homologues of bacterial TnpB_IS605 are widespread in diverse eukaryotic transposable elements. Mob. DNA. 4, 12(2013).
[1059] 19. J. V. Gomes-Filho, L. S. Zaramela, V. C. da S. Italiani, N. S. Baliga, R. Z. N. Vêncio, T. Koide, Sense overlapping transcripts in IS1341-type transposase genes are functional non-coding RNAs in archaea. RNA Biol. 12, 490-500(2015).
[1060] 20. Z. Weinberg, C. E. Lunse, K. A. Corbino, T. D. Ames, J. W. Nelson, A. Roth, K. R. Perkins, M. E. Sherlock, R. R. Breaker, Detection of 224 candidate structured RNAs by comparative analysis of specific subsets of intergenic regions. Nucleic Acids Res. 45, 10811-10823(2017).
[1061] 21. A. Hüttenhofer, P. Schattner, The principles of guiding by RNA: chimeric RNA-protein enzymes. Nat. Rev. Genet. 7, 475-482(2006).
[1062] 22. A. Schneider, A short history of guide RNAs: The intricate path that led to the discovery of a basic biological concept. EMBO Rep. 21, e51918(2020).
[1063] 23. E. V. Koonin, Evolution of RNA- and DNA-guided antivirus defense systems in prokaryotes and eukaryotes: common ancestry vs convergence. Biol. Direct. 12(2017).
[1064] 24. H. Altae-Tran, S. Kannan, F. Zhang, Code and processed data for: The widespread IS200/605 transposon family encodes diverse programmable RNA-guided endonucleases, Version 1.0, Zenodo (2021); <link to be inserted after official acceptance of manuscript>.
[1065] 25. C. Camacho, G. Coulouris, V. Avagyan, N. Ma, J. Papadopoulos, K. Bealer, T. L. Madden, BLAST+: architecture and applications. BMC Bioinformatics. 10, 421(2009).
[1066] 26. K. Katoh, D. M. Standley, MAFFT multiple sequence alignment software version 7: improvements in performance and usability. Mol. Biol. Evol. 30, 772-780(2013).
[1067] 27. M. Steinegger, J. Söding, MMseqs2 enables sensitive protein sequence searching for the analysis of massive data sets. Nat. Biotechnol. 35, 1026-1028(2017).
[1068] 28. M. Steinegger, M. Meier, M. Mirdita, H. Vöhringer, S. J. Haunsberger, J. Söding, HH-suite3 for fast remote homology detection and deep protein annotation. BMC Bioinformatics. 20, 473(2019).
[1069] 29. S. R. Eddy, Accelerated Profile HMM Searches. PLoS Comput. Biol. 7, e1002195 (2011).
[1070] 30. S. A. Shmakov, K. S. Makarova, Y. I. Wolf, K. V. Severinov, E. V. Koonin, Systematic prediction of genes functionally linked to CRISPR-Cas systems by gene neighborhood analysis. Proc. Natl. Acad. Sci. U.S.A 115, E5307-E5316(2018).
[1071] 31. A. B. Crawley, J. R. Henriksen, R. Barrangou, CRISPRdisco: An Automated Pipeline for the Discovery and Analysis of CRISPR-Cas Systems. CRISPR J. 1, 171-181(2018).
[1072] 32. D. H. Haft, B. J. Loftus, D. L. Richardson, F. Yang, J. A. Eisen, I. T. Paulsen, O. White, TIGRFAMs: a protein family resource for the functional identification of proteins. Nucleic Acids Res. 29, 41-43(2001).
[1073] 33. A. Delcher, Improved microbial gene identification with GLIMMER. Nucleic Acids Research. 27(1999), pp. 4636-4641.
[1074] 34. S. Naser-Khdour, B. Q. Minh, W. Zhang, E. A. Stone, R. Lanfear, The Prevalence and Impact of Model Violations in Phylogenetic Analysis. Genome Biol. Evol. 11, 3341-3352(2019).
[1075] 35. S. Kalyaanamoorthy, B. Q. Minh, T. K. F. Wong, A. von Haeseler, L. S. Jermiin, ModelFinder: fast model selection for accurate phylogenetic estimates. Nat. Methods. 14, 587-589(2017).
[1076] 36. M. N. Price, P. S. Dehal, A. P. Arkin, FastTree 2—approximately maximum-likelihood trees for large alignments. PLoS One. 5, e9490(2010).
[1077] 37. G. Altekar, S. Dwarkadas, J. P. Huelsenbeck, F. Ronquist, Parallel Metropolis coupled Markov chain Monte Carlo for ian posterian phylogenetic inference. Bioinformatics. 20, 407-415(2004).
[1078] 38. A. Stamatakis, RAXML version 8: a tool for phylogenetic analysis and post-analysis of large phylogenies. Bioinformatics. 30, 1312-1313(2014).
[1079] 39. R. Lorenz, S. H. Bernhart, C. H. zu Siederdissen, H. Tafer, C. Flamm, P. F. Stadler, I. L. Hofacker, ViennaRNA Package 2.0. Algorithms Mol. Biol. 6, 1-14(2011).
[1080] 40. E. Rivas, J. Clements, S. R. Eddy, A statistical test for conserved RNA structure shows lack of evidence for structure in lncRNAs. Nat. Methods. 14, 45-48(2017).
[1081] 41. E. P. Nawrocki, S. R. Eddy, Infernal 1.1:100-fold faster RNA homology searches. Bioinformatics. 29, 2933-2935(2013).
[1082] 42. Z. Weinberg, R. R. Breaker, R2R—software to speed the depiction of aesthetic consensus RNA secondary structures. BMC Bioinformatics. 12, 3(2011).
[1083] 43. J. Mistry, S. Chuguransky, L. Williams, M. Qureshi, G. A. Salazar, E. L. L. Sonnhammer, S. C. E. Tosatto, L. Paladin, S. Raj, L. J. Richardson, R. D. Finn, A. Bateman, Pfam: The protein families database in 2021. Nucleic Acids Res. 49, D412-D419(2021).
[1084] 44. C. Bland, T. L. Ramsey, F. Sabree, M. Lowe, K. Brown, N. C. Kyrpides, P. Hugenholtz, CRISPR recognition tool (CRT): a tool for automatic detection of clustered regularly interspaced palindromic repeats. BMC Bioinformatics. 8, 209(2007).
[1085] 45. F. Asnicar, G. Weingart, T. L. Tickle, C. Huttenhower, N. Segata, Compact graphical representation of phylogenetic data and metadata with GraPhlAn. PeerJ. 3, e1029 (2015).
[1086] 46. L. Maaten, G. Hinton, Visualizing Data using t-SNE. Journal of machine learning research. 9, 2579-2605(2008).
[1087] 47. P. G. Poličar, M. Stražar, B. Zupan, Embedding to reference t-SNE space addresses batch effects in single-cell classification. bioRxiv (2019),, doi: 10.1101/671404.
[1088] 48. P. J. Rousseeuw, Silhouettes: A graphical aid to the interpretation and validation of cluster analysis. J. Comput. Appl. Math. 20, 53-65(1987).
[1089] 49. R. J. G. B. Campello, D. Moulavi, J. Sander, in Advances in Knowledge Discovery and Data Mining (Springer Berlin Heidelberg, Berlin, Heidelberg, 2013), Lecture notes in computer science, pp. 160-172.
[1090] 50. D. H. Parks, M. Imelfort, C. T. Skennerton, P. Hugenholtz, G. W. Tyson, CheckM: assessing the quality of microbial genomes recovered from isolates, single cells, and metagenomes. Genome Res. 25, 1043-1055(2015).
[1091] 51. P.-A. Chaumeil, A. J. Mussig, P. Hugenholtz, D. H. Parks, GTDB-Tk: a toolkit to classify genomes with the Genome Taxonomy Database. Bioinformatics (2019), doi: 10.1093/bioinformatics/btz848.
[1092] 52. S. Frey, D. Görlich, A new set of highly efficient, tag-cleaving proteases for purifying recombinant proteins. J. Chromatogr. A. 1337, 95-105(2014).
[1093] 53. M. Martin, Cutadapt removes adapter sequences from high-throughput sequencing reads. EMBnet.journal. 17, 10-12(2011).
[1094] 54. B. Langmead, S. L. Salzberg, Fast gapped-read alignment with Bowtie 2. Nat. Methods. 9, 357-359(2012).
[1095] 55. A. M. Sriramachandran, G. Petrosino, M. Méndez-Lago, A. J. Schäfer, L. S. Batista-Nascimento, N. Zilio, H. D. Ulrich, Genome-wide Nucleotide-Resolution Mapping of DNA Replication Patterns, Single-Strand Breaks, and Lesions by GLOE-Seq. Mol. Cell. 78, 975-985.e7(2020).
[1096] 56. K. Clement, H. Rees, M. C. Canver, J. M. Gehrke, R. Farouni, J. Y. Hsu, M. A. Cole, D. R. Liu, J. K. Joung, D. E. Bauer, L. Pinello, CRISPResso2 provides accurate and rapid genome editing sequence analysis. Nat. Biotechnol. 37, 224-226(2019).
[1097] 57. A. Bankevich, S. Nurk, D. Antipov, A. A. Gurevich, M. Dvorkin, A. S. Kulikov, V. M. Lesin, S. I. Nikolenko, S. Pham, A. D. Prjibelski, A. V. Pyshkin, A. V. Sirotkin, N. Vyahhi, G. Tesler, M. A. Alekseyev, P. A. Pevzner, SPAdes: a new genome assembly algorithm and its applications to single-cell sequencing. J. Comput. Biol. 19, 455-477(2012).
[1098] 58. M. Turmel, C. Otis, C. Lemieux, Divergent copies of the large inverted repeat in the chloroplast genomes of ulvophycean green algae. Sci. Rep. 7, 994(2017).
[1099] 59. D. T. Hoang, O. Chernomor, A. von Haeseler, B. Q. Minh, L. S. Vinh, UFBoot2: Improving the Ultrafast Bootstrap Approximation. Mol. Biol. Evol. 35, 518-522(2018).
[1100] 60. P. J. Lockhart, A. W. Larkum, M. Steel, P. J. Waddell, D. Penny, Evolution of chlorophyll and bacteriochlorophyll: the problem of invariant sites in sequence analysis. Proc. Natl. Acad. Sci. U.S.A 93, 1930-1934(1996).
[1101] 61. A. Criscuolo, S. Gribaldo, BMGE (Block Mapping and Gathering with Entropy): a new software for selection of phylogenetic informative regions from multiple sequence alignments. BMC Evol. Biol. 10, 210(2010).
[1102] 62. J. Strecker, A. Ladha, Z. Gardner, J. L. Schmid-Burgk, K. S. Makarova, E. V. Koonin, F. Zhang, RNA-guided DNA insertion with CRISPR-associated transposases. Science. 365, 48-53(2019).
[1103] 63. S. E. Klompe, P. L. H. Vo, T. S. Halpin-Healy, S. H. Sternberg, Transposon-encoded CRISPR-Cas systems direct RNA-guided DNA integration. Nature. 571, 219-225 (2019).
[1104] 64. M. Krupovic, K. S. Makarova, P. Forterre, D. Prangishvili, E. V. Koonin, Casposons: a new superfamily of self-synthesizing DNA transposons at the origin of prokaryotic CRISPR-Cas immunity. BMC Biol. 12, 1-12(2014).
[1105] 65. S. M. Crotty, B. Q. Minh, N. G. Bean, B. R. Holland, J. Tuke, L. S. Jermiin, A. V. Haeseler, GHOST: Recovering Historical Signal from Heterotachously Evolved Sequence Alignments. Syst. Biol. 69, 249-264(2020).

### Example 4

[1106] FIG. 62 shows reclustering CRISPR-associated IscB polypeptide at 60% sequence identity reveals novel IscB proteins. The IscB proteins comprise an X domain and a Y domain. CRISPR-associated IscB proteins from 00644 cluster were functional with an NAC PAM (FIG. 63A showing IscB protein of locus JGI accession Gaa0099850_1002913; FIG. 63B showing IscB protein of JGI accession Ga0348337_018242; FIG. 63C showing IscB protein of locus JGI accession Ga0208542_1002724).

### Materials and Methods

### Profile Curation

[1107] Initial IscB sequences were curated using NCBI's PSI-BLAST on the NR database with 8 iterations from a starting seed sequence up to a maximum of 20000 target sequences (Camacho, C. et al. (2009), BMC Bioinformatics. 10, 421). Strong filtering parameters (expect threshold of 1e-5 and PSI-BLAST threshold of 1e-6) were selected to reduce the accumulation of unrelated proteins also containing HNH domains, such as restriction enzymes or homing endonucleases. All proteins smaller than 260 aa were discarded. The remaining proteins were then aligned using MAFFT FFT-NS-1 and partial proteins as well as proteins with poor alignment coverage to the HNH domain were discarded (Kotah, K., et al. (2013), Mol. Biol. Evol. 30, 772-780). The filtered set was then clustered using MMSeqs2 at 70% sequence identity with a minimum coverage of 70%. The MMSeqs2 representatives for each cluster were then aligned using MAFFT-einsi (Steinegger, M. et al. (2017), Nat. Biotechnol. 35, 1026-1028). The resulting alignment was further split into multiple domains (PLMP, RuvC-I, RuvC-II, HNH, and RuvC-III) in order to create distinct HHAlign profiles for the respective regions (Steinegger, M. et al. (2019), BMC Bioinformatics. 20, 473). For HMMER profiles, the PLMP, HNH, and RuvC-III were used to create separate profiles. RuvC-I, BH, and RuvC-II were combined into a single HMMER profile to reduce false positives (Eddy, S., et al. (2018), Proc. Natl. Acad. Sci. U.S.A 115, E5307-E5316).

[1108] Due to the extensive diversity in TnpA, a PSI-BLAST search resulted in more than 20000 homologous sequences. Because TnpA consists of a single contiguous catalytic domain, HHblits was instead used to identify more non-redundant homologs using an E-value cutoff of 1e-3, minimum hit probability of 80% and 8 iterations on the UniRef30_2020_06 database (Steinegger, M. et al. (2019), BMC Bioinformatics. 20, 473). The resulting proteins were aligned using MAFFT-einsi, and partial proteins were removed (Kotah, K., et al. (2013), Mol. Biol. Evol. 30, 772-780). The resulting alignment was used to create an HMMER profile.

### Identification of IscB, IsrB, and IshA

[1109] All prokaryotic (bacterial+archaeal) genomes were downloaded from NCBI, and NCBI WGS, as well as JGI projects for which express permission was given, and were combined into a single prokaryotic database. ORFs on all contigs were predicted with TTG, TAG, and TAA stop codons, and ATG start codons (with a minimum size of 55 aa), allowing for alternative start codons GTG (if it produced a minimum ORF size of 100 aa), TTG (if it produced a minimum ORF size of 100 aa) or CTG (if it produced a minimum ORF size of 300 aa). In the case of multiple potential start sites with different start codons for the same potential ORF, all potential start sites were listed in order of increasing corresponding ORF size. A best start site was iteratively selected by traversing the list and selecting a new best start site based on the previous one with the first item in the list selected as the initial best. GTG/TTG start sites were accepted as best if they would make the ORF 20 aa longer than the current best start site, while CTG was accepted only if it would make the protein 40 aa longer than the current best start site. Any ATG start site larger than the current best was automatically selected. ORFs sharing the same stop location and strand (+/−) as an existing protein annotation were discarded in favor of the existing annotation. All ORFs were then searched using HMMER and the 4 IscB profiles with a minimum bit score of 18. Any ORF/protein with a hit to any of the 4 domains was considered a protein of interest (POI) and retained for further analysis. For redundancy reduction, all proteins were then clustered using MMSeqs2 at 90% sequence identity with 85% coverage. Within each 90% cluster, proteins smaller than the 80^{th} percentile in length were discarded. Of the remaining proteins, proteins containing X (ambiguous) amino acids were discarded unless their removal would result in an empty set of sequences. Of the remaining proteins, the sequence with the largest minimum distance from either the start or the end of the protein-coding sequence to the edge of the respective contig, that is, the protein sequence farthest away from either edge of the containing contig, was selected as the cluster representative. Representative proteins with start or end sites within 200 bp of contig edges were considered partial and were subsequently discarded. These remaining representative sequences constituted non-redundant POIs. The non-redundant POIs were then further clustered into “clusters” (as opposed to non-redundant sequences) using MMSeqs2 at 65% sequence identity and 70% sequence coverage. For each cluster, the representative sequence was taken to be the sequence with the 90^{th} percentile length in the cluster. The use of 90^{th} percentile reflect the skew towards protein fragments that are often observed in large clusters. Unless specified otherwise, when referring to a cluster's components, such as the protein ORF (e.g., IscB cluster 2089) or associated RNA sequence (e.g., 2089 ncRNA), it is the respective component of the representative locus for that cluster that is being referenced.

### IscB-IsrB-Cas9 RuvC BH and RuvC BH HNH Domain Based Phylogenetic Analysis

[1110] Cas9s identified from the IscB domain-based search exhibited monophyletic branching from a RuvC-based tree, however not all Cas9s were identified from this search. To expand the space of Cas9s included in the analysis, Cas9 profiles from the Koonin Lab (30), TIGRFAM, and profiles made from MAFFT alignments of Cas9 proteins from CRISPRDisco were used to identify additional Cas9 proteins not found in the initial IscB domain-based search using HMMER with a minimum bit score of 25 and protein length of 500 aa (Kotah, K. et al. (2013), Mol. Biol. Evol. 30, 772-780; Crawley, A. et al. (2018), CRISPR J. 1, 171-181; Haft, D. et al. (2001), Nucleic Acids Res. 29, 41-43). Cas9 proteins from the IscB domain search were combined with the Cas9 proteins from the Cas9 search and deduplicated. The Cas9 ORF start sites were then refined using GLIMMER (Delcher, A, et al. (1999), Nucleic Acids Res. 29, 41-43). The superset of Cas9 proteins were then clustered 90% sequence identity with 85% coverage and redundancy reduced in the same manner as for the IscB search. The superset of non-redundant Cas9 proteins were then reclustered at 50% sequence identity and 60% coverage. The choice of 50% sequence identity reflects the difference in the size of conserved regions between IscBs and Cas9s with approximately 100 aa more slowly evolving in the key regions (RuvC, BH, and HNH). The clustering criteria of 65% minimum sequence identity for 400 aa proteins is functionally similar to 65%−100/400+100/1000=50% sequence identity for larger 1000 aa Cas9s with the same conserved domains spanning approximately 100 aa. For each cluster, the representative sequence was taken to be the sequence with the 90^{th} percentile length in the cluster.

[1111] Clusters were additionally filtered for homology to IscB/Cas9 catalytic domains using profile-profile comparison. Specifically, for each cluster, the non-redundant sequences in the cluster were aligned using MAFFT in order to generate hhm inputs for HHAlign. These resulting alignments were then compared to the 6 IscB domain alignments using HHAlign (for IscB/IsrB clusters), or the corresponding 8 Cas9 domain hhm profiles of the equivalent regions (RuvC-I, Bridge Helix, REC1, REC2, RuvC-II, HNH, RuvC-III). IscB/IsrB clusters were selected for further analysis if at least two hits to any of the IscB RuvC-I, RuvC-II, or RuvC-III domains were identified through HHAlign (with a minimum bit score of 17). Cas9 clusters were selected for further analysis if at least two hits to any of the IscB RuvC-I, RuvC-II, or RuvC-III domains were identified through HHAlign (with a minimum bit score of 17), or if any two hits to the Cas9 RuvC-I, RuvC-II, RuvC-III domains were identified through HHAlign (with a minimum bit score of 17). The passing Cas9 clusters were then pooled with the passing IscB clusters for phylogenetic analysis.

[1112] IscB, IsrB and Cas9 obtained from the above filtering criteria were aligned using MAFFT-x2 (two iterations) and BLOSUM62 scoring (default if not otherwise specified). The RuvC-I and BH regions of Cas9 did not align with the RuvC-I and BH regions of IscB and IsrB due to the different domain architectures and sizes of these divergent protein families. RuvC-I and BH were manually grouped and realigned using MAFFT-x2. Sequences with poor coverage at the RuvC-I domain region of the alignment were removed if their HHAlign score to either the IscB-RuvC-I or Cas9-RuvC-I profiles were less than 21. Small proteins with both Cas9-like and IscB-like sequences containing HHAlign hits to RuvC-I and BH typically did not have correct alignments with RuvC-I and BH relative to all other proteins due to their hybrid nature. For such proteins, all amino acids between the N-terminus and RuvC-II were grouped together as RuvC-I and BH for alignment. RuvC-I and BH regions were then realigned using MAFFT-linsi. IsrB aligned columns from the HNH domain were moved to the RuvC-II column group. RuvC-II, RuvC-III, HNH, and PLMP domains were then sequentially aligned using MAFFT-linsi. Excess regions between the BH domain and RuvC-II were then aligned using MAFFT-einsi and BLOSUM30 for identification of REC-like insertions. Sequences with no or poor alignment to any of the RuvC or BH domains were removed. The resulting alignment was then used for phylogenetic analysis.

[1113] All domains not common to all 3 types of proteins, namely PLMP, REC1, REC2, PI domains, and IscB/IsrB C-terminal domains were removed from the alignment, leaving a trimmed alignment containing only the highly conserved portions of the RuvC-I, BH, RuvC-II, and RuvC-III domains, creating a RuvC/BH alignment containing IscB, IsrB, and Cas9. Another alignment was created containing only RuvC-I, BH, RuvC-II, HNH, and RuvC-III domains for only IscB and Cas9, termed the RuvC/BH/HNH alignment. For both of these alignments, clusters with dead representative sequences (sequences with key catalytic sites mutated) were removed. Specifically, the positions filtered were the RuvC-I conserved D, RuvC-II conserved E, HNH Conserved H (when applicable), and RuvC-III conserved D and H. Positions (columns) with more than 75% gaps were also removed. Symmetry tests implemented in IQ-Tree 2 were used to identify potential phylogenetic violations for the alignments (FIG. 22) (Naser-Khdour, S. et al. (2019), Genome Biol. Evol. 11, 3341-3352). The RuvC/BH/HNH alignment displayed significant violation to the stationarity assumption of the three main assumptions used in typical phylogenetic analysis (reversibility, stationarity, homogeneity). As the alignment contained too many taxa for the use of heterotachy models in IQ-Tree 2, Applicants use a subtractive approach to identify the source of the stationarity violation. Preliminary analyses showed that the major clade of II-B Cas9s consistently split from the rest of Cas9s with a branch length of ≥1, suggesting its accurate placement along the tree might be difficult. Applicants removed the major clade of II-B Cas9s from the RuvC/BH/HNH alignment, which substantially reduced the stationarity violation as determined by marginal symmetry test p-value (FIG. 22). Applicants also created another alignment only consisting of IscB and Cas9s from the early stages of Cas9 evolution, which completely eliminated any stationarity violation. For both of these additional alignments, catalytically inactive variants were removed as described for the RuvC/BH and RuvC/BH/HNH alignments, and positions (columns) with more than 75% gaps were removed. For each alignment, substitution model selection was performed using the ModelFinder tool implemented in IQ-Tree 2 (Kalyaanamoorthy, S. et al. (2017), Nat. Methods. 14, 587-589). Optimal models were selected using the Akaike Information Criterion corrected for small sample sizes (AICc). In most cases, the AICc best model differed from the Bayesian Information Criterion (BIC) or AIC (standard Akaike Information Criterion), and some analyses were run for both sets of models; however, AICc was generally preferred due the small sample size correction. Then, for each alignment, phylogenetic trees were built using multiple methods for cross comparison (IQ-Tree 2, RAXML, MrBayes). While FastTree2 was used for quick visualizations of phylogenetic information, the likelihood scores obtained using this method were substantially worse than those for IQ-Tree 2, RAxML, or MrBayes (Mihn, B., et al. (2020), Mol. Biol. Evol. 37, 1530-1534; Price, M., et al. (2010), PLoS One. 5, e9490; Altekar, G. et al. (2004), Bioinformatics. 20, 407-415; Stamatakis, A. et al. (2014), Bioinformatics. 30, 1312-1313). As a result, FastTree2 was not used for comprehensive cross comparisons.

[1114] For FIG. 31A, a hybrid tree approach was used in order to condense the information pertinent to Cas9 while maintaining phylogenetic accuracy. For this approach, a subsample of Cas9 clusters were selected from the alignment, in addition to the complete set of IscB and IsrBs. The resulting sub-alignment was then used for phylogenetic inference using IQ-Tree 2 with identical parameters. Due to the potentially skewed Cas9 related information present in the sub-alignment, placement of the Cas9 lineage was inferred from the tree built with the original alignment. This was done by detaching the Cas9 branch from the sub alignment tree and replacing the original Cas9 branch on the original tree with the smaller detached branch. The branch selected for grafting was the branching between Cas9_849 and all other Cas9s, as this region shared the same topology between both trees. The ordering of Cas9 subtype evolution was checked for consistency between each tree to ensure compatibility after having substantially downsampled Cas9 proteins.

### IscB/IsrB ωRNA Discovery, Curation, and Analysis

[1115] Using results from just the IscB domain search, all representatives from clusters with at least 3 proteins and at least 2 HHAlign hits to any of RuvC-I, RuvC-II, or RuvC-III with at least 17 bit score were collected. All regions upstream (−300 bp to +200 bp of the start codon), and downstream (−200 bp to +300 bp of the stop codon) for all IscB and IsrB proteins were aligned separately using MAFFT-einsi. The upstream alignment demonstrated large conserved regions outside of the typical CDS boundaries of the IscB/IsrB. The downstream alignment did not contain any large conserved region and was discarded for further analysis. Individual sequences in the conserved upstream region were folded using ViennaRNA RNAFold (Lorenz, R. et al. (2011), Algorithms Mol. Biol. 6, 1-14). Sequences in the alignment were split into separate groups on the basis of conservation to key distinct regions in the alignment. The main group was labeled G1a and spanned a large number of IscB ωRNAs. R-scape was used to infer covariance-folded RNA structures that correct for phylogenetic correlations (Rivas, E. et al. (2017), Nat. Methods. 14, 45-48). The R-scape parameters used for all profiles was an E-value threshold of 1e-2 and a gap threshold of 0.75. CMbuild from Infernal was used to optimize the RNA alignments and build covariance models (CMs) (Nawrocki, E. et al. (2013), Bioinformatics. 29, 2933-2935). R2R was used to visualize the resulting RNA structures (Weinberg, Z. et al. (2011), BMC Bioinformatics. 12, 3). Additional alignment groups for IscB/IsrB ωRNAs (G1b-i) were iteratively created based on conserved upstream regions (relative to the ORF) from clades of IscB/IsrB in the RuvC tree that were not strongly associated with existing ωRNA groups. Models for these groups were built in the same manner, except the consensus secondary structure identified using ViennaRNA was used in place of the R-scape structure when the sample size was too small to permit an accurate covariance-folded structure. Due to this small sample size, in FIG. 1G, for the CRISPR-associated IscB ncRNA, nucleotides with ≥97% identity and nucleotides with ≥90% identity are the same by definition and were displayed as being ≥90% to avoid overstating their level of conservation in the presence of limited data. Pseudoknots were not explicitly encoded in the covariance models for Infernal. The structure for the hybrid CRISPR/ωRNA associated with CRISPR-associated IscBs was inferred in the same way, using the consensus secondary structure in lieu of the covariance-folded structure due to small sample size.

[1116] All IscB/IsrB ωRNA CM profiles were then searched against the prokaryotic database using cmsearch with a minimum bit score of 20 to identify potential ωRNAs (Nawrocki, E. et al. (2013), Bioinformatics. 29, 2933-2935).

[1117] Overlapping profile hits were resolved by assigning the group of overlapping hits to the profile hit that produced the highest bit score. ωRNAs were annotated using the natural target search analysis

### Natural Target Search

[1118] For the target search, a separate database was curated consisting of plasmids and bacteriophage/archaeal viruses from the NCBI microbial genomes portal. The 30 bp upstream from each ωRNA scaffold as determined by CMsearch along with the generated profiles was used as the corresponding guide sequence for that ωRNA. Guides were then searched against the prokaryotic database or the plasmid/viral database for potential spacer matches using a minimum bit score cutoff of 44. To remove candidate target hits that are related to the original guide/ωRNA pair, a separate pruning step was performed. For each target hit, the corresponding ωRNA scaffold of the guide that generated the hit was separately blasted against a 300 bp window around the target. For this second search, if the ωRNA scaffold had a match within the window with a bit score of 44 or higher and was found within 15 bp of the identified target, the target was discarded for being too similar to the original locus.

[1119] Target hits were then searched for evidence of transposition. For each guide/target pair, the sequence consisting of up to 2000 bp downstream from the end of the ωRNA scaffold was used as a 3′ prime seed. This seed region was then searched against the target contig using blastn with a minimum bit score of 44. Hits from this search were discarded if the strand was not the same as the guide/target match strand. Moreover, hits that were not both ≤50 bp downstream from the guide/target match site and ≤15 bp upstream from the guide/target match site were discarded for being implausible insertion sites. If any 3′ seed hits remained at this stage, the guide/target pair was considered to be associated with transposon insertion/transposition. In this case, of the remaining 3′ seed hits, the most upstream hit was selected, which along with the guide/target site demarcated the 3′ insertion site flanking region and 5′ insertion site flanking region respectively. Guide/target pairs that did not have an identifiable 3′ insertion site flanking region were not considered insertion linked and were discarded unless their guide/target match bit score was ≥50, which approximately corresponded to an E-value of 0.02 for the given size of the prokaryotic database.

[1120] To determine if prophage sequences might be a target for ωRNAs, all guide/target pairs were analyzed to detect if the guide targeted ORFs. Specifically, a guide was considered ORF targeting if any corresponding target was found to overlap with an ORF in the given database. All targeted ORFs were then searched for possible PFAM hits using HMMER and the Pfam34 database (Mistry, S. et al. (2021), Nucleic Acids Res. 49, D412-D419) and a minimum bit score of 18. All ORFs that had any hit to any phage Pfam profiles listed in Table 12 were considered phage targets, and the corresponding guide was labeled as phage ORF targeting.

[1121] ωRNAs were then further annotated as being near IscB/IsrB fragments based on the presence of any nearby ORF (≤2000 bp) with an HMMER hit of 18 bits or higher to any of the 4 IscB HMM profiles. ωRNAs were then clustered as follows. ωRNA scaffold sequences were clustered at 95% sequence identity using cd-hit-est using only global +/+strand comparisons.

[1122] Similarly, all spacers were clustered at 95% sequence identity using cd-hit-est using only global +/+strand comparisons. ωRNAs were then grouped according to both their ωRNA scaffold cluster id (ωRNA_id) and their spacer cluster id (spacer_id). Each (ωRNA_id, spacer_id) group was then classified as being associated near IscB if any ωRNA in the group was considered near IscB/IsrB fragments. Then, for each ωRNA_id, the fraction of all (ωRNA_id, spacer_id) pairs considered associated with IscB/IsrBs was computed. If this fraction was ≤0.75, the ωRNA_id was classified as being associated with standalone ωRNAs, and this classification was propagated back to all IscB/IsrB ωRNAs according to their ωRNA_id.

### Anti-Repeat Determination

[1123] For CRISPR associated IscB, IsrBs, and Cas9s, anti-repeats corresponding to likely tracrRNA regions were identified as follows. For each locus, the closest predicted CRISPR array to the locus within 10 kbp of the protein of interest (POI) (namely IscB, IsrB, or Cas9) was selected. If no such array was identified, the analysis was not performed for the given locus. Next, edit distance between each direct repeat in the selected CRISPR array was computed. The resulting edit distance matrix was used to a medoid direct repeat that had the lowest average edit distance to all other direct repeats in the CRISPR array. The medoid direct repeat was then searched against the 10 kbp window around the POI using blastn with a word size of 4. Hits with bit score <20 were discarded. Hits that mapped to any predicted CRISPR array were used for calibration. Specifically, all such CRISPR array matching hits were collected into a list, and the 20^{th} quantile bit score of such hits was denoted the min_crispr_score. Any hit that was found ≤40 bp of any CRISPR array was discarded as a potential anti-repeat due to its high proximity to CRISPR arrays suggesting the hit could simply be another CRISPR direct repeat. Hits occurring inside the protein of interest were also discarded. Remaining hits occurring ≤500 bp from either the POI or any predicted CRISPR array were retained. For each hit in this final list, if the region of the query median direct repeat that produced the hit does not reach ≤3 bp of either edge of the direct repeat, the hit was discarded as a potential anti-repeat due to the likely inability to produce a stable lower stem region for the putative repeat-anti-repeat stem-loop. If any hits remained, these hits were considered anti-repeats for the POI.

[1124] Anti-repeats were then used to predict potential tracrRNAs for specific Cas9s. This process involved taking the anti-repeat region and extending it until the boundary of the neighboring feature (either protein gene or CRISPR array). TracrRNAs were predicted in this manner for the tracrRNAs shown in FIG. 31B.

### Cluster Annotation

[1125] All 10 kb genomic frames (10 kb region around the protein-coding gene of interest (POI)) were collected, and encompassed all unique/non-redundant IscB, IsrB, and Cas9 genes (according to their 90% redundancy reducing clustering id, denoted mc_id). CRISPR arrays were identified using CRT (Bland, C. et al. (2007) BMC Bioinformatics. 8, 209). TnpA was predicted for all ORFs within 10 kb of a POI using HMMER with a minimum bit-score cutoff of 18.0. All ωRNA annotations from the natural target search were merged with the corresponding genomic frames when applicable. RNA profile hits with a bit-score below 35 were discarded. For each genomic frame, all ωRNAs predictions were merged with the POIs according to their genomic locations. All ωRNAs further than 250 bp away from either end of the POI were considered to be unrelated to the POI. Any ωRNAs closer than 250 bp were considered related to the POI, and in the case of multiple such ωRNAs, only the closest one to the POI was considered for tabulation purposes. For each POI, a locus boundary was then computed as follows. A minimal locus interval [L, R] was set to encompass the POI and associated ωRNA when applicable. Then, iteratively, all other ORFs and CRISPR arrays in the contig were considered for addition into the locus interval, upon which a new minimal interval [L′, R′] would be computed to encompass all elements in the locus. Specifically, an ORF was added to the locus if it was ≤1000 bp from the existing interval and contained a Cas1, Cas2, Cas4, or Csn2 HMM profile hit with a minimum bit score of 25 as determined by hmmsearch. CRISPR arrays were included if they were ≤500 bp from the existing interval and contained ≥3 direct repeats and had a median direct repeat length of ≥25 bp. The locus determination process was terminated once no new elements were being added, resulting in a final locus interval [L, R], which Applicants termed the locus bounds. ORFs with HMMER hits to TnpA with a minimum bit score of 14 was then considered tnpA and a part of the locus if they were ≤500 bp away from the locus bounds ([L, R]).

[1126] For tabulation of cluster annotations, all POIs and corresponding locus information were grouped by cluster id (c_id). POIs with ‘X’ amino acids in the sequence translation were discarded. Moreover, POIs with ≤250 bp distance to either edge of the contig were also discarded. The resulting locus features (features within the locus bounds [L, R])), and tnpA association were then used to tabulate aggregate metrics, such as average CRISPR association (fraction of loci in the cluster that have a CRISPR array within the locus bounds), tnpA association, and various cas gene associations. Anti-repeat association rates were also calculated in this way using anti-repeats as determined above, where loci that did not contain a CRISPR directly inside the locus bounds ([L, R]) were considered to not have an anti-repeat. For natural target search tabulations, the associated ωRNA in the locus bounds for POI closest to the POI was used. The fraction of associated ωRNAs in the cluster targeting genomic regions, plasmids, and phage were tabulated. Similarly, the fraction of associated ωRNAs associated with standalone ωRNAs for the cluster was also calculated. Lastly, the fraction of associated ωRNAs in the cluster that demonstrated evidence of insertion/transposition was also computed for each cluster.

[1127] For tabulation of protein domains, the hhm profile for the alignment of non-redundant sequences from the cluster was used to identify domain hits. Specifically, the cluster was considered to have the PLMP domain if the cluster alignment had an HHAlign match to the IscB PLMP domain with a bit score ≥30. Likewise, the cluster was considered to have the HNH domain if the cluster alignment had an HHAlign match to the IscB HNH domain with a bit score ≥25. As the HNH has multiple variants of the motif (often being replaced by HNN as in most Cas9s), the identity of the last amino acid in the HNH motif (e.g., HNH vs HNN) was computed for the cluster according to the corresponding position in alignment of representative sequences used for the phylogenetic analysis.

[1128] The protein length for each cluster was taken to be the non-gapped length of the cluster representative in the alignment containing all IscB, IsrB, and Cas9 cluster representative sequences (IscB_IsrB_Cas9_full_gappy.fasta). The calculated protein length therefore reflected the trimming of large (>50 aa) non-homologous sequences at the protein termini as determined from the IscB_IsrB_Cas9_full_gappy.fasta file. REC-like regions were taken to be the region directly between the Bridge Helix and the RuvC-II domain as found in the alignment of cluster representatives. The REC-like regions are found in IscB_IsrB_Cas9_REC_only.fasta. Lengths of REC-like insertions for each cluster were taken to be the non-gapped lengths from the REC alignment. GraPhlAn was used to visualize the resulting information on different phylogenetic trees (Asnicar, F. et al. (2015), PeerJ. 3, e1029).

[1129] Throughout the text, where fraction of loci containing a specific feature are computed, the analysis considered only the non-inactivated IsrB loci, as determined by RuvC/BH alignment, and the non-activated IscB and Cas9 loci as determined by the RuvC/BH/HNH. In addition, proteins from cluster 34507 were also included despite being considered an inactivated cluster because the cluster contains active CRISPR-associated IscB variants.

### IscB/IsrB ωRNA Phylogenetic Analysis

[1130] All iscB/isrB associated ωRNAs from the loci of cluster representatives were collected.

[1131] For CRISPR-associated ωRNAs, the entire region spanning the CRISPR array and the remainder of the ωRNA scaffold was taken to be the corresponding RNA for the system. These RNAs were then converted to DNA sequences and aligned using MAFFT-ginsi to identify conserved regions spanning multiple types of RNAs. A phylogenetic tree was then constructed using IQ-Tree 2 with 5000 rapid bootstraps with hill climbing, a GTR substitution model with 4 Gamma rate categories.

[1132] To analyze the relationship between II-D tracrRNAs and ωRNAs, cmsearch was used to identify if the predicted II-D tracrRNAs contained any homology to IscB/IsrB ωRNAs using the corresponding IscB/IsrB ωRNA profiles. Based on the potential homology determined this way, a small panel of ωRNAs that were highly related to the II-D tracrRNAs were combined with synthetic single guide sequences from II-D systems constructed by concatenating the DR with ‘AAAA’ and the predicted tracrRNA. These combined sequences were then aligned using MAFFT. The resulting alignment was used for Bayesian phylogenetic analysis with MrBayes with 2 chains at a delta temperature of 0.025 with 8 independent runs for 5M generations. A standard GTR model with gamma rates and 4 categories was used.

### Binning of Yellowstone Lake Metagenomes

[1133] Tetranucleotide frequencies of assembled metagenomes (contigs>5 kb) provided an input for the t-stochastic neighbor embedding (t-SNE) analysis, which reduced the data to two dimensions (Maaten, L. et al. (2008), Journal of Machine Learning, 9, 2579-2605). Applicants used openTSNE (Poličar, P. et al. (2019, bioRxiv (2019),, doi: 10.1101/671404) because of its speed and scalability. The perplexity parameter was set at 40, while the learning rate and the number of iterations were variable. Typically, both were set to larger values for bigger datasets. A grid search coupled with silhouette scores (Rousseeuw, P. et al. (1987), J. Comput. Appl. Math. 20, 53-65) was used to find optimal parameters for density-based clustering (Campello, R. et al. (2013), Advances in Knowledge Discovery and Data Mining, Lecture Notes in Computer Science, pp. 160-172) (HDBSCAN) of data points from the t-SNE plot (MD and WPI, in preparation). DNA sequences were grouped into metagenome-assembled genomes (MAGs), and their completeness was evaluated using CheckM (Parks, D. et al. (2015), Genome Res. 25, 1043-1055). The GTDB Toolkit (Chaumeil, P. et al. (2019), Bioinformatics doi: 10.1093/bioinformatics/btz848) was used to classify MAGs into taxonomic groups based on the Genome Taxonomy Database.

### Identification of Guide Encoding Mechanisms for IscB/IsrB ωRNA

[1134] Upon complete classification and curation of all major ωRNA types according to IscB and IsrB, the genome of K. racemifer was searched for all instances of IscB and IsrB using HMMER with the previously described profiles. The genome was also searched for all instances of IscB/IsrB ωRNAs using CMsearch with the G1a-G1i RNA covariance models. Occurrences of multiple nearly identical IscBs associated with nearly identical ωRNAs were identified with BLASTn and was classified as transposon expansion. Occurrences of ωRNAs without detectable IscBs or IsrBs within 500 bp on the same strand were classified as standalone trans-acting ωRNAs. In some instances, ωRNAs and corresponding IscB/IsrBs were separated by the insertion of unrelated transposons between them. In such cases, the ωRNA was not considered a trans-acting ωRNA.

[1135] All covariance models were searched against our prokaryotic genome database. Examples with multiple ωRNAs on the same strand within 300 bp were retained for further analysis and categorized as ωRNA arrays.

### Identification of Eukaryotic IscB Orthologs.

[1136] All eukaryotic genomes were downloaded from NCBI. In order to capture all possible IscBs, existing gene models were discarded for this analysis. All DNA sequences were translated into 6 frame amino acids translations and split into ORFs by splitting across stop codons (*).

[1137] Each ORF was then searched for IscB domains using the HMMER profiles generated by the IscB profile curation step. ORFs with hits to both IscB HNH and RuvC domains were retained for further analysis. The regions around the ORFs were then searched for IscB-linked ωRNAs using CMsearch and the IscB-linked ωRNA covariance models created in this study.

### Codon Analysis of I. Tetrasporus Chloroplast IscB

[1138] All previously annotated ORFs from the NCBI chloroplast genome KY407659 were obtained and classified as non-IscB or IscB using a BLASTp search with the single intact IscB as the query. ORFs corresponding to IscB fragments were discarded. For each remaining IscB or non-IscB ORF, the average codon usage for each of the 60 codons was computed as a vector, pi, where pic is the fraction of codons in ORF i that use codon c. The average and standard deviations of p across i (excluding IscB ORFs) were computed to get distribution information for how the codon usage varies across different non-IscB ORFs. The codon usage of the single IscB ORF for each codon was then compared to the average and standard deviation of codon usage across all the other non-IscB ORFs. To quantitively assess how different the IscB codon usage is relative to other ORFs in the same genome, p was averaged across the non-IscB ORFs to obtain an average distribution of codon usage, which Applicants referred to as the reference distribution. For each ORF, the Kullback-Leibler divergence between the ORF's codon usage, pi, and the reference codon usage distribution was computed.

### Discovery of IshB

[1139] The powerset of all possible domain combinations of the PLMP, RuvC-I, BH, RuvC-II, HNH, and RuvC-III domains was generated. For each domain combination, the number of clusters from the IscB domain search with a hit to every domain in the combination with a minimum bit score of 21 was computed. Domain combinations that exhibited high levels of protein sequence conservation within the combination were retained for further analysis. Domain combinations that were N-terminal or C-terminal truncations of IscB, Cas9, or IsrB were discarded. From the remaining combinations, PLMP+HNH displayed high cluster counts relative to the other domain combinations, such as RuvC-II+PLMP only, suggesting that the combination corresponded to a true protein family. These proteins were subsequently named IshB due to the presence of an HNH domain, while also containing the PLMP domain present in IscB and IsrB.

### Taxonomy Analysis of IscB, IsrB, and Cas9

[1140] Taxonomy information for available genomes were obtained from the NCBI microbial genomes portal. Genomes which lacked taxonomic information or metagenomes were discarded for this analysis. Genes were classified into IsrB, IscB, Cas9, or other on the basis of their cluster id. The fraction of genomes in each taxonomic group containing IsrB, IscB, or Cas9 was computed. For each gene type (IscB, IsrB, and Cas9) the distribution of the number of genes per genome in each taxonomic group was calculated. Box plots of gene counts per taxonomic group was then computed using Python.

### TnpB Curation and Analysis of ωRNA

[1141] Examples of IscB-linked ωRNA from K. racemifer were searched in the K. racemifer genome using BLASTn. Hits in the vicinity of IscB or IsrB were discarded. Multiple partial hits were found in the vicinity of TnpB, with the hit being always downstream of the TnpB gene.

[1142] Exploration of these hits showed that multiple TnpBs shared transposon ends with IscB. An upstream and downstream locus conservation analysis was performed for related TnpB loci as done for IscB. As TnpB is highly diverse, only TnpBs that were identifiable via high similarity in an mmseqs2 search were included. The RNA-seq traces were then used to identify the 5′ RNA boundary on the TnpB ωRNAs in the conservation analysis. These ωRNAs from the conservation analysis were then extracted and used to create an R-scape secondary structure with an E-value threshold of 1e-2 and a gap threshold of 0.75.

### Expression and Purification of CRISPR-Associated IscB RNPs

[1143] To purify the CRISPR-associated IscB in complex with the ncRNA of its native locus, the human codon optimized CRISPR-associated IscB protein was cloned into a modified pET45b(+) backbone with an N-terminal His14-MBP-bdSUMO tag (Frey, S. et al. (2014), J. Chromatogr. A. 1337, 95-105), and C-terminal twin-strep tag. The non-coding part of the CRISPR-associated IscB locus was cloned into a separate pCOLADuet-1 vector, and co-expressed with the CRISPR-associated IscB protein in Rosetta(DE3)pLysS strain (EMD Millipore) (Tables 5, 9). Cells were grown at 37° C. in the terrific broth (TB) medium supplemented with 100 μg/ml ampicillin, 25 μg/ml kanamycin, and 34 μg/ml chloramphenicol until reaching an optical density (OD600) of 0.3, then shifted to 18° C., and grown further until OD600 was 0.7. The bacterial culture was induced overnight at 18° C. with 0.2 mM isopropyl β-D-1thiogalactopyranoside (IPTG) and harvested by centrifugation. The cell paste was resuspended in lysis buffer (50 mM Tris pH 8, 200 mM NaCl, 5% glycerol, 5 mM MgCl₂, and 1 mM DTT) supplemented with protease inhibitors (PMSF and Roche complete, EDTA-free), and lysed by two passes with a high-pressure homogenizer (LM20 Microfluidizer, Microfluidics). The lysate was cleared by centrifugation, and the soluble fraction was gently mixed with Strep-Tactin Superflow Plus resin (Qiagen) at 4° C. The resin was first washed with lysis buffer, then briefly with buffer A (50 mM Tris pH 8, 1 M NaCl, 5% glycerol, 5 mM MgCl₂, and 1 mM DTT), and buffer B (50 mM Tris pH 8, 500 mM NaCl, 5% glycerol, 5 mM MgCl₂, and 1 mM DTT) on a gravity flow column. Bound RNP was then eluted in buffer B supplemented with 5 mM desthiobiotin (Sigma), and the N-terminal solubility tag was cleaved using bdSENP1 protease.

[1144] Once the boundaries of the co-purified RNA were defined by small RNA sequencing, the predicted ncRNA sequence was cloned downstream of a T7 promoter in a pCOLADuet-1 vector for inducible expression. The CRISPR-associated IscB-ncRNA complexes used for in vitro cleavage assays were then prepared following the same procedure explained above.

Small RNA Sequencing: Heterologous Expression in E. coli

[1145] Stb13 chemically competent E. coli were transformed with plasmids containing the locus of interest. A single colony was used to seed a 5 mL overnight culture. Following overnight growth, cultures were spun down, resuspended in 750 μL TRI reagent (Zymo) and incubated for 5 min at room temperature. 0.5 mm zirconia/silica beads (BioSpec Products) were added, and the culture was vortexed for approximately 1 minute to mechanically lyse cells. 200 μL chloroform (Sigma Aldrich) was then added, culture was inverted gently to mix and incubated at room temperature for 3 min, followed by spinning at 12000×g at 4° C. for 15 min. The aqueous phase was used as input for RNA extraction using a Direct-zol RNA miniprep plus kit (Zymo). Extracted RNA was treated with 10 units of DNase I (NEB) for 30 min at 37° C. to remove residual DNA and purified again with an RNA Clean & Concentrator-25 kit (Zymo). Ribosomal RNA was removed using a RiboMinus Transcriptome Isolation Kit for bacteria (Thermo Fisher Scientific) as per the manufacturer's protocol using half-volume reactions. The purified sample was then treated with 20 units of T4 polynucleotide kinase (NEB) for 6 h at 37° C. and purified again with an RNA Clean & Concentrator-25 (Zymo) kit. The purified RNA was treated with 20 units of 5′ RNA polyphosphatase (Lucigen) for 30 min at 37° C. and purified again using an RNA Clean & Concentrator-5 kit (Zymo). Purified RNA was used as input to an NEBNext Small RNA Library Prep for Illumina (NEB) as per the manufacturer's protocol with an extension time of 60 s and 16 cycles in the final PCR. Amplified libraries were gel extracted, quantified by qPCR using a KAPA Library Quantification Kit for Illumina (Roche) on a StepOne Plus machine (Applied Biosystems/Thermo Fisher Scientific) and sequenced on an Illumina NextSeq with Read 1 42 cycles, Read 2 42 cycles and Index 1 6 cycles. Adapters were trimmed using CutAdapt (Martin, M. et al. (2011), EMBnet.journal. 17, 10-12) and mapped to loci of interest using Bowtie2 (Langmead, B. et al. (2012), Nat. Methods. 9, 357-359). Filled reads were obtained and filled reads longer than 200 bp were visualized using a custom Python script.

### Ribonucleoprotein

[1146] RNPs were purified as described. 100 μL concentrated RNP was used as input. The above protocol was followed with the following modifications: 300 μL TRI reagent (Zymo) and 60 μL chloroform (Sigma Aldrich) were used for RNA extraction.

K. racemifer

[1147] Freeze-dried K. racemifer SOSP1-21 DSM 44963 was obtained from DSMZ (www.dsmz.de/collection/catalogue/details/culture/DSM-44963), resuspended in GYM Streptomyces media (4 g glucose, 10 g malt extract, 4 g yeast extract in 1 L water) and grown in a shaking incubator at 28 C. After 76 days, the culture was spun down, and the above protocol was followed with the following modifications: mechanical lysis using zirconia beads was performed with approximately 30 min of vortexing. Ribosomal RNA was removed using a NEBNext rRNA Depletion Kit (Bacteria) (NEB) as per the manufacturer's protocol and the rRNA-depleted sample was purified using Agencourt RNAClean XP beads (Beckman Coulter) prior to T4 PNK treatment. T4 PNK treatment was performed for 1.5 h and purified with an RNA Clean & Concentrator-5 kit (Zymo). Final PCR in the small RNA library prep contained 15 cycles.

I. tetrasporus

[1148] An agar slant of I. tetrasporus UTEX B 2012 was obtained from UTEX, inoculated in Modified Bold 3N Medium (UTEX) and grown at 20° C. in a shaking incubator with 12-hour light/dark cycles. After 18 days, the culture was spun down and the above protocol was followed with the following modifications: ribosomal RNA was removed using the manufacturer's protocol from the RiboMinus Transcriptome Isolation Kit for bacteria (Thermo Fisher Scientific) with probes from the RiboMinus Transcriptome Isolation Kit for bacteria, RiboMinus Plant Kit for RNA-seq and RiboMinus Eukaryote Kit for RNA-seq (all Thermo Fisher Scientific) combined in an equimolar ratio. Eluted RNA from ribosomal removal was concentrated using an RNA Clean & Concentrator-25 kit (Zymo) prior to T4 PNK treatment. Final PCR of the small RNA library prep contained 15 cycles.

### Cloning PAM TAM Libraries

[1149] Target sequences with 8N degenerate flanking sequences were synthesized by IDT and amplified by PCR with NEBNext High Fidelity 2×Master Mix (NEB). Backbone plasmid was digested with restriction enzymes (pACYC: EcoRV; pUC19: Eco88I and HindIII, Thermo Fisher Scientific) and treated with FastAP alkaline phosphatase (Thermo Fisher Scientific). The amplified library fragment was inserted into the backbone plasmid by Gibson assembly at 50° C. for 1 hour using 2×Gibson Assembly Master Mix (NEB) with an 8:1 molar ratio of insert: vector. The Gibson assembly reaction was then isopropanol precipitated by addition of an equal volume of isopropanol (Sigma Aldrich), final concentration of 50 mM NaCl, and 1 μL of GlycoBlue nucleic acid co-precipitant (Thermo Fisher Scientific). After a 15 min incubation at room temperature, the solution was spun down at max speed at 4° C. for 15 min, then the supernatant was pipetted off and the pelleted DNA was resuspended in 12 μL TE and incubated at 50° C. for 10 minutes to dissolve. 2 μL were then transformed by electroporation into Endura Electrocompetent E. coli (Lucigen) as per the manufacturer's instructions, recovered by shaking at 37° C. for 1 h, then plated across 5 22.7 cm×22.7 cm BioAssay plates with the appropriate antibiotic resistance. After 12-16 hours of growth at 37 C, cells were scraped from the plates and midi- or maxi-prepped using a NucleoBond Midi- or Maxi-prep kit (Machery Nagel).

E. coli PAM Screen

[1150] 100 ng each of a plasmid containing a locus of interest and a target 8N degenerate flanking library plasmid were transformed by electroporation into 30 μL Endura Electrocompetent E. coli (Lucigen) as per the manufacturer's protocol, with 3 biological replicates per locus of interest as well as 3 biological replicates of an empty control. After recovery by shaking at 37° C. for 1 hour, cells were plated across 1 22.7 cm×22.7 cm BioAssay plate with the appropriate antibiotic resistance and grown for 12-16 h at 37° C. Cells were scraped from the plate and mixed well, and 2 mL of the scraped cells were used as input to minipreps (Qiagen). 100 ng miniprepped plasmids were input to PCR to amplify the PAM-containing region with a 12-cycle PCR using NEBNext High Fidelity 2×PCR Master Mix (NEB) with an annealing temperature of 63° C., followed by a second 18-cycle round of PCR to further add Illumina adaptors and barcodes. Amplified libraries were gel extracted, quantified by a Qubit dsDNA HS assay (Thermo Fisher Scientific) and subject to single-end sequencing on an Illumina NextSeq with Read 1 75 cycles, Index 1 8 cycles and Index 2 8 cycles. PAMs were extracted and Weblogos depicting depleted PAMs were visualized using a custom Python script (Altae-Tran, H. et al. (2021).

### In Vitro Cleavage Assays

[1151] Double-stranded DNA (dsDNA) substrates were produced by PCR amplification of pUC19 plasmids containing the target sites and the TAM sequences. Cy3 and Cy5-conjugated DNA oligonucleotides (IDT) were used as primers to generate the labeled dsDNA substrates. Single-stranded DNA (ssDNA) substrates were ordered as Cy5.5-conjugated oligonucleotides (IDT). All ωRNA used in the biochemical assays was in vitro transcribed using the HiScribe T7 Quick High Yield RNA Synthesis kit (NEB) from the DNA templates purchased from Twist Biosciences. Target cleavage assays performed with AwaIscB contained 10 nM of DNA substrate, 1 μM of protein, and 4 μM of ωRNA in a final 1×reaction buffer of 20 mM HEPES pH 7.5, 50 mM NaCl, and 5 mM MgCl₂. Assays were allowed to proceed at 37° C. for 1 hour, then briefly shifted to 50° C. for 5 min, and immediately placed on ice to help relax the RNA structure prior to RNA digestion. Reactions were then treated with RNase A (Qiagen), and Proteinase K (NEB), and purified using a PCR cleanup kit (Qiagen). DNA was resolved by gel electrophoresis on Novex 10% TBE (dsDNA substrates), 6% TBE-Urea (dsDNA substrates), and 15% TBE-Urea (ssDNA substrates) polyacrylamide gels (Thermo Fisher Scientific). Target cleavage assays performed with CRISPR-associated IscB RNPs were performed similarly, except that 450 nM RNP replaced the protein and the ωRNA, and the reactions were incubated for 1.5 hours at 37° C. Cleaned reactions were then run on a 4% agarose E-gel (Thermo Fisher Scientific). Target cleavage assays with AmaTnpB were performed with 1 μM of protein, 3 μM of ωRNA and 10 nM substrate, purified as described, and visualized on 2% agarose E-gels (dsDNA substrates) or 10% TBE-Urea polyacrylamide gels (ssDNA substrates).

[1152] For kinetic analysis of AwaIscB or AmaTnpB activity, cleavage reactions were quenched with 11 mM of EDTA at each time point prior to cleanup. For screening metals, MgCl₂ was eliminated from the reaction buffer, while 2 mM of EDTA, and 7 mM of the indicated metal were added. Collateral cleavage assays for AwaIscB were performed using 10 nM of unlabeled ds/ssDNA substrate along with 10 nM of Cy5.5-labeled collateral ssDNA substrate, and the reactions were allowed to proceed for 3 hours at 37° C. Cleavage of the labeled nontargeted ssDNA was then assessed on a 15% TBE-Urea polyacrylamide gel. Collateral cleavage assays for AmaTnpB were performed with 10 nM of unlabeled ds/ssDNA substrate and 10 nM of Cy5.5-labeled collateral ssDNA substrate for 1 hour at 60° C. and the resulting cleavage was visualized on a 10% TBE-Urea gel.

[1153] Single-stranded RNA (ssRNA) substrates were in vitro transcribed and labeled with pCp-Cy5 (Jena Bioscience) on their 3′ end. For the 3′ end labeling, 50 pmol of ssRNA was incubated with 100 pmol of pCp-Cy5 and 50 U of T4 RNA ligase 1 (NEB) in 50 mM Tris pH 7.8, 10 mM MgCl₂, 10 mM DTT, 2 mM ATP, and 10% DMSO at 4° C. for 40 hours. Labeling reactions were quenched with 20 mM EDTA and purified using an RNA Clean and Concentrator-25 kit (Zymo). ssRNA cleavage assays were performed similarly to the DNA cleavage assays, quenched with 19 mM EDTA at the end of the reactions, treated with Proteinase K, and visualized on a 6% TBE-Urea polyacrylamide gel.

[1154] For all experiments, all conditions were performed at least twice for replicability.

### Cell-Free Transcription Translation TAM Screen

[1155] IscB protein sequences were human codon optimized using the GenScript codon optimization tool, and IscB genes, TnpB genes with endogenous codon optimization, and ωRNA scaffolds were synthesized by Twist Biosciences. Transcription/translation templates were generated by PCR from custom synthesis products. Cell-free transcription/translation reactions were carried out using a PURExpress In Vitro Protein Synthesis Kit (NEB) as per the manufacturer's protocol with half-volume reactions, using 75 ng of template for the protein of interest, 125 ng of template for the corresponding ωRNA with a guide targeting the TAM library and 25 ng of TAM library plasmid. Reactions were incubated at 37° C. for 4 hours, then quenched by placing at 4° C. or on ice and adding 10 ug RNase A (Qiagen) and 8 units Proteinase K (NEB) each followed by a 5 min incubation at 37° C. DNA was extracted by PCR purification and adaptors were ligated using an NEBNext Ultra II DNA Library Prep Kit for Illumina (NEB) using the NEBNext Adaptor for Illumina (NEB) as per the manufacturer's protocol. Following adaptor ligation, cleaved products were amplified specifically using one primer specific to the TAM library backbone and one primer specific to the NEBNext adaptor with a 12-cycle PCR using NEBNext High Fidelity 2×PCR Master Mix (NEB) with an annealing temperature of 63° C., followed by a second 18-cycle round of PCR to further add the Illumina i5 adaptor. Amplified libraries were gel extracted, quantified by qPCR using a KAPA Library Quantification Kit for Illumina (Roche) on a StepOne Plus machine (Applied Biosystems/Thermo Fisher Scientific) and subject to single-end sequencing on an Illumina MiSeq with Read 1 80 cycles, Index 1 8 cycles and Index 2 8 cycles. TAMs were extracted and enrichment score for each TAM was calculated by filtering for all TAMs present more than once and normalizing to the TAM frequency in the input library subject to the same in vitro transcription/translation and quenching reactions. A position weight matrix based on the enrichment score was generated and Weblogos were visualized based on this position weight matrix using a custom Python script (Altae-Tran, H. et al. (2021).

### Expression and Purification of KraIscB-1 RNP Complex

[1156] Purification of the KraIscB-1 in complex with the ncRNA of its native locus was performed similarly to the CRISPR-associated IscB-ncRNA RNP complex with the following modifications: (1) the KraIscB-1 CDS was not codon optimized; (2) co-expression with the ncRNA was performed in BL21(DE3) cells (NEB) in the presence of 100 μg/ml ampicillin, and 25 μg/ml kanamycin; (3) bdSENP1 protease was not used since KraIscB-1 protein was not attached to an N-terminal tag, but was only twin-strep tagged on its C-terminus. Once the boundaries of the co-purified RNA were defined by small RNA sequencing, the predicted ωRNA sequence was cloned downstream of a T7 promoter in a pCOLADuet-1 vector for inducible expression, and the KraIscB-1-ωRNA complexes were then prepared following the same procedure.

### Cell-Free Transcription Translation Cleavage Assays

[1157] ωRNA templates were amplified from custom synthesis products as described and in vitro transcribed using a HiScribe T7 Quick High Yield RNA Synthesis Kit (NEB) with 150 ng DNA template in 2 uL, 2 μL T7 RNA Polymerase Mix (NEB) and 6.67 mM final concentration each NTP in 30 μL total volume reactions and purified with an RNA Clean & Concentrator-25 kit (Zymo). Protein sequences were amplified from custom synthesis products or locus plasmid templates. To generate targets, short oligos containing target and PAM sequences with appropriate overhangs were synthesized by Genewiz and cloned into corresponding backbone plasmids by Golden Gate or restriction-ligation cloning. Dye-conjugated primers for generating labeled linear targets with dyes as annotated were synthesized by IDT and linear targets were amplified from target plasmids by PCR using Q5 Hot Start High Fidelity 2× Master Mix (NEB) as per the manufacturer's protocol.

[1158] Cell-free transcription/translation reactions were carried out using a PURExpress In Vitro Protein Synthesis Kit (NEB) as per the manufacturer's protocol with half-volume reactions using 75 ng of template for the protein of interest and a final concentration of 1 μM in vitro-transcribed ωRNA to cap the possible final RNP concentration. Reactions were incubated at 37° C. for 4 hours to allow for RNP formation, then placed on ice to quench in vitro transcription/translation. 50-100 ng of target substrate was then added, and the reactions were incubated at the specified temperature for 1 additional hour. Reactions were then quenched by adding 10 ug RNase A (Qiagen) and 8 units Proteinase K (NEB) each followed by a 5 min incubation at 37° C. DNA was extracted by PCR purification and run on either 10% or 6% Novex TBE-Urea gels, or 10% Novex TBE gels (Thermo Fisher Scientific) as per the manufacturer's protocols, as specified in figures. Gels were stained with 1×SYBR Gold (Thermo Fisher Scientific) where specified for 10-15 min and imaged on a ChemiDoc imager (BioRad) with optimal exposure settings. Each condition was performed twice for replicability.

### Mammalian Cell Culture and Transfection

[1159] Mammalian cell culture experiments were performed in the HEK293FT line (American Type Culture Collection (ATCC)) grown in Dulbecco's Modified Eagle Medium with high glucose, sodium pyruvate, and GlutaMAX (Thermo Fisher), additionally supplemented with 1× penicillin-streptomycin (Thermo Fisher), 10 mM HEPES (Thermo Fisher), and 10% fetal bovine serum (VWR Seradigm). All cells were maintained at confluency below 80%.

[1160] All transfections were performed with Lipofectamine 2000 (Thermo Fisher). Cells were plated 16-20 hours prior to transfection to ensure 90% confluency at the time of transfection. For 96-well plates, cells were plated at 20,000 cells/well, and for 24-well plates, cells were plated at 100,000 cells/well. For each well on the plate, transfection plasmids were combined with OptiMEM I Reduced Serum Medium (Thermo Fisher) to a total of 25 μL. Separately, 23 μL of OptiMEM was combined with 2 μL of Lipofectamine 2000. Plasmid and Lipofectamine solutions were then combined and pipetted onto cells.

### Mammalian Lysate Cleavage Assays

[1161] Human codon-optimized IscB genes were cloned into a CMV expression backbone by Gibson assembly using 2×Gibson Assembly Master Mix (NEB) to generate pCMV-SV40 NLS-IscB protein-nucleoplasmin NLS-3×HA constructs. 500 ng each protein expression plasmid was transfected in a separate well of a 24-well plate as described. After approximately 48 hours, cells were washed with 500 μL of Dulbecco's phosphate buffered saline (Sigma Aldrich). 50 μL ice-cold lysis buffer (20 mM HEPES 7.5, 100 mM KCl, 5 mM MgCl2, 0.1% Triton-X 100, 5% glycerol, 1 mM DTT, 1×cOmplete Protease Inhibitor Cocktail) was added, then cells were scraped from the plate, transferred to clean tubes and incubated on ice for 15 min. Cells were then sonicated in a cold water bath with amplitude 30 for 4 cycles of 10 s each. Lysate was then cleared by centrifugation at max speed for 20 min and supernatant was collected and either used fresh in assays or snap frozen in liquid nitrogen for later use. Labeled targets and in vitro-transcribed ωRNA was generated as described in “Cell-free transcription/translation cleavage assays” above.

[1162] To perform cleavage assays, 10 μL cell lysate was incubated with 1 μg in vitro-transcribed ωRNA or sgRNA, or no RNA for negative controls, and 100 ng target substrate in 1×NEBuffer 3.1 (NEB). Reactions were incubated at 37° C. for 1 hour, then quenched by adding 10 ug RNase A (Qiagen) and 8 units Proteinase K (NEB) each followed by a 5 min incubation at 37° C. DNA was extracted by PCR purification and run on a 4% Agarose E-gel EX (Thermo Fisher Scientific) as per the manufacturer's instructions and visualized on a ChemiDoc imager (BioRad).

### Expression and Purification of AwaIscB

[1163] The human codon optimized AwaIscB protein was expressed from a pET45b(+) plasmid backbone, with a His14-bdSUMO tag attached to its N-terminus, and a twin-strep tag attached to its C-terminus. Rosetta(DE3)pLysS cells transformed with the expression construct were grown at 37° C. in the terrific broth (TB) medium supplemented with 100 μg/ml ampicillin, and 34 μg/ml chloramphenicol, and shifted to 18° C. at an OD600 of 0.3. Protein production was induced after reaching an OD600 of 0.6-0.8 with 0.2 mM IPTG and continued at 18° C. for 16-18 hours. Cells were harvested by centrifugation and resuspended in lysis buffer (50 mM Tris pH 8, 1 M NaCl, 5% glycerol, 5 mM MgCl₂, 40 mM imidazole, and 5 mM β-mercaptoethanol) supplemented with benzonase (Sigma), and protease inhibitors (PMSF and Roche cOmplete, EDTA-free), and then lysed by two passes with a high-pressure homogenizer (LM20 Microfluidizer, Microfluidics). After clearing the lysate by centrifugation, the soluble fraction was bound to Ni-Sepharose 6 Fast Flow resin (GE Healthcare). The Ni beads were first washed with lysis buffer, then briefly with buffer C (50 mM Tris pH 8, 2 M NaCl, 5% glycerol, 5 mM MgCl₂, 40 mM imidazole, and 5 mM β-mercaptoethanol), and buffer D (50 mM Tris pH 8, 500 mM NaCl, 5% glycerol, 5 mM MgCl₂, 40 mM imidazole, and 5 mM β-mercaptoethanol). The AwaIscB protein was then eluted in elution buffer (buffer D containing 300 mM imidazole) and dialyzed overnight against buffer E (20 mM Tris pH 8, 500 mM NaCl, 5% glycerol, 5 mM MgCl₂, and 0.5 mM TCEP). Following dialysis, the protein was purified through a HiTrap Heparin HP column against a gradient of 0.25-2 M NaCl. Afterwards, peak fractions containing AwaIscB were pooled and dialyzed overnight once against buffer E. Protein was concentrated up to 1.5-2 mg/ml, aliquoted, snap-frozen, and stored at −80° C.

### Sequencing of Cleavage Products

[1164] In vitro cleavage assays were performed as described. Purified reactions were subjected to a GLOE-seq library preparation protocol (Sriramachandran, A. et al. (2020), Mol. Cell. 78, 975-985.e7) as described using 2.5 μM adapter as input to the proximal adapter annealing step. The final amplification to add Illumina adapters and barcodes was performed with NEBNext High Fidelity 2×PCR Master Mix (NEB) with an annealing temperature of 63° C. for 15 s and 12 cycles. Libraries were subjected to paired-end sequencing using an Illumina MiSeq with Read 1 150 cycles, Read 2 150 cycles, Index 1 8 cycles and Index 2 8 cycles. Paired-end reads were mapped to the target substrate using BWA and 3′ ends were extracted and plotted using a custom Python script.

### Enzymatic Footprinting Assay

[1165] dsDNA substrate (191 bp) was produced by PCR amplification from a plasmid containing the target site and the TAM sequence. 10 pmol of dAwaIscB and 40 pmol of ωRNA were incubated in reaction buffer (20 mM HEPES pH 7.5, 50 mM NaCl, 10 mM MgCl2, and 5% glycerol) at 37° C. for 30 min. Then, 0.1 pmol of DNA substrate was added and the reaction was allowed to proceed for another 30 min at 37° C. Next, 500 U of Exonuclease III (NEB) was added, the assay was incubated for an additional 10 min at 37° C. and quenched with 20 mM EDTA. As negative control, another reaction was run in parallel, in which ωRNA was excluded and the volume was replaced with water. After quenching, both reactions were briefly shifted to 50° C. for 5 min, then immediately placed on ice, treated with RNase A (Qiagen), and Proteinase K (NEB), and purified using a PCR cleanup kit (Qiagen). Purified reactions were subjected to a GLOE-seq library preparation protocol (Sriramachandran, A. et al. (2020), Mol. Cell. 78, 975-985.e7) as described using 2.5 μM adapter as input to both the proximal and distal adapter annealing steps. Libraries were amplified as described in the “Sequencing of cleavage products” section above and subjected to paired-end sequencing using an Illumina MiSeq with Read 1 100 cycles, Read 2 100 cycles, Index 1 8 cycles and Index 2 8 cycles. Paired-end reads were mapped to the target substrate using BWA and 3′ ends were extracted and plotted using a custom Python script (Altae-Tran, H. et al. (2021), Zenodo (2021).

### Mammalian Genome Editing

[1166] ωRNA scaffold backbones were cloned into a pUC19-based human U6 expression backbone by Gibson Assembly. For initial testing, 12-guide libraries were cloned in a pool mixing primers to add each of the 12 guides in in a given pool at equimolar ratios, and ωRNA scaffold backbones were subject to whole plasmid amplification with guide primers annealing to the U6 promoter and a second primer annealing to the start of the ωRNA scaffold using Phusion Flash High-Fidelity 2×Master Mix (Thermo Fisher Scientific). PCR products were gel extracted and eluted in 30 μL, then blunt-end ligated to circularize by addition of 5 units T4 PNK (NEB), 200 units T4 DNA Ligase (NEB) and final 1×T4 DNA Ligase Buffer (NEB) and incubation for 1.5 h at room temperature prior to transformation in Stb13 chemically competent E. coli (NEB). For individual guide constructs, oligos with appropriate overhangs were synthesized by Genewiz, annealed and phosphorylated using T4 PNK (NEB) and cloned into ωRNA backbones by restriction-ligation cloning. Protein expression constructs were cloned as described in “Mammalian lysate cleavage assays” above.

[1167] Prior to testing individual guides, each tested IscB protein was screened for activity in HEK293FT using a pool of 12 guides cloned as described. This was done to more rapidly assess many guides for a given protein for a broader survey of possible guides, as Applicants had no prior knowledge of the effect of guide properties such as sequence or genomic location may affect the ability of IscB to generate indels in eukaryotic cells. For this 12-guide pooled initial screening of IscB proteins, 800 ng protein expression construct and 1200 ng of the corresponding guide pool with corresponding ωRNA scaffold were transfected in one well of a 24-well plate as described. After 60-72 hours, genomic DNA was harvested by washing the cells once in 1×DPBS (Sigma Aldrich) and dry trypsinizing cells using TrypLE (Thermo Fisher Scientific). Trypsinized cells were collected in 1 mL 1×DPBS and pelleted by centrifugation at 300×g at 4° C. for 5 min. The supernatant was removed, and cells were resuspended in 50 μL QuickExtract DNA Extraction Solution (Lucigen) and cycled at 65° C. for 15 min, 68° C. for 15 min then 95° C. for 10 min to lyse cells. 2.5 μL of lysed cells were used as input into each PCR reaction. Amplification of each region targeted by a guide in a given guide pool was performed individually. Insertion/deletion (indel) frequency was analyzed using CRISPResso2 (Clement, K. et al. (2019), Nat. Biotechnol. 37, 224-226). Given the low frequency of indel events with IscBs, in order to eliminate noise from PCR and sequencing error, only indels with at least 2 reads or more than 1 base inserted or deleted were counted towards reported indel frequencies. The allele frequency table generated by CRISPResso2 was used for manual verification of indels (i.e. both insertions and deletions occurring, occurrence of insertions and deletions of diverse sizes, not occurring in homonucleotide stretches), to determine if computed indels were due to PCR or sequencing error given that putative detected indels often occurred at frequencies similar to the detection threshold based on the number of cells input used in the experiment and the number of reads obtained from sequencing. Indel quantification results from the 12-guide pools are available in Table 11. Guides with manually verified indels from this pooled screen were assessed individually to validate indel formation as described below.

[1168] For individual guide sequences, 250 ng guide/ωRNA expression plasmid and 125 ng protein expression plasmid were transfected in each of 4 wells as biological replicates in a 96-well plate for each guide condition as described. After 60-72 hours, genomic DNA was harvested by washing the cells once in 1×DPBS (Sigma Aldrich) and adding 50 μL QuickExtract DNA Extraction Solution (Lucigen). Cells were scraped from the plates to suspend in QuickExtract and cycled at 65° C. for 15 min, 68° C. for 15 min then 95° C. for 10 min to lyse cells. 2.5 μL of lysed cells were used as input into each PCR reaction.

[1169] For library amplification, target genomic regions were amplified and with a 12-cycle PCR using NEBNext High Fidelity 2×PCR Master Mix (NEB) with an annealing temperature of 63° C. for 15 s, followed by a second 18-cycle round of PCR to add Illumina adapters and barcodes. The libraries were gel extracted and subject to single-end sequencing on an Illumina MiSeq with Read 1 300 cycles, Index 1 8 cycles, Index 2 8 cycles. Insertion/deletion (indel) frequency was analyzed using CRISPResso2 (Clement, K. et al. (2019), Nat. Biotechnol. 37, 224-226) as described. For individual guide/ωRNA experiments, to assess statistical significance, 2-tailed T-tests were performed using non-targeting guide/ωRNA conditions as a negative control (see Table 11).

### I. Tetrasporus Shotgun Sequencing

[1170] An agar slant of I. tetrasporus UTEX B 2012 was obtained from UTEX inoculated in Modified Bold 3N Medium (UTEX) and grown at 20° C. in a shaking incubator with 12 hour light/dark cycles. After 14 days, cultures were spun down and DNA was extracted using a DNeasy Plant Mini kit (Qiagen). Total DNA was tagmented using Tn5 and tagmentation reactions were quenched by addition of Buffer PB (Qiagen) and PCR purified. 10 μL purified DNA was used as input to PCR using 2×KOD HotStart Master Mix (Millipore Sigma) as per the manufacturer's instructions with an annealing temperature of 60° C. and 30 cycles to add Illumina adapters. Amplified libraries were gel extracted, quantified by qPCR using a KAPA Library Quantification Kit for Illumina (Roche) on a StepOne Plus machine (Applied Biosystems/Thermo Fisher Scientific) and subject to paired-end sequencing on an Illumina NextSeq with Read 1 150 cycles, Read 2 150 cycles, Index 1 8 cycles and Index 2 8 cycles. SPAdes-3.15.2 was used with the “isolate” option and kmer lengths of 21, 33, 55, 67 to create a contig level assembly from the reads (Bankevich, A. et al. (2012), J. Comput. Biol. 19, 455-477). BLASTn was then used to compare the final contigs containing ChlorIscB and IscB fragments with the published UTEX B 2012 chloroplast genome (GenBank accession KY407659.1) (Turmel, M. et al. (2017), Sci. Rep. 7, 994).

### Expression and Purification of TnpB Proteins

[1171] To purify the A. lobatus TnpB-2 protein in complex with the putative ωRNA of its native locus, an N-terminally His14-MBP tagged TnpB CDS and the corresponding downstream locus up to 80 bp beyond the end of predicted guide adaptor were cloned as a single piece downstream of a T7 promoter in a pET45b(+) vector. The AloTnpB-2 RNP was expressed and purified similarly to the CRISPR-associated IscB RNPs with the following modifications: (1) the lysis buffer, and the buffers A and B were supplemented with 40 mM imidazole, and 5 mM β-mercaptoethanol, while MgCl₂ and DTT in all of the buffers were eliminated; (2) the RNP was purified on Ni-Sepharose 6 Fast Flow beads (GE Healthcare) instead of the Strep-Tactin resin; the elution buffer was supplemented with 300 mM imidazole and 5 mM β-mercaptoethanol, while MgCl₂, DTT and desthiobiotin were eliminated; (4) the His14-MBP solubility tag was kept attached to the RNP to provide stability.

[1172] To purify the A. macrosporangiidus TnpB, the native sequence was expressed from a pET45b(+) plasmid backbone, with a His14-MBP tag attached to its N-terminus via a TEV protease cleavage site. The AmaTnpB was expressed and purified similarly to AwaIscB with the following modifications: (1) expression was performed in BL21(DE3) cells (NEB) in the presence of 100 μg/ml ampicillin; (2) MgCl₂ was omitted from buffers C, D and E and the elution buffer; (3) TEV protease was added to the dialysis for solubility tag cleavage; (4) following dialysis, the protein was purified through a Resource S column against a gradient of 0.2-2M NaCl; (5) protein was concentrated up to 5 μM.

### Supplementary Text

### Extended Discussion of Hybrid CRISPR ωRNA and ωRNA Secondary Structure Analysis

[1173] Comparing the CRISPR-associated IscB ncRNA and ωRNA covariance model-based secondary structure predictions (FIG. 9G), Applicants found that all 10 base positions that were more than 97% conserved in the ωRNA were also highly conserved in the CRISPR-associated IscB ncRNA. Both the ωRNA and CRISPR-associated ncRNA contain a short 3-4 bp nexus, a conserved nexus hairpin, and a large region consisting of two interconnected multi-stem loops. The ωRNA additionally contains a hairpin that encompasses a Shine-Dalgarno (SD) sequence located approximately 10 bp upstream of the CDS start codon, implying that the ωRNA might be involved in the regulation of the translation of IscB. A statistically significant pseudoknot structure was predicted to exist in the ωRNA between the loop of one hairpin in the multi-stem loop region and the region directly downstream of the nexus, which Applicants termed the nexus pseudoknot hairpin (FIG. 9G). Examination of individual CRISPR-associated ncRNA sequences suggested the presence of a homologous pseudoknot structure (FIG. 9G inset). Scrambling the sequences found in the pseudoknot of the ncRNA disrupting the structure abolished the cleavage activity of the CRISPR-associated IscB. However, mutating the pseudoknot sequence while maintaining base pairing had no effect on cleavage activity, suggesting that the pseudoknot structure, but not necessarily sequence, was important for ncRNA function (FIG. 47).

[1174] The majority of iscBs are associated with predicted ωRNA scaffolds matching the structure of the covariance model shown in FIG. 15B, but several large groups are not. To explore the diversity of the possible ωRNA scaffolds, Applicants iteratively built a set of profiles that span all major groups of ωRNAs associated with iscBs and isrBs, and found that different iscB/isrB clades were associated with structurally distinct ωRNAs (FIG. 31C). The structures differed by the number of hairpins in the multi-stem loop and guide adaptor regions, but the nexus pseudoknot was present in all major iscB- and isrB-associated ωRNAs. The IsrB ωRNAs additionally contained a second conserved pseudoknot between the guide adapter and a hairpin loop in the multi-stem loop region. Two of the three main IsrB ωRNA structures contained a third hairpin in the multi-stem loop region that forms the pseudoknot with the guide adaptor.

[1175] This guide adaptor pseudoknot was unique to IsrB ωRNAs and appears to have been lost contemporaneously with the insertion of the HNH domain (FIG. 41A-C).

### Extended Phylogenetic Analysis and Discussion

[1176] To assess the robustness of our phylogenetic analyses and interpretations, Applicants describe in this section the additional analyses Applicants performed and the reasoning behind our phylogenetic conclusions.

[1177] To obtain maximally robust trees, Applicants used modified parameters for tree inference software. For all IQ-Tree 2 inferred trees, 5000 ultrafast bootstraps were performed with the bnni option to help reduce the impact of severe model violations on bootstrap support values (Hoang, D. et al. (2018), Mol. Biol. Evol. 35, 518-522).

[1178] Under this option, individual bootstrap trees are optimized using nearest neighbor exchange with hill-climbing on the likelihood function based on the bootstrap alignment. To improve the optimization performance of IQ-Tree 2 relative to default parameters, Applicants used nstop=500 (500 iterations of no improvement before terminating), with ninit=500 (500 initial trees), ntop=100 (100 top trees retained), and nbest=20 (20 best trees retained throughout the search and iteratively improved upon). For RA×ML, Applicants used 2000 rapid bootstraps for each tree to obtain accurate bootstrap values. For MrBayes, Applicants typically used 8-16 chains with a temperature difference between 0.01 and 0.025. Applicants also used 4-8 (resources permitting) independent runs to obtain a better estimate of convergence. Due to the occurrence of numerical overflow in MrBayes when computing likelihoods with a large number of taxa, Applicants employed a reaper script to restart from the last checkpoint when a numerical overflow was detected in any of the chains during the runs.

[1179] Applicants analyzed multiple different alignments to ensure robustness of the phylogenetic conclusions. Focusing the alignments only on the core, highly conserved regions containing the catalytic sites provided for comparison of IscB, IsrB, and Cas9s, proteins that widely differ in size and domain composition. Furthermore, analysis of slowly evolving regions enables phylogenetic inferences to be made over long evolutionary larger timescales that encompass the evolution of entire protein families, such as IscB and Cas9. The presence of multiple decaying, inactivated variants of IscB, IsrB, and Cas9 with high sequence divergence from active forms rendered long branch attraction a potential issue (Lockhart, P. et al. (1996), Proc. Natl. Acad. Sci. U.S.A 93, 1930-1934). Therefore, all inactivated proteins were removed from the RuvC/BH and RuvC/BH/HNH alignments to ensure the phylogeny tracked the evolution of active nucleases with the maximum possible accuracy, avoiding the artifacts caused by mixing active and inactive nucleases that evolve with substantially different rates. The evolution of Cas9 from IscB through the intermediate CRISPR-associated IscB cluster 2089 was supported by all inferred trees, and the evolution of IscB from IsrB is also strongly supported. However, to ensure robustness of these interpretations, Applicants considered numerous phylogenetic parameters, compared Bayesian and maximum likelihood methods, and also assessed the effect of taxa sampling (FIGS. 22, 35C-D, 52-53, 54A-B).

[1180] Next, Applicants tested whether the main assumptions of phylogenetic inference held for the alignments used for our phylogenetic analyses. In some cases, the stationarity condition did not hold for the default alignment, prompting additional modifications to reduce the extent of stationarity violation. The stationarity violations detected for RuvC/BH/HNH alignments were mostly resolved by removing Cas9s of subtype II-B (prompted by the unstable placement of the major II-B Cas9 clade in the phylogenetic trees) and were completely eliminated by removing all Cas9s except for the earliest forms that evolved from IscB. This improvement in the tree quality suggests different evolutionary regimes for the core regions of IscB/IsrB (the RuvC, BH, and HNH domains) are substantially different in IscB/IsrBs and the homologous regions of the late, specialized Cas9s (II-B, II-C, mpA-associated II-C, and the majority of II-A). Such a difference in evolutionary pressures is likely to stem from the shift in biological functionality between Ω systems (IscB/IsrB) and CRISPR-Cas systems (Cas9). Applicants performed additional phylogenetic analyses using these two modified alignments in order to assess the consistency of the inferences. The origin of Cas9 from the IscB cluster 2089 was consistently reproduced in these analyses (FIGS. 32-33, 35, 54A, C, 56).

[1181] Due to the removal of clusters that included inactivated nucleases, some CRISPR-associated IscBs were removed. For experimental characterization, Applicants considered all CRISPR-associated clusters regardless of whether or not they were included in the main phylogenetic analyses. In particular, IscB cluster 34507 contained mostly inactivated variants. Applicants studied IscBs from this cluster experimentally, reasoning that the high level of inactivation implies that the active members of this cluster are likely to have a high level of activity that could render them toxic to the host cell resulting in selection driving inactivation. To determine the likely position of this cluster in the full phylogenetic tree, Applicants performed an additional phylogenetic analysis of full IscB proteins (excluding the C-termini that aligned poorly). Applicants found that the experimentally studied CRISPR associated IscBs belonged to a small clade of CRISPR-associated IscBs that includes 4 non-redundant, CRISPR-associated loci. This analysis also yielded additional information on the relationship between IscB and Cas9. Because the alignment used for this analysis consisted of all IscBs and Cas9_1261 and Cas9_665 (two previously identified early Cas9 clusters from II-D), Applicants were able to construct a MAFFT-einsi alignment that spanned the entire length of these proteins (except for the C-terminal and the PLMP domain that is missing in Cas9). The phylogenetic analysis based on this alignment incorporated information from all homologous regions of IscB and Cas9 rather than the core region only. Clusters lacking coverage to any of the catalytic domains were removed; however, clusters including inactive nucleases were retained in the analysis. Positions in the alignment with more than 75% gaps were removed, and the tree was inferred using IQ-Tree 2 with the modified parameters described above. The exclusion of additional Cas9s in this analysis could potentially skew the placement of the Cas9 family. Nevertheless, the resulting tree supported CRISPR-associated IscB cluster 2089 as the ancestor of Cas9 (FIG. 56).

[1182] Phylogenetic symmetry tests showed that the main RuvC/BH/HNH alignment that included all Cas9s and IscBs likely violated the stationarity condition used by most phylogenetic methods (SRH conditions). Similarly, phylogenetic symmetry tests show that the high resolution (individual proteins as opposed to cluster representatives) codon DNA sequence alignment of early cas9s also likely violates the stationarity condition. Applicants considered a number of methods to assess the validity of the phylogenetic trees inferred using these alignments. For the early Cas9 tree, Applicants compared the tree inferred from the amino acid sequence (IQ-Tree 2, WAG+F+I+G4 model) (FIG. 32A) to the tree inferred from the underlying DNA codon sequences (GTR+G4) (FIG. 33A). The two trees were closely congruent with respect to the transition from IscB to Cas9 although despite the DNA tree inference only involved the simple GTR substitution model that does not take codon level information into account (FIGS. 32A, 33A).

[1183] To assess the generalizability of the phylogenetic conclusions, in addition to bootstrap analyses in all ML trees, Applicants also performed a sensitivity analysis of the RuvC/BH/HNH phylogenetic inferences. Specifically, Applicants considered the effect of random exclusion of taxa. To this end, Applicants explored a range of taxa dropout rates. For each dropout rate, r, Applicants selected 1000/(1−r) alignments with r taxa randomly dropped out. Because Applicants were interested predominantly in the topology surrounding early Cas9 evolution, Applicants ensured that IscB cluster 2089 (putative Cas9 modern ancestor) and early Cas9 clusters (Cas9_1261, Cas9_665, Cas9_1079, Cas9_849) were retained in every alignment. Applicants then obtained inference for each of these taxon subsampled alignments. All trees were rooted on the clade of IscBs considered to be ancestral, that is evolved from IsrB, as inferred from the RuvC/BH tree. Next, various features (such as percentage of trees where Cas9 is monophyletic) were summarized across all trees for each dropout rate (FIG. 35). Error bars (95% confidence intervals) for the estimates were computed using 2000 bootstraps over the tree samples. Due to the computationally intense nature of ML inference for alignments with many taxa, Applicants limited this dropout analysis to FastTree2 (as opposed to IQ-Tree 2) based phylogenetic inference. The results of this analysis supported that Cas9_1261, Cas9_665 were the oldest Cas9 groups, and that all Cas9s likely originated from the ancestors of these two clusters. Moreover, the tree supported that even with taxon dropout rates of up to 50%, most of the resulting trees supported the CRISPR-associated IscB cluster 2089 as the ancestor to all extant Cas9s.

[1184] Applicants next considered whether or not the coarse graining of proteins (specifically the use of cluster representatives), as opposed to including all non-redundant sequences (at 90% redundancy), affected the phylogenetic inference. Applicants curated two “high resolution” alignments consisting of all non-redundant proteins of interest (Cas9/IscB) from clusters related to the early evolution of Cas9. One version of this alignment consisted of full protein alignments (using MAFFT-einsi) with the REC domains and PLMP domains removed. Positions with 75% or more gaps were removed. Another alignment consisted of translation aligned DNA codons for the ORFs, again removing REC domains and PLMP domains. Highly gapped codons triplet positions (sets of 3 positions) were removed using BMGE (Criscuolo, A. et al. (2010), BMC Evol. Biol. 10, 210). The resulting alignments were analyzed using IQ-Tree 2 and MrBayes. As the DNA alignment suffered from severe violation of the stationarity requirement for phylogenetic analysis, Applicants considered further using heterotachy models to account for changing modes of evolution throughout the underlying evolutionary tree. Adding a heterotachy-aware model did not change the inferred sequence of events in the evolution of early Cas9 from IscB (FIG. 33B). Phylogenetic analyses of the DNA sequences were agnostic to codons. Nevertheless, the two sets of alignments produced closely similar topologies for early events in Cas9 evolution. These topologies further agreed with previously identified topologies inferred using coarse grained clusters, suggesting that clustering was not detrimental to the inference of phylogenies.

[1185] Comparison of IscB/IsrB ωRNA phylogeny to the protein phylogenies can be useful for identifying co-evolution, and potentially could provide more information regarding the ancestry of Cas9. However, the structural motifs differed across the diversity of ωRNAs. Therefore, the main large-scale phylogenetic analysis across IscB/IsrB ωRNAs used a non-structured nucleotide alignment of representative ωRNAs that was produced using MAFFT-ginsi. Because the nexus pseudoknot is conserved in almost all ωRNAs, greater emphasis was given to this region by removing all sequences with low coverage to the nexus pseudoknot. An IQ-Tree 2 ML inference showed that IscB ωRNAs are a deep branch in the tree of ωRNAs, suggesting that IscB ωRNAs evolved on a single occasion from IsrB ωRNAs (FIG. 55A). Due to the high diversity of ωRNAs, the early Cas9_1261 and Cas9_665 tracrRNAs could not be included in the analysis for accurate placement because as the alignment across all RNAs failed to capture sufficient global sequence conservation. CMsearch of two tracrRNAs from early Cas9s (Cas9_1261 and Cas9_665) yielded significant hits to the G1a ωRNA profile (E-values 3.7e-8, 4.1e-8 respectively), suggesting that at least part of the tracrRNA in early Cas9 systems originated from the IscB ωRNA (FIG. 36). The likely evolutionary link between ωRNAs and tracrRNAs further suggests that Cas9 evolved from IscB. To further address the question of whether or not early Cas9 tracrRNAs were derived from ωRNAs, Applicants constructed an accurate MAFFT-ginsi alignment of the early Cas9 tracrRNAs along with 25 closely related IscB ωRNAs, including the hybrid CRISPR/ωRNA from IscB cluster 2089. To account for the discrepancy between tracrRNAs and ωRNAs, Applicants concatenated the DR of the corresponding CRISPRs to the tracrRNA with a 4 bp poly-A tetraloop joining the two. Applicants performed a Bayesian phylogenetic analysis to address potential issues with the smaller number of taxa in this analysis. Applicants found that the combined DR/tracrRNAs likely evolved from IscB (2089) like ωRNAs, with high posterior probability (branch posterior 89%±1%, FIG. 55C). This result further suggests that all Cas9s evolved from the CRISPR-associated IscB cluster 2089.

[1186] Additional evidence from protein or RNA alignment comparisons were also useful in identifying the most likely ancestor of Cas9. On the sequence level, the Cas9_1261 and Cas9_665 representative sequences are more similar to the IscB cluster 2089 representative sequence in the split RuvC and HNH domains compared to other example IscBs (FIG. 35). Moreover, the N-terminus of Cas9_1261 potentially contains fragments of the PLMP domain that is characteristic of IscB, suggesting that the PLMP domain gradually degraded during the transition to Cas9. Lastly, the 5′ end of the DRs from CRISPR-associated IscB cluster 2089 is closely similar to the 5′-terminal sequences of the DRs from Cas9_1261 and Cas9_665, suggesting further homology. All of these observations, in addition to the phylogenetic analyses, strongly suggest that CRISPR-associated IscB cluster 2089 is the ancestor of the earliest Cas9s. Accordingly, the sequence of events in the evolution of Cas9 was, first, the association of CRISPR arrays with IscB, either through duplication of the 5′ of the ωRNA or by insertion of the ωRNA into a CRISPR array. Then, REC-like sequences were inserted between the BH and RuvC-II, or possibly inside the BH, splitting it into two domains, the second of which remains in some early Cas9s. Then, the PLMP domain degraded from the lengthened IscB protein becoming Cas9, which subsequently became associated with the CRISPR adaptation module. Given the rarity of the early Cas9s, such as Subtype II-D, compared to IscB and other Cas9 subtypes, it appears likely that these systems containing small, simply organized Cas9s were outcompeted by the subsequently evolved, more efficient, larger Cas9s. From our phylogenetic analyses, the most likely candidate set of adaptation genes that became associated with Cas9 at first included Cas1, Cas2, and Cas4 genes. The association with Cas4 was then likely lost, forming Type II-C Cas9s, which subsequently gained additional associations to become II-A (associated with Csn2), II-B (re-association with Cas4), and tnpA-associated II-C (re-associated with Y1 recombinases).

### Extended Discussion of Potential Biological Functions of IS200/605 Endonucleases.

[1187] The biological functions of Ω systems remain unknown, but several hypotheses appear to be compatible with available evidence.

[1188] First, IscB, IsrB, and TnpB could mediate RNA-guided TnpA-catalyzed transposition while suppressing transposition independent of ωRNA. Our phylogenomic analysis together with previous observations (Kapitonov, V. et al. (2015), J. Bacteriol. 198, 797-807) indicate that iscB, isrB, and a subfamily of cas9 have all associated with the Y1 transposase mpA of IS200/IS605 transposons on multiple, independent occasions (FIG. 31A) (Kapitonov, V. et al. (2015), J. Bacteriol. 198, 797-807). Moreover, the iscB, isrB and tnpB genes themselves are embedded in non-autonomous transposons of the IS200/IS605 superfamily. Integration events of ωRNA-containing transposons have been observed in locations with an ATGA or GTGA 3′ flanking sequences (Weinberg, Z. (2009), Nature 462, 656-659), which is a common TAM sequence for IscB proteins (FIG. 48). Many IscB TAMs contain start and stop codons, such that IscB targeting could mediate transposon insertion at the beginning or end of operons, allowing the transposon to exploit existing transcription initiation and termination signals. Together, these observations suggest the possibility that IscB, IsrB and TnpB are functionally analogous to CRISPR-associated transposases (CAST complexes) (Strecker, J. et al. (2019), Science 365, 48-53; Klompe, S. et al. (2019), Nature 571, 219-225), which mediate RNA-guided transposition of Tn7-like transposons. However, in contrast to CAST effectors such as Cas12k, an inactivated TnpB derivative (Strecker, J. et al. (2019), Science 365, 48-53), the great majority of IscB, IsrB and TnpB are predicted to be active nucleases. The role of the nuclease activity of these proteins in RNA-guided transposition (if any) remains to be studied experimentally. One possibility is that these nucleases eliminate aberrant DNA structures emerging upon RNA-guided transposon insertion.

[1189] An orthogonal hypothesis is that these nucleases, together with the ωRNA, are a distinct variety of toxins, to which TnpA is the antitoxin. Such toxins would kill cells lacking the inserted IS200/605 locus, thus making the host addicted to the IS200/605 transposase and ensuring that the non-autonomous transposons encoding IscB/TnpB also maintain their transposition capacity.

[1190] In addition to its direct role in transposition, TnpA might function to acquire guides for 22 systems, analogously to the Cas1 protein that is thought to have evolved from the transposase of the casposons, a distinct class of self-synthesizing transposons (Krupovic, M. et al. (2014), BMC Biol. 12, 1-12). The high sequence identity between the ωRNA transposon end-overlapping regions in both iscB and tnpB loci in K. racemifer suggests that, at least in this bacterium, some IscBs and TnpBs share a mechanism for acquiring guide sequences. More generally, loci encoding complete Ω systems or standalone ωRNAs could be mobilized and moved to new locations by TnpA, thereby associating with new, diverse flanking sequences that become guides.

### References for Extended Discussion of Supplemental Materials

[1191] 1. F. Zhang, Development of CRISPR-Cas systems for genome editing and beyond. Quarterly Reviews of Biophysics. 52(2019).
[1192] 2. F. Hille, H. Richter, S. P. Wong, M. Bratovič, S. Ressel, E. Charpentier, The biology of CRISPR-Cas: Backward and forward. Cell. 172, 1239-1259(2018).
[1193] 3. V. V. Kapitonov, K. S. Makarova, E. V. Koonin, ISC, a novel group of bacterial and Archaeal DNA transposons that encode Cas9 homologs. J. Bacteriol. 198, 797-807 (2015).
[1194] 4. P. Siguier, E. Gourbeyre, M. Chandler, Bacterial insertion sequences: their genomic impact and diversity. FEMS Microbiol. Rev. 38, 865-891(2014).
[1195] 5. S. Shmakov, A. Smargon, D. Scott, D. Cox, N. Pyzocha, W. Yan, O. O. Abudayyeh, J. S. Gootenberg, K. S. Makarova, Y. I. Wolf, K. Severinov, F. Zhang, E. V. Koonin, Diversity and evolution of class 2 CRISPR-Cas systems. Nat. Rev. Microbiol. 15, 169-182(2017).
[1196] 6. B. Zetsche, J. S. Gootenberg, O. O. Abudayyeh, I. M. Slaymaker, K. S. Makarova, P. Essletzbichler, S. E. Volz, J. Joung, J. van der Oost, A. Regev, E. V. Koonin, F. Zhang, Cpf1 is a single RNA-guided endonuclease of a class 2 CRISPR-Cas system. Cell. 163, 759-771(2015).
[1197] 7. E. Deltcheva, K. Chylinski, C. M. Sharma, K. Gonzales, Y. Chao, Z. A. Pirzada, M. R. Eckert, J. Vogel, E. Charpentier, CRISPR RNA maturation by trans-encoded small RNA and host factor RNase III. Nature. 471, 602-607(2011).
[1198] 8. I. Kalvari, E. P. Nawrocki, N. Ontiveros-Palacios, J. Argasinska, K. Lamkiewicz, M. Marz, S. Griffiths-Jones, C. Toffano-Nioche, D. Gautheret, Z. Weinberg, E. Rivas, S. R. Eddy, R. D. Finn, A. Bateman, A. I. Petrov, Rfam 14: expanded coverage of metagenomic, viral and microRNA families. Nucleic Acids Res. 49, D192-D200(2021).
[1199] 9. Z. Weinberg, J. Perreault, M. M. Meyer, R. R. Breaker, Exceptional structured noncoding RNAs revealed by bacterial metagenome analysis. Nature. 462, 656-659 (2009).
[1200] 10. M. Jinek, K. Chylinski, I. Fonfara, M. Hauer, J. A. Doudna, E. Charpentier, A programmable dual-RNA-guided DNA endonuclease in adaptive bacterial immunity. Science. 337, 816-821(2012).
[1201] 11. G. Gasiunas, R. Barrangou, P. Horvath, V. Siksnys, Cas9-crRNA ribonucleoprotein complex mediates specific DNA cleavage for adaptive immunity in bacteria. Proc. Natl. Acad. Sci. U.S.A 109, E2579-86(2012).
[1202] 12. G. Gasiunas, J. K. Young, T. Karvelis, D. Kazlauskas, T. Urbaitis, M. Jasnauskaite, M. M. Grusyte, S. Paulraj, P.-H. Wang, Z. Hou, S. K. Dooley, M. Cigan, C. Alarcon, N. D. Chilcoat, G. Bigelyte, J. L. Curcuru, M. Mabuchi, Z. Sun, R. T. Fuchs, E. Schildkraut, P. R. Weigele, W. E. Jack, G. B. Robb, Č. Venclovas, V. Siksnys, A catalogue of biochemically diverse CRISPR-Cas9 orthologs. Nat. Commun. 11, 5512(2020).
[1203] 13. M. Jinek, F. Jiang, D. W. Taylor, S. H. Sternberg, E. Kaya, E. Ma, C. Anders, M. Hauer, K. Zhou, S. Lin, M. Kaplan, A. T. Iavarone, E. Charpentier, E. Nogales, J. A. Doudna, Structures of Cas9 endonucleases reveal RNA-mediated conformational activation. Science. 343, 1247997(2014).
[1204] 14. B. Q. Minh, H. A. Schmidt, O. Chernomor, D. Schrempf, M. D. Woodhams, A. von Haeseler, R. Lanfear, IQ-TREE 2: New Models and Efficient Methods for Phylogenetic Inference in the Genomic Era. Mol. Biol. Evol. 37, 1530-1534(2020).
[1205] 15. K. S. Makarova, Y. I. Wolf, J. Iranzo, S. A. Shmakov, O. S. Alkhnbashi, S. J. J. Brouns, E. Charpentier, D. Cheng, D. H. Haft, P. Horvath, S. Moineau, F. J. M. Mojica, D. Scott, S. A. Shah, V. Siksnys, M. P. Terns, Č. Venclovas, M. F. White, A. F. Yakunin, W. Yan, F. Zhang, R. A. Garrett, R. Backofen, J. van der Oost, R. Barrangou, E. V. Koonin, Evolutionary classification of CRISPR-Cas systems: a burst of class 2 and derived variants. Nat. Rev. Microbiol. 18, 67-83(2020).
[1206] 16. K. A. Majorek, S. Dunin-Horkawicz, K. Steczkiewicz, A. Muszewska, M. Nowotny, K. Ginalski, J. M. Bujnicki, The RNase H-like superfamily: new members, comparative structural analysis and evolutionary classification. Nucleic Acids Res. 42, 4160-4179 (2014).
[1207] 17. H. Nishimasu, F. A. Ran, P. D. Hsu, S. Konermann, S. I. Shehata, N. Dohmae, R. Ishitani, F. Zhang, O. Nureki, Crystal structure of Cas9 in complex with guide RNA and target DNA. Cell. 156, 935-949(2014).
[1208] 18. W. Bao, J. Jurka, Homologues of bacterial TnpB_IS605 are widespread in diverse eukaryotic transposable elements. Mob. DNA. 4, 12(2013).
[1209] 19. J. V. Gomes-Filho, L. S. Zaramela, V. C. da S. Italiani, N. S. Baliga, R. Z. N. Vêncio, T. Koide, Sense overlapping transcripts in IS1341-type transposase genes are functional non-coding RNAs in archaea. RNA Biol. 12, 490-500(2015).
[1210] 20. Z. Weinberg, C. E. Lunse, K. A. Corbino, T. D. Ames, J. W. Nelson, A. Roth, K. R. Perkins, M. E. Sherlock, R. R. Breaker, Detection of 224 candidate structured RNAs by comparative analysis of specific subsets of intergenic regions. Nucleic Acids Res. 45, 10811-10823(2017).
[1211] 21. A. Hüttenhofer, P. Schattner, The principles of guiding by RNA: chimeric RNA-protein enzymes. Nat. Rev. Genet. 7, 475-482(2006).
[1212] 22. A. Schneider, A short history of guide RNAs: The intricate path that led to the discovery of a basic biological concept. EMBO Rep. 21, e51918(2020).
[1213] 23. E. V. Koonin, Evolution of RNA- and DNA-guided antivirus defense systems in prokaryotes and eukaryotes: common ancestry vs convergence. Biol. Direct. 12(2017).
[1214] 24. H. Altae-Tran, S. Kannan, F. Zhang, Code and processed data for: The widespread IS200/605 transposon family encodes diverse programmable RNA-guided endonucleases, Version 1.0, Zenodo (2021); <link to be inserted after official acceptance of manuscript>.
[1215] 25. C. Camacho, G. Coulouris, V. Avagyan, N. Ma, J. Papadopoulos, K. Bealer, T. L. Madden, BLAST+: architecture and applications. BMC Bioinformatics. 10, 421(2009).
[1216] 26. K. Katoh, D. M. Standley, MAFFT multiple sequence alignment software version 7: improvements in performance and usability. Mol. Biol. Evol. 30, 772-780(2013).
[1217] 27. M. Steinegger, J. Söding, MMseqs2 enables sensitive protein sequence searching for the analysis of massive data sets. Nat. Biotechnol. 35, 1026-1028(2017).
[1218] 28. M. Steinegger, M. Meier, M. Mirdita, H. Vöhringer, S. J. Haunsberger, J. Söding, HH-suite3 for fast remote homology detection and deep protein annotation. BMC Bioinformatics. 20, 473(2019).
[1219] 29. S. R. Eddy, Accelerated Profile HMM Searches. PLoS Comput. Biol. 7, e1002195 (2011).
[1220] 30. S. A. Shmakov, K. S. Makarova, Y. I. Wolf, K. V. Severinov, E. V. Koonin, Systematic prediction of genes functionally linked to CRISPR-Cas systems by gene neighborhood analysis. Proc. Natl. Acad. Sci. U.S.A 115, E5307-E5316(2018).
[1221] 31. A. B. Crawley, J. R. Henriksen, R. Barrangou, CRISPRdisco: An Automated Pipeline for the Discovery and Analysis of CRISPR-Cas Systems. CRISPR J. 1, 171-181(2018).
[1222] 32. D. H. Haft, B. J. Loftus, D. L. Richardson, F. Yang, J. A. Eisen, I. T. Paulsen, O. White, TIGRFAMs: a protein family resource for the functional identification of proteins. Nucleic Acids Res. 29, 41-43(2001).
[1223] 33. A. Delcher, Improved microbial gene identification with GLIMMER. Nucleic Acids Research. 27(1999), pp. 4636-4641.
[1224] 34. S. Naser-Khdour, B. Q. Minh, W. Zhang, E. A. Stone, R. Lanfear, The Prevalence and Impact of Model Violations in Phylogenetic Analysis. Genome Biol. Evol. 11, 3341-3352(2019).
[1225] 35. S. Kalyaanamoorthy, B. Q. Minh, T. K. F. Wong, A. von Haeseler, L. S. Jermiin, ModelFinder: fast model selection for accurate phylogenetic estimates. Nat. Methods. 14, 587-589(2017).
[1226] 36. M. N. Price, P. S. Dehal, A. P. Arkin, FastTree 2—approximately maximum-likelihood trees for large alignments. PLoS One. 5, e9490(2010).
[1227] 37. G. Altekar, S. Dwarkadas, J. P. Huelsenbeck, F. Ronquist, Parallel Metropolis coupled Markov chain Monte Carlo for Bayesian phylogenetic inference. Bioinformatics. 20, 407-415(2004).
[1228] 38. A. Stamatakis, RAXML version 8: a tool for phylogenetic analysis and post-analysis of large phylogenies. Bioinformatics. 30, 1312-1313(2014).
[1229] 39. R. Lorenz, S. H. Bernhart, C. H. zu Siederdissen, H. Tafer, C. Flamm, P. F. Stadler, I. L. Hofacker, ViennaRNA Package 2.0. Algorithms Mol. Biol. 6, 1-14(2011).
[1230] 40. E. Rivas, J. Clements, S. R. Eddy, A statistical test for conserved RNA structure shows lack of evidence for structure in lncRNAs. Nat. Methods. 14, 45-48(2017).
[1231] 41. E. P. Nawrocki, S. R. Eddy, Infernal 1.1:100-fold faster RNA homology searches. Bioinformatics. 29, 2933-2935(2013).
[1232] 42. Z. Weinberg, R. R. Breaker, R2R—software to speed the depiction of aesthetic consensus RNA secondary structures. BMC Bioinformatics. 12, 3(2011).
[1233] 43. J. Mistry, S. Chuguransky, L. Williams, M. Qureshi, G. A. Salazar, E. L. L. Sonnhammer, S. C. E. Tosatto, L. Paladin, S. Raj, L. J. Richardson, R. D. Finn, A. Bateman, Pfam: The protein families database in 2021. Nucleic Acids Res. 49, D412-D419(2021).
[1234] 44. C. Bland, T. L. Ramsey, F. Sabree, M. Lowe, K. Brown, N. C. Kyrpides, P. Hugenholtz, CRISPR recognition tool (CRT): a tool for automatic detection of clustered regularly interspaced palindromic repeats. BMC Bioinformatics. 8, 209(2007).
[1235] 45. F. Asnicar, G. Weingart, T. L. Tickle, C. Huttenhower, N. Segata, Compact graphical representation of phylogenetic data and metadata with GraPhlAn. PeerJ. 3, e1029 (2015).
[1236] 46. L. Maaten, G. Hinton, Visualizing Data using t-SNE. Journal of machine learning research. 9, 2579-2605(2008).
[1237] 47. P. G. Poličar, M. Stražar, B. Zupan, Embedding to reference t-SNE space addresses batch effects in single-cell classification. bioRxiv (2019),, doi: 10.1101/671404.
[1238] 48. P. J. Rousseeuw, Silhouettes: A graphical aid to the interpretation and validation of cluster analysis. J. Comput. Appl. Math. 20, 53-65(1987).
[1239] 49. R. J. G. B. Campello, D. Moulavi, J. Sander, in Advances in Knowledge Discovery and Data Mining (Springer Berlin Heidelberg, Berlin, Heidelberg, 2013), Lecture notes in computer science, pp. 160-172.
[1240] 50. D. H. Parks, M. Imelfort, C. T. Skennerton, P. Hugenholtz, G. W. Tyson, CheckM: assessing the quality of microbial genomes recovered from isolates, single cells, and metagenomes. Genome Res. 25, 1043-1055(2015).
[1241] 51. P.-A. Chaumeil, A. J. Mussig, P. Hugenholtz, D. H. Parks, GTDB-Tk: a toolkit to classify genomes with the Genome Taxonomy Database. Bioinformatics (2019), doi: 10.1093/bioinformatics/btz848.
[1242] 52. S. Frey, D. Görlich, A new set of highly efficient, tag-cleaving proteases for purifying recombinant proteins. J. Chromatogr. A. 1337, 95-105(2014).
[1243] 53. M. Martin, Cutadapt removes adapter sequences from high-throughput sequencing reads. EMBnet.journal. 17, 10-12(2011).
[1244] 54. B. Langmead, S. L. Salzberg, Fast gapped-read alignment with Bowtie 2. Nat. Methods. 9, 357-359(2012).
[1245] 55. A. M. Sriramachandran, G. Petrosino, M. Méndez-Lago, A. J. Schäfer, L. S. Batista-Nascimento, N. Zilio, H. D. Ulrich, Genome-wide Nucleotide-Resolution Mapping of DNA Replication Patterns, Single-Strand Breaks, and Lesions by GLOE-Seq. Mol. Cell. 78, 975-985.e7(2020).
[1246] 56. K. Clement, H. Rees, M. C. Canver, J. M. Gehrke, R. Farouni, J. Y. Hsu, M. A. Cole, D. R. Liu, J. K. Joung, D. E. Bauer, L. Pinello, CRISPResso2 provides accurate and rapid genome editing sequence analysis. Nat. Biotechnol. 37, 224-226(2019).
[1247] 57. A. Bankevich, S. Nurk, D. Antipov, A. A. Gurevich, M. Dvorkin, A. S. Kulikov, V. M. Lesin, S. I. Nikolenko, S. Pham, A. D. Prjibelski, A. V. Pyshkin, A. V. Sirotkin, N. Vyahhi, G. Tesler, M. A. Alekseyev, P. A. Pevzner, SPAdes: a new genome assembly algorithm and its applications to single-cell sequencing. J. Comput. Biol. 19, 455-477(2012).
[1248] 58. M. Turmel, C. Otis, C. Lemieux, Divergent copies of the large inverted repeat in the chloroplast genomes of ulvophycean green algae. Sci. Rep. 7, 994(2017).
[1249] 59. D. T. Hoang, O. Chernomor, A. von Haeseler, B. Q. Minh, L. S. Vinh, UFBoot2: Improving the Ultrafast Bootstrap Approximation. Mol. Biol. Evol. 35, 518-522(2018).
[1250] 60. P. J. Lockhart, A. W. Larkum, M. Steel, P. J. Waddell, D. Penny, Evolution of chlorophyll and bacteriochlorophyll: the problem of invariant sites in sequence analysis. Proc. Natl. Acad. Sci. U.S.A 93, 1930-1934(1996).
[1251] 61. A. Criscuolo, S. Gribaldo, BMGE (Block Mapping and Gathering with Entropy): a new software for selection of phylogenetic informative regions from multiple sequence alignments. BMC Evol. Biol. 10, 210(2010).
[1252] 62. J. Strecker, A. Ladha, Z. Gardner, J. L. Schmid-Burgk, K. S. Makarova, E. V. Koonin, F. Zhang, RNA-guided DNA insertion with CRISPR-associated transposases. Science. 365, 48-53(2019).
[1253] 63. S. E. Klompe, P. L. H. Vo, T. S. Halpin-Healy, S. H. Sternberg, Transposon-encoded CRISPR-Cas systems direct RNA-guided DNA integration. Nature. 571, 219-225 (2019).
[1254] 64. M. Krupovic, K. S. Makarova, P. Forterre, D. Prangishvili, E. V. Koonin, Casposons: a new superfamily of self-synthesizing DNA transposons at the origin of prokaryotic CRISPR-Cas immunity. BMC Biol. 12, 1-12(2014).
[1255] 65. S. M. Crotty, B. Q. Minh, N. G. Bean, B. R. Holland, J. Tuke, L. S. Jermiin, A. V. Haeseler, GHOST: Recovering Historical Signal from Heterotachously Evolved Sequence Alignments. Syst. Biol. 69, 249-264(2020).

[1256] Various modifications and variations of the described methods, pharmaceutical compositions, and kits of the invention will be apparent to those skilled in the art without departing from the scope and spirit of the invention. Although the invention has been described in connection with specific embodiments, it will be understood that it is capable of further modifications and that the invention as claimed should not be unduly limited to such specific embodiments. Indeed, various modifications of the described modes for carrying out the invention that are obvious to those skilled in the art are intended to be within the scope of the invention. This application is intended to cover any variations, uses, or adaptations of the invention following, in general, the principles of the invention and including such departures from the present disclosure come within known customary practice within the art to which the invention pertains and may be applied to the essential features herein before set forth.

LENGTHY TABLES
The patent application contains a lengthy table section. A copy of the table is available in electronic form from the USPTO web site (https://seqdata.uspto.gov/docdetail?docId=US20260117211A1). An electronic copy of the table will also be available from the USPTO upon request and payment of the fee set forth in 37 CFR 1.19(b)(3).

The application's sequence listing, which the Patent Office published only in electronic form, follows.

SEQUENCE LISTING (25200 sequences)

SEQ ID NO: 1 - DNA, 12 bp, synthetic construct
  misc_feature 1..12: note = Synthetic
  source 1..12: mol_type = other DNA
acttgtttaagt

SEQ ID NO: 2 - skipped

SEQ ID NO: 3 - protein, 383 aa, Actinoplanes lobatus
MKLVVQVKLQPTAEQASMLEATLRACNTAANEVAQVARRARVYRNYDLRKHVYAGIKADHRLGSQAAQHVIKKVCDAYKTLTSNLRAGNYGPPDAKRYRRVSTEPVRFRWQAAQPYDARMLSWQHDARTVSIWTVAGRMKNIAYTGSPDQLKAVAELPVGECDLVHRDGMWLLYATVEIAEATPVEPAGFLGVDLGIVQIATDSDGTVYAGEQLNRYRRRQIRLRAKLQAKKTESARRLLVKRARRESRHATNVNHVISKSIVAEAERTSRGIAVEDLTGIRARVRLRKPQRAALHSWSFAQLGGFLTYKARRAGIPLVQVDPRYTSQTCSACGHRDKRNRPDQATFICRSCGVVAHADVNAAVNIAARGVDVWGAVSRPYVA

SEQ ID NO: 4 - DNA, 600 bp, unidentified
  misc_feature 1..600: note = Ga0207030_1011 JGI
  source 1..600: mol_type = other DNA
atgtctgtttttgtgttagacaaaaagaaaaacccattaatgccatgttctgaaaagcgtgcgcggctattgctacaacgtgggcgtgcagttgtcattcgagtgtatccatttaccattcgtttgaaagatcgagtgggcggtgaaacacaggatttacgtttaggcattgatcccaggagtaaaacaacagggttaatgctcgcgcgggagtgtgagaaaattgattcagagagcggcgaaattaagcgaactcgcttaacagcgcggggtttccctcgcggatatttgctgcgtaaaaaatctgttaatggatttcaaacaggagacatggttattgctgatataccaaaaggggttaaaagtggcgtacatgttgggagagtggcaatacgttcatctggttattttaatattcaatcgacaaaaaatgttatccaaggtgtatcacatcgtcactgcaaaatgatgcagcgagctgatggatatggttattcaattgtagcgcaacaaaaagaggtaagtgggaatttggggcacgcttcgcgcgccgcgctatccatccccggcatgaatgctgaggtttcccgcgcaatttga

SEQ ID NO: 5 - DNA, 303 bp, unidentified
  misc_feature 1..303: note = Ga0207030_1011 JGI
  source 1..303: mol_type = other DNA
gtcaatcaccccgccctaaaggacggagcttgtaaagcataagccaaacaagcttgaggttgaccagggaaagcggtaaccaacccgctaagttgtaaacaggtacaagacccaccagcgaatgcttcctcagttcgctgctctggaagttgcagatgcagacaaggttcgggtaactacgaaacggtctgtgactaggtagacatactgaaggccggtttacaacattcccgaggggagatacaccgcaaggtgtgcgtcacaagacccgtaagggtattttttaggaaaatggttatgtct

SEQ ID NO: 6 - DNA, 771 bp, Moorena sp.
  source 1..771: mol_type = other DNA
atgcgagtttttgtacttgataaaaacaaaaaaccattagacccatgccagcctgctagagctagaatcttgctcaaacaaggaagggctaaggtctttaggagatacccgttcacaatcatcatatgcgatttggaggaattggaatgtgtgacacataatcatcagatcaaacttgaccctggttctcaaacaacaggtttagcaattgttcaagaaaaggtggttgtttggggtgcggaactaacccacagaggtcttcaaattcgagatggtttaacctcacgtagaaagttgagaagttctcgtagaaaccgcaaaactcgttatcgacagccacggtttcttaaccgtaaacgtcctgatgggtggttagctcccagtctaatgtcgagagttcataatattctcacatgggtaaaaaaacttactcgattttgtccgataactggcatttctcaggaattagttaggttcgatactcagaagatggaaaaccctgaaatttctggaacagagtatcagcagggcacactctacggatatgaagttagagaatatctactttccaaatggaatcgtaaatgtgcttactgtggtgtgactgatactcaactagaggtcgaacacatcaaacctaaatcaaagggcggttctgaccgagtaagtaacctagcaagtgaggtatggttccagtgtatgagtgaaggagtcaactatcccgttactgatttggtgtcgtggcagggaaaaagttactgtggggtctag

SEQ ID NO: 7 - DNA, 265 bp, Moorena sp.
  source 1..265: mol_type = other DNA
gtcaggagcctgggagtagcaaaccccacggataaatccgggggcttgtgaatcattacctgaccagcccaagtcccatcagggactacgttatcagcaagagttaaagttcctaccttgaaatgcgacgctagtttcaagctctagaaccggattgttaaacatctttatcaggttaaggaagtgcaacgcgcgaaagtaccgactgataacattggcgcagcgaactttaccctagcaataggagaatactcacattatgcga

SEQ ID NO: 8 - DNA, 1554 bp, unidentified
  misc_feature 1..1554: note = contig_4171967 MG-RAST
  source 1..1554: mol_type = other DNA
gtgatctggatagctgtatcgaagctatggaattgtaataccacagggaagtgctttacaggcggtgccctgtggaacaagggaagatttttggaaaggaggcatcggcagatgctcatatacatcatagacgcatcaggaaaaccgctgatgccgactgaaagaaaaggacatattaagagacttttgaatcgtggcaaggcacgaattgtcactaaggtgccattcacggtacagctgaaatatgagacaccaggcatcacacagccgttatacggcgggactgatcccggtagaacaaacctcggggaagctgtgattgatgaaaatggtactgtgatatataaatcacatgtcgaaacacgaagcaaagatatccctaagctaatgtctgagagaaaacagcacaggcaggcgtcccgcaggggagaacgtctgagaaagaaacggcgtgctgcgaaatgcggtacaactaaagtatttactgaaggacgcacgataccaggatgcgaaaaacccgtcatgatgaaggatatcatcaatactgaaagcagatttgccaacaggaagcgttctgaaaactggataacaccgacaacgaggcaactcatacagacgcacctcaatatggtgcgaaaaatatgtcaggtgcttccggtaacagactggactcttgaaatcaaccgttttgccttcatgaagatggatgatggcggtatcagaggtttggatttccagaacggcaggctcaaaggctacagcagctcacatgagtacatatacgctatgcaggatggcaaatgtgcctgctgtgataataacatcgagcattatcaccatctgacaccacgttcaaaaggcgggtctgatacaccggaaaaccttataggcctctgtggttcatgccataaaaagatacatactggtgacctgaagcttgaaaatatcggactcagaaagaaatacgctgcactaagcgtactgaaccaggcaataccgtttattattgatggacttgtagagatattcggtgaaaaacacgtccatttctgcgaaggctataatactcagatgataaggaaaagcctctgcataggaaaggatcatccggaggatgcggtatgcatcgcacttcttggagtgggtatccaaaaggtaacggataacacggaagcctttgaagtgatgcagttccgaaggcataatcgagcaataataaataatcagcgtgagcgtacctattatcttgatggtaaggccgtttgtaagaatcgtcacaagcgttttgagcagaaaggagactctcttgaggaatttagtaagaaacatccgtctgacgtgaaacgtttgactgttaaaaggagcacacgtttctataatgctaataacagattgatgcctggagtagtatttacgtacaaagggcagaggtatgtaatgtcaggacagcttacaggaggaaaataccttcgtgctgtcggagacacaaagacaaactatccggttacacaatgctatatcttaaatgaaaacacaggccttgtgtatatttaa

SEQ ID NO: 9 - DNA, 178 bp, unidentified
  misc_feature 1..178: note = contig_4171967 MG-RAST
  source 1..178: mol_type = other DNA
gtcaataaccccgccccgtgaaggggcgaggcttgaaaaagcctaatctgagttattgagcagagctatgatacagcagcaacaacgccaccacatctgattccaaggtatgtgatctggatagctgtatcgaagctatggaattgtaataccacagggaagtgctttacaggcggtg

SEQ ID NO: 10 - DNA, 1344 bp, unidentified
  misc_feature 1..1344: note = rumenHiSeq_NODE_3861232_len_211451_cov_5_332990 JGI
  source 1..1344: mol_type = other DNA
atgaaaccaaaacataaaatcaaaaggaggaagaaatgcttaaagcagaaactagtatttgtagttgataagaaagaacgttctttgatgccttgtacacctagaatagcaagattattgcttaaacaatgtaaagcaaggatatacaaacacgcttacacaggattctttgctatcaaactcaattatattccttctaagtgttaccttcagaagaataggattggagttgatactggaagtaaatacatcggtgtttcagttgtaaggattgacaaaaatcaagaaaaagtttctagaagttgcactcacctttatgaagttaaactaagaggtgacgaaataactaagaacatcgaacagcgaaggatgtacagaagaaatagaaggaataggaagacaaggtatcgtaaacctagatttcttaaccgtaagaactctagacgggaaggactaaaaaatccaacaatgatacataaatttgaaactcattgtaaggttattaatactctacaatccttacttccaaaaacaaagttaatcttcgaagttggaaactttgacccacatttgatgaagaatgaaagaaaagcatttaacagacattggggttatcaacgtggggtaaattatggattcgctaatcgtaaagcttatgtattatgtagagataattacacatgtcaacaatgtaagaaaaagaatgtagcattacatgttcaccatatagtttatcgttctaacggcggaagtgacgatgaatcaaacttgataactctttgtgaggattgtcaccacaaacttcatcaaggaaagataaagttaaagaaatccatcagtcaaggtaaaaagaaagcacttaaagatgcaactcaaatgaactatcttaaaggtcttttgatagaacattatcccaaggctagaataacttggggttatatcactaaagaaaaccgtcaataccttaaactatctaaagagcattattttgatgctctggtgattgcgtctaaaggtaagaaagttaaggtggaaacaaatcaagttaccaagatagtcaaagttgctaaaggtgactatcaactttcaaaaggaagctgtagcgaaaagatgctacctaaaggtaaagttaatggatttagaagatttgataaagttaagtattttggtaatgaatatttcattaaaggaagaagaacatctggaacaggagaattaatggatgtagaaggaaataaaattgacttttcttatatgccgaagggatttagaacaccttcaatgaagaatatgataagattttcatcaagaaggtctttgatagttaaaaacgtttcactttaa

SEQ ID NO: 11 - DNA, 355 bp, unidentified
  misc_feature 1..355: note = rumenHiSeq_NODE_3861232_len_211451_cov_5_332990 JGI
  source 1..355: mol_type = other DNA
gtaaactactgctagtctaaagacatagcagcttccttaaatgttaccagacttagttctttagttaggactacgataagaaagtcatgacaccttaggttgtcgcctcagacctatgctctgtcgttgatagttaaacaaggcgggaattaaatgaacctagtgctatcaacataaaaagctttcttatctttgtcgagaggaaatccgaagtccttgaataaggcagtaggtacacttgttgtgagaacaacaaggatggacatcaagtttgtctatcaaatatctctaaagcaaggagagttaaaaaatgaaaccaaaacataaaatcaaaaggaggaagaaatgcttaaag

SEQ ID NO: 12 - DNA, 1104 bp, unidentified
  misc_feature 1..1104: note = Ga0334820_006144 JGI
  source 1..1104: mol_type = other DNA
atgcaggatgcttctcaagtcctgcttcccttggttagtcagtctcgaagagagaaattgccccgtaagggagataagaaggtaacttctttgtcaataagagttccggttgtttcgtcaaacggaattccattgatgccatgtgaaccagcaagagcgagagaattggtaaagagtgatagggcgattaggagattcaagacaggaattttctatattaaattggtagaaagagaaaccggagatgtacagaaagtaacatgcggaatagatcctggaagtaagcgagaaggattcacagtaaagtcagccaatcatacatatataaatgtactttctaatgcagtggatacggtaaaagataaaattaaaacaagaatgatgatgagaagaaatagaagacaaagaaaaactccttatagaaaaaataaatgtaatcgaaaacatgggggtttgccgccttcaaccagggccaggtggcaagcaaaattaagaataattaacatattaaaaacattatatccaataagtgtttatattgtagaagatataaaagtcagaacaataccaggaaaaacaaattggaacaaatcattttcatcattagaaactggaaaaaatttgttttattttgaactgagaaaaattggtagtgttatattaaaacaaggttatgaaacaaaagaatatagagataaacttggattaataaaaacaaaagctaaattagagaatgttttttcagcacacaatgtagatagttgggttttggctaatttagaatttgaccagaaagttccagataacactaatatttttagaatgattccattaaattttcacagaaggcagttgtattatttacaaacagaaaagaatgaaataaaaagaccgtttggtggtactataagtcacggaattactaaaggaactgttataaaacataataaatatggttatgtttatataggtggaaaatataaagatagagtttctgggcatgatttaagtacaggggcgagagtttatgctaatattaaaccacttgaagtagatatactatatatgattaagtggaggtttttgattagtctaaattcttaa

SEQ ID NO: 13 - DNA, 273 bp, unidentified
  misc_feature 1..273: note = Ga0334820_006144 JGI
  source 1..273: mol_type = other DNA
attaattatccatattaaaatatggacttgagtaagtaggaaatgccaatttcgaaagaacaagttaaacaagagattagagtgcccaagatcattggacgcaagcgtaagtctgcgtccaagggtcgtttgaaggaaactgaactaactaaccgtggcaggttgaacaatatgcaggatgcttctcaagtcctgcttcccttggttagtcagtctcgaagagagaaattgccccgtaagggagataagaaggtaacttctttgtcaataaga

SEQ ID NO: 14 - DNA, 1380 bp, unidentified
  misc_feature 1..1380: note = Ga0210025_1000354 JGI
  source 1..1380: mol_type = other DNA
atgcagcgagtgttagtgttagacaaacataaaaatccattaatgccatgcacacccgcaagggcaaggatattattgtctcaacataaagctgcagtgtttaagatctatccatttacacttattttgaaaaacaaaacccaacataacactcaaccaatacaagttaaaatagatcaaggttccaaaaatacaggcattgcactggttgctgagtttaagcaaggtaaaacggtgatatttgctgctaacttacaacataaaggccatgccatttctgaaaaactggctagccgtgctgcctcgcgtagatcaagacgcagtagaaaaactcgatatcgaaaaccgaaatggactaatgctatgtctaaaaagcaattggtgcatattaatcaacgtccaaaaggatggtttcctccatctgttacttcaagagtggataatgtaacgaatttagtgaataagttaacaagattaacacctattagtgctattgccgttgaaaatgtgcgttttgacactcaattaatggaaaataaaagcataagtgggatcgaatatcaacaaggtacattgtttgaaaaagaagtaaaagaatatttattgcatttattccattataaatgtgcctattgtaatggattaagtaaagatcctattttggaaaaagagcatattattcctagatctaaaaaaggttcaaacagaatagataatttatccttggcatgtcatacttgcaatcaagctaaaaataatttgttgccacaagaatggttaatggtgcttaaaaaatcaacgtcaaaaattaataaagagcgagtaaaacgctttacccatatcattaagggcattaaaccgtcattgcgtgatgcggcagtcatgaacgccattcgttataaattagtagacgcattaagggtatttaatttaccgattgaattaggcagtggtgggttaaccaaattcaatagaaccaatcaacaattacccaaagatcattggatcgatgcagcgtgtattggacaaagcggcaataatattattatccctaaaaatctaatacccattaatattaaggccgttgggcgtggttcaaggcaaatgtgcttgatgaataaatttggttttccacgaacaaagccgaagaagaaagggcattgctttaattttaaaacaggtgatctcattaaggctatagtcactaagggtaaaaaggaaggaacgtatattggtagattagcggtaagaacaagtggtaatttcaatatatcaacaaaaaatggcatagtgcaaggtattaactaccgttattgtcgattgcttcaaaaaaacgatggctatcattatagcaatcatataaatcaattaattaactaa

SEQ ID NO: 15 - DNA, 258 bp, unidentified
  misc_feature 1..258: note = Ga0210025_1000354 JGI
  source 1..258: mol_type = other DNA
gtcaacaaattaaggtgagatcgtaagattatggttgacccgactcagtgtttgcatttttgcattcactacgttaagtaagaatatatagtgagttcggaatactactccagttccacaaactcaggatctacgttaaacagtgacttttgggtaagaagcagtgcgtagttcaataaaccttatttaacattgtctaggagtattttaccctcgtaagaggtgtcccgttatgggaaaatttaacaaaaaggaata

SEQ ID NO: 16 - DNA, 1311 bp, unidentified
  misc_feature 1..1311: note = Ga0256405_10001455 JGI
  source 1..1311: mol_type = other DNA
atgtatttagtatacgtaaaatctaaaaatggaaaccccttaatgcctactaaacggtgtggtagggttagaaagctgttaaaagagggaaaagcaaaagtgatatgtaaatgtccttttacgattaaacttctttatgacagtactgagtacactcaaaaactgtctttgggtattgatgttggttcatcacatatcggttctgccgttgttaatgaaaaaggcgatactgtttatatggctgaaacaacaatcaaaaatgacataaaagataaaatggaacaaagacggatgtataggagacacagacgttcaagaaaaactcgttatagaaaagctagattcttaaatagaaagaatagtactaaaaaaggtagattaccacctactttaattagtaaaattcattctcatgtaaaagagattgaatttgttaaatctattcttccggtaacagatgatgatctaatttttgaaacagctaaattcgatatgcatttattgaaaaatcctaaattgcataatgaaaaatatagacattttggttatcaaaaaggtatactttatgggtatgctaatgcccgtgaatacgttttagaacgagataatcatgaatgtcagatatgttgtaaaaaagaaggttataaacgtaaaaatggtattcgattagaaacacatcatattgtttatagaagtcggggtggaagtgacgatccaaggaatttaattactgtatgtccagtatgccatccaaaaatacatgatggtaaaataacaatagacattaaaggaatgccttttggggttttaagacatgatactcatatgaatataatctcaaaacgattagttgaccgttacccaaatgcaatagaaacatacggttatataactaaacaaaatcgttttgaagctaaattgcctaaacgacattatatagatgcatgtataatagctaatggtggaccagatgttaattttaaatctgatatagtatatattaaaagaagtgttactaaaggtgattatagacagactaacggaaaacggtctgaaaagcgaatgaatagaggtaaagtaaacggtttaagacgttatgataaagttcaatataaaggtaatatatactttataaaaggtattgatagcaaaggttatgcgactttaatggatataaacaataaaacaattaaatttccagatgcgcctaaaagagataaaacacctaaattatctaaaataaaaaggataactgcaagaaacacatgtctaatagatatagaaaaggttcacattgcatatactcgttaa

SEQ ID NO: 17 - DNA, 298 bp, unidentified
  misc_feature 1..298: note = Ga0256405_10001455 JGI
  source 1..298: mol_type = other DNA
gtaaactaccccaccccatgaaggggtgtggctttcattaaataacagtttaccagactaagtttagagaaatctaaactacgatgttaaggtcatgctacctttggttgacgcatcagatcaatgctctagcatcttaaaaaactgataaggttgaagtaataaatgccttacgataagatatgacaagccttaatgtcattgtcgagatgaagtcggattttaattgtggtaacagcaattaaatacgcataactaagtcttaggactttgaattatattcttaaggaataattat

SEQ ID NO: 18 - DNA, 1380 bp, unidentified
  misc_feature 1..1380: note = Ga0224415_10000689 JGI_Dark_Harvest
  source 1..1380: mol_type = other DNA
atgccttgtctgaatccaaagaaggtacgaaagcttctgaaagaaggacgtgccgtcatcgccggatataagccgtttaccattcagcttacatacgaatccgggaaggaaaaacagcctgttgaaatgtccatagacgccggcgacaggcacgtaggtaattccatcaaatcagaaaagcatgaattcattcatgaacagcgtgacctgcttaaagatggaaaacaaaaacatgatgatcagagaagactacgcaggacacgccgtaacagaaagcggtacagaaaacccaggtttgacaacagacgtatccctgaaggctggcttgctcccagcatcagaaacaagaaaaacatccatgtcatgttatacgacacgtacagaaaagtaattcctataacggatgtttttattgaaaccggttcgtttgacacaaacgcgctgcatcttcaggagcaagggcttcccgcacctgaagaaacagattatcagcatggtccccgattcggatatgacaacctgcgggaagcagtattttacagggatcatcatacctgtcagatctgtggttctacgatcggtcagataaaaaagaaagatgggtcctttaaaccaggcgaagttattttaaggatgcatcacataggatatcgaacaggagaccggaccgatcgtatgtctaatctccttacagtatgtacaaggtgccatacgcctaataatcataaacccggcgggaagttatatgatctggaacctgtgacacgaaccatatccggagccgctttcatgaatacagtacgatggtatgtattcaatgagataaaagccattgacagcgctgtacatgttcatatgacatatggatcggtaacaaaacgtgaaaggctgtcaaggcgtatcagaaagacgcacgcaaatgacgcgtactgtataggatacttcagaccgaaacataaagcttctgaggaaatctttcagaagatccgccgtaataacaggtgccttgaaaaattctatgacgctgtatatatcgacagccgtacaggagaaagagcttccggcggatcattaagctgcggaagaacaaacagatcagagtcaagaaactctgatacaaataaacgaatatatcatggcagaaaacgtacaaaaggatacagaaatatccgcagaaaacgtcatcccctgcaggcaggagacaaagtaatattccaagggaaaaaatacacagtaaaggccagcaggacaagatataccaaaacacatggttttcatgaaaccgttgaactaaaagaaataccaaaagaacatcttttagaagagataaaactggttagtcacatatccggctggaaaaaagtccagccggcatcataa

SEQ ID NO: 19 - DNA, 376 bp, unidentified
  misc_feature 1..376: note = Ga0224415_10000689 JGI_Dark_Harvest
  source 1..376: mol_type = other DNA
ttcggattactctttatgaatctctgtaagcccggttgattagcctaaatgacgaaattggtgtctctgacatcacaaccgtcatttatcagagaaggcatttatgccagtatctacgtttgataccaataatatagtcacgtcagaatgctccacaagttctgtcccatgagcctgtatattaaaaatttctgagggtaggaaacgtgtatacaggatgatatccgaaaccggtttaccggttttggatatctgaaacggtgttgaacattggcgttgtggcccactcccgagagggaagataccgtacatgcttttaatgtacggaaggcgtaagccattaaaaagaaaggaggcataagccttgagctatatt

SEQ ID NO: 20 - DNA, 1329 bp, unidentified
  misc_feature 1..1329: note = Ga0210041_1000150 JGI
  source 1..1329: mol_type = other DNA
gtgtctgtattggtgatcgacaagcgaaagaaaccgctgatgccgtgtagcgagaaacgagcaagaaagttgcttggttctggccgtgcgcgtattcatcggctcattccgtttgcgatacgactgattgatcgtgaagttgccggttgcgatttgcagcccgttaaaatcaagattgacccgggtagcaagtacaccggcattgccgtggtgcgcgaatcaaaggaagtggatgttgcaactggcgagatcagcgttaccgcgcatgtactgaatatttttgagttactgcatcgcggccgtcagatcagcgaagccttaacgtcgcgccgggcaatgcgccgccgtaggcgtggatgtttgcgctaccgagcgcccaggtttcttaatcgcggtaacaaagccaagggctggttagcgccaagcctgcaacaccgtgtcgatacgactgttgcatgggtgaaccgtttccggcaattggctccgatcaccgatatcgctcaggagttggtgcgcttcgacatgcaggcgatggagaatccggagatttcgggtgtcgaatatcagcaaggtgcgctgattggttacgaagtgcgcgagtatttgctggaaaaatggggtcgcaagtgcgcgtactgtgacgccaaggatgtgccgctgaatctggatcacatccagccaaaagccagcggtggaagcaaccgtgtttcaaatttgaccctggcctgtgtgccgtgcaaccagaagaaaggcgcacaggatgttagcgtgttcttggcgaaagaccccaagcgattggatcgaatcctgacgcaagctaagcgtcctttaaaggatgctgctgcggtcaatgcgacacgctgggcgttgttcaacgcgctcaaggccactggcgttcctgtatcaacaggttcaggtggcttaacgaagtataaccgtgctcgatttggtatcccaaaagcgcacgcgtttgacgctgtgtgtgttggcctggtgagtgccgtgacaggctggggaaagccgacgctggcaatcaaggctaccgggcggggaagctaccagcgcacgcgcttagatgcgttcgggtttccgcgcggttacctgacacgagaaaagcggattcaaggattccagactggcgatatggtcagcgctaatgttgccaacggcaagaagattggtttttatgttggtcgagtggcggttcgcgcaaccggtagtttcaatattcagaccgcgcaaggagtcgtacaaggcatatcccataggcattgcaaagtgattcagcgtgctgatggatatggttattcaatcgtggcaaaaatgtag

SEQ ID NO: 21 - DNA, 298 bp, unidentified
  misc_feature 1..298: note = Ga0210041_1000150 JGI
  source 1..298: mol_type = other DNA
gtcaactaccccgccctaaccggcggagcttggaagggcagtaagaagctcggttgaccagcctaagttacggagaaacgtaactacgttgtagcgaagtacaagaccgacgttgggatgcttcctcagtcccaacctctcgaagcggcaggagtagacaagcgaagggtaagcacgaaacagcttgtcgcaaagttcaaagtaccgaactgaagctgcgttacaacattggcgaggggagcgaaccgaaaggttctgtcacaaggtgcgtaagcacatttaggagaaacaagtgtct

SEQ ID NO: 22 - DNA, 1302 bp, unidentified
  misc_feature 1..1302: note = Ga0163150_10004194 JGI
  source 1..1302: mol_type = other DNA
atgttagtcttcattttaaattctcatggcaaacctctgatgccttgtaagccgcagaaagcccgtgttcttttaaaagacaacaaagcaaaagtgatcaaacgactgccgttcaccattaagctcaaatttggagcttcaggttttaagcaggagttaacggcagggatggactctggcagtaaagtcattggcaccgctgtagtaactagaagtggcaaagtactgtatcaggctgaaacgactcttcgaggtgaagagattaaaagtaagatggccaccagggcgatgtatcggcggaatagaagaggcaggaagaccagataccgacaaccaagatttctcaatagaagagcctcgacttcccttaaccggcttcccccctcgacaaaacacaaggttgagtcccatttagccgaaaagaagtatattgagtcaatcctgccgatcacaaattggcggctagaattagcttctttcgacatccacgccttaagcaatccagaagtatccaaagccgcatggtggacctatcaacgtggcgaaatgtatggcttccagaatcttaagcaatatgtcctaagtcgagatacctatacttgtcagacctgtaaaaagaaaccgaagcagaacgttgagcttcatgtccaccatattcatttcaaatcaaatgggggggctgataccaaaaacaacctgattaccttgtgtaaaccttgccacgacaagcttcacagcataaaaaatgctcaacagcattctctaaaattaaagccaaaggcgacaaataccaaacatgcaactgagattaacatcgtcgccgctcaactaagaaaaagtgattggaacttcgcagagacttttggctttattacaaaagttaaccgattggcacaaggtttgccgaaaagacacttcatcgatgccgcagtcatagcctcccaaggactggatatccgagctttaaaaagaacgatcattagaagacgtgtagccaaaggcgattaccagcagacaaaaggttctagatctgagaaaaccataccgacgggaaaactctttggtctaagaaaattcgatttaatcaaaacacctaagtgtactggctttatcaaaggcaaaagatcgtcaggtttttttgccattagcgacatacatggccattcgatctgtaactccgtcaaagttaaagccgactgtacccgcatcacagcgcgaacgacaacccttgcttatgtggagaatttcgaggctgacgcatcgatgctcgccgcagggcttcaccattcctcctccacctaa

SEQ ID NO: 23 - DNA, 295 bp, unidentified
  misc_feature 1..295: note = Ga0163150_10004194 JGI
  source 1..295: mol_type = other DNA
gtcaattacccccacctaaaggagggggcttgtgaggtgactcataagggtaactagttgaccagaccactaacaaagaaaggcaagaaaaattgttagtaaacgttaaagcagaatatcacaccttcggatgccgcctcagtccgttgctctgtggcctactattaaacagagttgaaagactcagtgtagtaggcgtaaaaagttgttttaactggtcgggaggaagtcgtgatatcagattcaaccttttagaagctgatatcatgcgtcactgtttagaatttagcaggag

SEQ ID NO: 24 - DNA, 1038 bp, unidentified
  misc_feature 1..1038: note = Ga0209777_10000113 JGI
  source 1..1038: mol_type = other DNA
atgaagaaagtaatggttcctgtagtagacaaaaataataagccacttatgccaactagttgttggagagcttccaagtggattaagtctagaaaggctactccattttggaaacatggtatattttgtgtacgattaaacgtagaaccttctgccagaaatatgcaacctatagcagtaggtattgatccaggtagcaaaagagaagcatttactgttaaatctaagaagaatacctatgtaaatattctgacacatgccgttactcatgttaaagatgtgatggaagatagaaaaagtgctcgtaaaagtcgccgatttagaaaaacaccatatagaaaacaaagaaaaaataggaaaatgggtggactaccaccttctactaaagctagatggcagttgaaacttagggttattaataagcttattaaaatttttccaatttctcaatttgtagtagaaaacattaaagccgtaacaactggacaaaaaagatgggattctaattttagtccattaggggctggcaagaaatggttttatggcgagcttagaaaaattgctccagttaagcttatgcaaggttgggaaacttgtaatttaagaaatcgacttggacttgagaaaacttattcaaaattggatgaaaaattttcggtacataatgttgatagttggactttagcttggagtggggttggcggaaaagaaaaaccagataatgaatctttattaattttagtttcactaagatttcatcgaagacaattacattattgtaatttttttaaggggggaaaacgacgtttatatggaggaacaagaagtttagggttaaaacggggaagtttagtagatcattcagaatatggactttgttatgttggtggatcatctaaaggtatgataagtttacattcacttgtagatggttgcagaatttatcaaaaagttaaattgaaagatattaaatttaaatgttatagtagttttagattttatacagagaaagatattactgatccttttgttgcttaa

SEQ ID NO: 25 - DNA, 281 bp, unidentified
  misc_feature 1..281: note = Ga0209777_10000113 JGI
  source 1..281: mol_type = other DNA
gtcaatggccagtttctaaaatggtttgaaagtccctccaaagggcaactttcaacgtaagcattgactagacaacgattggaaaggaggttaaagacaaaagaaaattccaatcaaactgaacaatctacccgtggaagggtgaaacacgttgcgaatgctaccctagtttgcatcctctgtgattgtcagtgtcgaagggttgtatacatgatagagttttctttgaattgcctaaaacgattcaaggaattttggagaagcaaatgaagaaagtaatg

SEQ ID NO: 26 - DNA, 1350 bp, unidentified
  misc_feature 1..1350: note = uncultured Clostridiales bacterium
  source 1..1350: mol_type = other DNA
atgacgactttcgttatatcggcagaaggcgaaaagctgatgccgacaacaaatatcaaaaaaatccgaaagctcctccgatcaggaagagccaagatcgtgaagcacgcgccgttcaccgtgcagcttctgtacgagagcggaaacgccgtgcagccaatcgagtttacggaagataccggctatcagtatatcggagtctctctcaaatcggagaagcacgaatacgtgagcgccgagtatacgcttcttaagaacgagaagcagcatcacgacgatcagcgtcgcgaggtaagacgcccgcgtcgcaacagaaaacgctaccgcaaggcgcgcttcgacaacagaagaaagtctgaaggctggctcgctccgtcgctcagaaacaaggcggaccgccatgtagatatcttcaagatgtactgcgaggtatgcccgataacaagcgtcacgctcgagattggacagttcgacccggcggtgctcgatgctgtagagcaaggcaagcccttgccggaaggcgttgattaccaatacgggccgcgttacggatacgacacgctgagagaagcagtcttcgcaagagacggttacagatgcctctgctgcggtaaatcagttatagaagacggcaccgctctcaggctccatcatgtgggctttcgcacgggcgacagatcgaacaggctcggcaacctcgcatcagtatgcgagaaatgccacagcccgaagaaccataaacccggcggaaaactgtgggatatggcacctcctaaaggcacggcatccgcagcgtacatgaacatcgtcaggtggcatatctacgagggagtcaaggcgtttggcgtagacacacatataacctatggtgccgtaacgaagcgcacaagacgtgatctcaacatcggaaagtcacacgcgaatgatgcctactgcatcggcagcatgagaccgaaacgccgcacgaagacgcaatactttgaaaagcgccgccgcaacaaccgcatactcgagaagttctacgacgcgaagtatctggatattcgtgatggcaaaacaaagaaggcggcggagctcgggtgtaatcgcacctcgagatccataccgcgaagcaatccgcagaacgagcgcgtcttccgcggggagaaggtgtcgaacggcagacgcagtatacgcgctcagaggtatctgtaccagccggacgacattatcatcttcggcggcaagaagcgcatggtcaagggtacgcataacaagggctcgagtgtgcagcttattggaggaggcgatatttcgccgagaaagataaaacttcatcaccacgctggtggctggagacaagtagtttaa

SEQ ID NO: 27 - DNA, 332 bp, unidentified
  misc_feature 1..332: note = uncultured Clostridiales bacterium
  source 1..332: mol_type = other DNA
gtcaactacccaccgcttagactgacgtcttgaagcgggggcttgtgaaaacaagtcagttgattagcctgagtgctcagggcactacgttatctgcgaatatacaggtaccccgggatgctccacaagtcccgggcactacggatatgcgttaaacatcggtgagggtagccgaagtgcgtatatcatcaaaccgcggaataacattggcgatgtggacaccgcccttcggggcgaggatccgtatacacgcctcttcggagacacggtatgcggaaagccgtaaggcagcatgttagcactaaaaaaacagaaaggaggagcacatgacg

SEQ ID NO: 28 - DNA, 1440 bp, unidentified
  misc_feature 1..1440: note = Ga0190327_1001504 JGI
  source 1..1440: mol_type = other DNA
atggattcacaaggtaatattggacatccaacacgaaaaggtagaatggtccgaagattattgaagaaaggtaaagcaaaagtaatagctggtggtgtaaagaaaggtcagccattgttaatacaattgcttgataaagtatttgataaatctaagactatagatacagaatttcgtattggtattgattcaggctataaatatattggttatagtttatttaaaatatataaaaatcatattgaactattactatctggtgaagtagaaactcgtacatctgaagttactaaaaatctaagtgatcggaagatgtatcgaagtcttaggcatcaatatagacgaaagaatgttaaacgtaagtttagtaaagctaagtttagacatcctaaatggaaaaacagagctaaacatgcttttcaacctactcatagacatttgattacaagtcatattaatatattaaaatggttatttaaaagagtaccaaaggatcaatgtgaggtacatttagaatatagtaaatttgatgttcaaaaaatgatcaatccaggtattcacagttggcaatatcaacgtggtcctcaatatggttttgaaaatgtgaaagcatatattcgtgatagagataattatacttgtcagatatgtaagaaacatattgctaatgaaaaaaatgaagtacatcatattataccaagatctaaaggtggatcagatagaccggataatttgattcttttatgtcaaaattgtcatacaaaagtacataccggaaaagtttcttgcacatcaaatttgattcacagtaaatttcgtgacgctggtgtattgaattcttgcatgaaatggatgtttgataactttagtaagaaagtttcattagtaaaaacttttggatatattacaaagactgttagattaaatagtaatggtaagatttcaaagacacatgctcatgatgccatgataattgcactttgcaatgaaaatggtcctgaaactaaattcaaaacatatactaattatgatcatcatataacagttaattttaaacaatatcgtagacatattagatcttggacacaaagattagaagatcgaaaatattatttaattgatgatttgaaatttaaaaaatgcgtagctcataatagaagaagagctacagcacaaaataaaaaatatcctagtcttgaagaatatttagaaaaatattctaatatgcaattaatagcaaagcctggtggacggattatgaaacaaagcgaaaagaatatgaattttcgccgaggtgatataattaaatgtccaaaaggtattgctactgtgcaattttatgaacttagacataaagaaattactactgcacaatttggtagaattagagaaagagtttgtactaagattttaaataatgctggaatgtgtatcgtttag

SEQ ID NO: 29 - DNA, 313 bp, unidentified
  misc_feature 1..313: note = Ga0190327_1001504 JGI
  source 1..313: mol_type = other DNA
ttttaaaaaacaggaggagaaaatttatgaaagtcgtgcaggcattaagtcaatcttaaattttaatatttaagttgacacagacgactgactattggttcaccctggaatgccactcccagttccaggctctgaaggtgttagtaattatattacttagtcctcattgcgatatatttcttaaatataacgtattaccaatagtcaagtcgggggagaccaacctaattaattaagctgagcttttaattagcttttatcatgaagttatttttaaaagcaagtgaattggagacaaattttaaacatgatt

SEQ ID NO: 30 - DNA, 660 bp, unidentified
  misc_feature 1..660: note = Ga0376669_0068582 JGI
  source 1..660: mol_type = other DNA
ttgtcgaggcccccattacctgggcaaccagagactccgaaaggggtaatcgtgagcaaagtattcatgttagacaccaatttcagacaactcaatcccgtccatcctggggaagccagaaaattgctttcagcaggaaaggcagcggtctaccgtcgctatccttttacgatcatcctcaaaagggctgtcaagacacctgttgaaccactacgggtcaagatcgatccaggctcaaaaaccacggggatcgccgtcgtcaacgatacgacaggagaagtcgtgtttgcagcagaattgtctcatcagggagagatcatcaagaagcgcttagacaaacggcgtggagtgcgtagaagcagacgtaatcggcgtacccgctatcgccaagcacgatggagaaaccgacgcaacaagaaaaggggctggttgccaccatctttgcagagcaggatcaccaacagtgcagggcgcatggcagcacgtgcgacaggctcattcaatatcacaaccaagggcaagacggtccaaggaattggataccagtattgcaaagctctccatcggtcagatggatacagttaccagaagggagcgaccattgtgcttgcccagccggaaacagagacggtagtcgcttcccctgaacgtgttgtctag

SEQ ID NO: 31 - DNA, 280 bp, unidentified
  misc_feature 1..280: note = Ga0376669_0068582 JGI
  source 1..280: mol_type = other DNA
gtcagggaccccacgcatgaatgcgggggcttgcagtgatccggcaatggattagtgcggcttcacctgaccagactcagtgctaggcttgtctctagcactacgttaggagcgaaataggtacgttgggatgcgtgggccagtcccaaccgctacggttgcaggttaaacaggattacgagggttagtgccagtgcttacaacgctaaaccgcataaccttgtcgaggcccccattacctgggcaaccagagactccgaaaggggtaatcgtgagcaaa

SEQ ID NO: 32 - DNA, 876 bp, unidentified
  misc_feature 1..876: note = Ga0394878_0025107 JGI
  source 1..876: mol_type = other DNA
atgtccaaagtattcttaatcgacactgatttacgaccattagaccccgttcatccagcacaagcaagacaattattaagagagaaaaaagcagcagtatttaggcggtttcctttcaccttaatcttgaaggagtcacgccctaattcttctgtttcagtttcacccctcagattaaaaattgatcctggagctaagtttacaggaattgccttagttaacgattctaatggcgaggttgtctttgctgctgagttaaagcacagaggatttgtaattcgagacgctttaatttctagaagacaattacgacgtagtagaagaaaccgcaaaacccgttaccgtcaaccaagattcttaaacagaacaagacctaaaagctggttagctccaagcttacaaagtcgagttgataacatcaaaacttgggttgaaagactaagaaaaatagccccaatcaaagctatcagtcaagagttagtacgttttgatacacagctaatgcgtaacccaaacatccaaggtaacgagtatcaacaaggaactcaatcaacacctgttcttaaaattaaaggagttaaaccattgttaattacagccaatggacatggttctagacaatcatgccgtactgataagtatggatttccatctcgttatgttccacgttttaaatttgttaaaggttttcaaactggtgacatcattaaatctattgtcacgaatggcaaaaagattggcgtttatattggacgaattgctgtccgctcgacagggagttttaacatcgcaacttctcaaggattagtacaaggcattaattacaaatactgtaacccaattcacaaaaaagacggttattcctatgcaacatag

SEQ ID NO: 33 - DNA, 249 bp, unidentified
  misc_feature 1..249: note = Ga0394878_0025107 JGI
  source 1..249: mol_type = other DNA
gtcaacaacccaccgatttatcgggggcttgaaatacagccctagttgaccagattcaggtagcaatacctacgtttaagggaagagttaatctcctaccttggaatgcgaagctagttccaagctctagaactcaaaggttaaacagccatctgggaggcagtgcttttgagatagtaccgaccttaaacattccttaaacattatcaaagctaacattacccgaaaggaggggcagaaatgtccaaa

SEQ ID NO: 34 - DNA, 1149 bp, unidentified
  misc_feature 1..1149: note = Ga0163150_10002834 JGI
  source 1..1149: mol_type = other DNA
atgcccaccgaaaggcatggatgggtgcgccgctctatacggggtgggcaagtcaaagtcgtcaagaggttccccttcacgattcaattgacttacgaatctgaagacgcagttcagcctttgactctaggtcaggatattggatttgggacggttggagtcagcgtaacttccgaactaaaggaagtctttgctgccgagtacaaaatccgcaccgacgtttcagaaaaagtaactgaaagaagatcctaccgcagaactaggcgaggcaataagacccgttacaggccagcgaggtttgacaatcgaaagagaaaagcgttgcagccttcgatcaagcaaaaagtcgagagtcatgagcagataatcaaaaatttgcaaacgatcctgccaatctcaaatgtgattatcgaagccaataactttgatatggccaaaatcaataagcccaacatatcaggacgagattatcagaatggtgaacaaaaaggcttctataatgtcaaacagtatgttctcgccagagatggctatacctgtcaggcagggaaaaaaggctgcgtggacaaacttcacgtccaccatctcacattcaaaagccagggcggaagcgatgccccttccaacctcttgacgctttgtgaaaaacatcatgccgatcttcatgctggcaagcttcaagttaccatcaaaaagcataagacactcaaaaccgccaccatgatgaatatcgtgcgcagccagctactcatacggaatccaggttttacggaaacttttggatatgagacaaaatttgaacgagaactgcttgaactgcaaaaaacccatcacaatgatgccttcgtcatagctggcggcagatgtcaaaggcgagccagggtccatttcatcacgcaaaagcgcaagaataatcgggcaattcagatgaaccgaaaaggccaagcaccagccataaggaggcaaagatacaaaattcagcccaaggacatcatccaatggcgaggaaaaaagtattttgctgggggtatgcaaaacaaaggggcttacctcatgttttggagtgattgtaaggaaaagtatgttaaaccgattgcgcagatcaaaatcatttttcatcaaagaagctatgttctcgacgcgatctaa

SEQ ID NO: 35 - DNA, 295 bp, unidentified
  misc_feature 1..295: note = Ga0163150_10002834 JGI
  source 1..295: mol_type = other DNA
gtcaatcaccccacccaaccctagcgggtatgggtagggcttggaagaaaggaaacaattttccaagctcttgattgattagactcagccctggcaacagggctacgttactggcgaatgacataggcaccttgggatacttctctagtcccaggctctgcgcgagacggctaaacagttctgatgggtaggaacagtgctttctcgaaaaaccgccggataactttgtcgaagagaatccacagccgaaaggctgccttacaggaacccctaacggggaagaaagaaatagatg

SEQ ID NO: 36 - DNA, 540 bp, unidentified
  misc_feature 1..540: note = Ga0208279_1011523 JGI
  source 1..540: mol_type = other DNA
atggtgcgcagaggacgcagaactcgcaagacccgctaccgccaaccacgcttcgacaaccggcggcgagcggaaggatggcggcagccatctctcatgtctcgcgtgcagaatgtgcgccattgggcagatcgcttggcggctctcgtaccactcagtcagattgcggtagagactgttcgcttcgacacccaactcatggagaacccaagtatcactggagttgagtaccagcaaggcgaactggcaggctacgaggtgcgcgagtacctactggagaagtggggccgcaagtgtgcctactgtggcgcggagaatgtgccacttgaggtagagcacatccgtccgaagtcgcggcgtggaagcaatcgcgtcagcaacctactcatttcgtgccatgcctgcaaccaggccaaggggagtcgggatgtgcgagagttcctggcacatgatccagcacgattgaaaaggatactggcgcaagccagacagccgctttcggatgcggcggcggtgaacgccacccgatacgcgattggg

SEQ ID NO: 37 - DNA, 373 bp, unidentified
  misc_feature 1..373: note = Ga0208279_1011523 JGI
  source 1..373: mol_type = other DNA
ggcaaccgctcattttcgaccaggatttcgtcgatccgggcttggtacggccccaggaccggtgcctcgcgtggcgctcgaagtgtatattccttcccctcggccgactcgatggcccttttgactgtcgggcgcgagtgtcccatctctcgggctattcgcctgatgctcttgttttcatgaaagaaagctcgtcggatgttttctcgttcgtccacctttatcatctcctcctccgctatcataggatttgttctcacactgcccataatagcagagatcgtttcaggtggtcctgttttcagtgatcaaaatccggtcaggtggtccccttttagtttatcaaaaacacaaggcggctctggacaagagg

SEQ ID NO: 38 - DNA, 1824 bp, unidentified
  misc_feature 1..1824: note = Ga0247609_10000157 JGI
  source 1..1824: mol_type = other DNA
atggtttacgtaatagacaaaaacaatcatcctctaatgcctacgcatcgttacggaaaagtacgcagaatgcttaaagaaggcaaagctaaagtcgtaaaacgagaaccttttacgattaaactgctgtacgattcatgtgattttgtgcagccactagttctcggtattgacacaggaagcgaatacataggaactgccgcctgttctgacaaaggaaatggaaaagtaattttgtattcatccatcgttaaacttcgtacagacatcaagactaaaatggaacaacgtagaaagtatcgttccgcacgtcgtggaaagttacgttgcagaccaccaaggttcttaacacgttttgcgtacactaaaaaagacatcatggacaaactgaaactctgtggtgaatctgtcaagcaaacggttattaaagacggcaaagaagtcacaactacagtgtttaagaaatacaacaagaagcagatacagcatttgaaacgatgcctgtcatgtgcaccagacaaacttcctgactcacagacgacaactctgtctcctacgatacgaagcaagataggttcgcatgtaagagaagttgtggatattagcaggatacttcctgtcagtcgtttagtgcttgaagtcggtcagttcgacacacatgctttgaaaaatccagaactgaaagacatgtcgaatcctgacattcgtgcatggggttatcagcacggacccaactatggttatgaaagcacaaaagcacatgttttagctagggataagtacaaatgcagaatatgcggtgtttccttcaaaggacgttcagggaaatcactgcatgttcatcacattgtattccgaagtaatggcggaagtgatgaccttgaaaatttagttacgctatgtgaagactgtcaccacacactgcataatgatttcaagacgatgacaaaggacgcatttgatgtgaaatacaagaccttgggttctggaaacgcatcaagatggaaagtgttaaaacacgcagctcacatgaatgtcatacgtgcacaacttttacagaacgccgccaattcagtcaaaatggtcgtgaaagattcatcagaacaaaagcatattatctcgttatttgagaatgcaaccgaaacttttgggtacattacaaaagcgaacaggcaatggcatggaatcgcaaaagaccatcatctggatgcgtgtatgattgcatctggtggttctaaattcacggttgacccagatacaccggttttcaagaaacgccatattgaatctggaaattatcaggtatgcgtccgtaaagacagcaatgcggatattatggctgagttcaagaaagcactgaaaaaggaaggtagagaacttggggatgcttcaaagaatgaatacaagcggtttaagaaagcacgtagagagcgtttaaaagctgaatttgagtctttcataagtgataatgcggaacagctcaaaaaatgtaaacgcagatggattcagacggatgtgtcctggtcaacacgcgacaaagttcatggatgtcggctgtattacaaagtcaattactacggtcagtctggattcctcggtgcttgcggactcaaaagtgccgggtatcttttggatgtgttcggtaaaaaattggaaatctcagaacacagaatacgattgaagaaaaagacagtgactgcaaattcgctttccaataaaaaggatgttcgtgtgctgtcggcacggcatactacgttatgcgaccatgaagttccaaaagactggatgcatcaaacgattgttacgtctgtttctgaggtatga

SEQ ID NO: 39 - DNA, 419 bp, unidentified
  misc_feature 1..419: note = Ga0247609_10000157 JGI
  source 1..419: mol_type = other DNA
acgagtgttatacccaggtgaggtggtgatatggcactgattagtctcagaggtatgacatttgttatgagtgtaatacgacgaaaccgtctgactcaacggatacgtggtctcagaggtatgacatttgtaacgggtgtaatactcttgcccgtaccgactgtctcagaggtatgacatttgttatgagtgtaatacctctaaaacgcctgtaacaaatgtcatgctaatgggaacagactcagctcttcggagctatgcatcaactttaacgaaacgttctgatgcctcctcagtcagttcaattctgtcgatgctttgtcgaggggaagtcgtatcgcccttacgggctgtacgcattacatcggctctcatgctgatggcttacagcaacatctttaacgtggagttctaaaatg

SEQ ID NO: 40 - DNA, 303 bp, unidentified
  misc_feature 1..303: note = Ga0116227_10015234 JGI
  source 1..303: mol_type = other DNA
atgtccaaagtactagtaattgacaccaacaaaaaaccgcaaaatccaattcatccctccctggcgagacagcttttaaataacggtaaagccgcaatatttagaaaatacccgtttacaggctatgaaacgcgagaatacctgttagaaaagtggaacagaaaatgtgcttactgcgatatcaaagatgtcccgttgcagatagaacacattcattcgagagcaaaaggagggtcaaatcgcatttctaatctaactttaagttgtgagaaatgcaatattttgcaaaaaaacgatcagtag

SEQ ID NO: 41 - DNA, 292 bp, unidentified
  misc_feature 1..292: note = Ga0116227_10015234 JGI
  source 1..292: mol_type = other DNA
gtcagtaactcaggtctaaagacgctgagcttgtctcagagttttagccacactagctgacccgatgcgagtacctcgtgtactacgttatcggtaagtgtttaagttcctaccttgagatgcattcgccagtttcaagctctagaactgggtgattaaacaggtttatattgagttaacactccttgttgcccagatagtaccgtccgataactttggcattagcgcagcgttagcgagtactcgagcgtcggctaacatcacccagtaatggagggaatttatgtccaaa

SEQ ID NO: 42 - skipped

SEQ ID NO: 43 - DNA, 337 bp, unidentified
  misc_feature 1..337: note = Wastewater metagenome
  source 1..337: mol_type = other DNA
gttaagttctcactaccctaaagggtaggagcttattgagtttttcgataagttacttaaatagcttaagcatatcgcaatatatgctacgttactaaagaatatataggtacttcagggtttgtatctagcacaaactagatttgactctagctctgaactctacggtataaagctaaacatctctgacgagaaggagaagtgcgatatacattaaaacctttagataacattggcgaagggaagtaacttaaaagattttgtacttaggtacatatgttttaaagagttttatctctacttacaaaaaggagtttttatgattaaaataacaaat

SEQ ID NO: 44 - DNA, 1347 bp, unidentified
  misc_feature 1..1347: note = Ga0207421_10008055 JGI
  source 1..1347: mol_type = other DNA
atgcaacgagtttttgtacaaggggttaccggggaacgactgatgccgtgccatccagcccgtgctcgacaactacttcggtctgggcgggcgcgggtaattcgctcccgccccttcaccatcgagatgatcgaccgagccgagggcacggtgcagccggtgcgcttgaagattgaccccggcgcacgggtcaccggcattgccctagttgccgagggcaagaccggagcccgggttgtttgggccggggaactggctcaccgtagtcaggctatccgcaaggctctcgccgaccggcgctcctatcggcgcgcacgccgggggcgcaagtgccgcaatcgcgccccacgtttcaacaaccgcagtcgggtacccggctggttgccgccgagcctccaacaccgggtagacaccacccggacatgggttgggcgactactatcccgggttccggtcaccgctgtggatgtggagacggtgcgcttcgatgtgcatgcgctggccgccgggcggccgctctccagcgtggagtaccagcaaggcaccctgcacggcgtcgagctacgtgaatacctacttcaacgggatggctatgcttgtgtctattgccgaggcgcgagccatgatcctgtgttggagttggaccatgtgcagccgagcagccggggcggcagcaaccgaaccggcaatctggtaaccagttgcaccacctgtaatcaggcaaaaaacaaccgcactgccgaggagtgggcggcggcactggctggcagttactccagacttgaccgcacccgggcagaacgggcggggaagatccaagccggatggagcccgggcctgcgggatgccgccgctatgaacgccagccgctatgccatcggacgcgcgttaaaagaaaccggcctgccggtgacgttcgccagcggcgggcgcaccaaacacaaccgcagtacccagcattatccgaaggcacactggattgacgcggcgtgcgtcggcgaatccggcgaaaaggtgaaactggacccaaaaaccccgatccttcatatcgaagcccgaggtcgcgggcagcgcctagtctgccgggtggatcggtttggtttcccccgcacggctcccgggcgggtgaagcgggtgcatggctttcaaaccggcgacgtagtgcgtctaaaccagccccggggaaagtatcgaggccagcacaccggggcgctagccggtattcgtgcccggggctctatggatcttcgcacctcttctggacagaagatcagtgcctcgcaccaacatatgcgtctgctccggcgattcgacgggtattgctactcggaggcacgggcatgctag

SEQ ID NO: 45 - DNA, 271 bp, unidentified
  misc_feature 1..271: note = Ga0207421_10008055 JGI
  source 1..271: mol_type = other DNA
gtcgccgctttagccctgcccatcccggcctccgtgccggatgatcagggcagactcaaccagcccgagcctcctttgaggggctacggccgacaggaatagatagtcactccggggtgcttctccagccccggaccatgaggccggtggtcatgctgcccgattgcggtgaagggcgaaggctgccggtgaaaaccctgtcggatcatgggcgaggagacttgaccggccctgcggggccgagactgagaggggtaacgaaatgcaacga

SEQ ID NO: 46 - DNA, 264 bp, unidentified
  misc_feature 1..264: note = GENOME_ID: 238320 MG-RAST
  source 1..264: mol_type = other DNA
atggtcgtatttgtcaaaaacaatcatggcgaagcactaatgccgtgttcagaaagaaaagctcgcttattattacgagataaaaaagggaaaattgggtttatttcaggattttctggaaaaacgcaatgttatgtgaaaaacatttttggtgattatgtcacgatttcgccaaaatacaaaatggtagggctaaaaaaactaaaccgattagcgcacaacaataattggatacagcaaagaacaccagcgtacgctggctaa

SEQ ID NO: 47 - DNA, 264 bp, unidentified
  misc_feature 1..264: note = GENOME_ID: 238320 MG-RAST
  source 1..264: mol_type = other DNA
gtcaataacccaccacttaaaatcattttatgatttttgaagtgggggcttgcaaaagcttgattgactagcatcagttcttcgagaactacgttcgttttgttatcatacccgtaggtgattcccaagccgtcggctctatgctggctctgtaaaagtcctgagaggtaaggacggtcaaccagatgtgacagtcacactgttcaagcgtttcgaacatttgcgaagggaaacaaactccaaaggaggaaatacgatatggtc

SEQ ID NO: 48 - DNA, 1335 bp, Moorena sp.
  source 1..1335: mol_type = other DNA
atgttagcctttgttttaaacaaattaaaaaaacctttgatgccttgctcttcggctaaggctaaaaggttactaaaaaaaggtttggccaaagtcatatcaaaaaaaccatttacaataaagttgctttttggctctagcggacataaacaagaagttattagtggaatggatacgggttcaaaaaccattggcatagcagctattgccaatggaaaaattttgtatcaagctcaaacaaaactaagaggcgaagaaattaaaaaaaagatggatcaaagaaggatgtacagaaggagtaggaggagcagaaaacttcgttatcgaaaacctagatttttaaatagaagagcaagtacagctattaataggctcgctcctagtgttaaacataaactactctctcatctaagagaaaaaaagtttatcgaatcgattcttcctgtaagtatgtggattgtagaaactgcaagttttgacatccacaaaatcacaaatccgaaaggggtttcaaaagctttaggtaaaggccggacttatcaaaagggcaggatgttagatttttataatgtaaaacaatacgttctcaatcgagataagtatcaatgccaagtgtgtaaaaagaaaaataatcttaaattgcatgttcatcacattcaatttagatcaaacggcggctctaattcacctgacaacttagtaattctttgtgaaacttgtcatgacaaactccataagctaaaaaaagaagaagctgaaaaatcttcaaaaaaattacaaaaaagcgcacaaaaacagactaaacatgcaacagagtcttcaattctcagatcacaactttgtaaacattttaaaaagcttgaaagttctcaagtatttgaagaaacttttggctatattacaaaatttaacagagagagagctcttcttcccaaatcgcattatatagatgcaatctgtatcgctagccgggggaagatacctgagatgcatattcaaaataacacctcagatctttttcttagaagatgtgtttcaaaaggcgattataaacaaagaagaggaatttgttcggaactgaaaataccaaccggaaaactttttggattaaaaaaatttgatcttgttaagacttccaagggagttggatttgttaaagggaaaagaagctccggtttctttgccatttcagatatcaatggaactctcatctctgatagtgtaaacattaagaaaaacataggccggatacaagctaggaaggccgttttaacttggaggtcgcaattcctccctgacctaaaggacagggtttccttgcgagaaaaaagatga

SEQ ID NO: 49 - DNA, 314 bp, Moorena sp.
  source 1..314: mol_type = other DNA
gtcaatcacccctccctaaaggaaggggcttgaaccgtgaggattaagggcaactggttgaccagaagacaaactcaaggagttttattaatgtttgtaaccgttaagacagagaaaagacaacagaccaacgagtgccacctcagcttgttgctctctgctgtgcaattaaacaaagtccaaagacttagtgttgcccaggaaaaaacctgttttaactcttcgagaggaggacttgacgatctattggttgctccaaccggctggatcgttgagcataaccggtttgtttgtaccgggaaggctttatgtta

SEQ ID NO: 50 - DNA, 1233 bp, unidentified
  misc_feature 1..1233: note = Ga0172380_10022713 JGI
  source 1..1233: mol_type = other DNA
atgtcaagtaagaaatttgcttttgttgtagatattaaaggtaagaaattagcacctacacctgataataatgcatggtatttaattagaaaaggcagggctaaattattacaaaaattccctatggttattgaattacaaagagaaataccaaaagaacaattagataattcagaatatattgttggtatagacgatggttctaaacatgtcggtatttctattattcagaaatgtaaatataagactaaaactatatttaaaggaactttagaacaaagaaatgacgttaccaaattaataagtttaagaagatcttatagacggcatagaagagggcaaaaaagataccgtccagttaggtttaataatagaagttcatctaaaagaaaaggtagaatacctccatctattaagcaaaagaaagatgctattttaagagtagtaaataaattaaattcattacttccttctatatataaaatatttttagaagatgtagcaatagatattcgtgtattacaagatggtaaaaagttatatggagggcaatataaaatttctaatagattagacgagaatattcgtaaagctgtattgattagagataaaaattcttgtatgaactgtggtagatctaattgtaaacttgaaatccatcatataattcctaaaagaatgcaaggaaataatactatggataatcttatatctctctgtgagaaatgtcacaaagaggtaacaggacaagagtttagatttataaataagtttcaacaattaatcaaaggtaaaaacattcgttttgattatgctcaacatgttatgcaaggaaagacttatttaagaaataatttaagagatatagcagaagtaatcctaactactggaggagatacggctaacaaaagaataaatttaaatattgaaaaatctcattctaatgatgcagtagtaattgctggaggtaatgaaattacactttatgattgggttattaaacctctacgaaaaaaatcaaaaagtaaagggtatataattaatggttttagatgtagagacattgtaaaatatactaaaaaaaatggagagtcatataaaggctatatcacaagtcttgatccaaaaagaaatacttgcaatattactacatttaatggtatgcaattaataagatatggaataaaaagattgatcttgatagatcgtccaaaaaatgtaatatggatttaa

SEQ ID NO: 51 - DNA, 289 bp, unidentified
  misc_feature 1..289: note = Ga0172380_10022713 JGI
  source 1..289: mol_type = other DNA
aacagtaatttcttaagtggacacatagtctttagaaattagttgtttgagtgctttctagcctaagtgagtgtaaaaaatcgaaagatttttagcacgatgaactacgttagcggacaaaggcaaagacacacctttagatgtatccagcagtcttaagctctgtgagtattgaggaagaacaatttctaatgtcctgaagttaatcaccaaaaatacatgtcctcccgctgacattggcaagcaggaaaattcctaataagtgggtgacagagatgtcaagtaagaa

SEQ ID NO: 52 - DNA, 1281 bp, unidentified
  misc_feature 1..1281: note = Ga0310695_10007302 JGI
  source 1..1281: mol_type = other DNA
atggtttatgtattagataaggatggaaaccctctcatgccaaccaaacggtatgggaaggtaagacatcttctaaaggatggcaaggcagttgttgtcagacgtgatccgtttacgatacggcttacatacgacagcgggaaacacacacagcccgtaagccttggcgttgatgcaggaagtaagcatatcggtctatctgctacaactgaaaggaaagagctgctttctgcacaagtagatttaagacaggatatcagtaagttgctcatggctaggagagaaacacggcgtagcagacgtagcagaaagacacgttacaggaagccacgttttcagaaccgtgtccatagcaagcagaaaggatggcttgccccatctgttcaggcaaagtgcgatacacacgttaaagtcgtaaaggatgtatgtaggatactccctgtaacaactataacgattgagatggcaccttttgatacgcagaaactgaaggcagacatccttggtatgaagactccttcgggaactgactatcagcatggggaagcagaaggctttgataatatcaaagcttatgttaaatggcgtgatggttataagtgtgccgtatgcggtgcagaacacgttcaactacaggtacaccacaaaaagcaacgcaaggatggcggtacggatatgccggcaaatcttataaccgtctgtgctgactgccacaaggcataccacgcaggaactcttactggcagaaaatccgaggtcatgagacctgacacaaagataaagactatgcaggatgcttcgttcatgggcatcatgagatgggctgtctggaacaggctcaaagcactcggtatcccgctccacatgacgtacggttataagacggctgaaaagcgtaagcaatgtgatttgccgaaagatcaccgcattgatgcaaggtgtataagcggtcaccctgacgtagaacccgctggtgaatggttcttctgtaagaaggtgcgatgccacaacaggcaaatacataaggtcaagacactaaagggcagcatccgtaaacgcaatcaggcagaacacgagattaaaggcttcagactgttcgataaagtcaaatgtaacagtacggagtgctttatcttcggaagacgttctgccggatacatggatgtgcgtacgcttgatggaacaaaaataaatgcaggtatcagttataaaaaactcaaatttgttaaccctgcaaaacatttactcatagaaaggaggtgcgtctcctcccgcgactaa

SEQ ID NO: 53 - DNA, 309 bp, unidentified
  misc_feature 1..309: note = Ga0310695_10007302 JGI
  source 1..309: mol_type = other DNA
gtcaatgacccatgactaaagtcacgagcttgtaatcaaaagctccattgactagcctaagccttgaaataaaggctacgttagatatgttatcacacccgtgggcgtagcacctaacctacggctctgtgcgggccctgtaaacagcggtgagagggtaaaccgcagtcaacccaagatgaccgagtacggaaagcatttctaacattggcgaaggtgtgacaactgatatggtttttacatctgaaattcagaatgtaagactgtagtaaggcttactgtttaagtacagtagaaaggtaacttatg

SEQ ID NO: 54 - DNA, 879 bp, unidentified
  misc_feature 1..879: note = GENOME_ACESSION: mgm4547164.3 MG-RAST
  source 1..879: mol_type = other DNA
atgaaacattcatacgttgcttttgtaatagccatggacgggacaaggctgatgccatgcctgaatccaaagaaagtacgtagattgctgaaaagcaggaaagcggtcattgcaaaatatgacccgttcacgattcagcttacatatgaaacgactaatgaagtacagccggtggagctgtccgtggatacaggtgaacaacatattggcatatccatgaaatcagaaaaacatgaattcgttcatgaacaaagagacctgcttgcggatgagaaatcacaccacgatgaccagaggcgctatcgcagggcaaggcgtaaccggaaacgttacaggaaagcccgttttgataacaggcgcattccaaaaggctggctggcaccgagcctggaccacaaaaaagaacaacacatccggctttgcgaaaaatacgtcgatgtagcaccggtcacagccatctggctggaagccggacaattcgatacaacggcgctgcaccttgcggaacaagggctgccagcgcctagtggtacggattaccagcagggaccgcggtttggctatgataacctgcgggaagccgtcttttacagggatggtcatacctgccaggtatgcggttcgactatcgggaagattaagaccaaggaaggttataagtcaggtacggtcatacttcgaatgcaccatattgggtataggaccggtgaccatacagacaggatgagcaatctcctgactgtttgcaccaggtgtcacacctcggcaaatcaccagcctggcggcgctttatatgacttaaagccaaaagccaaaactctgaaaggcgccgcgttcatgaacacggtcaggtggtacatagttaatgctttaacctaa

SEQ ID NO: 55 - DNA, 421 bp, unidentified
  misc_feature 1..421: note = GENOME_ACESSION: mgm4547164.3 MG-RAST
  source 1..421: mol_type = other DNA
gtcaataacccccactaaatcgctgcggcgattttgagggggcttgacaggaatttcaatgaattgcctttgggtgaatcattgcctgacctgttaagcccgattgattagccccttcctgtgctggcaacagtacggaaagagacgttacccgtaaataacatagtcacgccagggtgcttcacaagctctggccactgagcctgttacattaaacatccctgagggtaggggaagtgtgtacagggtatacgtaagctgtttcctccgggacatggcttatgtatataaaactgcgggataacaagggcgttgtgaaccacgtccctacggggatagatgctgtacatgctctttatgtacagaaggcgtaagccaatttttcaggaaggaggcagcagccatgaaacattcatacgtt

SEQ ID NO: 56 - DNA, 1368 bp, unidentified
  misc_feature 1..1368: note = GENOME_ACESSION: mgm4547164.3 MG-RAST
  source 1..1368: mol_type = other DNA
atgacaacaatagtttatatattgaacaaagatggaaaacctttaatgccaacagaacgacacggaaaagtccgaaaacttttaaacgaaaataaagcgattgttgtaaagaaaattcctttcacaataaaattgctttatgaccaaacggaatttacacaacccatcacgctcggtattgacacaggtgctaaacatattggtatttctgcaaccacagaatcaaaagaattatatgcaggagaacataatcttcgtgatggaaaaacaagtgttacatcacttatgacaaagagaagaacattaagacgagcaagacgcaacagaaaaactcgttatagaaaaagccgatttgaaaatcgcaaaagaaaacctacagatggattcgacaaatggttaccaccaacaatacgcacacagattgctggtcatgaacatgttatacaagaagtatcaaagattcttccaatatcacatatcatagttgaaactgcttcgtttgatacgcaacttttaaagaatccagaaattcaaggaattgaataccaacaaggagaaatgagtgattggtcagctaacttaagagaatatatacttgcgagagacaattacacatgtcaatggtgcaaaaaaagttcattccaacatgatttggttctccaaacgcatcatatacagtttagaagtaatggaggttctaatagaccggacaacctcataacgctgtgtttggactgtcatcaaaaactccacaccattacaaaagaaactggaaaaattcctattgatttaagaaaatcgccaaatcttaaatgtgcagcatattcatctattatgaaatatggaatctttaatatggcaaaaaagtatgataaaaacgcaaacatgacatttggttataaaacaaagaaaacacgaatcgacacaaatcgaaaatttggattacatcttccgaaacaacattatattgatgcaagatgtataaccggaaatcctacagcaaaacctcttggtcaaatatacgtttcagaacaaagacgatgtcataatcggtccttctttgacacagtacctattaggatacctaaaaaaccaaatgaaaaagcacttatcaaaaataactcatatttcagaccccaaatagtcatgaccgatatccttggatttagagacggcgatataatagaagctgataatactctatacatggtaaaaagacgcggagatttaaaaacgcgtgtagcactcggatgtattcgttggaatagcgatgacactacactagaaacaatctcctcaaacaaagtaaagctctggtcaagaaataaagatagaattgtaattctaaaagaaaatattggaggataa

SEQ ID NO: 57 - DNA, 302 bp, unidentified
  misc_feature 1..302: note = GENOME_ACESSION: mgm4547164.3 MG-RAST
  source 1..302: mol_type = other DNA
ataaaacctcaaacaatagattcaaacacatattatttaacaataatcataagattatactaaaacaagactaagttccaaataaggaactacgttatgtgagaatatatagttacctgtcgatagaagccaagtcttcagctctaaggtcttagtttaaacagtcctattaggtagggacagtgattaagacatataaaacctcacaataacattgtcgatggctaccattacgagttatgcatctcggcttacagcaataaaatgcatacgataataacaagaaaggaatgacaacaata

SEQ ID NO: 58 - DNA, 1287 bp, unidentified
  misc_feature 1..1287: note = Ga0255336_100223 JGI
  source 1..1287: mol_type = other DNA
atggcagtattcgtactggatcgacgcggcagaccattaatgccgtgttcggagaaacgggctcggctgatgcttgagcgtcagcgagcacgcgttcatcgcgtgatgccgtttgtcattcgtcttaccgaccggctcctcgaggaaagcacattgcagccggtacgcattaagattgaatccgggagcaagataaccgggctcgcactggtgcgagaggatggcgagtcgaccgccgttcttaacctgtttgaattgatacatcggggtcgtcagatcagcgagggcctatctgcccgcagcaacttccgccgacgcaggcgcagcgctaacctgcggtaccgggccccacactatgccaatcccgcacgaacaagtggttggctcccacccagcttgagacatcggatcgacacgacgaaatcatgggtgacgcgttttatccggtgggcaccagtgagcggacttgttagcgaactggtgcgctacgacctcgcagcggcagaaggtgacgagagagcctccgacaataaggagcatgctgaaatcgccgcccaggagatacgcgcgtatctcttggataagtggggacgccaatgcgtttattgcgataccgatcgccaacatctgcagattgacccgatcgatcttcgtacggcaggcgagccggcaaggcacatatccggtttgatcctggcctgtacttcctgcatcgcgcggcgagctggacgtgacattggcgagttcgtcaccgatcgggcgcggctcgagcggctgcggaactggacaaaagcgccgcagagagatcgcgcggctgtagatggcgcgcgttcggccatcgcgcaattcctcgcaacgacggggctccctgtcgagctgtccagtggcggacgcacgaaatggaaccgtacacgccttgctcttcccaagtcgcaggctctggatgcggtatgtgtgggcgcagtcacggctgtcgtctgctggcgtattcccgtcatcaagataaagtgtacgggccgaggccgataccagcgaacacttgtgaacgcgtatggcttcccccgtgcccacctgatgcgcaacaagcgcatacataacgttcagaccggtgatcgcgttcgcgccaccgtcccgaccggcaagaaagctggtatccatacggggcgagtggcggtccgttcgcgcggctattttgatgtgcacaagccagacgggccggttactgggattcaccatcgatactgcgtcgttttgcagcgggctgatggatacagttattcgatgtaa

SEQ ID NO: 59 - DNA, 270 bp, unidentified
  misc_feature 1..270: note = Ga0255336_100223 JGI
  source 1..270: mol_type = other DNA
gtcaatcgctccggcctaacggccgaggcttgcaaaagcctgaggttgaccagccagagccctgcaaggggctacgttgtgcagaagttcaagacccactccgcgatgcttcctcagttgcggacactggaacctgcggcagtagacacgcttcgagcaagcacgaaacgggtcgcggggtaacgctgctgtacaacattggcgaggggagcggagcccgaatggctcccgtaacaaggttccgtaagggacaattgagaacacatggca

SEQ ID NO: 60 - DNA, 1275 bp, Moorena sp.
  source 1..1275: mol_type = other DNA
atgtccaccaattatgtatttgtacttgatgcaaataaaaagcctttagcaccatgcaaggcaggaatggcaaggtcattattaaaagcaggtaaagccaaggtttttaggcgctatccattcagcataattctcaataaattggtagcagaaaaacatcaggatttacagctaaaaattgaccctgggtctaagcaaacaggttttgctttagtaactcaagaaggggaagttatttgggcgatggtcttaatccatcgaggtcaacaaataaaaaacgctatgcttaggcggcgaaatcttcggcgaggtcgccgccgtcgaaaaacccgctatcgacaaccgcgttttcttaacagaaagcgtaaaaaaggatggctgccaccaagtttaatgcacagagttttaactgtagaagcttgggttaacaaattatgcttcttagcacccattaattccctagcaatggaattagtaaagttcgatacccaaaaagttgaaaatcccgaaatctctggaattgaataccagcaaggaactttatcgggatacgatcttcgcgaatatttgctcttaaagtttaatcgcaaatgtgtttattgcggcgcaaaagatactcgcttagaaattgagcatacaactccccgttcaaaaggtggaagcaatagggtgtcgaatctagttattgcttgtcatcaatgcaacaaagataagggtgctatggatattagagaatttttgaaggataaaccatctcttttggaacgagttttgaaacaagccaaaacgccattaaaagatgcagcagcagttaatgcaactcgttggaaaatctttgaaactttaaaaaagacagaactacccgttgttaccgggagtggtgcgcaaaccaagtacaatcgtcgtcgattggatttaccaaaagaacattggatagatgcagcgtgcgttggggaagtagaaaaattaacaattcttacggctcaaccattgattgttacagcaatgggacacggttgcaggcagatggtacaaatggataaatatggttttccccgcaaaggttataaggctacaaaacctgtccctggttggaaaactggagatattatcaatgtcgtaaaaggccaaaatattggactaaaaggagtcaggattaaaactgtaagaagtaaaggcaattttgatatccgacatcaagatgaaattttgtctgtttctcgaaaccatatccaacccgttcacagacgagatggatacaattactcgttttga

SEQ ID NO: 61 - DNA, 253 bp, Moorena sp.
  source 1..253: mol_type = other DNA
ataaagactaaccacaaatctaatcaaaacgcttatttgtgtttaaatggttagtccagcctacttttttaaggtaaacgttattttggtcacaatacgtcggaatgcgcggccagttccgacctctattgctcggcattaaacaggcaaagagacttgaaaagctagtgtgtcgagcctaacaagccaaaataaccgggcgaggccaactttacatttctataggagggacgcaacaatgtccaccaattat

SEQ ID NO: 62 - DNA, 531 bp, unidentified
  misc_feature 1..531: note = 11783J13700_1016113 | JGI
  source 1..531: mol_type = other DNA
atgttacgagtaccagttctatcaaagtcaggcaaacccttaatgccgactaaacctagtcgtgctaaccagacaccagagacacacgctgttgatggtgtgagcctagcggcgtttgagtttattcaatggcgggagcgatattctaagaatgccaagcatggcaactgggagggtggtgttcatataacaccagcgccgtttacggtaatccgcagaccacctattaaccgccggcagttgcacctatttgttccatccaagggtggcaagcgacgaaagtatggcggcacggttactcgtcatagcttcagaaaaggagacaaggttgtagctgaaaaagccggaaaaacctatacgggctggtgttctggagacaccaaaacacaggtttctgtttctaacggaaactggaaacgaattgggcagtttactgccaaaaaagtcaggttgttgcagcgaagcacgggtttaatcgtcgtgccttcaactggattgtcaaatcttaccactcaaagtggtaagatttga

SEQ ID NO: 63 - DNA, 313 bp, unidentified
  misc_feature 1..313: note = 11783J13700_1016113 |JGI
  source 1..313: mol_type = other DNA
ttcaataaccccaacttacttcgttgaagttggggattgccggacaaacggactgtttaaaccgttgaataccacatagagtctcggtttggtacaaactctcggatgcctccctagtccgagttacatttaaggctttttgtcgagtcgctgttaagtcaggacatcttaaccgagatggtgggaagggacatagtggtcagtggtcagtggtcagttatcagtggtcagtaattggctgataaatgataaccgatacctggtaactgataactgataacttaactcgtgaggtttatcacccatgttacga

SEQ ID NO: 64 - DNA, 783 bp, Moorena sp.
  source 1..783: mol_type = other DNA
atgcgagttttcgttctagacaaaaaccattatcctcttgacccctgccacccagcacgggcgagagaactactacactcaaggagggctaaagtatacagacgctatccgtttactattgttttgcaagacagaacggttgaagaatctacaactcattctcatcggattaaaatcgatcctggtagcaaggttactgggtttgcagttgtccaagaagagacaggacgtatcacaaacgcccttgaagtctctcatagaggacaacaaatcaaagattctcttgagtctcgtagagctttaaggagaggtcgtcgtaaccgtaaaacccgttaccgcaagtctcgttttcttaaccgcactcgtaaacaaggctggctaccaccatcacttgagagccgaatttccaatattgaaacttgggtcaggagaattagaaaattgtgtccaatcactgcaatttctcaagagctagtcaggtttgatttgcaacagattaaggtagcggcaaaaggacacggaaccagacaacgatgccgtcctgataagtttggattcccaaaagctcatgctccaaaggctaagtttttccaaggctttcaaactggcgatatcgttaaagccgatgttcaaaaaggtaagtttacgggtcaatatgttggtcgaattgccattcggttcagaccgagttttgtcctgcaactaccgaatcaaaagtttgatgttcaccccaaatacctaaaaactatccacaggaatgacggctatgaataccaattctga

SEQ ID NO: 65 - DNA, 262 bp, Moorena sp.
  source 1..262: mol_type = other DNA
gtcaacaactcaccgttaagttctagcgaactataacgggagcttgaaataaagctctagttgaccagactaaggtttgaaataaaacctacgttcagagtaagagttaaagttcctaccttaaaatacgtgccagttttaagctctagaactagaaagttaaacatctgtagttgagttaaggaagtgctttctagatgtaccgactttgaacattgtcgaggctaactttaccagaaatgagagtctcaaagtaatgcga

SEQ ID NO: 66 - DNA, 756 bp, unidentified
  misc_feature 1..756: note = Burkholderiaceae bacterium 16
  source 1..756: mol_type = other DNA
ttgcagacaagcggcagggtaagcacgaaacggatccgggcacatcgccggttctcaacatgccgaggggagacctcccggaagggaggtgtttcccggcccgtaacaatgagggggattgccatggcagtcattgtgttggacagaagcagccaggcgtcgatgccgtgcagcgaggagcgagcccgccagctctccgagcgcggtcgcgcgtgcgtacaccgcctgatgccgttcgccatccgagatcgccgccgagcggactgcatcatcccgccgatgcgcatcaaactcgatccaggctgcaatgtcactggcatggccgtcgtgcgcgcggtcgatgccaatggcgctgcaccgaggcgccatgccgtcgcgctattcctggttgagccgatccaccacggcatgcggatccgaccgaatctaagtgtgcgcaggcgccatgcaccaaccgcgccgcagctgcaagccccgttatcgcgccgctcacttcgacaatcagcgccggcccgcaggctggctggtgccccgcctgcagcaccacatcgacacgacaatggcctgggtgcgcgcaccaagtacaaccggcggcgccttgatctgcccaagacccgcgccatcgatgcactgtgcatgggcgctgtcgtgtctatccagcattggcaggtaccggtgcagcccatcaaatgcgtcgcacgcgactcggcaccgtcggcttcccgcacggcgacctcatgcgcagcaagcaggtga

SEQ ID NO: 67 - DNA, 242 bp, unidentified
  misc_feature 1..242: note = Burkholderiaceae bacterium 16
  source 1..242: mol_type = other DNA
gctgtcaacccctccctgacggatggagctctaaggcagctccgctacgttgtcaacaggggcaagaccaacgttgggatgcttcactcagtcccaacctccgcaagccccggttgcagacaagcggcagggtaagcacgaaacggatccgggcacatcgccggttctcaacatgccgaggggagacctcccggaagggaggtgtttcccggcccgtaacaatgagggggattgccatggca

SEQ ID NO: 68 - DNA, 435 bp, unidentified
  misc_feature 1..435: note = filamentous cyanobacterium ESFC-1
  source 1..435: mol_type = other DNA
atgcaacgtatcccagtacaaaaccctgacggcacaaccgctatgcccacaaagcgcacccgcgctgaaaaatgggtaaaacagggtaaagcccagtgggtcaaaaccgacctccgaatcaaagctgtccgcctacgcactgttacccgacacggcttccgaaaaggagatttggttcgggctgaaatggcaggacgcatctccatgggctatgtgagtggtgacaccgcccgtcaggtgtctgtatctgatttcaattggaagcgaattggccagtttaccgcttccaaagttcaattactcgatcgcgcaacgggcattctggttacttgcccgaagatattgttagtcaacggggcaaccccgccgactaacgctcctatccctctctcacctgctgcgcgaggtgggggtatcaaaggagttttttcatga

SEQ ID NO: 69 - DNA, 224 bp, unidentified
  misc_feature 1..224: note = filamentous cyanobacterium ESFC-1
  source 1..224: mol_type = other DNA
ttcaatgacctccaccgactacgcgcgtgtatgggggagcgatcggagataacccggtcgtagctgcgaataggctattcaggttagtgcggcaacacttccagccgcttctctaggttggattatctgtaaggccctggaatctcagggagtggtatcaaaccagacacaccgtactagctggcttaagagacctgtagttggggaattatcttccatgcaac

SEQ ID NO: 70 - DNA, 1356 bp, unidentified
  misc_feature 1..1356: note = Erysipelotrichaceae bacterium SG0102
  source 1..1356: mol_type = other DNA
atgagcgtatgcgttgtagcgccggataaaaagccgctgatgccgacaagcgagtaccgtgcaagaaagctgctgaaaagcggcaaggctgttatctttaagtataagccgttcacgatcatgcttacaagaatcgtaagcgagaatatgcagccgatcgagtactgctgcgatacgggatacaaacatattggtgtatccatcaaatcagaaaaacacgagtattttgactgccaatttgacatgcttcaggatgagaagaagcggcacgatgaccgtcggaaaatgcgccgcgcaagaagaaacaggcttcgctacagaaagccccgttttgataatcggacagcttccaaaaaggaaggatggctggcgccgtcgctgagaaacatccgtgatcagcatatccgtatttttgagcggttccttgaggtcatgccgatagtctcagccacgtttgaaatgggctcgtttgacgtccacgccatgcatgagtttgaggcaacaggcaccgtgcttaaaggcgatgattatcagaaggggccgcgatacggcatgaacacgctgagaaaagccgttttctatcgtgacaattacacatgccaggtgtgcggggaaaccgcggatgaaggcgctattctgagagtgcatcatatcggcttcgaaacaggcgatcatacgaaccgcatgagcaatctgctgaccgtctgcacaaaatgccatacttcggcaaaccacaagccgggcggaaagctgtacgacctgaagcctaggacgaagccgtttaacggcgcagccttcatgaacgctgtcagatggcagatgttcagaacgctgaaaagcacccaccctgatttagaatggcacatgacatatggcgctgctacgcaggaggcaagaagagtcctacaccttgaaaagtcgcatgccaatgacgcctacgccatgggagaattccatccaagacgcaggacgccttttatgcattttcagaagctgagacggaataaccgcatccttgaaaaattctttgatgcaaaatacgttgatgcgcgagacggcaagacaaagaaaggtgcagagctgtcatgcggacgcacagacagaagcgagtcaagacactccgagaagaaccttcgcgtattcagagagcggaaagtttcgaaaggcagacgcgtgatcagaagaagccactataaactgcgtcctggcgatactgttgttattggcggagagaagcatagggcaaagggcgttcataacaaaggcacatatgttgtgacagacgccaagaagtcagtgcctgttaagaaagtagagaagattattcatgcaggtgggtatatgcctgttaaatag

SEQ ID NO: 71 - DNA, 338 bp, unidentified
  misc_feature 1..338: note = Erysipelotrichaceae bacterium SG0102
  source 1..338: mol_type = other DNA
gtcaactacccgcgactaaagtcgcaggcttgtctcgcgcaagtctaagactggcgtcggtacatatgtactagctgattagcctaatgtgtttcgggcactacgttatccgcaaaaatacaggcacctggggattcttcccacgtccctcgctctgcgggcatgcattaaacatctctgacgtgcaggagaagtgtgcatgtcatacacaactgcggataaccttggcgatgggaactaccctgaaagggagaaactgcatatatactgcctctggcaagcgtatgcaggcgtgcgtaagcgcacacttattcatcaatcttagctcagctgattaa

SEQ ID NO: 72 - DNA, 1254 bp, unidentified
  misc_feature 1..1254: note = Ga0075125_10000791 JGI
  source 1..1254: mol_type = other DNA
atgttagtatatatactgaataaacaaggtaaaccattaatgccttgtaaacccacaaaagcaaaacaccttctcaaagaaaaaaaagctagagttatccaagtagaaccatttatcatccaactattgtttggatcaagtaattatagacaaccaataacattaggtgttgatccaggataccaaaatgttggtttatctgctatatccaataaaaaagaaatataccgaagtgatgtgcaattacgaatagatatacccaaacttttaatggaacgcaaaatgtttagaaaaaatcgcaggaacagaaagactcggtatagaaaaccacgttttgataaccgtagcaaaaaaaacggtcggcttgtaccaagtatcaagcacaaacttgatagtcatattcggttagtaaatgcagtcgaaaaaatattacctattactaaaattattattgaggttgcatcttttgattcgcagaaaatgcagaaccctgagatatccggagttgaatatcaacaaggaactctgcatggttatgcagtaagagaatatttattggaaaagtggagtagagagtgtgtctattgtggaaaaaggaatgtacccttggagatagaacacattgtgccaaagtcaagaggtggtacagatagagtatcaaatcttacattatcatgtcacgaatgcaatcaagaaaagagcaatatgactgcagaagagtttggacatccagagattcagaaacaggcagaaaaatcgttgaaggctacagctttcatgaacattgttcgttggaaattggtaaatattttgaactgtaagcatacatatggtaatataactaaacgcaacagaataaaaaatgatattgtcaaatctcatagtaatgatgcttttgttatagctgggggtactaaagatgtggatcgatcagatgttctcatcaaacaaaagcaggtacgcagaaacaatcgcaaactggtcaagggtcagagaggtgagatatctaacaaatgtccaagagaagtattcggattcagattgtttgataaagtagtatataataacaagaaatattttgtttggggacgtaggaaaggaggatcttttttgcttaaaactttatctggtgataaaattgagagaacatataaaaagttacaaaaggtatgtggtcaggtttcttttcttgttgagatccaattttcatccattctaaacgaaggttttttaagaggtataatcaatgaataa

SEQ ID NO: 73 - DNA, 236 bp, unidentified
  misc_feature 1..236: note = Ga0075125_10000791 JGI
  source 1..236: mol_type = other DNA
ggtcaacagccctattctaatgaacaaatcttatgaagttgactaggaggcataatatgcagacgttaagaagaagaaacacatacacaccttaccgtaccactctagcggcaagctctgtgaccatgcaattaaacagacctgttagggtagggttagtgttgcaaagtctcaaaactcttcttaactctccgaagagaccattactcggaaacaggaggtatactttatgttag

SEQ ID NO: 74 - DNA, 1005 bp, unidentified
  misc_feature 1..1005: note = Ga0180109_1294567 JGI
  source 1..1005: mol_type = other DNA
atggcagttttcgtattggacaagaggagcaaaccgctcctcaatcgcaggaggcccgcgggctctcttgcaccctccctgcgccaccgagtcgatacgacgatggcatgggtgcagcgtatctcccgatgggcacccgtgacagcgatcggtacggagctggtgcgttttgatacccaggcgttgcagaacccggacatcgaaggcagtgaataccagcaaggcgaactcgccggctatgagctacgcgagtatctgctggaaaagtggggtcgctgctgcgcctactgcggcgcgacggatgtgcccttgcagatcgagcatatccacccaagggccaagggcggaagcaaccgcgcggccaatctcacgctcgcttgtgtgccctgcaatacggcgaaaggggcaagggacgtgcacgagtttgtcaaggacgacacgcgcctgaaacgcctcctcggacaggccaaagcgcccttgaaggatgcggcggcggtgaatgcaacccgccggatgctttgtcgtgccttgaaggccaccgcactaccggtagaaatcggctcaggcggccggacgaagtggaatcgttcgcgtctcggcattcccaagacccatgccctcgatgcggtctgcgtcgggcgcgttgaagcggtgaagggatggcagatcgccgcttggcaactcaaggccaccggacgcggaagctaccagcgcacccggctcacgaaatacggttttccgcgcggctacctgatgcgcgaaaagcgggtgaagggtttccagacaggcgatttcgtcgtggccgcagtaccgagcggcaagaagactggaatctatactggccgcgttgccgtgcgaaaatccggcagcttcaacattcagaccgcatacggcgtcgtcgaaggcatcggccacaagcattgccggcggattcagcggtctgatggctatgggtattttttacaaccatgggccgtaacaaaaggagagcgggagggactttcg

SEQ ID NO: 75 - DNA, 298 bp, unidentified
  misc_feature 1..298: note = Ga0180109_1294567 JGI
  source 1..298: mol_type = other DNA
gtcaatcaccccggcctaaaggctggggcttgagggggcaaccccaaaagcccgagattgaccagggaaagcggtagccaatccgctgcgttgcaacgaagtacaagacccacatacggatgcttcctcagtccgtagcactggaagcggcagatgcagacaaggtccgggtagctacgaaacggtctgctgtaaggcgaaaacccaagctgcgttgcaacattcccgaggggagcggtgctgcaaggcacccgtaacaaggcccgtaagggcattttagtggacaagaacgatggca

SEQ ID NO: 76 - DNA, 1485 bp, unidentified
  misc_feature 1..1485: note = Ga0073583_1167572 JGI
  source 1..1485: mol_type = other DNA
ttgaacgcgaagttaaagaccgacggtagggtgcttcctcagccctgccctctcgaagctcatgctgcagacaacccggatcagggacgaaacgggtgtgggcgcgatgctgccgttcaacatggtcgaggggagcccaacggaaccgtcaagccgttggcgtcacgggcggaagcccagtgcggcgtaagccgcgtatttgtgctggatcgaaaggggttacccttgatgccttgtcatccagcccgagcccgcaagctactcaggaacggtagagcgcgggtccatcggctgattccgtttacgatccggatcgtagatcgagacgtcgaagacagccaactgcagccagttcggctcaagttggatcccggttccaaggtaaccggcatcgcgatcgttcgtgaggacggtgctgatcagcatgtattgcacctggccgagcttcaccaccgaggacaggtcgttcgcaagaaaatgcaacagcgtgcgatgtaccgtagacgtaggcgttctgctaacctccggtatagacagcagcggtttggtaatagaaagcatagacttaaaatcggaggaaaatggctaccgccgtctatacatagttgcgtaagtaatatacttaattggtctgtaaattacagagggtggtgtccggtttccggacttactgcagagaccgccaaattcgacacccagttgatgcaggaccccgagatctcaggcatagaatatcagcagggcgaactccaaggctacgagatccgggagtatctgctggagaagtggggcaggatgtgtgcgtattgtgctggtaaagacatcccgttgcaggtggaacacgtggtgtcgaaagctaagggcggctccagccgtgtcagcaatttgacgttggcctgtggtccctgcaaccaagctaagggtgctcgggacgtccgtgagttcttgcaggggcgccctgccagattggcccatctactgtctaagacgaaaaggtcgctgcgaagtgcagcagtaatgaactctacacgtaatgctttgctcggtgcattcgcctcggcgggttttttggtagacacagctacaggaagtcgtaccaaatacaatcgagaacggttacgcgtcgcaaagacccatgcccttgacgctgcttgctgtggtctagttagccgcgttttggggtggggacagcgtgtattgacaataaaagctcagggccgaggaaaataccaaagaaccaccacgaccaagtatggcttccctcgaagctattcgatgaggaaaaagaaagtacatgggtttcaatctggtgatcttgtacgcgcagtaatcaccaaaggaaaatatgtaggtatacaccaaggaagtgtagtggtccgctcgcggggctttttcgacgtaaagacaccagaaaaaattggtgttaattggcgctattgctcactacttcagagatcgaatggctactcttgtagctacagctaa

SEQ ID NO: 77 - DNA, 233 bp, unidentified
  misc_feature 1..233: note = Ga0073583_1167572 JGI
  source 1..233: mol_type = other DNA
gctgcagtcagacgatcttctcttcggagaaagccccatgggctcatgctgaccagaccaagttcacagaaggctgacagccgcaaaaggaactacgttgaacgcgaagttaaagaccgacggtagggtgcttcctcagccctgccctctcgaagctcatgctgcagacaacccggatcagggacgaaacgggtgtgggcgcgatgctgccgttcaacatggtcgaggggagc

SEQ ID NO: 78 - DNA, 957 bp, unidentified
  misc_feature 1..957: note = Ga0070741_10072506 JGI
  source 1..957: mol_type = other DNA
atgtcaaaagttttcgtgggagatacccaccgaacgccgcttgatccggttcatccgggccgcgctcggcttctgctcaagcaaggcaaggcagccgtgtttcggcgctctccgtttccgctcctcttgaaggtgcagggaacctatccgaagccacagccgctgcgagtcaagatcgatcctgggagcgacgtccccggtctggccgtcctggatgacgccacgggcaaagggatctgtgcggtggagttggggcaccgtgcaggcacgagtatgcatgcactggagagctgcggagcaggccggcgctcgcgccggcaacgctacacccgttaccgccaggcaagatggcgcaatcggcgggccaggtatcgcactcgcgaatgccagggtcagccatctcttgcactgtctctggagagcagactcgccaatgtgctgacccgggtgcaacggcttcgtcggttcgcgccgattcctgccatcagtcaggaacgggtgacgtttgatatgcaactggtgagccatctcgaaatcagcggcgaagaggaccaccagggcgatgtacggggccttgaagtgtatgagtatctgctcgagaagtggggcaagccaggtgcctcctgcgcgacaaaacacgttccgctccagattgagcatatgctggtccgcgccaacggcggaaccgaacgggtgagcaatcgttgcctggcctgtgagccctgcaatctcaccctggcgaagaagccggaggtgcttgagcgtatgctggcacaggccacggctccgttgaaggatgcggcggccgtggatgccatgcgaggggcaccgtatcggcggctggtggcgttggggttgccggttgaggcagagactggcgggaggaccagatggaatcgcaccacgcgccagttgcccgggatgcatcgggtggaggcagcctgctccggtgccagt

SEQ ID NO: 79 - DNA, 263 bp, unidentified
  misc_feature 1..263: note = Ga0070741_10072506 JGI
  source 1..263: mol_type = other DNA
tcatgaacccctgtattcaatgcaggagcttgcagtgaggcatcagctcccctgtaagccctcatcatgaccttgaaagagagcctgcgttttcaggaagcgttcacgttcctcccttcgggtgcgcggccatagtgaaacaggtcgaggaggtgaaggcagtactgagaagacagttaccgcctgaaaaccttgtcgaggccaacgttacccgtgcaagcggagtccctttcgagggcagaaagtcaagcatcatgtcaaaa

SEQ ID NO: 80 - DNA, 804 bp, unidentified
  misc_feature 1..804: note = JGI12273J12029_10000967 jgi
  source 1..804: mol_type = other DNA
gtgcccgtagtaagtcaagacgcaaaaccactaatgcccacaaagccaagcagggcaagaaagggggtgaaagttggtaaagcaatcggcaaatggtcagacttaggagtctactatgtgcaactgctgcaaccatcgggagaagaaacgcagcctattgtggttggagtagaccccggtaaatcttatgctggaatcggagttcaatccgctaaatacaccctactaaggctgcacttaatccttccctttggtcgtgttcgagaaaggatggataaacggcgagagttgaggcgttctcgccggggaagaagaattaaccgcaagctaccacgcaagctacgcaatcaccgacagtgcaggttcgacaatcgtaaacagtctaagattgccccttcaatcagggcatctcggcaactggaactgagagtagttaaggaattatcaaaaatattcccaataatcacgataggttacgagcgagtcagagcgaatgtagacagaaccaagaggaagaaagccaagtcaggtaaaggtttctctccggtgatgtcaggtcaaaactgggctatcgaacaaatgggagctattgcacctgtcttcattcgggaaggatggcaaaaagatggcaacggtacatctcagattagaaagcatctgggattggaaaaggacaagaaaaacaaaggcgaggctaagccagaaactcatgcagtagatggtgttgccttagcagcaggatactttgttcaatacagccgtcacatccgtgtaaatattcagggatatatctggaaaggcaat

SEQ ID NO: 81 - DNA, 232 bp, unidentified
  misc_feature 1..232: note = JGI12273J12029_10000967 JGI
  source 1..232: mol_type = other DNA
ttcacgaacccctggctagtacgttgagccaggggattgcaggagataaccctgcatgaaatcgtgaatacggctctcgttggcgcgagacaaacacttccgaatgcttccctaattcggatgaaatgtacagaccctggaatcttagggggtggggtaaagcccagaaacaatcgcgccaatgccgtaagggactataaactttagctctaaaggattatctccatcatta

SEQ ID NO: 82 - DNA, 1278 bp, unidentified
  misc_feature 1..1278: note = MIS_10001517 JGI
  source 1..1278: mol_type = other DNA
atgaataatgtgtttgttttggatacggggaagaagcccttaagtatgtgtagacctgctagggctagacagttattgaaagaaggcaaggctgctgtatataggaaatatccatttacgataattttgaaggtggcaatgcctgaagctgtggtgaaagaggttattgttaaattagaccccggaagtaaaacaacggggattgctttagtatctgataatcgggtggtgtttgctgctgaattagagcatagggggcaatatattaaaaatagaatagttagacgtgctgcattaaggcgtaatcgcagaagtcgtaagacacgttatcgtgctgcgaggtttaataataggtgccgtaaagctggatggttaccccctagtttacaacaccgtgtattaactacgatgacgtgggttaataaatttagaaagtttgcatcagtatctgaattggcgatagagagggttaaatttgatatgcagaagatggtaaatcctgaaataagtggtattgagtatcagcaaggcacattgcaagggtatgaggttcgagaatatttattagagaagtttaatagaacctgtgtatattgtgatgctaaggatgttccattgcaaattgagcatatacatgctaaatcaaaaggtggctcaaataaaatttctaatttaactttagcctgtgaagcctgtaataagaagaaggataatttagatattaatgtatttttaaagaataagcctgagttattaaaaaatatattgaaaaaggttaaaacacctttgaaggatgctgctgctgtaaatgctactaggaatgccttatttaaagcacttttagatactggattacctgttgaaacaggaactggatcacagaccaagtacaatcgtaccaatctaaaattaccaaaagagcattggatagatgctgcgtgtgtaggtgattctggttctgaggttaaggtggatgctacttttaaacccttaaaaataaagagtatgggtcacggtaatagacaaatgtgtattactaataaacatgggtttcctattaagcacagaactaggaaaaaagtacattttggatttcaaacaggggatatagctagagttgtagtttttaaaggggttaatacgggtatccatgtgggtagggttatctgtaatattaagggtaacttttctgttagaactactgctaggatatatgaaactatctcgtataagaagttcatcttacttcaaaagaatgatggatatagttataattaa

SEQ ID NO: 83 - DNA, 289 bp, unidentified
  misc_feature 1..289: note = MIS_10001517 JGI
  source 1..289: mol_type = other DNA
ataaagaatactccgttatatacaggggcggcatcagtatatccgtgtcgaaaagttcatttaaaaactttaattagttttaatttacgaccagactaagttttaagtaactacgtacatttaatcataacacctatgaatgctttccagtttgtagctctgttgttaattatcaagatattatggttgaacacataatgaaggtgattagcttagtaagttttatgtacattgtcgaggaaaacataaccaacgaaagttgcgtaggagtattaaaaccatgaataat

SEQ ID NO: 84 - DNA, 765 bp, unidentified
  misc_feature 1..765: note = MIS_1002273 JGI
  source 1..765: mol_type = other DNA
gctgtctggaaacgttacccgttcaccatcatcctgaaagatgttctaccaaatccccaaattgcacccttgcgattaaaaatagatccaggcgctaaatttactggcttagcactggtagatgatgcaacaggagaagtagcttgggccgccgaactagaacatagaggctttcaaattcgcgatgctttaaccaaacgccgccagttaagaagaggaagacgccatcgaaaaactcggtatcgtcaaccacgctttgataaccggaaacgccctacagggtggctcccacccagtctgcaaagccgagttgagaatatcgtaacttgggttcgtaggttacaaaagctagctttgatttctgatatttctcaggaattagtcaagtttgatactcaactcatggagaatccagacatcagtggattcgcataccaacaaggtgagttagctggttacgaagtgcgagaatttctgcttttcaaattcaatcatacctgtatgtactgtggggctaaagatactcgtttggagattgagcatcttttacccaagtctaaaggtggttcaaatagaattagtaatttaggcattgcttgtaggaattgcaaccaaaaaaaaggccgtcaagctctcagagaatttttagcccaaaaacctgacttgttacagcgcattctgagacaagtaaaacaacagaaagccgacactgctgccgttaattctacccgttgggcattatttaatcgactcaaagagactgga

SEQ ID NO: 85 - DNA, 254 bp, unidentified
  misc_feature 1..254: note = MIS_1002273 JGI
  misc_feature 216..254: note = MISC_FEATURE - Any "n" represents any nucleotide
  source 1..254: mol_type = other DNA
gctatccgcgaaccactggacaaacctggacaatcccgataaatccttggtagagatagcccggttaagtctaaccacagactacgttaagaaggtcacgacaccctgtgagtgcttgccagctccttgctctgtcgctaccagttaaacatctttatttcgctaaggaagtgctgctagcatgacaagccctcttaacattaccaaggcaaaagnnnnnnnnnnnnnnnnnnnnnnnnnnnnnnnnnnnnnnn

SEQ ID NO: 86 - DNA, 1245 bp, unidentified
  misc_feature 1..1245: note = Ga0377217_000700 JGI
  source 1..1245: mol_type = other DNA
atgaccactaaacaattcagtttagttattgattcagagggaaaacagttaagtccaactaatgccaataaggcatggtatttaattaggaaacaaaaagctaaattaattacaagatttccaatggttattcaattgttcaagaagattattcctaaagcaattgataaatcaaaatttatctgtggcattgatatcggcaataaacacacgggcatcgcgattgttcaagaatgccaaactaaatctaaagtaatattaaagggaacaattgagcatcgaaatgatgttaaaaaattaatggaagagcgagcgagttatcgcagatatcgtagaaaaaataagagatatcgccccgaaagatttaacaataggggttcaagcaaaaagaaagggcgcatcgccccatctattagacaaaagaaagagtctattctaagagtaattaataggttaaagagacatgtatctatccataaatatatagtagaagatgttttaatagatataagaaaaattcaagagccaaatatttcttcaacggaataccaaaaatctaataaattagattctaatattcgaatggctgttatgatgcgtgataaatttaaatgccaagaatgtaaaagaggttatgctaaattagaagtccatcatataacgccgaagagattaagtgggaacaatacaattgataatctaataacgctttgtgtcgattgtcataaacaaacacatggaaaagaagaggtatttataaaaaaatattataatattataaaaggaaaaaatattaatttcagggacgcttcgtgcgtaatgcaaggcaaaacatattttagaggtgaattaaataaactagggatagtcgagttaacaactggatgcgaaactttttataaaagacatatgtggaatattattaaatctcattctaacgacgccatagttatttgcaataaagaggtttgtcaagaacaatgcaacataatcgattggattatcaagccattaagaaggcaaagcaaaacagaatataaagaaatatgtggattgacacatcgggattttgtatgttacactactattaagaacgaaatagtgactggatatataaccgcaatgcctattggcaaaaaccaagtaaatattcaatctaagaataaaaaatggactagggtaagagccgaaagatgctttttaattaatcgtcctaatagaataatgtggagaattaatgattaa

SEQ ID NO: 87 - DNA, 268 bp, unidentified
  misc_feature 1..268: note = Ga0377217_000700 JGI
  source 1..268: mol_type = other DNA
tcgaaatcttattaatatgttatttattcgggttcaagctcaagtgagtgcataatctgaaaggaagttgcacgatgaactacaattttacagaaggctaaaaatacacctacgaatgtaacttcagtttgtagctctgtaagcacaaaggatgaccgacacctacgacatggtgtcaaacaccgaactgcatatgccctgtaatgttatgagcaagaagtaaaacgctcgaaagaaggatggttagaaatgaccactaaacaattca

SEQ ID NO: 88 - DNA, 1395 bp, unidentified
  misc_feature 1..1395: note = Ga0180007_10009944 JGI
  source 1..1395: mol_type = other DNA
atggtattcgttatctcagaggatcggaagcctttggatatgtgttccgaggcgcgtgccaggatcctgttagacaaggggagagcggttgtctttagacactttccctttgtaatattgctcaaaaatacctggtcctttgcagccgaaactcacgaatacaggctgaagatcgatcctggcgcgaaatttgctggtcttgccatcctgagagaggataacggacaggttgtatgggcggcggagatacagcatcgcggctggaagataaaaaaggacatggacaggagacggaattgcaggagagggagaaggagcaggaaaacccgacatagagagccgaggtttgataatagaacaagaccgaagggctggctgcctccgtcgctgatgcacaggccgttgaccgtttacacctggctcaagaggctcatgaggtattgcccaatagagcacatatccatcgagtctagcaagtttgatacgcagaagtttgagaaccctgacattgaaggcgttgaatatcagcagggagagcttcagggctatgagctgcgagaatatttgctggagaagtacaacaggctgtgtatctactgcaaaaacccggcgcgtattcccaacgttgagcataatgtacctatgagccggggaggtacggacaggctaaaaaacctggttctgtcatgtgagaaatgcaacatagagaagggaagcaggaccgccgaagaatactttaagttcttacgcaagcgcgaagagaggaaattagagcgggagctgactgagctggaggcatggcggttttcagctaaaggcgcgatccgtcctgagtttatgaaggcaatagccgtgaccaacagcataaggaataaactggctgaactcctgagatcaaccggaatacctctggaagttagctatggatacgtcacgaaaaagaaccgccaggagctgcaacttgagaaggcccattggatcgacgccgcctgtgtgggaacacagaggcagccagataaggaatctattgacaagatcaaaccgttgcaaatagtctgcaagggacgtggaacgcgccggagggtccaggtttacgggccttataaactggatgataatggaaagcctattataccgaaggctaaaaaggatttccctgccgtagctcctgggatgccatgctcaaagcccaaaagcggaaatgagtttttcggcttcaagtctgtcgactacgttaaggccaggactaagcaaggggagaaaacagggagacttctttctgtgaggaaaaccggaagctttacactcagaacaagggataagcaaaaatacagcgtaaattgtaagaattgcagcattatacagcggaatgatggttacgaatatttaaactaa

SEQ ID NO: 89 - DNA, 316 bp, unidentified
  misc_feature 1..316: note = Ga0180007_10009944 JGI
  source 1..316: mol_type = other DNA
aagaatgttgaaatattttcgcaaatcggatttctgcggaaaaacccgcttgatttgcgcaaatccgtctgcaattgcataattgatggctacagagttgtaaccagcctaagacgctttataacggtctacgttatcggcagagctaaagaacgtaccctgggatgcttgccagtcccaggctctataattcatgagttaaacaggcgatctgagtcgaagccagtgctcgtgagaaaagctgaccgataacattggcgaggcaaacgttacccgcgaaagcggagttcccttacgggaaaaggaaacgcagatg

SEQ ID NO: 90 - DNA, 1401 bp, unidentified
  misc_feature 1..1401: note = Ga0233412_10000478 JGI
  source 1..1401: mol_type = other DNA
atgcagaagtttaatttaaagttaaagaacacaccaaaggatgctccacaagtcctttgctctgtaaattcttcattaaacaaagatcaaagtcttagtgtgaagaataaagtactggaattaaacagtcccgatgtggatctacctcaacgtaaagaggagaagaacttgagagtctcttctatggtttacgtattaaataaacgaggagaacctttgatgccttgttctccacagaaagcaaagaaactgattaaggagaatttagcatgtatagttagaagaagtccatttactattcagttaaaatatgcgactggagagaataagcaagaagtaacattaggaatagattctggagctaagaatataggttttagtacagtctcaaaagaaaaagaattaataagtggaactgtcattttagatgacaaaatgaaatctagattagataatagaagaatgtatagaaaacataaaagaagtaaactttggtatagaaaacctagattcaataatagagtttctactaagaaaaaaggttggctaccaccttctattttgagaaaatatcagactcacttaactcttatctataagattaagagattattacctattaaacaagtaatagtagaagtaggtaattttgacatacaaaaaattaagaatccagatattaaagggaaagagtatcaagaaggtgatttattaggatataacaacataaagtcttacatttttgcaagagaaagttataaatgtcaactttgtgacaagtctgtaattggtagaaagactaatttacatcatattatccctaaacctgaaggaactgacaagtctgataatttagccttattgcacaaaaagtgccataaaaaacttcatgaacaaggtttgcaaggtaagttaaaaaagagtagacaatacaaagaagcaacatttatgaatattgttaagaatagatttcaaaaagatttagattgtaaagtagtttttggatatgaaacttttactaaaagaaatgagttagatctgcctaaaaatcatgttaatgatgcttttgtaatttctggtggagagaaacagattaggactatcccttttgaggttgcacaaaaaagaaaaaacaatagatgtttacaaaagaatagaaaaggttttaaaccttctattaggaaacaaaggtactctatcagacctaaagatttagtaaaaatagaaggtaaactttttgtagttaaaggtatatctagttatggaaagtgtattagtctaattaacgaattaggaaaaaccgttaataaatcagttaaaaaaatagattgggtttttcataataaaacgttgatatgggagaagactacagttcatctaaaagaaagtttgcttacataa

SEQ ID NO: 91 - DNA, 273 bp, unidentified
  misc_feature 1..273: note = Ga0233412_10000478 JGI
  source 1..273: mol_type = other DNA
gtcaattaccccttcttttaggaaggggcttgaaccgtgaggtttaacgtaagagttgattagggagcttagttaagaaagttaattatgcagaagtttaatttaaagttaaagaacacaccaaaggatgctccacaagtcctttgctctgtaaattcttcattaaacaaagatcaaagtcttagtgtgaagaataaagtactggaattaaacagtcccgatgtggatctacctcaacgtaaagaggagaagaacttgagagtctcttctatg

SEQ ID NO: 92 - DNA, 1236 bp, Moorena sp.
  source 1..1236: mol_type = other DNA
atgaccgaatattgttttgtgttagacaaagacaacaaaaagctttcgcctacaaatgttaataatggatggagattaatcagaaggcaaaaagcagaactggtttccagatatcccatggcaataaagcttaaaaaagtagttaaagatgaagacacagacaaatctgaattttcatgtggtatagatacaggaagtatttatacaggcattgcaatcgttcagaggtgcagcacagggaataagccggttttcaaaggaactttggagcacaggcaagatgtaaaacaaaaaatggaaataagacgtggctacaggagatataaaagaagcaataaacgatacaggaaagcgagatttgacaatagatctgccagtaaaagaatcaacagagcagctcccagcatattacagaaaaaacaggctatcgtcagggtattaaacagccttaataagtatataaatatatcaaaggtcgtaatagaagacgtagccatagatatcagagcattgaccgaaggttgtaaactgtataaatggcagtatcagcagtcaaacagattagatgaaaatataagaaaagctgttattctcagagataagtgcaaatgcatggaatgcagcagatcaaacactaaattagaggtacatcatattgttccaaagcgatcaaacggcaaaaacaacctgggaaatttgataacactctgttctaaatgtcacgatgaaactaaaggcagggaagaacagttcatcaataaatatcaggggatgatagatggcaaaaacataaggtttgattatgcccagcatgttatgcaaggcaagaattggcttagaaaagaattatctaaacaatttcatgtggaatttacttttggttcagatactgcaaacaaaagaatcgactggaatatagaaaagacccacgccaatgatgccatatgcattgcaggccttgaagtcaatgaaagaaagtgcggtattaaggactggacgataaaaacaatcaacaggcgctgcaaatcaaaacttaaagaagaagtatgcggattcaggcacagggattatgcggaatatacagacactaaaggagtaagttatacaggatatgtaacagccatgtaccctgaattaaatgccatcaatattaactctccacaaaaacatttgaaaaaagcaaatgctgaaaaatgtaaattagtgtggaggtttaataagatatattggttttaa

SEQ ID NO: 93 - DNA, 304 bp, Moorena sp.
  source 1..304: mol_type = other DNA
tatatagatatgtacaaatatactcacagtcccataataccctgttagtatatgacttaatgtcaggtttcaagcctaagtgaatactgcactgtgaaaacatgctgtatgatgaactacgattgtatgaatgctgaagacttaccttcagatgtgatttgcagtctgaagctctaagagtacaaaggatgaccgacttctaattgggtgaagtcaaacaccgaaatacatgagcaccatactgtcattggcaagcagaaaaatcccacgaaagtgagagtggttagaaatgaccgaatattgt

SEQ ID NO: 94 - DNA, 1554 bp, unidentified
  misc_feature 1..1554: note = activated sludge metagenome
  source 1..1554: mol_type = other DNA
gtgcttcctcagccccaagctcttgaatctgtgcctgtagacaaccctggggtagggacgaaacggggcacggacaccgccgtgatggtggtagctggtgtgcaacatggtcgaggggagaccacccgtgagggtggcgtcacgaaccatcagcgggagaccgcaggtggttccggaagccgggttgtcccggcaacaacacagcagcgggtgttcgtacttgaccggcatggtcgtccgttgcagccctgccgtcccgccagggcgcgcaagctacttcgtcaaggccgtgcgcgtgttcatcgcatggtcccgttcgtggtccgcctgattgaccgggaggtggagaccagtgtcgtcgatggggtgacggtcaaggttgatcccggatcacgtactaccggtctggctgttgtggagcagcgggacaccctcaaccccgccaccggcgaaaccaccaccgtgaaggggttgtggttgggcgagctcgtcctgcgcggtctccagatcaagcgcgcgatgcattcgcgtgctgctcttcgcaggggtcgccggtcgcggaacctgcgctaccgccaaccgaggttcaacaatcgcacccgacccgagggatggcttccgccatcactacaacaccgggtggatgtcaccttgtcgtgggttcggcgtttgagtcgctgggctcctgtcatcgctgtcgcctatgagctcgtacggttcgacacccaagcgattgagaaccccgacatctccggtgtcgagtaccagcagggcgctttggctgggtgggaggttcgggagtacctgtatgccaagtgggggtaccgctgcgcgtactgcgatgcccccggggctggtgtgcagatcaacatcgaccacgttgttccccgatcccgcggtggcagcagccgggtgtcgaacctggtaccggcgtgccgcccatgcaatgaactcaaggacactcggctggttgaggacttcctcgcccatgaccccgcacgtctcgcccgcatcactgccgggctgaaacggccgttgcgggacgcggcagcggtcaacaccacccgctgggtgctgtggcggcaactcaccgccctcggataccaggtgaccaccggcacaggcgggcagacccggtggaaccgataccggcaccgcatccccaagagtcacgcgctcgatgcgctgtgcgtcggggccgttgacgcgggggctagctacacggcgggccccaaccagatcatggccaccggcaggggcagctacgcccggacccgcagcaacaagtacgggttcccccggctgcggctcacccgcacaaagcggcactacgggttcgccaccggcgaccttgtacgcgcggtcgttcccgccgggaagaacaccggaacccacatcgggaaaatcgctgtccgagcctcggggtcattcaacatcaccaccacaaccggcgtcgcccaaggaatccaccaccgtcacgtcaccctgatccaacgcggtgacggctacacatacaaaacccaaccgacacccacgaaaggcatgacatgatag

SEQ ID NO: 95 - DNA, 324 bp, unidentified
  misc_feature 1..324: note = activated sludge metagenome
  source 1..324: mol_type = other DNA
gtcaggcaccccacggctgaagccgggggcttggtgattccaagccgctagcagcagccgagtttgaccagaccgagatacctcgaagggagggatctacgttgtacataagtgagcggaccaaccttggggtgcttcctcagccccaagctcttgaatctgtgcctgtagacaaccctggggtagggacgaaacggggcacggacaccgccgtgatggtggtagctggtgtgcaacatggtcgaggggagaccacccgtgagggtggcgtcacgaaccatcagcgggagaccgcaggtggttccggaagccgggttgtcccgg

SEQ ID NO: 96 - DNA, 1263 bp, unidentified
  misc_feature 1..1263: note = Human gut metagenome
  source 1..1263: mol_type = other DNA
atggtatatatccttaataaacataatgagcctctgatgccttgtccagagagaaaagcaagacttctcttgaaacagggaagggctgtcatatacagaaaggacgtgtttaccattaaactgataaatggaagctatggatataaacagcacataacaatgggaattgactgtggaagcaaacatataggaatttctgcaacaaccaataagaaagaactgttctcggcaaatgccgaactaagaaatgacattgttaagctactttctgatagaaagtcattaagaagaaacagaaggtacagaaaggcaagatacaggaaacccaggtttgacaacagaaggattaaagaagggtggctcgcaccatcaatcagacaaaagattgactcacatgtaaggattgtcagtttaatccacaaattgttacctgtgaaacaggttaatgtggaggtggctgcatttgacattcagaagattaaaaatacagacattaaaagctctgaatatcagatgggggaacaacttgattcttataatgtaagggaatatgtattgttcagggacaatcacatttgtcaacattgcaagggaaaaagcaaggatgatgtattgcaggttcatcatattgagagcaggaaaacaggtggcaatgctcctaacaacttggttacactttgcaagacttgtcatgaaaagtaccattcaggtgaaataacattgaatgttaatcgtggaaagtcatttagggatgcgagtgcaatgagtacgatgaggtggctcttgtatgaagaactgaagagtaggttcagcaatgtgaatattacttatggttatattactaagtacaagaggattaagttaggcttgtctaaggagcattacaacgatgcttattgcatagctggtaatcttaatacaagtaggctttgcaatcatcatttaataaggttcatacctaggcatagtaggatattgcatatgcagaaattcagtaaaggcggtgtaagacgaagtgctagtgcttcttattggcttaactgtggtaaaccttcaaaaagcggagcaatgtttaccatgtttgacaaggttaagttcaatggtattgtttgtttcattagtggaagtagtaatggttatgctgcattaagagatataaattggaataaggttcacggttgtaagacaactgtaactgttaataaattagcattagtttctcgaaggcgtggcagcatgttgtttggggaattatgcggatag

SEQ ID NO: 97 - DNA, 271 bp, unidentified
  misc_feature 1..271: note = Human gut metagenome
  source 1..271: mol_type = other DNA
agacagatgtaagtatttgactatccgcaatcatccccaaagggtaattgatgggtaagcagattagcctaagcacaggtacaacctgtgctacgttagaaatgaatgtataggaacgttgggatgtttatccaagtcccaacctcttcggtcagtgattaaacagaacctaaaggaacggtgttgctgacaactgaaaccatttcataaccttggcgatgggtaacttatgggagaagtcctgggcagctctattttagctgccgtaata

SEQ ID NO: 98 - DNA, 1278 bp, unidentified
  misc_feature 1..1278: note = Ga0180007_10001273 JGI
  source 1..1278: mol_type = other DNA
atgcaaaaagtattagtgctggataataacatgaatccattgatgccttgtcatccagcacgagctaggcaattactcaaacaaggtaaagccgctgtctatcgtcattatcctttcattattattctgaagaatagaaaagggggcgatgtacagccagtcgaattgcggatagaccccggcagcaaagtaacggggctggcggttgtagctcaatttggtagaggacgaaccgttgtctgggcagctaatttacaacataagggctggagagtcaagaaggctttagataaacgtcgtattcttagacggagtaggcgatcacgaaagattcgctatcgcccgccacgttggaggaacagaaaaacggaaaaggggtggctgtcaccctctctgatgtcgcgcgtgaataatatacggcattgggccgagaaattaacaacactaataccaataaaaactattgcggttgagactatacgttttgatacacaattgatggaaaaccccgaaattagtggtgtagaatatcaacaaggtgaattgcagggctatgaggtgcgcgagtacttattagaaaagtgggggcgcaagtgtgtttattgtagtgcagacaataaacagcttgagattgaccatgtttggcccaagtctcgtggaggcagtaatagggtgagcaacctcgttatttcttgtgagccttgtaatagagcgaagggtagcagctctgtacaggaattcttggcacatgatccaaaacgacttgagctcatattagcgcagaagcgaaagcccttacgagacgctgctattatcaatgctatttgttatcgtattggtgatgagcttaaagagttgggaatgtcggttacgttttggagcggggggcttactaaatacaatcgttgtaatgctggttatccaaaagatcattggatagatgccgcttgtgtaggaactcatgcagcgcagatactagaaggaatgcttccgctgaatatcaaagcaatgggtagagggaaacgacgggtgtgtcaacctgataagtacggttttcctaaagcgaaacccagaacggtaaaacgggttcacggctttcagacaggcgactttgtgaaagcggttgtgccactaggacggaaagctgaggggacacatgttggtcgagtgacaatacgggcgagtggatatttttgtattagcaagatcgacggcattaactggaaatattgtaaattgttgcagcaaagtgatggctatgagtacactcagatatga

SEQ ID NO: 99 - DNA, 286 bp, unidentified
  misc_feature 1..286: note = Ga0180007_10001273 JGI
  source 1..286: mol_type = other DNA
ggaagtcgaaatgctcttaagtgagatagctgaagtaacgttatccttcccacgtatgtattggataaccagccttagtaattagtttttcaaaaactaattactacgttacaagcgaatacataggcacttcggaatgcttctccagttccgaactctgcggttgaaagttaaataaactgtacgtgtggaacggttagtgctttcaacattaaaccgcttgctaacattggcgaggagaccataaccgccgaaaggcgagactgaggtaactcagatgcaaaaa

SEQ ID NO: 100 - DNA, 1260 bp, unidentified
  misc_feature 1..1260: note = Ga0256407_10000103 JGI
  source 1..1260: mol_type = other DNA
atggtttacgtattagacacagacggtacacctttaatgcctacacagaggcattacagagtaagattcctcctcaaaaagaaggaagcaaccgttgtgtccgtatatccgttcaccattaaacttaccactgacaagccaaggcatacccaaaacgtatcacttggtattgactgtggaaccagacacatcggtgtttctgctacaacggaaaccaaggtactttactcagcagaggcaatactgcgtggggacactactaaactgattgccacaagaaaggagctacgtaaaacacgccggaaccgtttacgttacagacccgaaagattcaataaccgtataacatctaagaaaaagggatggctagcgccttccattcttaacaaagtggcattccatgccaaagtcgttaagtacgtaaggaaacttctaccgataacctcgataattttggaagttgcaccgttcgatattcaaaaacttgctaatcctgatataaaagggacggactatcagcacggggaacaggaggggtcatataatacacgcgagtatgtactgtacagagaccatcacgaatgtcagcactgtcacggtaagtccggtgataaaatactgaatgtacatcacattgaaagcagaaagaccggcggtaatgcaccgaataatctggttacgttatgtcatacatgtcatgatgcatatcataggggcgagatagagcttaacattaaacgcggtaagtccatgcgtgatgcagccggtatgaatctaatcaaagaccgtctgtacgaggttgtaaaagaggaaaacggtgacatcactgttcggtacacgtatgggtatataacgaagtacaaccgtataaagtacggtatagagaaaagtcatacgaacgatgcacaagtgataagtggtaatcttaatgcgaagttatgctgtgatatgtgggagttaaggcaggtacgtagacataacagacagatacacaagttcaatatctgtaaaggcggcaaacttaaacgtaatcagagtgcatactgtgtaaagggttatcgtttatgggacgtggttaagtacaaaagtaacacatatctgataaaggctaaacgaagcagtggttcattccgtctgatgagtttagatggagaggaacgtgacggtgtgggttacaaacatttgagaatagttactatatgtaacagactgattaaaataaaaagtgaaaagagagggtgcaattcatcccacggttaa

SEQ ID NO: 101 - DNA, 317 bp, unidentified
  misc_feature 1..317: note = Ga0256407_10000103 JGI
  source 1..317: mol_type = other DNA
gtcaataacccacccctaaaaggagtgggcttgataggcgaggcaagcgtgccttactgaaaacaagcccttattgattagccttggtgatagggatttatccccttgaactccgttatccgtgaatgcataggcaccggtggatatacttccaagtctgccgctctgcggtcagtggttaaacagtcctgagaggtagggacagtgctgctgacgaataaaggaaaccacggaataacattggcgatgggagccttacccaacttaggttggagacttacccctaacagggttatttttaaaaaacaaaaacaatg

SEQ ID NO: 102 - DNA, 822 bp, unidentified
  misc_feature 1..822: note = Ga0373630_0001637 JGI
  source 1..822: mol_type = other DNA
atggtggtgacaatgcgaaacttgactagacggcccggctctgcgagtcgggttagcggcgtggaaagctacaagaacgtacaggtgcaagacctagcctgtacctcttcgctagaaccactaaatggcgtggctgccagaaatggtagcctaagccttccatgcaacgtcgaaggtcactcaactcaaactggggagcccgcaatcgggagagttccagtcgtctccgcagacagtacgtccttgatgccatgtaacccatcgaaagcacgtaagctcctagaacatggcctagcggagaagcgatggagcaagcttggacaactcacgctctattcgggcgtagaaaccgctgtgctacgtgaaaggttcagcctaccaaagaatccagtcaaaagggagcttacatggactacgcatgctgtagacgccatagccatcggctccgctgagatcggatgtgtgaatccgtatccgccagagttctgggtttggaaacgcttcgagtatgctcgacgtcaacttcacaggcttgaacctgacaagggcggagttcgcagaaggtacggtggcatatggagtactccaccattcagaaaaggagacgtcgtgttatggcgtggcaagcttgcgagagttggaggcttcatggatggctacgggatctcactacactctttcgggctgaagaacaaacgtttcacacaagccgccaatccaaacgaatgcgtcaggctattcaatcagcacgtattcagtagacgggagcagccccgattccttccacccatgaatggtgtgggtttccttgggggaccttga

SEQ ID NO: 103 - DNA, 310 bp, unidentified
  misc_feature 1..310: note = Ga0373630_0001637 JGI
  source 1..310: mol_type = other DNA
gtcgattcgacactcttaaggaagtgttgaaacgacatcgaggaatatgtccagtctcgacacaacgaacctgtccaataggggtgagggagtcggttccacgtgatgaactccgaccggttaaactgtgtttaacaagtcctagaggacacagtgttgacgccgaatacccgagcctccggtagcttcgatggtgaattcggtcaggaacccatgcctaaaggcatgggcttgtgatggtggtgacaatgcgaaacttgactagacggcccggctctgcgagtcgggttagcggcgtggaaagctacaa

SEQ ID NO: 104 - DNA, 1608 bp, unidentified
  misc_feature 1..1608: note = Human gut metagenome
  source 1..1608: mol_type = other DNA
atgtacaggcttaccaccgaagcggggatcccgttgatccctgagagactacatgacaccaaaaaaagaaaggagacatcgaggatgtctgaatatatttatgtcataggcatggatggagatccacagatgccgatcaaacgaaagagacatgtcgaaaaaatgttacagacaggaagagcacgcgtcttccggcaagtcccttatacaatacaattaacttataagaatcaaccagtcttacagccagttacgatcgcggaagatcccggacgttctaatatcggaatggcagtggtctctctgagtggagagttactatccgcagcggttgtgcagaccaggaacaaggaaatcgttaaattaatggagaaacgtaagttgcatcgcagagcttccaggaatggagagcgaaaggcaagacaacgactggctaagaggtgtcatacgatgctcaaagctggttttctgatgcgaaaacttccgatgtatagaaaagacaaacgagtgaaatgtcttgtgatccgcaatacggaagcaagattctgtaatcgaaagcgagaagatggatggctgacaccaagtgcggaacatctggtgcggacacacatcaatctgatccataagatgcagaaattcctgccgatcaccgatgttgcgatcgagatcaaccggtttgctttcttatcactggaagatccgagtatcagtggagtcgatttccagaatggcccgttaaaaggctatgatgatctgaatgcagcggtagaagatctacaggacggacactgtttaatgtgtaacagcctgatcgaacaccggcatcatatcgtaccacgaagtatgcagggctccaatacgatcggaaacatcgcaggattatgctgcaaatgtcatgagagagtccataaagatgcaagatttgaggaccgtctgaagaaaaagaaagccggactggacaagcgttatgcagcggtcagtgccttaaatcaggcgatcccgtttatctgcaaacgactggaacaggaattcgggaaagaacatgtccattactgttctggccgagatactgccatggtccgaaggtcctttggataccataagacaaaagaagagcagctacatgtggtcgatgcctggtgtatcgcagttctttctttacggcagatcccagagaaagctccagagttcgatcatgtgcatgagatcctgcaatttcgcagacaggatcgcagccggatcaaagctcagacctctcgtgcatactatcatgaaggaaagaaaattgtcaggaatcgcaaaaaagcggaagggcaaggagaagattcccttcaggaatggagaaaacgacaggttgatagatatggagaagagcagaccagaaagatgatcagtcagttaaaagtcaagaaaagtatccggcgttacaatcgtctggaccgtctcatgccaggagctgtcttttattatcaagacgttcgatatgtcatgcgtggacaacattgcgaagggacatatcttcaggcggttggaatgggaagcaaggattttcctgcaaagaaatgcaagatcgttgctaacaatgagggactggtctttgtgtcataa

SEQ ID NO: 105 - DNA, 272 bp, unidentified
  misc_feature 1..272: note = Human gut metagenome
  source 1..272: mol_type = other DNA
gtcaattaactcatgactaaagtcacgagcttgcagaaagttttatgaattagttagcgcgttaatgagcagaaacaagatgtcagcgatcttctttggaaagtgggcactctgggattctctagtcccagaccctgtcaagctgacaccaagtttaagaagaccaaaatcttgtcatgtacaggcttaccaccgaagcggggatcccgttgatccctgagagactacatgacaccaaaaaaagaaaggagacatcgaggatgtctgaatat

SEQ ID NO: 106 - DNA, 735 bp, unidentified
  misc_feature 1..735: note = Human gut metagenome
  source 1..735: mol_type = other DNA
atggtgtacgtacaagacataaatggtaaacctatgatgcctacaacaaggcatggtaaggtaagacgactgcttaaagaaaacaaggcagttgttgtgaacctatgtccgtttaccatcaaattaacgtacgtcacatctgattacaaacaagaaattgtgttaggcgttgatgctgggaccaaacacgttggtctatcagctacaacgaaaagcaaagaactttacagcagtgaagtaattcttagaaatgatatcgtagatcttttgtctaccagaagagagctacgaaaaacaagacggaatagattgagacatagaaaacatcgttttaacaatagaataaaaagtaggcgtcccggatgggtagcaccttcggtgaagtacaaaatagacgcccatattcgtgttattgataatgttttttctatactgtctgtatcccgtattgttattgaagtagctcaattcgatactcaaaagattaacaatcctaatatatcaggtaaagaatatcaggagggtgatcaacttggattttggaacgttagggaatatgttttagcaagagatggacataaatgccagcattgcaagggaaagtcaaaagacccagtattgaatgttcatcatattgaatcacgaaagacaggtggagattccccatctaatcttattaccttatgtgaaacttgtcataaagaataccataaaggtaatatagatttaaaaatc

SEQ ID NO: 107 - DNA, 269 bp, unidentified
  misc_feature 1..269: note = Human gut metagenome
  source 1..269: mol_type = other DNA
ataaccaatttgtattgtattatgcataatagccaaaagctattccgattattagcctaagtgttgaaacaaacactacgttatttaagaatagatagttacctacggatatttacccaagtctgtagctctaaggtaggtgattaaacagttctggtattcaggaacagtgttgcttacgaaaaaccttaaataacattggcgatgggtactaacagagttttactctgacttatgttgaataaacattaaaaacgtttgtagatatg

SEQ ID NO: 108 - DNA, 1029 bp, unidentified
  misc_feature 1..1029: note = Ga0315279_10002905JGI
  source 1..1029: mol_type = other DNA
atggttccagtatttgattcaaaaaacaaaccgttaatgccctgcacagagaagcgtgcacggaaattactggagaaaaagcaagccttctgtttctggaagaagggaatcttttgtattaagttgttgcgagaaccttctgatagacagtatcaggatgttgttgtaggtattgatgttggatcgaaaagagaggcttataccgttactactgtcaaacatgtagtattgaatattctcacgaatacacctgattgggtaaaagacgcagtaaaaagtcgtagagaaatgcgtagaggtcgcagatttcgtaagacaccatgtaggcaaaatagaactaaccgtgctattatggagctttcgcttggtatgttagcaccttcgacaaaggcacgatggcaaacgaaattaaggattctaaattggctatcaacattgtatccgataactgatgtcgttgtagaagatgtgaaagccaaaactcgtaaaactggagcttacgctggttcaaagaaatggaatatgtcattttcaccattggaagtggggaaaacttggttgtactcggagataaagaagttctggaatttgtatttggttcagggatacgaaacaaaagaatggcgtgatatggcaaagtataaaaagagtagcaataaactaaaggactgttgggaatctcacaatgtagattctcatgttctttgtgagatcggtcttggaggttgtatcaagccattcaagaagatacttagactagagtttctacaccttcatagaaggcagttgcatgttctacaatttgccaaaggtggtattcgtaaattgtatggtggaacgagaagcatgggatttaagcgtggcagttgggtaaaccatatcaagcatggtttgtgctatatcggtggcacatcaaaagaaagagttagtctccacgagatgtcaacaggcaaacgtttgacgcaaactgcaaagccagaggattgtagattcttgacttatgcaacgtggagaatgtcatttatttga

SEQ ID NO: 109 - DNA, 209 bp, unidentified
  misc_feature 1..209: note = Ga0315279_10002905 JGI
  source 1..209: mol_type = other DNA
gtcaataaccccacgcataaatgcgggggcttgagtaatctggaagccaaccagaccaatcgagacgaaactgttgactagactatgttttagaaaccaattgagctatctgatcgtggcaggtcaaaagatgtcatagacgccaccctaatctataaccaatctgatagccaatgtcgaagggtcgtttaacaaggagtgtaaactca

SEQ ID NO: 110 - DNA, 1257 bp, unidentified
  misc_feature 1..1257: note = Ga0194137_10007470 JGI
  source 1..1257: mol_type = other DNA
atgaaagtatatgtattaaataaacatagtaagccattgatgccttgttctccaagaaaggcacgattattattacgtgataagaaagctaaagtagtcaaaaaatacccatttactatacaattactatatggatcaagtggatatcggcaacaaatcactttgggtatcgatgcgggcagcaaaactatcggtttatcagcaacaaccgaaaaccatgaactatattcggcagaagtcatattgcgcaatgatatcagtgataacatcactaccaaaaagcaactaagaagaacacgtagaaatcgtttgcgctataggaaaccaaggtttttaaatcgagtgagtaataaaaagaaaggttggctacctccatcaacacaacacaaaattgatacgcataaatttatggttgaacaagtacataaattgttgccaattagtaagattatagtagaaacagcagcttttgatattcaaaagattgataatccaaatattagtggaagccaatatcaacaaggaaaccaacatggattctggaacacacgggagtatgttctttatcgtgatggtcatacatgtcagatgtgtaaggggaaatccaaagataagatactgaatgtgcatcatattgtatatcgtagccatggcggtactgataaacctaataatttgattacattatgtaatacctgtcatagtcctaaaaaccataagaaaggtgcaatattatggcaatggatggaaaatggaaaaaaggtaattacttcatataaagatgctacgtttatgtctataatgcgttggtcattttataattggttgaaagataagtatatagatgtatcaatgacttatgggtataccactaaaaataaaagaattagtaatcaattaccgaaagagcattatattgatgcgtattgtattacaggcaatattaatgctaagagattagatggtcattggatatataagaaaatgcgtaagcataatagatcattgtatatgctaaatccactgaaaggtggtatatggaaaaagagacaagctaattattatgttaagggctttgctttatttgataaagtacgttatgataatgttgtatgttttattatgggacgtagggctactggatatttcaaattaaggactattatgggaaatgaagtacataatagtgcgagttataagaagattgagtatgtaggacgtagtggtgggtatatgtatgattatgtggtacattag

SEQ ID NO: 111 - DNA, 283 bp, unidentified
  misc_feature 1..283: note = Ga0194137_10007470 JGI
  source 1..283: mol_type = other DNA
gtcaactaccactgggctaataacccagtggcttgataatatatcaagccacagttgattagactaaggtattaatttacctacgttgatccggtcatgatacctatggatgtacaatatagcctagtccatagctctatcgtatattattaaacgatttcaaagtggttaatggaatcagtgtaatatatgtaaaaaagccatttcaacattgtcgaaggctaattacttacttcggtaagaagggcttatctattagcccaattaagaggaaattatgaaa

SEQ ID NO: 112 - DNA, 1032 bp, unidentified
  misc_feature 1..1032: note = Ga0310696_10080563 JGI
  source 1..1032: mol_type = other DNA
atgctggtatatgtccaagacaaggaaggaaaggcgataagccccaccaagaggtgcggacgcgtcggctatctccgccgtcacggacttgccgtggtcatcatgctcgagccgttcacaataaaaacgcccgaggaagatgccgaatctttagttcggcataggaatcgggcgggggttgacacatcctctggaaaaatggtatactatgaaccgaaagaacccgtcccagaagttgcaaaggcactctgcgaagagaaaacggctcaaaatgcaacgggacatgacacccgccatcgtcttgaaaggactttggcggcagggcttggtcaacggcccaatcgtcggggcgaaagcctacggcaagcattcgcgtcttcagcgcggaagcagttgacgatacggctcctgtacgatgtccacgggaccgagcatgtccaggcggcgacgcttggtgtcgacacgggggcgaagcacatcgggctctcggcgtcgaccaagaaaagcgaactctattcctcacaggtggaattgagggacgatgtgtcgagactcctgacagcccgcagggagaatcggagaggacggcgggggcgcaggcacaactggtaccgccccgcgaggtggcagaaccgcgctgatgcgcgggaagagcacttgccaccaagcatagtgcatcgggcggagtcccatgttcgcgcaatcaagaacgcggcgaagatacttccactgcggaagatagtggttgagattgggaagttcgatgtgcagaagataaagaaccccgacatcgagggcgtcgagtaccagcgcggtcctcagatggggtggaagaacctaaaggcatacgcccgctggcgcgatggcgagaagtgccgcatctgcgggaagtcgtcgttcaaggacaaggcgaagctggatgtccaccacatcatccagcgtgcatatggcgggacggatgtccccgagaatgtcgtgaccttgtgcgagaactgccaccacgcccaccacgccaatctgcgcaggataaag

SEQ ID NO: 113 - DNA, 299 bp, unidentified
  misc_feature 1..299: note = Ga0310696_10080563 JGI
  source 1..299: mol_type = other DNA
gtcagcggcccaaccctgaagggttgggcttgtgggtgaaagagaccgcgagcccgagctgactaggcgactgaaacgaaaggagaaaaactgagtgacagtagaagttgatagagaatgcataggcaccgtgggatggtcgtccaagtcccacgctctgcggtgtgcggttaaacagtcctgcgaggtaggggcagtgccgtacacgggaaacctctttcaacgcgccgatgggcaccacacccgccttcgggcggagactaaccccgcaaggggataatataggaaacaccatgctg

SEQ ID NO: 114 - DNA, 1395 bp, unidentified
  misc_feature 1..1395: note = Human gut metagenome
  source 1..1395: mol_type = other DNA
atgtatgtattcgttatagggctggatggaacaagacttatgccttgtaaaccaagaaaagcccgaaaattaatagaagctcacaaggctgaaatctataagaaacagccgtttacaataagattactgtataagacaggctgtgcttcacaacccataacattaggtatagatacaggttcccagcatatcggaattgcggtaacatcagaaaacaaagtcttataccaggcagagatagaactgcgcagcactatggataagcgttcactcatggaaaccagatacagttaccgcagaagcagaagataccgcaagaccaggtacagaagtcctaaattcagatttcatacaaaacggacatattctgaaacacttgttaagcgtaagaccacaggtattatgacccactgggttaaacatattaactcaatgagtacaaacagaccggacggatggcttgcaccatccatgcagtcgaaagtagatcatcatatccgatggattaacagatttttagatgtgcttccaccagatacgaaactccggctggaaattgccaggtttgacatggcaaggatgaaaaatccggaagtgcataatgaattataccagcatggtccacagtatgattacgaaaatttaaaagcttatgtatttgacagagatcattataagtgtgtggtctgtaaaaggaaattagggagtaaacagccggatggacattctttaaaaggaatgatgcatcacataacattccggtccaaaggagctacggacaatcctgatcagcttgttacagtctgcgaatactgtcatactccccaggcgcataaagaaggtggagtactctgggatctgaaagagaaacacaaatcagtgcagcggggactaagggatgccacgcagatgaacataatccgtacacgactggttaaagcatttccagatgcggagctgacttatggaaatattacggctgctgatagaaagaagatgcatcttccaaagtcacatgctggtgatgcagttgcaatagcaatgaaaggtgaggatgttaatatctgtgaaccgactgtatatataaaacagattcggaagaaaaagcgttcactccatgaagcaacgcctagaaaagggcgtaaaaggcctaatacccaggcagtaagaaatcctaagaatacaaaaagcataggtatttatcatatttatgacactgtaagattccagaatgaaacaggatttatctcaggattcacaggcaagtctgcatatgtccaggattttgacggcaattatatcacaatgcctggaaaatcgtataaacagataaatttatcgagtttagaactggtaaagcataacaacaactggattcaaaagaccagaaattaa

SEQ ID NO: 115 - DNA, 224 bp, unidentified
  misc_feature 1..224: note = Human gut metagenome
  source 1..224: mol_type = other DNA
ttgaataaccgagcatggttaaataattgtcgcccgtaaggacaggatgactagcctaagttccaagagaactacatcagaagtatgatcccagttccagacggtaccctaatctgagcgctgggcgggcaacatatgaatccaggagaaaggatgatgtaacccggtgttacaagtactctgatattggcgaagggtaaatgctgactttggccagcatagac

SEQ ID NO: 116 - DNA, 1503 bp, unidentified
  misc_feature 1..1503: note = Ga0307373_10037003 JGI
  source 1..1503: mol_type = other DNA
gtggtcttcgtcttggatcggcgcaagaagccgctgatgccttgcagtgagcggcgggcgcgcatcctgctgcagcgcggccgggcggtcgtccaccgcctgcggccgttcaccatccggctccgggaccgcacggccggggagtcggtgcttcaacccctgcgcctgaaggtggcgcccgccacgaaggtgacggggggcgctctggtccgcgacgacggtcccgatgctggcgccgttgtcttcgcggcggagatcaagcacaagcccggcatccacgccaagatgctgcgccgggcgggctaccggcggcgccgccggtcagccaacctgcgctaccgggccccgcgctttgacaaccggcgccctgagccgtgcatcgtttgcggcggcaacgcccggcacgggcacaaccgctgccgccgatgcgtcgaggccggggacgaacccgcaggcctcggggcgcgccccccgcgcctggcgccgaccctgcggagccgggcggacaacacccgctcctgggtcgcccggctgcgccgctgggccccggtgacggcggcatcggtgctgttggggcgctacgacacgcaggctctgcaggaccccgaggtccggggggtcgagtaccagcaggggaccctgcaggggtacgaagtgcgcgagtacctgctggagaagttcgggcaccgctgcgtttactgcggcggcctttccggcgaccctgtgctcaacatcgaccatgtggtgccgcgcagccgcgagggcaccgatcgcgtctccaacctggcgctggcgtgccgggcgtgcaacgaggcgaaggacgaccggccacccgaggagtgggcggcgcgcctggcacgcctgcattccccgctggcggtcgcgcggatggcgggatgcaaggccgtcgcgggccggctgcaggcgccgctgcgcggcccggcggccgtcaacgccactcgctgggccgtctggcgtgtgctggcgcagacggggctgcccctggaagcggggaccgctgcccgcaccaagtggaatcgcgcacgcctcggggagccgcggagcccggccgccgacgcggcctgcgtgggcgcctcgacgccagccgcactgcggtgggcgggacggtgggtacacgccatcacggcgctcggccgggggcgctatcagcggacgaacacggatgcccacgggtttccgcgcggctacctgatgcgcggcaagagcgtgcatggcctgcggagcggcgacctggtgacggcgggggtgcggcatcgggccgggggccggctgccggcggcgtttgtggcagagatcgaagccacaggccccgtcgcggtgcgcgccagcgggtccttccgcctcgggccgttcgaccccgtgcgttggcaggcctcccgtctgctgcagcgcggggatgggtacgcctaccacgtggccccgctcggcgacaccggcgcccggcggggcggcggggtggaactggaggaggcggctccgtga

SEQ ID NO: 117 - DNA, 297 bp, unidentified
  misc_feature 1..297: note = Ga0307373_10037003 JGI
  source 1..297: mol_type = other DNA
gcccgttgacccccgggatgcttaccaggccgagcgcccgaggttggcagccgttgagggcgctacgttgccgccaggcccaagacccaccccgggatgcttcctcagtcccgggctctggaaccggccgcagcagacaagccccgtgggcgggggcacgaaacgggcggtcggacgcgccgggcggtgacatggccgaggggagcggatcgggcaagccggcccggtcccgtcacacaggccccgtaaggggcaccccgcaaggggcctgatcgcgaggaagggggcgcgcccgtg

SEQ ID NO: 118 - DNA, 651 bp, unidentified
  misc_feature 1..651: note = Ga0373633_0030533 JGI
  source 1..651: mol_type = other DNA
atggttttgagcgtgtttgtattggacaaccgaggtgtggcagtgatgccgtgtacacagaagcgtgcaaggctgttgcttgcgcgtggacgtgcccgcgtgcatcggctggtgccttttgtcatccgatcggtcgatgtcaaagcacaggattgcagcttgcagcccttgtctttgaagatcgacccaggcagcaaaaccatgtgccaaagacccatgcgctggatgcggcgtgtgtcggtgagatggactgggtatcggcccagcctgcacatcaaatccacagggcgtggcagctaccagcgcacacgcctggatgcgtttgggttcccgcgcggctacctgatgcgaaataaatcggtcaagggttttgccacaggtgatctggtcaaggccacggtgacacacggcaaaaagcaaggcggctaccgagggcgtgtggcaatcagggccacaggcagtttcaacatccaaacccgagagggtgtggttcaaggcgtctctcacaggcattgcacgttgttgcaacgcggtgatggatatggttaccaacagcagagcaaatcagacgcaggaagagatcgtgcttcgcacgatgcgctctgcctccccggcatgaatgccggggtctcccgcgcaattcaagggtga

SEQ ID NO: 119 - DNA, 312 bp, unidentified
  misc_feature 1..312: note = Ga0373633_0030533 JGI
  source 1..312: mol_type = other DNA
gtcaactaccccggactaaaggccgaggcttgatcagagatgtttaagcctggttgaccagaccaagaaaggagtcattttttctacgttgttgttaaggcgaaaagtccgacccacgaatgcttcctcagttcgtggctctcgaaggcggtggtgcagacaagcaaatgggtacgcacgaaacggccccgtcattcccacgccggacagcaacatggacgaggggagatgcaccgaaaggtgcgcgtcacaaggcccttacgggctggctgctggaaagacagcacttattttggagagatggttttgagc

SEQ ID NO: 120 - DNA, 1329 bp, Ktedonobacter sp.
  source 1..1329: mol_type = other DNA
atgtcaaaagtgttgctcctggatatgaccaaacagcccttagacccagtgcatccgggccgagcacgcctgttgctcaaagagggcaaggccgccgtgtatcgcaggtacccctttaccctcatcctgaagacgcaagtggactcccctgcggtgtctgccctgcggctcaaacttgatccaggggcgaagacgagcgggctggccctggtcgatgacgcgagcggggaagtggtgtgggcggcagaactcggccatcggggagccagcatcaagaagcgcatagatgcccggcgtggcgtgcggcgcaagagacgctcccgtttcacgcggtaccgcaagccgcgcttccacaaccgcaggagttccaggagaaaagggcggcttccgccctcgctggaaagccgggttgccaacatgctgacctgggtagggcgcctgaggcgtttgtgccccattgaggtgatcagcatggaactggttaagttcgatatgcaggccatgcaaaacccggagatcactggcgcccagtaccaacaaggggaacgcatgggctatgagacgcgggaatacctgctcgcaaagtgggggcggcgatgcgcctactgcggggctgaggatgttcccctggagattgagcacatcctctgccgcgcacgaggcggcacgcatcgcgtgagcaacctcaccctggcctgcgagccgtgtaacgtcaagaagggcacgcaactcatcgaggatttcctgaacaagaaaccagacgtgttggcacgcatcctggcccaggcgaaaacgccgctcaaagctgctgccgccgtcaatgcgacccgctggcacctctttgaacggctgaaggcgaccggcttacccctggagaccagcagtggcggtttgaccaaatacaaccgggcgaagcggcatctgccgaaaacgcattggctcgatgcagcgtgtgtcggccagagcaccccaaagcctctggaaacgagccaggtggttcctttgctgatcgaagccaccggtcatggcaaccggcaaatgtgcggcgtcgatgagcatggctttcccatccgccataggcagcggaagaaggtgcatttcggctaccagacgggcgacctggtgcgggcggtggttcccacgggggcgagggcggggacgcatgttgggcgcgtgctggcacgagccagcggctctttcgatttgaggaccaaagctggacgccaggccgggatcagttatcggtattgccgtcccatccatcgcaacgatggctatcgttaccagcaaggagggcggcatgcagtccccgccacccaatccacctga

SEQ ID NO: 121 - DNA, 290 bp, Ktedonobacter sp.
  source 1..290: mol_type = other DNA
gtcatgaacccctgcatcgaatgcgggggcttgcagcaaggctcatcgtctcgctacaagcccggaacatgaccagactcaggcttgaaacagagcctacgttaggagcgaatccataggcacgtccgggtgcgacgccagcccggaccgctgcggcaatcgattaaacagggctagcgggttaccccagtgtcgtttgcgtcaaaccgctccataaccttgtcgaggcgaacatcacccggcgcttgccggaggctcgcaagagcaaagaggaccccatcatgtcaaaa

SEQ ID NO: 122 - DNA, 1317 bp, unidentified
  misc_feature 1..1317: note = Ga0209048_10010134 JGI
  source 1..1317: mol_type = other DNA
atgtcacaggtctttgtcctagatgcaaacgaacaggcattgaacccgatccatccgggacgcgcccgcttgctgctcaagcaaggcaaggcagccgtccatcgacgctacccgttcacgatcattctgaagagggtggtagagcagcccacactccatccattgcgcgtcaaaatcgatccggggagccacaccactggcatcgctctcgtcaatgaacacacgggagaagtggtgtgggcggctgaactgacccatcggggtgagcagatcaagcgcgatttggacaagcgtcgagcagtcagaagaagcagaagacagcgcaagaccagatataggaagccacgctttgctaatcggcgcaaacgcacagggacgttgcctccctctttagagagccgcgtatgcaacgtgctcacgtgggtacggcgcctgatgcagatctgccctgtcaccgccatcagccaggaactggcgcgctttgatacccaggccttggagcaccccgatatcgagggcgtagactatcagcgcggacagctagcaggctatgaggtcagagagtatgtcctgctcaagtggaaccatcagtgcgcttactgtgatgcgcgcgaggtcccgctggaactcgatcatgtgcagcctcgcagcaagcgctgccttgatagagtgagcaacttgacgctgtcctgtcgatcctgtaaccagcgcaagggcaatcgggatgtgcgcgagttcctgcatgacgatcctgctcgccttgcccgcatcctggcacacctaaaaagtccgctgcgggatgcagcagctgtcaacactacccgctgggcactcaacgcgcggctcaagttatttggggttccggtcgagagtggcagcggcggcttgaccaagtataaccgcgtgatgcgggggctcgacaagacccactggctcgatgcggccaacgtaggcaggagcacgccagcctcgctcatcatcaaaggcatcgttcctttgcacatcattgcaaccgggcacggcagccgccaaatgtgtcgcatggacaagtacgggttccctcgtaccggacccaagcagcgcaagcgtgtccaggggttccagacgggtgatctcgtgcgcgctgtggtgacaagtggcacgaagcagggaacctacgtgggcaaagtggctgtgcgtactcgtggcgtcttcaacatcaccactgcgcagggtgtggtcaccgacattcatcatcgctactgtacgctcatcgctagagccgatggctatacctatcggcggcccaaggaggtggcactctctcccatcgcctga

SEQ ID NO: 123 - DNA, 307 bp, unidentified
  misc_feature 1..307: note = Ga0209048_10010134 JGI
  source 1..307: mol_type = other DNA
gtcaggaacccgccctgtagaacggggcaggcttgcttgcaggagcaagcctcatcttgaccagtctcagccaccggtcttcttcttcattggaagagggccgacggggcttcgttcggagcgaatggataggcacgtccgagtgcttcaccagcccggacctctgcagagtagcattaatcaggttgacgaggtaaagccggtgtgctgctcaaatgaaaccgctcaagaacactgacgaggtgaacatcacccgcgcaagcggaggctcgtaagagcacaaccaaaggaatccagcatgtcacag

SEQ ID NO: 124 - DNA, 1356 bp, unidentified
  misc_feature 1..1356: note = Human gut metagenome
  source 1..1356: mol_type = other DNA
atgttcgttgcagtcattagcaagactggcgtgagactcatgccaacaagtgaataccgggctcgtaagctgctgaactccggaaaagcaatcatctatggataccgtccgtttacgatccagttaacagaaagggaaactggcgctcttcagccagtagaactctgtgtggataccggatatatccatattggagtatctgtaaagtcagagaagcacgaatatctggaattacaggtcgatacattaaccaacgagaagaaaaagcatgatgaacgccggatgtaccgtaagcagagacgaaaccggaagcgataccggaagccgcggtttgataaccggaaacgggaatctggctggcttgccccgtcactgagacataagaaagaggttcatctgcaagtcataacaaagatatgcgatgtatatccaattgcagacatcactctggaaatgggaaactttgatacacaggttctgaaagctcaggaaaaaggtaagccgataccgcaaggaaccgattaccagcatggggaacggtatgggattgcaacactccgggaagccgtctttacaagagatgagtataaatgccagtgctgcgatcgaggaatcaaagatggcgcaatcctgcatgcccaccatatccagtatcggagccatggcggaaccaaccggatgtccaatctgatcacggtatgtgagaaatgccatacaccagccaatcataaaccgggtggaaaactgtacggttggaaaccaaaggctgcctcgttcaagggcgcaacttacatgacgattgtccggtggcagttatacaacaaagtgaaagaagcactgccagtgattggtgtcaagattacctatggcgcagaaactaaggaacgccgcaggagcatggatgtcaaaaagtcccatgtgaacgatgcattcgtaataggacggttccatccaaagcaccgttcatcaccggtactttataaaaagaaacgccggaataaccggtgtctggagaacttctatgatgcgaaatacatcgacagcaggaacggaaagaaacgatccggccaggaactgtttagtggcaggatcagccggaaccataagaaggattccgagaacctgcatcgataccggaagaaaaaggtgtcacggggtaagcggactattcgcatacagcgttacaagatccagcctcatgatatcgtcctatttgacggaaagaaatatgagaccaccggatgccataacaaggggaccagggcaatcctgctaccggagaagaaatcgaaatccgtggataaacttacaatttataaatatgcaggtggatattatccatcgaagtttgcttag

SEQ ID NO: 125 - DNA, 420 bp, unidentified
  misc_feature 1..420: note = Human gut metagenome
  source 1..420: mol_type = other DNA
gtcaacaaccccgtctgaaataaatttcaggcggagcttataaaagatctgatttttattagatcttagccccgtcttagatttattgatggcgacgaccgaaaggccgtaaatgattagcctcagtgcaacgaaactggtcagaccagacacggtgaattattagcactacgttaccggtaaaattaggcactccgggatacacctctagtcccggaccctgcggtatcttattaaacatctctgagggtaagagaagtgtgagatacgcgaaactaccggataactttggcgaagaggaccaccgattctgagtaggtacttgtaccgaaaggatagagaacctgtatggggtatccataaggatatctgatacagaaggcgtaagccagattttaggaaggaggacagctgatgttc

SEQ ID NO: 126 - DNA, 1329 bp, unidentified
  misc_feature 1..1329: note = Proteobacteria bacterium
  source 1..1329: mol_type = other DNA
atgagccatgtctttgtcctggaccgtgcccgtacccctctggacccctgccacccggcgcgggcacgggagttgttgcagcatggccgtgccgcggtgttccggcgtttccccttcaccatcatcctgcgcgaccgcaagcgagccgagtcggtggtacacgaccaccgcttaaagattgacccaggcagtaagaccagcgggttggccctcgtgcaagaccagcgcgtcgtctgggctgctgagctgacccaccgagggcagcggatcagagacgccctggagagtcgccggggccttcggcgtagtcgccggcaacgccagacgcgctaccggcaaccacgttttctcaaccgcacacgtccatccgggtggctcccgccgtcgctggggagccggatagcccatacgatgacctgggtagagcgtctggcgcggtcgtgtcccatcaccgccctgagccaggagctggtgcgcttcgatacccagatgatgcaagaccctgagatggctggggtggcgtatcagcagggcgagctggctgggtatgaggtccgcgagtatctgctggagaagtggaagcgcacctgtgcctactgccacaagacgggcgtgcccttgcaagtcgaacatctcatccccaaagcgcgaggtggctcggaccgcgtgtcgaatttgacgctcgcctgtggcccatgcaatcaacagaaaggcacacagacggcagcagagttcgggttcccagcgatccaggctcaggccaaacagccgctgaaagacgccgcggccggcaacgcgacacgttgggggctctatcgtgcattagcaacgacggggctccccgtcgaaacaggcaccgggggacgcaccaagtacaaccgcacccgcctgaacatcccaaagtcccactggggtgacgcggcgtgcgtcggtgccagcacgccagaggcgttgcgtgtcgcggggatccagccgctgggcatccgtgctatggggcatgggacgcggcagatgtgtcgcaccgaggcccatggctttcccaaggcgcaccgcacacgccagaagaaatatggcggcatgcagaccggcgatctcgtccaggcggtggtccccaaaggcaagtatgccggcacctgggtcagccgtgtggtcgtcagggccagcgggtggtttgacctggtcatccacggcaagaaggccagcgtgcaccacaaacattgcacgcggctgtgggctgccgatggctatacgtacaccctgcctgctggtgcaggcaccgctgtgtcctccccccactcaagcgaggggtctccacagcggaatctttag

SEQ ID NO: 127 - DNA, 265 bp, unidentified
  misc_feature 1..265: note = Proteobacteria bacterium
  source 1..265: mol_type = other DNA
atcagagtcgacgtactcccccgactgaagtcgggggactcttaggaaactgagagtcggtgtcgagcagactccgtgccgcaaggcacgccgttcttttggtcatgacaccctggaatgcgtggctagttccaggccctgtcgtctgtcgttaaatgtccgtggcgcgtaccacgctgtgcggcagacaggacaagccatgagaacattgtcgaggccaacgtgaccggcgcaagccgagcggaaaggtaacttcatgagccat

SEQ ID NO: 128 - DNA, 1407 bp, unidentified
  misc_feature 1..1407: note = Ga0256831_1000378 JGI
  source 1..1407: mol_type = other DNA
atgtctaatcgtgtatttgtattagatacaaatcgtaaaccattagctccgtgccatccggctagagctagggaactattaaggaaaggtaaagctaaggtatttagaaaatacccttttaccattattttaaataaagcttatccaaatgctaaactaacatacattaccataaaagtagatccgggtagtaagcagacaggaatggcattaattgctaaaggacagaataaaacccgttgtatttttggtttaaatatagttcatagaggacaacagattgttgatgctttactcagtagaagacaatctagaaggactagaagatccagaaaaaccagatatagaaaacctaggtttgataacagagctattcctaagggatggttacccccttcaatcttatctagactatcgaatattaaaacctggatactgcgttttagtaaacttactactatagctaacgctgtagtggaattagtaaaatttgatatgcaaagaataagaaatcctgatataaaaggtaaggaatatcagaatggtttattaaaagatttagagttaaaggaatatctcttatacgcatataaccatacttgccaatattgccatggagtatccaatgattctattcttgagaaggaacatatacaccctaagtctaaaggaggatctgattctgttgacaatctcaccatagcctgtaggacttgtaatattgcgaaatctaatctgctattgaatgattggttaaggattgtgtctgataagaaagataagctatctgtagctagaactaaatatatccctaaagttataaaaggaattaaaccgagtttaaaagatgctacggttagcaatattctttctaatcgtaccatagctttctgtgaatctatgggtttaaatacagaggctgcgccttcttatctcactaaatataatcgtaagaatcatggttacaggaaagaccattggatagatgcgactatgtgtggtaatctagacagaaaaatagagatatataagtctatgcgttgtataacagccattgctcagaaaactaataatagacaaatgtgtctaatggataaatatggttttcctaggactaaggctaaagggcaatctactgtatatgggtttaaaacaggagatattgttagggctgtggtgcctagtggtaagtataagggaaaacatatagggaaagttatggttaggaatagtggatggtttgatgttaaaaccattaaaggtaaaattatcactaattattcttattgtaaaaccacgcataagaaagaaagttttacctatcaacacggtactaaaactattctaaaaataatatccaatagaagggattgtattaaagatatttttaatactgtaaaatctcaa

SEQ ID NO: 129 - DNA, 330 bp, unidentified
  misc_feature 1..330: note = Ga0256831_1000378 JGI
  source 1..330: mol_type = other DNA
gtcaacaacctcgtcctaaagaacgaggcttgtattaatttataagtctctattaattagggtgagccctaagaaggctatgttgaccagactctgtgttatgtaaataacactctgttaccaaagaatatataggtacccgtaggtggctttccagcccacggctctacgctagcctgttaaacaatgctgaggaaaggcatagtgcagtctagatataaaacctttggataacattgtcgaggaaaacgttatggtttgggtcggtatgtgccagactagattttaaatggaaacatttatattaaggagactgtaatgtctaatcgt

SEQ ID NO: 130 - DNA, 1260 bp, unidentified
  misc_feature 1..1260: note = Ga0315550_1018591 JGI
  source 1..1260: mol_type = other DNA
atgcagcgagtattcgtgctgagcagcgaccgcgagccgctagacccgtgccacccggcacgggcgcgcaagctgctcaaacaggggcgggcagcggtccttcggaagtggccgtttacgataatcttgaaggatcgcacggtggccgagtcggtcacacacccgcaccgggtcaagatcgatccgggcagcaatacgacgggcctgggagttgtgcaggagcaaacaggcgaggtcgtctgggcagcggaactggagcaccggggccagcagatcaagcaccgaatgacgagccgccgccagttgcggcgggcgcggcgtggcaggaagtgccgttaccgcaagccgcgcttcgacaatcgggcgtcgagtcgtcgcaagggcaggcttccgcccagcttgcagagccgtgtcgagaacgtgagcacctgggtcgaacggctgaggcgctactgcccggtcgaggcgctgtcacttgagctggctaagttcgacacgcagagaatggagaaccccgaaatcagcggcgtcgaataccagcagggtgaactggcaggctacgaggtgcgcgagtacctgctggagaaatggggccgcaagtgcgcctactgcggtgcggagaacgtgccattgcaaatcgagcatatcgtacccaaggcccgaggagggtctgatcgggtgagcaacctggcgatctcgtgcgggccgtgcaaccaggagaagggaagctgcacggcggaggagtttggacaccccgaggttcaggcgcaggctcgcaagccgctgaaggatgcggcggtactgaacgcgacacgctgggtgctgtttcgcagacttcaggcgatcggcctgccgctagagatcggcacgggcgggcggaccaagtacaaccgcacgcagctgggacttcccaaggcgcattggactgacgcggtgtgtgttggggagttgggtgagcaagtgcgcgttccgcccggcctggtaccgctgcagatccgggcgaccggccacggaagacgacagcggtgcgggacggacaagtacggcttcccgatccggcacgcgcctggcgcgaaaaagtttcggggttggcagacgggcgacatcgccaaggcggtgatccccaaagggaagtatgcaggcgtgcatgttgggcgtgtcgccattcggcataggctatcgttcaggctgaatgggatcgacgtgcatcccaagtatctggagctcgtgcagagggcagacgggtatgcatactcctag

SEQ ID NO: 131 - DNA, 300 bp, unidentified
  misc_feature 1..300: note = Ga0315550_1018591 JGI
  source 1..300: mol_type = other DNA
gtcaactaccccacggatgaatccgggggcttgtgcggaagcattgcgagcccggagttgaccagtcccagccaccagccgagaggctgatggggctacgttatcgagaagtgccaaggttcacaccttggggtgcgcgagccagccccaagctctgtaaccggaagctaaacagccatacggggtagaaggcagtgctttcgggagatggccgcccgataacatcgacgaggctcactttaccggcaagtccttcgggacgaaccgagaatccgtaaggaggaaatcgaaatgcagcga

SEQ ID NO: 132 - DNA, 1299 bp, unidentified
  misc_feature 1..1299: note = Ga0137384_10001405 JGI
  source 1..1299: mol_type = other DNA
atgtcacggattttcgttgtggatgcccagcgcaatcccctgatgccttgtactcctgcgcgtgcccgcctgctgctcaaagcaggcaaagcggcgatcttgcgccgcgcccctctggtgttgattctcaaagagcgtcggccagaggcggtggtccagccattgcgagtcaaacttgatcctggagcaagcaccagtgggatcgccgtcgtcaacgatcgctcgggggaagtggtgtgggctgcagaagtgacccatcgcgggcgagagatccgcgaagctctcaccagaagacgagcggtacgccgccagcgtcggcgtcgacagaggagatatcgccccaaacgctttgccaatcgccgtcgcccgttagggtggctagctccctctttgctctcacgtgtgctgaatctgctgacctgggtggcgcgtctgcgaagcttttgtccgatagaagcactctcgcaggaactggccagattcgacacccaggccatgcaagatccgaccattgctggcatccagtatcagcaggggagccttgctggatatgagataagatcatacttgctagaaaagtggcaaaggcgttgtgcctactgccagcagccctcgacgaagttgcaagtcgaacatctgattcccaagagccggggagggagcgacagaatttccaatgtggtgctggcctgcgaaatctgcaacatcgccaagggtgacaggacggctgaagagtttggttttgtgcagctgatggctcaggcaaaagtaccccttgcaagtgcggcagtaatgaatgccacccgttggaggttgtaccaggagttgcaggcgataggcttgccagtagaagtggacaccggggggagaacaggctacaaccgtgccattcgccagcttcccaagcagcactggatagacgcggccctggtggggacctcaactcctgaacagctccaacttcagcacgttcgcccctggcagatcacagccaccggctggcagcggcgtcaaatgtgcctggtagatggagcaggatttccacgcacccgcgccaagcagcgatccctggttaagggattcaggaccggcgacctggtagttggcgtggtcaagagcggaacgaaacagggcatctacaaggggcgcgtggcggtcagagcttctggttcttttaacatcacgaccgacaaagtcacgatccagggcatcaatcatcgctggtgccgggtgctccagcggcgtgatggatatgcatatcagcaacgagaggaggcggcgtttcctcccaccccttga

SEQ ID NO: 133 - DNA, 297 bp, unidentified
  misc_feature 1..297: note = Ga0137384_10001405 JGI
  source 1..297: mol_type = other DNA
gtcagatgcccaagcctctgtaagggggcgggcttgcccctatctggccagtcccctcggtgttcgcactgaggagccctttgggaggagcgcccaaggtcgcacgtcggggtgaccggatcagccccgacccctgtaagtcggctggtaaacagctttggtgggagaaagcagtccagtggacagatggccgctcccaaagcggacgaggaccactttacctgagcaggcaactgctcagcgacgccccattatcggggtccgcagtgcgggaaaggaaagcgtgcgatgtcacgg

SEQ ID NO: 134 - DNA, 942 bp, unidentified
  misc_feature 1..942: note = Human gut metagenome
  source 1..942: mol_type = other DNA
atgtcaaccggccttcgggccgagcaagcggagcctgcgggtatccgcaaaggagacactttgaaagtatttgttttgaacatgcgcggcaagccgctgatgccgtgttcgcctgcaaaggcgagacacatgctgaaagcgggcaaggccgtcgtcttgcgacgcacgccgttcacgatcagtctgaccgtcgccacgggcgagacgaagcaggaagtgacgcttggcgtcgatgcaggcgccgaacacgttggcatttccgccacgacggaaaaggaggaagtcttcgcgtccgaagtcgagcttcgacaggacatcaagggacttctggctgatcgtctggcattccgacgtgcaaggcgcaatcgcaagacgcgctaccgcgcaccacgcttcaacaaccgcgttcgatccaagcacaagggctggcttgcgccgtccgtggagaaccgcattcaggcgcacatatcgcgcattgaagcggtttgccgagtgcttccgatcaccaaaatcgtgattgaaaccgcatccttcgacattcagaagatcaaaaacccggagattgaaggcgaaggctatcagcagggcgagcagcttggcttttggaacgtgcgcgaatatgtgctgttccgcgacggtcacgtttgccaagcctgcaaaggcagatcgaaagatctgattctcaacgtgcatcacattgagagtcggaaaacgggaggcgacgcgccgggcaacctcattacgctctgcgaggcgtgccacaaggcgtatcacgcaggcaagttgaagcagttcagtccccggcgcggcgcttctttcagggcagagactttcatgggcatcatgcgttggacggtgctcaaccgcctgcgcgagcgccatcccgaattgcctgtcacgaatacctacgggtatctgaccaaacacaagcgcatcgtcgcg

SEQ ID NO: 135 - DNA, 278 bp, unidentified
  misc_feature 1..278: note = Human gut metagenome
  source 1..278: mol_type = other DNA
gtcaataacccccgcctgaaggcggaggcttgaaaaagcctttgttgactagtctcagcaaacctcttccgggaggggagctacgttggttgggaatgtacaggcaccgtgggatgttcatcctagctccacgctctgcggccagtggttaaaagctctgagaggtaggagcggtgctgctggcaagaaaccctttccaacattgacgaaggatgtcaaccggccttcgggccgagcaagcggagcctgcgggtatccgcaaaggagacactttgaaa

SEQ ID NO: 136 - DNA, 411 bp, unidentified
  misc_feature 1..411: note = Ga0137365_10006127 JGI
  source 1..411: mol_type = other DNA
ctacaagagagcgtgctcaaaattgaccctggcagcagaaccagcggcatgaccctggtgcgggcagaagagacgccagcgggagaggtgcatcatgcgctcttttgctccgaagtgcagcagcgaggagagctcgtccatcgaggcaagcagacccaaagcaatgcccgacggcgtagacgcagtgccactctgcgtcaccgcgcgccacgcttcgacaaccgggctgttgccaaagggtggctgccgccctcgatgtgctcccgtgtgggtaacatcctcacctgggccaggcgatacagccgatgggtgcccgtcggcacctggacgggaggacgaacgcggtggaaccgggcgcgcttgggcatcgcgaaaacgcatgccaacgacgcgttgtgcgtgggagagatc

SEQ ID NO: 137 - DNA, 319 bp, unidentified
  misc_feature 1..319: note = Ga0137365_10006127 JGI
  source 1..319: mol_type = other DNA
gtcaacgaccccagcgctgaagcgcggggcttgcaggatcttcccgcaggcccgtcgttgtccagcctgagttcctgatcccgcaggtagggagacgagggaactccgttcgtccggtcaggacacccaggaacgcctcctcaattcctggccctgtcgtccagcattaaaagcccgttcggggtgtcgggcggtgtgctggacaagagcaagccggaggaacattggcgagaggagctgcctgggaacgccgtcccaggcgcgtcagacagccccgtaaggggtcccgaaagggaacagaaaggcttcaacagtcatg

SEQ ID NO: 138 - DNA, 699 bp, unidentified
  misc_feature 1..699: note = Human gut metagenome
  source 1..699: mol_type = other DNA
ttgagagtatttgtcctaaacaaacgcggaaaaccgctgatgccctgttcaccggcaaaagcgcgccttctgcttaaagagaagaaagctattgtgaagaggcgaacgcctttcactattcagctgacgattgcaacgggtgagtccaaacagccggtaagcctgggtgttgatgccggatacaaacatgtcggcctttccgcatcaacggaaaaggctgagctttatgcatcagaagtcgaactccgtcaggacgtctctgatctgctctctgctcgtcgtgcgttacggcagtcgcgccgtaaccgcaaaacgcgctaccgtgctccgaggttcgacaaccgcatccgcaccaagcgcaaagggtggcttgcaccatcagttgaaaaccgaatcaacgcgcacttgtcgcgcatagaagcggttcttcgactgctgccggtcacgaagatcaccgtggaaacggcgtccttcgacacgcagctgctgaagaattcagacattgcagggaaaaagtaccaagagggcgaacagctcggcttctggaacgtccgcgagtacgttcttttcagagacgggcacgtttgtcagcattgtcacggcagatcgaaagatccggtgctcaatgttcatcacttggagagcagacgtacgggcggtgattcgcccggcaacctgattacgctttgtgagacgtgc

SEQ ID NO: 139 - DNA, 247 bp, unidentified
  misc_feature 1..247: note = Human gut metagenome
  source 1..247: mol_type = other DNA
gtcaactacctcggcctaaaggccgaggcttgaaaaagcctctagttgactagcctcaggccgtcgtttggcggactacgttggtcgggaacctataggcaccgcgggatgcagatcctagtcccgcgctctgcggccgatggttaaaagctctgagaggcaggagcggtgctgtcggcttgaaaccccttccaacattggcgaaggatcacaaccggtcgaaagaccgaggagataaaacttgaga

SEQ ID NO: 140 - DNA, 1389 bp, unidentified
  misc_feature 1..1389: note = Human gut metagenome
  source 1..1389: mol_type = other DNA
atgagcgtacttgtaatcgggcaaaatggaagggcgttgatgccaaccaccacaagaaaagcccggatcttgctgaaagaaaacaaagcttctgttgtatgcagacatccgttcacgattcatttgcggtataaaaccggatgtgcgacacaggaaggaagcatcggtatcgatactggttcacaacatatcggaatcggagtcacctgtggaaataaagtgatcctcaaagatgaacatgaattacgttcttttatggagaagcgttccctgatggaaacgagggcaacaatgcggcgtggacgcagatatcgaaaggtgcggtaccggaagccaaagtggaaacatcatacaaaacgtatgtatttcgagaaggcgaaccggaaaggccaacactggagaaaagtaaaaacaaccacacagtcaccaagaccggaaagctggctgccaccgtcactacagtcaaagtgcgaccaccatttccgtatcattgaccggtatttgaaatgcctgccggattcaatcacgaagaatttagtgatcgaggtaggacgttttgatatggcgcgcatgaatgatccgacgatccatggtgaaatgtaccagcgtggtccgatgtatgatacagagaacctgagagcgtacattttcgcaagggatggatataaatgtgcctgctgcaaagcaaaggcaggatctatccgaaagaaagatgggacatccgtgaaactgattgcccaccatatccagttccgcagtcgcggagctacggacaatccaaaatatatgatcagcgtatgcgatcactgccatacgacaaaggcacaccagcctggtgggatcctgtattcctggatggaaaagaataaaaaagttacccgcggattaagggatgcgacatttatgaacatccttcggagacgattatttgacagatttccacaggcagcatttacatatgggaatataacagcggttgaccggaaacgtttactgcttccaaagagccatgcaaatgatcctgttgcaatctccctgtttgggaaagatgtttctgtcatcaatgccacttgccagacgttacgttataagcaggtgcgaaaatccaaacgttctctgcatgaagcaacaccaaggaaaggacggaaggaaccaaatacaaaagcgattcgtaataagaagaacacaacccatgtaaatggatttaagctgtgggatagtgtgcttgtaaatggacagaaactatttatttgcggtttcacaggctctagtgcatatctggttgatcaggatggacattatgtatcgcctcctgggaaaacatacaaacagtggacattatcgaagttgagccggttgcatccaaatggtaactggctgatggcgtaa

SEQ ID NO: 141 - DNA, 327 bp, unidentified
  misc_feature 1..327: note = Human gut metagenome
  source 1..327: mol_type = other DNA
gtcaagttacccaccgcttagatctctgatgaaatcttgaagcgggggcttgaaaaagccatttgactagcctcagtgattttggtaagtctgtgctggtccgccggatacagatactgtcagataaactacgttatgagtgtcatgataccatcctgtgaaccctagcaggaagcggtatccgggcaaccgatcgtggtgtgggaacccacacggacccgaaaactcaagcctcatgacattggcgaagggaccttacgcgggcacgcggcagggacggtttcgttccctgtgtaatgcaataacataaaggaggcgcttatgagc

SEQ ID NO: 142 - DNA, 1338 bp, unidentified
  misc_feature 1..1338: note = Human metagenome
  source 1..1338: mol_type = other DNA
atgacaaaaacactaaccaaacaaactacgcaagcttgcgtgttagaccaacacggtaaaccgttaatgccaaccacacgtcttggcaaagtttatcgtcttttaaagacacaaaaggctcatattgtgtcttatgagccattcacaatccaattggattataaacctgacacacatgttattcaaccaatgacacttggtgttgatagtggtgctattcattcaggttattctgtagctaatgaacaacgtgaattttatagtagcgaagttattgcacgtgataatatttcgtctcgtatatcagatagacgtatgtaccgtcagactcgccgttcacgaaaaacgcgttatcgtaaaccacgtttcaataatcgtaaaaataagaaaaaaggttggttaccaccatctcttgaacaaaaagttgctgttcaattaaatgaaatcgaccatcttcatcgttattttccaattgaaacaattattgtcgaagtagctgagtttgatattcaaaaaattaaaaatcctgatatttcgggaaaagattatcaacaaggaactttacaaggctataatattcgcaattatcttcttgaaaagcatagtcgtaaatgtttttattgtgataaagaagtgtcaacttttgaagttgaacacatgattccaaaagctaggggtggttctaatcgtattgacaatttaaccttatcatgtcataaatgtaatcagaaaaaaggaacactaacggcagatgaatttatcaaacgaactttaccggttgaaaatgccgctaaaaaattaaaacaattgtctaaagaaaaacgattgtttaaatatatggcgcatatgaatgctacaagatggacgttatataatgcaattgatgacaaatatccaaatgtcaaaatgacttatggttatattacgaaatacaatcgtattcaagcaggtcttccaaaagcccatcatatcgatgctaaatgtattacgggctttgctcaagtaccatcatttgatataatggttgttaaaacgaagatgcgtaggcataatcgtcaattgcatcgagcaacatttagtaaaggtcatgtacgtaaagcggcaagtttgccgacagttatgtttggctttagattatatgaccgtgtattatataataatcaccattattatataaaaggtcgtcgaagtacgggtttatttgcacttgcttctgttgaaggtttgaaagacgaaagcagaacttatagaaaattgacatttttggcgcatacgaacgcttatttgactaaccgatacattaacaatgatacagtaacaattttaattaaaaaatag

SEQ ID NO: 143 - DNA, 336 bp, unidentified
  misc_feature 1..336: note = Human metagenome
  source 1..336: mol_type = other DNA
acataaattaataaccaccccgctgaagtgggcggtttgcttgactcctttaccgtgagttaatcaaacctttattgattagcctcagtgtaaactacgttacttgtaaatatataggtaccttgagatgtctgcctagtcccaagctctacgcgttatcattaaacagttctaaggggtaggaacagtgtaatgacgatataaaactacaagataacattggcgaaggcaacatagggtttgtttatacccgcttaccgcataaaataaacaaatttaaacgaaaggactttgtcaaaacgtatgacaaaaacactaaccaaacaaactacgcaa

SEQ ID NO: 144 - DNA, 1020 bp, unidentified
  misc_feature 1..1020: note = Ga0070706_100018127 JGI
  source 1..1020: mol_type = other DNA
atgtcacaagtctttgtcttagacacgaccaagcgaccgctcaacccggtgcatgcggggcgtgcccgcttgctcttgaagcaaggcaaggcggcggtgtatcgccgctatccgttcacgatcatcctgaagcgcgcggtcgagcaaccttctcttgaaccgcttcgagtcaaagtcgatccggggagccaaaccaccgggctggcggtggtcaacgatgccagcggcgaagtcgtgtgggccgctctcctgacgcaccggggtaagcaaatcacgcgcgatctggcgagccgccgcacggtcagaaggagtcgcaggcaacgcaggaccaggtaccgcaagccacgcttcgacaaccggcgcaaaaagaaaggcacgctgccgccgtcgttagagagccgaatctgcaacatggtcacgtgggtgcggcgtcttctgcggctgtgtccggtagcggccatcagtcaagaactcgtgaagttcgacctgcaacagatggagcagcccgacatcagcggcgtggagtaccagcagggcacactcttcggctatgaggtgcgcgagtacatcctctcgaagtggcagcaccagtgtgcctactgtgaagcccgtgaggtgccattagaactcgatcacgtgcaccctagagccaagcatggctctaaccgggtgagtaatctcgtggcggcctgcacgacttgtaaccagcgcaagagcaaccaggatattcgcgacttcctcgccgatgatcctgagcggctggcgcgcatcctggctcaggtcaagacgccgttgcgggatgcagcggcggtcaatgcgacccgctgggcattacacgaccgactcatacgggtagggctgcccgtggaatgcggcagtggcgggaggacgaagtacaaccgcgtgaggcgggggctgcccaagtcacattggctcgatgcggcgtgcgtgggggccagcacgccggagcacctggacgtgcggggcgtggcgcccctgcacattagggcgacagggcac

SEQ ID NO: 145 - DNA, 297 bp, unidentified
  misc_feature 1..297: note = Ga0070706_100018127 JGI
  source 1..297: mol_type = other DNA
gtcagagacccgtcccgttcaacgggacgggcttgcgtggtaccacgcaggccccgctctgaccagtctcagccaccagtctccaagggactgacggggctccgttggaagcgaatgcataggaacgtccgggtgcttcaccagcccggaccgcttcggggtagcattaagcaggctgaggggtaaagccagtgtgctgtccaccggaaaccgcttcacaacgttgacgaggtgagcattacctgggcaaccagaggcccatgcgggcacatcaccaaggagtcatgtatgtcacaa

SEQ ID NO: 146 - DNA, 702 bp, unidentified
  misc_feature 1..702: note = Ga0137383_10047051 JGI
  source 1..702: mol_type = other DNA
atgagcaaagtgtttgttcttgatacccacaaacaaccattaaacccggtgcatcctggcagagcgcgtctcctgctctcctctggcaaagcggcagtgttgaagcggtacccatttacgatcatcctcaaaactgtggtcgagcagtcggtccttgagccgttgcgggtcaagattgatcctggcagcaagacgaccgggctggcactggtcaatgatgccacaggcgaggtcgttttcgcagcggaactggagcatcgaggtgagcagatcaccaaagcccttgccaggcgagccttccccaagacgcattggctggatgctgcctgtgtcggcaagaatacgcctgagcgtcttcgcctcaagggggttgtgccattgctcatcaaagccaacgggcatggctgtcggcaactgtgtttgatggatgagcatggcttcccacgcaccaagccgaaacagaagaaatttcggcatctgtttcggacgggcgatattgtccaggccagagttccggctcacctcaaacacccaggcgtccatgtgggtagagtgtctgctaaggcaaacggagccttcacgattgcgaccagatcagggaaagtcaccgatattggcaagaagtattgccgctgtctgcaacgggcagatggctatggctatctacagaaaggagaggaggcatttcttcccgccccctaa

SEQ ID NO: 147 - DNA, 247 bp, unidentified
  misc_feature 1..247: note = Ga0137383_10047051 JGI
  source 1..247: mol_type = other DNA
gtcaggaacccatcccgtagaacgggataggcttgcagaagcaagtttgaacctgacccgactcagctcgacaacgggctacgttaggagcgaatttaggtacgtttgggtgcgaggccagccccaacctctacggtacaacattaaacagctgtaacgggtgaaggccgtgtgttgtacgtcaaaccgctccataaccttgtcaaggccaccattaccctcgcgagaggaggctcgcatgagcaaa

SEQ ID NO: 148 - DNA, 1251 bp, unidentified
  misc_feature 1..1251: note = Ga0373956_0000940 JGI
  source 1..1251: mol_type = other DNA
atgaaggtttccgtcgtatccagggaaagaacaccacggatgccgacgacttccaggcgggcccgcctctggctcaaagcgggacgcgcccgagtggtgcatagtgagccatgtcccatccagatacggtgtgacactacaacgtctactcagcctgtcacggtggatgtagagacgggatcccagacaggtaggatcgccgatggggaggttgtttccctggctgaggtcgtcctgcgcaccaacatcagccacacagtgaggcaacgacgccaggactgcagaaagaggcgaggccggacaactcgggatagacaggcccgatgtgcgaaccatcgccgtaagccagggtcgcttgcactgtcagtgcgagccatcgccaagacaactgtcaagaccgtgcgcgttgtggccactggagtgccagtggggcgggtcgatgtggacgtcggacgcgttgcgacgcagacggtgcagactcccgacatctccgggtggcaaggccagcatagtgcgcttcaggactctcatcttcgtgaagacctgcgtgccagatggcacacgccatgcgcctcctggcacctgagtgcagtgccgctccagggagagtatctgagacccgtcagccgaggagacaacgattgcgcctcgcacatggcaatcgcctgtgcggcctggaatcaggcaaaagggaagcacaccgccgccgagtgtgtgtttccacaggttcaggctcaggcatgggtggccctcacagatgcagcgcatggagcgagtgaaaagacagtgagtgtgtaccaatgcagggatctctgcggatcggattgggtgacgatcacagttggctctgcaacgaagaagacacgtatgcaaatccccggccttcccagctcgcacaccaacgatgccatcgcgatggcctgtgcaggaggcgaggtggtaaaaccacatgcggtcgcctcccacttgcacaacgggaaacggagtgagcacgcggtctgggcatcttgcatggtcaaaggctggaaggtggacgaagtggtgaacgtcaaagggcggatcggttccattggtagatggtgtctcacaggagcgtatgtggtcaaggatctgacgagtgggaaagcatgtgtggaggtgacatcacgcatactcgaacggttggcccgtccggtacaaggctggatgatcactcgtctttctttctctcacatcagaggaaaggagggtggcgcttcctcccctgtctga

SEQ ID NO: 149 - DNA, 305 bp, unidentified
  misc_feature 1..305: note = Ga0373956_0000940 JGI
  source 1..305: mol_type = other DNA
gtcaatgacctgtcccttccagagggagatttgtgagagcaaagctcttgcgcgtcggattgaccagactgagcctcagtgccaggcgagccgagcacgtgagcgtcccatctgggaaagaagaggcgacgagatggctatgtgttgctcttctgactccagcgtgctgccccggcgtcggaccttccatcgcctgatctcaccagcggtgaggtcagcagcagtggtcaggagaacgaacggggtcctttctgtgtcgaggggatcacatgtcctccaatcggaagagaggagccttctctgat

SEQ ID NO: 150 - DNA, 1338 bp, unidentified
  misc_feature 1..1338: note = GENOME_ACESSION: mgm4547164.3 MG-RAST
  misc_feature 1105..1227: note = MISC_FEATURE - Any "n" represents any nucleotide
  source 1..1338: mol_type = other DNA
atgcagtatgtatttgtattatccagaaacggttcgccgctgatgccgacaacatgcggtcatgccagaaaactgcttcactccggcagagccgatatcgaaaagcacgagccgttcacaatccgtctagatcatgacgccgccggtattcagcctgtcgagtataagacagataccggggcagtgcatgtcggtgtatcaatctgctcggcgaagcacgaatatgtgcatgcacggttcgatatgctggctgatgagaagctgcggcatgacgattgccgtaagcaccgcagagcaaggcgcggcaggctaagataccgtaagccgcggttcaacaaccgtgcaaagccaaaaggctggcttgcgccgacgaatcagcacaagctggatacgcaggaaaatctgttcgccagatatgctgcagtctgtccgatcacagctggatacttcgaagtcggcaagtttgatacatcagcgattgaagcaatcgaacgcacaggtgttaagccggaaggcacggactatcagcacggctatcggtatcagatggccgcactcaggaatgccgtgttttacagagatggctacaaatgccagatttgtggcaagtctatcaaagacggtgcaattctcagaatacaccatattggtttctgggcaggtgatcatacgggccgcatggcaaatctgctgacggtatgcacaaagtgtcatacgtcagcaaaccacaagcccggcggcaaactgtatgatctcaagccaaaggttggcaatctgtctggcgcagcattcatgaatcagattcgccggaagatcatatctgatctgcaggaaaaataccagagcattgcattccatgcagtctatggatcagataccaaagtccgcagacatgaccggagtatcacaaagagccatgctaacgatgcatatgtgctcggtacgctcatttcgaagcatcggacgcaggagaaacactttgcaaagcatcgcagaaacaaccgtattctgagtaagttctacgatgcgaagtatattgacattcgggataacactacgaagtctggtgcacagctaagctgtggacggacggatcgctctgagnnnnnnnnnnnnnnnnnnnnnnnnnnnnnnnnnnnnnnnnnnnnnnnnnnnnnnnnnnnnnnnnnnnnnnnnnnnnnnnnnnnnnnnnnnnnnnnnnnnnnnnnnnnnnnnnnnnnnnnnnnnagagtagacattctgaaaagaacgaacgcatcttcagaggccggcaggtgcggaaaggcagagtttccatcaggaaacaacactatccgtatcagcctggcgacattgtga

SEQ ID NO: 151 - DNA, 468 bp, unidentified
  misc_feature 1..468: note = GENOME_ACESSION: mgm4547164.3 MG-RAST
  source 1..468: mol_type = other DNA
gtcagccaccccatgactaaagtcaggggcttgcagggaagaaagaaaaaggcgttgcttggtatttcttcttaggaaagccatagctgatcagcctcagtgtttgtatcatcgttctgcgatgcgctgcagatactacgatacctgagaatcctgtgagtaatcacaacataacaggcaccagcgaatgctccacaagtccgctgctctgcggaacgtcattaaacatctctgagaggtaggagaagtgtggcgttcagaaaacctcaggcactcattggcgatgtggactacggcactggctcggcttcggctgagtacaggctcgaatctgcaaatagtccgatatccaatccgaacgtttgcagaggtgcgtaagcaccgattttttccaaacacactggtagatggtgtgtggttcattgctttatcagcattacagagaggaggcatcagcctatgcagtat

SEQ ID NO: 152 - DNA, 726 bp, unidentified
  misc_feature 1..726: note = Ga0256831_1010291 JGI
  source 1..726: mol_type = other DNA
atggtttttgtattagataaaaccaaaactcccttagcccccactacggagtctaaggctagaattttgttaaaaaaaggtaaagctgttgtgcataaaatatttccctttaccataagattaaaagagaacaaaacgtgtactaaacactttgaaataaagtttgatgtaggtgcaaccgttacaggtgtagcgattgttgatgcactaaaatgctttttctttgcagaaatagtgcatagaggaaaagccgttaaaaaagcaatggattcaaggagagcaataagaagaggtagacgagatagaaaaacaagatacagagaagcaagatttgataatagaacaagaccaaagggttggttacctccaagtgttaaatcaagagcagataatgttattaactttgcaaaaaaatatgcaaaactaatcccattaaaaatggctacagtagaaaaagtctcttttgatactagctctatgactaatggtaaaaagttgcatggagtagagtatcaaaatggtagccttaaaaatacaaagttaagagagtttatctttatgaagaacaactacaaatgtgtatattgtggaaatcatggagaagagatagaacatattattcctcgctcaaaaggtggaacaaattctgttcaaaatttaacacttagttgtagaaaatgtaacgaacttaaaggcaatctaactcttaaagagtttggtaaaaaa

SEQ ID NO: 153 - DNA, 275 bp, unidentified
  misc_feature 1..275: note = Ga0256831_1010291 JGI
  source 1..275: mol_type = other DNA
gtcaataacctctcccaaaccttaacggttagggaagaggcttgattgaccagactaagtagctagagatagccaactacgataatagtgttatcacaccttggaatgcttctccagttccaagctctatgtaggctctttaagttgggttaaagccctgtgaacctaaggacgattcgccattgcgaacaagcatttttatcattgtcgaggagagaagcaaagcccgtcaccactgaaaagtgagttaatctgaaaaaggatttttaaaaatg

SEQ ID NO: 154 - DNA, 834 bp, unidentified
  misc_feature 1..834: note = Marinobacter lipolyticus BF04_CF-4
  misc_feature 358: note = MISC_FEATURE - Any "n" represents any nucleotide
  misc_feature 411: note = MISC_FEATURE - Any "n" represents any nucleotide
  source 1..834: mol_type = other DNA
ctgggatcacgctggcgaaaggtaaagcgccgaaggttccggtcgccgcgcaagcgggagccggtgatagacattcccgaggggagagaggcttcggcctccgttactaggcccgtaagggcattcattgaaaggaaaacgatgtcggtcttcgtactggatagacgcaaacacccccttatgccgtgcaccgaaaggcgtgcgcggcttctactcgaccgtggtcaagcggtggtggtgcgtgcgtatccgtttacgatccggttgaaaagccgggttggcggaaatactcagccggtccggatcaagatcgatcccggcagcaagaccaccgggattgcagtggttcgagaaagcngccagaagcaacacgttctggcgttaatggagttggctcatcgcggtcgccanatcagcaagtctctggagcaacgtcgggcgtttcgccgccggcgtcgcaaccagctgcggtacagggcaccccgatttaacaatcgaaccaagcccaggggctggctggccccgagcctgcaacaccgggtggataccacgaaaagcttggtgaatcggcttcggtctttggtgccggttgaatttatcagccaggaactggttcgattcgacacgcagaagatggaaaacccggaagtcagcggtgtcgaatatcagcagggcaccttgctcggctacgaggtccgcgaataccttctggagaagtgggggcgcgaatgcgcttactgcaccgacaaagacacccctcttcaaattgagcatatcgacccaaaagccaacggtggctcgaaccggatcagcaacctgacattggcgtgccgg

SEQ ID NO: 155 - DNA, 295 bp, unidentified
  misc_feature 1..295: note = Marinobacter lipolyticus BF04_CF-4
  source 1..295: mol_type = other DNA
gtcaactaccccgccctgaaggacgaagcttgtagagaataccctgcaagccaggttgaccagggagagcggacaccaacccgctacgtttatcacaggtcgctaagactcatcgccgaatgcttcctcagttcggcgctctgaaagactgggatcacgctggcgaaaggtaaagcgccgaaggttccggtcgccgcgcaagcgggagccggtgatagacattcccgaggggagagaggcttcggcctccgttactaggcccgtaagggcattcattgaaaggaaaacgatgtcg

SEQ ID NO: 156 - DNA, 927 bp, unidentified
  misc_feature 1..927: note = Ga0307968_1027799 JGI
  source 1..927: mol_type = other DNA
atggcggtgtatgttctggacaagaaaggcaggcccctgatgccttgtaccgaaaaacgagcgagattgctgctggagcggggccgtgcccgggtgcattattgtgtgccgttcgtgatccgtttggtggatcggctgcaatcggagtccgagcttcagtcgctgacggtgaagattgatccgggcagcaaggtgacgggcattgctttggtgcgggagcgcgaaaagaaggtggttgtgctatccctgatcgaactggtgcaccggggcgccagttcgatcaaaaaatccctgggccagcgagccgggtaccggcgtcgccggcgtagtgccaacctgcgccaccgggcaccccggtttctgaaccggaccaagccgaaaggttggctggcaccaagccttcagcatcgggtgaacaccacgctgagttgggtagaccggttacagcgctggacgccggttgccgaactggccgtggagcgggtgaaattcgacatgcagaagatggagaacccggagatccaggatgctgagtaccaacaaggcaccttgatggggtttgaggttaaggagtatctgctggcccggcaccaacacacttgctcgtactgcgctggcctgtccaaagaccccatcctggaggtcgagcacatcgttccccggggcctgggtggcacccaccggattgggaatcttacattagtttgcaagacctgtaatggggacaagggcatgcacgaaccgggtgcatggcagacgctctgtgagcggagcaagactgccatcaacaaggctcgcgccaagagcatggcccgcatcctggatggctaccgccccaccctgaaagatgcggcggcggtgaacgccacccgcaatgccttgtttcaggatttgctggcaacgggcttgccggtggaggccggcact

SEQ ID NO: 157 - DNA, 298 bp, unidentified
  misc_feature 1..298: note = Ga0307968_1027799 JGI
  source 1..298: mol_type = other DNA
gtcaactaccccgcccttaggacggagcttattggggcaatccgaagagctaggttgaccaggaagagcggtaatcaatccgctacgttacacacagggtacaagacccacctcgccgtgcttcctcagcgacgggctctggaatcgaccgatcatgctggcgaaaggtaaagcgtcgaaggttgggagaacggcttaaagccagtccggtgtgtgacattcccgaggggagcgaggcttcgacctccgtcacaaggcccgtaagggttttaattgaaaaggaagcgttttgatggcg

SEQ ID NO: 158 - DNA, 1165 bp, unidentified
  misc_feature 1..1165: note = Moorea sp. SIO2I5
  source 1..1165: mol_type = other DNA
atgcaaaattatgtttttgttattgacgcgaacaagcaaccattaaatcctattcacccaaagaaggctcgccgcctgctagaaaaaggaaaagcagctgtctttagaatgtatccatttacaatcatcttgaagactgcgtacgctaatccagttatctcaccttgccaaataaaaattgacccgggtagcaatactactgggttcgccctggttcgagacgggcaagttatttggggaatggaattaaaacacagaggaggattgatcaagaaaaaactggaatctagaagagctgtcagacgcggaagacgtaatcgcaacactcgttaccgaaagcccagattccttaaccgcaaacgaccacagggctggcttcctcctagtttagaacacaggattttgacaactgaaacttgggttaagcgattaattaaattctgcccagtctgtgaaatctggattgaacgagttaagtttgacactcaaaaaatgccaaaccctgaaatcagtggagtagactaccaacaaggcgagttagctggctacgaagtcagagagtatttactcgaaaagtgggggatagaatgtacttattgcgggaggcaaaatgtccctctacagatcgagcacattcacccaagatcaaagggtggtagtaacagagtaagtaatctctgtttggcttgcgaaaagtgtaatcagcgcaaaggaaacaagcccatagaatagtttataaaaaagaaacccagcctactacaaaaaatcaaaaccaaagccaaacaaccattattggatgcagcagcggtaaacgcgactcggaacaaattggtcaaggtattgaaagatactaaagtagtcgtcactggaacaggagcgcagactaagtacaaccggacaaggctaggactacctaagcagcacgcttattgacgccgcttgtgtaggaaatattgaaaacttagatctcaagaccttacaacctctatttgttacctgtaaagggcagggaggacgacagaaagcggctctcaacaagtacggttaccctattaggcacaacccactgaagcctgttaaaggatggatgactggggatatagcgagacaccagaaactggggataggcaaagtcacccctagtggtctgtcaaactcattttga

SEQ ID NO: 159 - DNA, 251 bp, unidentified
  misc_feature 1..251: note = Moorea sp. SIO2I5
  source 1..251: mol_type = other DNA
ctaagccttggtaattcccggtaactccaggaattgccaaccaggatgcagactaagtattcatttactacgttgttcaagccatgatacctacaaatgaacgccagtttgtagctctatcgctaactattaagacgaaggcaaccgtgtagttagctcaacaagcttttacaacattgtcgttcgcgcaagcgtgtgcgaagcactcggcacaccttaccaacttgaggcatttaacgatgcaaaattat

SEQ ID NO: 160 - DNA, 999 bp, unidentified
  misc_feature 1..999: note = Geitlerinema catellasis PCC 7105
  misc_feature 675..774: note = MISC_FEATURE - Any "n" represents any nucleotide
  source 1..999: mol_type = other DNA
atgcacgttttcgttctcgacaaagacaaaaaccccctagcaccatgccatccagccaaggcgcggcggctcctgaaatccggtcgagcttcggtatttcgtcgctatccatttacccttatcttgcacgagattgaagccaaagattgtgtcgttccggaaactcaactcaacgcttcggctccgctcgcttcgacttcgctcagcgttgagtccgagcggagtcgaggactcaaaatcgatcccggctcgccaacaactgggttggctatcctgtccgaaaaccgagtcatttgggcgtccgaactcagctatcgcggacagcaaattaagaacgacttagagaaacgtcgcgctttacgacgctcccgacgccatcgaaaaactcgttaccgaaagcctcgctgtcttaaccgtactcgtccgaagggttggcttccaccgtctctcaacgcttcggctccgctcgcttcgacttcgctcagcgttgagtccgagcggagtcgaggactcaaccatcgggtcgaaactacgatgacctgggtgaaccgtttgcgaaaacttttgaaagaaactggattgcccgttgaagtgggaacgggcggacagactaagtttaatcggactcgattgggtttgccgaaaactcacgggttcgatgcggcttgcgtcggnnnnnnnnnnnnnnnnnnnnnnnnnnnnnnnnnnnnnnnnnnnnnnnnnnnnnnnnnnnnnnnnnnnnnnnnnnnnnnnnnnnnnnnnnnnnnnnnnnnnggaattcccctcccgctaatcctgtcggatataacgggagtccccttcccgcattttagatggaaatttatagcagtcgccaacagaatctttctcctcaagaagaacgcgacctttccgcacttgccgaacaagccaaacgcgctcttgaggacggtgtcgtctcgcgagaagaacgagatgcactcattgcggcaatttatgccgatggaaaagtttcggtag

SEQ ID NO: 161 - DNA, 258 bp, unidentified
  misc_feature 1..258: note = Geitlerinema catellasis PCC 7105
  source 1..258: mol_type = other DNA
gtcaacaacccgccgtcaagcctgttggctatgacgggggcttgaaaaagcccacaagttgaccagcctaagtcttccgaagactacgttacgtccgagagtttaagttcctaccgacgagtacgttgccagcttgtcgctctagaactgaaaagttaaacagcttaaaacgggttaaggcagtgcttttcagatagtaccgagacgtaaccttggcgaggcaaacgttaccccttttgggagttgtgtattatgcac

SEQ ID NO: 162 - DNA, 1278 bp, Methylobacter whittenburyi
  source 1..1278: mol_type = other DNA
atgacgggtaaccgtcaacttttcaggtttacaggaatgaataaagtttttgttttggatcgcgagaaaaacccgttaatgccttgtcatccggcgagagctcgacagttattggatcgtaaacgggccaaagtttttcgcttacatccattcacgatcattttgcaggatcgagccggcggcgctgttcagccggttgaaatcaagctagatccaggcagcaagataaccgggattgcgataaccgttttgggcgataacggacgcacgcttgtctggtcgtgtcacttgagccatcgcggctgcactattaaggatagcctgcaaaaaaggcgtgggattcggcgtagccggcgtcatcgccattgccgataccggcagcctcgcttcgataatgtatttacctgggttaagcgcttgctgagctggacaccgggacagtgtattcatgttgagacggttaggtttgacacacaaaagctgatgaatcccgaaatatcgggcgccgaataccaacaaggtgagctgcaaggttatgaggtttgcgaatatttgctggaaaaatttcaccgaacctgtgtctattgcggtttaggcgatagaccgctggaggtggaacacgtagtagccaaggctaacggtggcagcaaccgggtctccaatttagcgctatcctgtcgggattgtaatgaacgtaaaggcactcaacgggtagaggatttcgtaacggaccctgttaagctggagcgattgcgcaagcagctaaagacaccgctaaaggatgcgactgctgttaatgcaacccgttatgctattggcaacaaacttaaaaacctgggtttaccggtccggttctggtcaggcggacgcaccaagatgaatcgaattcagcaaggttacggcaaagatcattttatcgatgcggcttgcgtcggcgataccggtagtcgcgtgtttattccggaagccctaacccctttaaccatttccgccaaaggacgtggtaaccggcaaatgtgcctgatggataaattcggttttccccgaacccggcctaaaggcgttaagcaagtcgatggctttaccaccggcgatagcgttcgactcaatcagccccgaggcaaataccggggtagctggacggggagtatcagtattcgagccagcagggtttttgacattacaacccgcaataaagaaggcaaaaaccaaaagatatcggcgtccagtcaacatttcgttcggcttcaagggtttgacggctatgtttacggctaa

SEQ ID NO: 163 - DNA, 332 bp, Methylobacter whittenburyi
  source 1..332: mol_type = other DNA
gtcagcagcttaaaccagagttgagccctcgacttatccaagcctgcgttaaatccgtttaacacaagcttggctagggttaattaagtgatttaattaacggctcaacccgcctaagctgcttagtggcagctacgttagtcaagtgatcttaccctgggatgcttctccagtcccgggcactaaggcaataggttaaacagtgagcgatcgagagtgaacagtgcttattgcatgacaagctttactaaccttggcaaggagatatttaaccgcttcggcggataatgacgggtaaccgtcaacttttcaggtttacaggaatgaataaa

SEQ ID NO: 164 - DNA, 1224 bp, unidentified
  misc_feature 1..1224: note = JGI24702J35022_10000018 JGI
  source 1..1224: mol_type = other DNA
atgttagtttatgttttgagcaaatctggaacatctttgatgcccaccgctagaaatggttgggtgcgaagggcgttacgagacggcagggcgaaagttatttcccgctcaccgttcacaatccggttatgttacgattctaccgagtatgtacaggaatgtacctgctcggtagatgcagggagtaagtttgttggattatcggtaaccacaggagagaaagaagtttatgcagctacagttcagttgagggcggatattgtagatttgttgtcaacaaggcgggaacttcgtcgttcacgcaggaacagaaaaactcgttaccggaaggcacggtggcaaaaccgtaaaaaaccagaaggttggcttcctccgtctgttagatggaaggtcgaagcccataagagggtaattgcaaagttacataagattttacccattagtaaaatcatcgttgaaacagcacagtttgacagccagaaaattaacaatcctgaaatatccggcattgactatcagatgggagaccagttaggctatcaaaacgtcaaggagtatgttttagtgagagacgggcacaagtgtcaggtgtgcggcaagggcaagataaaacttcatgtacatcatatcgaaagtcgtaagacaggcggaaatgcaccgaacaaccttgttactctatgcttggaatgtcatgatggtgttcataatggaacgaaacaactcaaaaagaaaagagggcaatcgttccgtgatgcaacacaaatgaccgtgatgagacccacactgttgagggaattgaaagaaatatatccttatgctcaagaaacctttgggtatattacgaaatttcacaggcaacaggctggtttagagaaatctcatgtcaatgatgctcggtgtattgaaggtaatatgccgactgttttgacaaagccttacctgattaagtttgtcagggctaataatagacagttgcacaaatgtacaatagccaagggcggttacagaaaatctaacaaggcggagaaatatgtctttggttttcggttgtttgatatggttaaatatcaaggacaagaatgttttatattcggaagacggtcttccggtagttttgatgtgcgattattagacgggacaaaagttagtgccggcatttcgtataagaaactaaaactgattaagaaaagtacaacaattttaacagaacgctgctcctcctga

SEQ ID NO: 165 - DNA, 263 bp, unidentified
  misc_feature 1..263: note = JGI24702J35022_10000018 JGI
  source 1..263: mol_type = other DNA
caactacacagtagaaagtaaacaacccacacgctaaagcgtggggcttttagcccttgtttactagattaagtttaacgcccggtttgtccgggagacaactacgttgattaggaataaataggtacttcaggatgcttgttctagtcctgaacactacggtttacggttaaaagttccaatgggtaagaacggtgccataaacattaaacccttttcaacattatcgaagaacacctaactccgtaaggagatttacaatt

SEQ ID NO: 166 - DNA, 1554 bp, unidentified
  misc_feature 1..1554: note = Leptospirillum ferrodiazotrophum
  source 1..1554: mol_type = other DNA
atgcttcctcagtcccgggctctggaagctgccgatgcagacaaccgcgagggccaggacgaaacggtcggcggcaagggagcgatcccgaagccggttgccaacattcccgaggggagacgcgtcgaaagaagcgcgttacggccgaaaggccagtgcaacgtaaggttcgacggaggattcgtgcaggtttttgtgctcgacaagaaaaagaagcccctgatgccctgccacccggcccgggctcgggagcttttgcgagagggacgggcggtggttcacaggatcgccccgttcaccatccggctgaaggaccggatcgggggcgaaacccagcccattcgggtcaaactcgatcccggatcgaagaccaccggactcgccgtggtccgggaggaagagacggacggggagaagaccgcccatgtcctgtttcaggcggagattcatcaccggggatccgccatcaaaaagagactggaccagcgccgggccttccggagacggcggcgaagtcagcttcgcgaccggacgccccggttcgacaaccggacacgtccggacggctggttgcccccgagcctgcgccatcggatcgacacgaccctcgcctgggtcgaacggctccggagactggttcccgtttccgaactgtcccaggagctggtccggttcgacatgcagaagatcgaaaacccggaaatctccggagccgaataccagcagggaaccctggccggatacgaggtccgggaatatctcctggagaagtggggccggacctgtgcctactgtgggtccgagaacgtgcccctcgagatcgaccacatccacccccggagcctgggcggatcggaccgggtctccaacctgacgctggcttgccgttcctgcaacctgaagaagggaaaccgtccggtcggggagtttctggcgaagacgccggagcgtctgtcgacgatcctcgcccgggccaaggccccgctgaaagacgcggcggccgtcaacacgacccggtgggcgctgtttcaggcgttaaaggcgacggggcttccggtcgagaccgcctccggaggacggacgaagtggaacaggactcggcttgtgctccccaagacccatgccctcgatgcagcgtgtgtcgggaaggtcgacaggatcgagggctggaaccgtccctacctttcgatcaagtccacgggacggggatcctatcagcggacccggctggatgcgttcggcttcccccgagggtctctgacccggacgaaagcccacttcggttttcagaccggagaccgggtcatggcgatcgtgacgaagggcaaaaaaaccggaacctatgccggacgggtggccgtgagaagctccggcagtttcaacatccagaccggctccggagtggtgcaggggatttcttacaaggactgtcggcttctccagcgggccgacgggtacggatattctatccatccgatcactgagaaaggagaagcgggagaggcgctacccctccccggcatgaatgccggactctcccgcgcaagaggatga

SEQ ID NO: 167 - DNA, 306 bp, unidentified
  misc_feature 1..306: note = Leptospirillum ferrodiazotrophum
  source 1..306: mol_type = other DNA
gtcaaccaccccgcgctgaagggcggagcttgaaaggaggttcgacaggctcgggttgaccagggaaagcgggttccaacccgctacgttggcaacaggtacaagacccaccccgggatgcttcctcagtcccgggctctggaagctgccgatgcagacaaccgcgagggccaggacgaaacggtcggcggcaagggagcgatcccgaagccggttgccaacattcccgaggggagacgcgtcgaaagaagcgcgttacggccgaaaggccagtgcaacgtaaggttcgacggaggattcgtgcag

SEQ ID NO: 168 - DNA, 1290 bp, unidentified
  misc_feature 1..1290: note = Ga0101770_1065076 JGI
  misc_feature 345: note = MISC_FEATURE - Any "n" represents any nucleotide
  misc_feature 370: note = MISC_FEATURE - Any "n" represents any nucleotide
  source 1..1290: mol_type = other DNA
atggtatttgtattagatattaatagaaaaccattatcaccttgtcatgaagcagttgcaagaaaattgcttaaacagggtaaggctgcaatatttaaaaggtatccatttacaataatacttaataaatctgtagataatactgacaataaacaagaatatagactaaaaattgattatggaagtaaacatacagggttggctatattacaaaataacaatgtaatatggttagctcaaatagatcacagaacagatattaaaaagaaacttgatgaaagacgtatgtttagacgcagtagaagaaacagaaaaataagatatagaaaaccaagatttttaaanagaaaaagaaaagaaggatggatancgcctagtttagaaagtagagttaataatataaaaacgtgggttaatagattacaaaaattaattccattaactcacatatcttatgaaaatgttaagtttgatactcaattattaagaaatcctgaaataagtggtattgagtatcaacaaggaattttatatggttatgaagttagagaatatttgcttgagaaatttagtagaaaatgttgctattgtggaaaagaaaacattccattagaaatagaacatataataccaaaatcaagaggtggtacaaatagaatagacaacctttgtttatcttgtcatgagtgcaatcaaaagaaaggcaatttgacagcagaagaatttggttatccagaggtacaaagacaagttaaagaaacgttaaaggacgctgccgtagtaaattctactagatggaaagtgtatgatgttttactacgaattggtttaccagttgaatgtggcacaggtgctttgactaaaatgaatagaattaaattaagattaccaaaaacacattatttcgatgcttgttgtgtaggacaaagtacaccagataaattatattttaagacaaaagatgttttgtatataaaagcaaaaggcagagggagtcattgtagaacaaatttagataaatacggctttccgagaggatatttagcaagacaaaaatatttctttggttttcaaacgggagatatagttaaagttgaaataccaaaaggaaaatataaaggcatttggtacggagaagttgcatgtagaaaatcaggtagttttgatattaaagacaaggaaggtcaaagagttgtacaaggcgtcaattataaatattttcaagtagtacaacgctttgatggatatagttatagaagggaggtagcaattcttacgcagcgtgtttaa

SEQ ID NO: 169 - DNA, 241 bp, unidentified
  misc_feature 1..241: note = Ga0101770_1065076 JGI
  misc_feature 66: note = MISC_FEATURE - Any "n" represents any nucleotide
  misc_feature 89: note = MISC_FEATURE - Any "n" represents any nucleotide
  source 1..241: mol_type = other DNA
gtcaactacccaacggctaaagccgtgggcttgaaaccccatgttgaccaggctaaggtttgaaanagaacctacgttatctatgttangacaccctaggatgccctcccagttctaggctctgtcgtatagcattaaacaggtgtagtgggttaagccagtgtgctatacgtgtaagcatagataacattgccgagggagatgttacctgcgtaagcagaggaaaggagaaaatcctatg

SEQ ID NO: 170 - DNA, 1278 bp, unidentified
  misc_feature 1..1278: note = Ga0075125_10001675 JGI
  source 1..1278: mol_type = other DNA
atggaaacaaaaataaactacgagaaaggaactgaaaaaacaccaacagacgcttcactaatctgttgctctgtaagagaacccattaactctacgagtttagaaaacaagagaaacactcttgataactctaagttcttttttctttgtggaagtgagtataactttccgaataggaaagcggtttgtagccgagtgtttgtattaggggttgatgggaaaccattaactccttgtaaacataaaagagcaaggttgttaatgaaacaaaataaagcaaaacctgtatggaataagtttggagaatttggaattaagatgttagaagaaacaggcagtgaaacagcagaaattattttagggatagataatggaacaaagtttgaaggttattctataattgttgataaaacaaataattttaatgtgatgtggaaacttccagataaacaaaaacttgtaaaaaaacttgaagaaagaagtagattaagaagagcgagaagacaaagaaattgcaggagaagagaagcaagatttaataatcgttcaaaagatggttttattgcaccaagtcaattacaggttgttcaaagtaggttgaaagcaataactgagttatttaaatcttacccaataagcaaggttgcatttgaagatgtgaagtttaatcaccgagataataggtgggggaagaatttttctacaattgaagtcggaaaaaatatgattaaagattttattaataataaaattggaaggaaaaatttaataaattttgaaggaatagaaacatataacttgagaaataaatataatttgaaaaagtcttcagataaatcaaaacagagtttttatagccattgtgtagatagttttattatatcaatggaaactattggaaaacctattattcttaatgaaagtataacttatatcgatgataactacagacctgttagaagaaggttacacgacactcaattttcaaaaggtggaattagaagtaaattttctactggaaaatttcaaggaatatcaaaggggtgtattataggagatgaaaatggttggttgggacaattggttggtggaactaaagataattgctggtattgtgattttgaaatgagaggtaatagaaaagtttatcaaaaaggaaaatccataaataaaattagttggatttcacatcacttcaaatataataaactaaatataaacagccaattcatcccccacctgaaggaaggggacttcttggctcagacaatatgttaa

SEQ ID NO: 171 - DNA, 324 bp, unidentified
  misc_feature 1..324: note = Ga0075125_10001675 JGI
  source 1..324: mol_type = other DNA
taaaaagaatacgtgaaaaaagaaaaagaattaatgctaaagaaaaaagaagttctcaaaaaagaagtgtagaaattgttgagtatgaggatggaacatattctttgattgggtatgcttgggatcttaaacttaaagaaaaagaagtctctgatgctgttaaaaattggattaatggttctcttgaaaatggggaagaaggtgaactacccctccataaatgaaggggcttcttatgatggtaagaacgcaagagttcactacactaagtttgaggaaacaaagaaatggaaacaaaaataaactacgagaaaggaactgaaa

SEQ ID NO: 172 - DNA, 1230 bp, unidentified
  misc_feature 1..1230: note = Ga0209347_1000563 JGI
  source 1..1230: mol_type = other DNA
atgacgcatgtctacgtactttccaggaacggccgccctctgatgccgaccatgccggccagagccagacacctgctcagagcaggcgaagcgagggtggtaaggatcaagccgttcaccatccagctaaccattaacacgccagaagtggcgcagccggtatacggcggccaggaccccggattaactcagggagtggccgcagtaaggaacgacggcaaagttttgtttaaagccgaagtcaaatgccgacctgacatttcagagagactcagggaacgcgggagttaccgcaaaggacgccggaaccggaaaacaaggtaccgccagcccaggtttttaaaccgcaaaaagccggaaggctgggtggccccgtcaatcaagcagttaaaacacgagcatgataaactccggcagttggtggaaagcatcctgcccgtgaccggctggttcatagaactcaacaaattcgactttcagaagatggaggacccgaacatccagggtgttcagtaccagaacggcccgcagaaaggctgcttcgacgtaagggaatacgtcctcgaacgcgacggctacgcctgtattctgtgcggcggcgtaaaaaaccgcaaactctatcactttcgcggcaaatccgagcgtccgaagaacctggtcaccctctgcggggaatgccacagaaaggccgtcaacaaagaaatcccttttgcggtattgctggagagctaccgttgggcagccagggtcaacgtgatgcgtgcgctgtgggggccgtccggacaaatcaattttgtcacagcagagcaggcagccgcgtcccgggaactgctccgcatggctaaaacgcacagcaacgacgccttggccgcagttcatgcggcttatggaacagtacccgccgccggcgaatgcaccctgcacggccgctacgtccggcagaagaaccggcaactgcaccgggcgaatcccggtaaaggcggcgtaaggcagttggctaacgccaaccggtacctggtaagcaaggcgggagtgagggtgcaaaaatacgacctggtaatataccgtacccggagtggccggaaaatcaccgggtacgtcaacaccctgttcagccgcggcgcggcgcggatagctgattacgccggcagggaactgtacagcggagcgagtgtcaacaaactcaagaagctgcagaatgctgataatttggtatgggaggtgttataa

SEQ ID NO: 173 - DNA, 262 bp, unidentified
  misc_feature 1..262: note = Ga0209347_1000563 JGI
  source 1..262: mol_type = other DNA
gtcaaccaccccccccactgaagtgggaggcttgcagaaaacactgcgagcctcgggttgactagccccagcctgtcagttacatgccagactacgttggaaaggccatcacaccctggagcgtagcccgaactccaggctctgtggtccgggattaaaagccctgcggggcaggggcggtgttccggacataacaaacccttccaacatgggcgacgggcgcaataacttcaacgtggaggaggtcatctaaatgacgcat

SEQ ID NO: 174 - DNA, 1254 bp, unidentified
  misc_feature 1..1254: note = Ga0209941_1000055 JGI
  source 1..1254: mol_type = other DNA
atgacggtatttgtcttggacaaacgtaaacggccgctgatgccgtgtagtaacaaacgagctcgtttactgttagagcgtgggcgcgctgttgtccaccgctttaagccctttaccattcggctgaaagaccgtattcagggcgactgcgtatttcaacctatcatgctgggtatagacccgggttcaaagaccacgggtctagccctcacacgccgtgacggtgaggacgccgtactggtgtttggtgttgagttacagcaccgggggttggctatacgggccaagcttttaaggcgcagtgcttaccgccgtaatcggcgctcccgtaagacccgctatcgccctgcccgttttaaaaaccgtacgaaaccaaaagggtggttacccccctctcttcgacatcgagtagaatcaacgttgacatgggcgggtcgctttcgacgcttagcaccagtgaccgctttggcttatgaagctgtggaattcgacacacagcgtttacgtaatcctgaggtctctggcatacagtaccagcaaggcacgttgcaagggtataccgtccgtgcctacgtacttcagaagtgggattacgcctgtgcgtactgtggatccaaagaccgtctgacacttgatcacgttatccctcgctctcgacacgggagtgacgcggtgacaaacctggtctgtgcttgttacggctgtaatcaacgtaagggcaaccgtcgggtgcaagagtttttagcaaagaaacccacggtactaaaacgtgtcctcgaacaactgaaaaagcccttacgagacgctagtgcggtgattagtacgcgccccgcgttacataaggcgttaggggaggtaggattgccactcactgttggtactggggcggaaaccagctacattagacaccgattgaaactccctaagagtcatgtcgtggacgctgcttgtgtggcgctaacaggaacccttaaaggagaatggtttaaaccattacttgtcgtttgtgctggtacgggacgttaccaacgtgtcagaacagatcgcttcggatttcctaaagcgcacagagttcgcgtcaaacggccattcggatttcaaacaggtgacctggtgcgttatgggaaagttattggtaggacagctgtaagaatgacgggttttttcagtttccaacacaaacatcaaaactttaacgtaaaatggtcgaaactaacactggtgcagagaagtgacggctatctctattgttga

SEQ ID NO: 175 - DNA, 289 bp, unidentified
  misc_feature 1..289: note = Ga0209941_1000055 JGI
  source 1..289: mol_type = other DNA
gtcagcggctgcgatcaagttcaggtacgctgactttcccgaacctagtttcgtcagggaaccagactcaatctgacgtaaagtcagactacgttactcaagaaataggtatcttcagatacctcctcagtctgaagctctacggtattacgttaaacagctttatgggtttaaggcagtgcgtaatgcgtcaaaccttgggataactttgtcgagaggactgtggggtaacgccccactgtcactgaaggcccgtaagggcgttgtaaaggtatttcaccatgacggt

SEQ ID NO: 176 - DNA, 1329 bp, unidentified
  misc_feature 1..1329: note = Ga0208186_100002 JGI
  source 1..1329: mol_type = other DNA
atgcttgtctacgtattagataaagatggaaacccgttgatgccaacacgccgtttaggacgtgttcgtcattggcttaaagatggtgaagcaatcgttgtttcgcatcaaccatttaccattcaatttacaaaaacaactgaacgtcatactcaagacttaaatcttggtattgacgctggttataaacacattggtgtttctgtgctaaacacgtctaaaaatgaagagatctactcagaatctgtcgatcaacgtgcaaacgaggttaaaaagaatattgaccgtcgtatgtatcgtagaactagacgtaataaactacgtcaccgtaaaccccgttttgataatcgtaaacaatttaaaaagtctgaaggctttacgccttcaatttatcacaagttccaagaacatttgaaagcaattggccgtgttaagaaattcttacctgtgtctaacatccatattgaagttgctccatttgataaccaaatgattaaagctaaatttaataacgaagctgttaaacgtcaaaatggcgatatgcaaagacattctgacattaagtcttatatctttgaacgcgacaactacacatgtgcagtctgcaatattaaaaagcaagtgtcacaattacattgtcatcacgtcaaatttaaatccaaaggcggaacgaaccaacctgataatttacttacagtatgtactaactgtcatacacctgacaatcatcaaaagggtcacgtactctatcaaatgatgcaagcaaaacaaaacccattttatcaaggggcgttcttcatgtcagcactcaagattttattagaaaagcaccttacatttcaacaagcctttggttatgaaacctctgctaaacgtattagctttggctggaataaagaccatcacgttgacgcattagtcattgccggcgcaaataatgacaccaaaccatattctgttcatattaaccgtacaaaactacaacgaaataatcgaagtttgtctaagttctatgatgcgaaatggttagactctcgtgaccacaatgtcaaatccggcaaagaattgtctaatggacgcgtaaaccgtaatcacaccaataattctgaaaatgagcacgtttaccgttgtcagaaaattaaaacaggacgtatctctacacgaaaacaacattatcaaattcgaccacatgatattctaaatattggtattgttaaaggtgtacaaaatcttggtaaatacctcaagctaaacagtggaaaagtggtttctactaaaaccgttagagtacttcgtcatgtaaacgggtatctagtagaaactaactaa

SEQ ID NO: 177 - DNA, 326 bp, unidentified
  misc_feature 1..326: note = Ga0208186_100002 JGI
  source 1..326: mol_type = other DNA
gtcaatgactcccgactaaagtcggaagcttgccaaagcacttttaattagaaaagtgtctttacaggcttaattgattagactcggtgaagagaatcttacgattctctgaactccgttagctaagaatacataggcacgtttggatactactcacgtctgaaccactgcgtgttataattaaacatccctaagagtaaggggaagtgttataacaatcaaaccttagcataacattgtcaaagagtacgaacaggaagcaagcttcctgaattatctttaattagatacaaacaacactattagaaaggacatgtcacatgctt

SEQ ID NO: 178 - DNA, 1356 bp, unidentified
  misc_feature 1..1356: note = Ga0315284_10000153 JGI
  source 1..1356: mol_type = other DNA
atgcagaagattaatataaggctaaagaattcaccagagaatacttctctagttctctgctctgagagttcttgtctaaacaaagaagaaattcttagtgataagagcatacagccagtattaatcaatcccgaagagaatcaagtccaacaagtaggacgctcaatacaagcacttgtacttgtcctttcaaaggaaggtaaacctttgatgccttgttcttatgctaagagcaaacgtatggtaaaatcgggtaaggctacagtaattaaaagatttccgtttgttatccagcttaattttagctgtgaagaaaagacacaagagattatttttagtttagatacaggctacgaatatgcaggtgtatcagtaagaacggaaaagagagaaatagtaagaattgaagtaaaattaagaaccgatgtaagtgacaagattgaagaaagagctatgtatcgaagaaatagaagaaacagattatggtacagagaaccaagattcgacaacagaaaaggattcatatttgctccatcagtacagcataagattgattctcatatagggattcttgataagatttctaaatatgttcctgtatcaagagtttgtgtggaatcgggaaagtttgatattcagaaaattttaaatccggaaatatcgggaaaagaatatcaacaaggaattctttatggttatgaaaatgtaaaggcttatgtgacaacaagagaacatggaaaatgccagctatgcggcaaggaatcaagtaaaggtaatggttttagattgcatcatataattccaaaacctaaaggaactgataaacctgataatttagctcttttacatgagaaatgtcatgaaagactacataaaaagaacttgcatcatcttttgacaaaaaataagcaatacaaagatgcaacaatgatgaatataatcaggaaagaagtagtccgaagaacacaggaattgtatccaacagcagtaacttatggatatgaaactaaagtaaaaagaaacgaactaaaccttgaaaaatctcatactaatgatgcttttgtaataggtaacggaacagttcaagaaagatgtaaagaagtaaggtggacacaaaaaagaagaaataatagagccttacagttaaacaggataggttttaagccttccataagaaaacaaaaatacaaggttcaaaataaggatttgatttatatagatggtcaaccattcgtttctaaaggatgtcagaatttaggaacaagagttgcttataatgattatcagggaaagaacagaactgtcagaatagaaaacatagataggttttataattacggaggtttttatgtatga

SEQ ID NO: 179 - DNA, 267 bp, unidentified
  misc_feature 1..267: note = Ga0315284_10000153 JGI
  source 1..267: mol_type = other DNA
gtcaactaccccttggctaaagaccaaggggcttgtacggtgacgtacaacgatgaaaagagttgattagggagcttaggaaactatgcagaagattaatataaggctaaagaattcaccagagaatacttctctagttctctgctctgagagttcttgtctaaacaaagaagaaattcttagtgataagagcatacagccagtattaatcaatcccgaagagaatcaagtccaacaagtaggacgctcaatacaagcacttgtact

SEQ ID NO: 180 - DNA, 573 bp, Moorena sp.
  source 1..573: mol_type = other DNA
atggctacgttccgcacaggacagaagacccaccaggccgtgcttcctcagcggcctgctctggaaccggagtcggtggacacgccccggatcgggcacgaaacgggactccgacaccaccccagggtggtatccggtgcggaccatgtgcgaggggagaccacccacatcccacctgatgtcggtggcgtcaccacccagcctctggctggggagaggccgcgtgagcggcacccatccgtcttcgtcctggacaagaaccaggtcccccttcagccctgtcacccggccaccgatacaccgctgaacctggcccacgtccatccccgctcccgtagcgggctggaacaacgaccgcccactcatgtcggttcgggtcgtcggaccaggtggaaccggacccgcgaccacctaccgaaaacccacaccctggacgccctggccgtgggcaaggtcgacaccaccacccacggcaccgtccaaggcatcggacacaagtacatgcgtctgctccaaagagcggacggctacggctacacctggaagggagagggcgtttcctcccggctctga

SEQ ID NO: 181 - DNA, 298 bp, Moorena sp.
  source 1..298: mol_type = other DNA
gtgaagggatcccggccctgttggaccgggctttcagtccttagggttgagagccgtctttaccagcaccagccatcgcctatgaggaggtgacctcgatggctacgttccgcacaggacagaagacccaccaggccgtgcttcctcagcggcctgctctggaaccggagtcggtggacacgccccggatcgggcacgaaacgggactccgacaccaccccagggtggtatccggtgcggaccatgtgcgaggggagaccacccacatcccacctgatgtcggtggcgtcaccaccca

SEQ ID NO: 182 - DNA, 1368 bp, unidentified
  misc_feature 1..1368: note = Wastewater metagenome
  source 1..1368: mol_type = other DNA
atgtcaaatagagttttggtgctagacactaaccgcgtaccacttatgccgtgccatccggcacgagcgcgggagttactaaacggtggtaaggctgcggtataccgcagatatccattcacgattatcctgaagaaccgtgaaggaggcgatgtacagcacatcgatatcaaaatagatccaggtacgaagtacaccggcatggcgctggtagcactcttcgatagaggaccacgctgtgtatacggtctgcacatcaaacaccgtggtgacgtggtccgacagtcgatgactcagcgagcagcgtctagacgcacacgtagatctcgtaaattacgttacaggcaacctagatttaataatcgtactcgtccaccagggtgggtaccaccctcgatcgaatcgcgggtgtctaacgtgacgacgtgggttagacgactattcggtgtaacacccgctgacaaggtctacttcgaagtggtcaaattcgacacgaacgccatggcgaacgtaacacgcgatcagtatgacacagacgctcgtatccgtactcagatgcgtcactatttactgacaactcgtggtaatgtatgttcgtactgtaagggagtctccgcagataaccggttagaacgcgaacatgtaatacctcgatctagaggtggtacagatgcactcgccaatgctgaactcgcgtgtagacggtgtaatctagacaaaggaacgatgttattgagcgagtggttgaatgcactaaaaggacgtatagatcctctctcgatggcacggttaaaacatatccctaaatgtattcgtcgtatcagacattcgttacgtgacgccagtatcatgaactggacacgctacatcatcgtggaacgcatacgtgatctagggatcgaggtcgtggagtgtccagcgtgggagaccgcgtaccatcgtcatgtcggacagtacgtgaagacccactgggtcgacgcagcgtgcatagggtacgtaccgtacctggatgatcagtctacgatctacaccgcagtcgcatcaggatatggtaatcgccagatgatcaaatccgacaagtatgggttccctaggggacgtcctaaaggaccctcctcaaataatgggtttcgtagtggagatatgtgtaaactaaaccaacccggtggtaaatataaagggacatatgtgggaaaagtaacgatacgcacaacgggttattttgatataaaggtcctaaactctaaaatcgcttctaaatatacaaactatgtaaagttacatcatcgggatggatatgtgtatactacaggtacaggtatcctgtctataacaatcaaaatgaatttgatcacagtatctatctag

SEQ ID NO: 183 - DNA, 258 bp, unidentified
  misc_feature 1..258: note = Wastewater metagenome
  source 1..258: mol_type = other DNA
gatgttaacgttcaaagttactagtgccctttattagcttataactaaatagtaaccagatctagctaccgtgaggtagctacgttacttaggaatacataggtaccgtgggatggccgtgccagtcccacgctctacgctgtgcagttaaacagacatgtgggtaacgtgtcggtgctgtacagatataaaaccctaggataacatgatcgaggcgcacgttactgtacgatctcgtgtcgtacaaggagataatgt

SEQ ID NO: 184 - DNA, 1290 bp, unidentified
  misc_feature 1..1290: note = Ga0371488_0019773 JGI
  source 1..1290: mol_type = other DNA
atgaacaacgtccccgaccgcgtcttcgtcctctacgacaacaaatcaccggctatgccatgcttccgcggccgcgcatggcacctgctcaaagccggacgcgccgcagtctaccggctcgtgccgtttaccatcatcctcaaagatcgcacctcgggcgacgcacagcctgtcgaacttcgcctcgacccgggctcgaaaacctccggaatcgccgtggtcgctaacgacaccgtcgtcttcgccgccaacctgcaacaccgcggccaggccgtcaaaaaggcgctcgagcagcggcgcgccctccgccgcggccggcgagcacgcaagactcgctaccgagcaccgcgcttcgataaccgcacccgcccggaaaactggctcccgccaagtctgctctcccgcgtcgacaacgtcgtctcgtgggcacgacgactcgcacacctcgcgccactgacctctatcgccgtcgaaaccgtccggttcgatacgcagcagatgcagaacccggaaatctccggcgtcgcgtaccagcaaggcaccctcgccggctacgaaatgcgcgaatacctcctcgaaaaatggaaccgcacctgcgcctactgcggagccaagaacgtcccgctgcaaatcgaacacatccaagcacgcgccaacggcggctccgaccgcgtcgcgaatctcacgctcgcctgcgagccctgcaacgtacgcaagggcacgcacgacgtcgccgtgttcctagcccggaagccgaacgtcctgaagaagttgctcgcacaagcgaaagcgccgctcaaagacgcagcggcggtgaacagcacgcgcaaagaaatcgggcgacgactcgtcgcactcggcttgccgacgagcttctgggccggcgggcgtaccaagatgaaccgcgtcgcacagggctatcacaaagaccactggatcgacgccgcctgcgtgggcgaaaacggcgctcacgtgcggatcgcaacgacgatcgcgcctcttggaatcaaggcactcggccgcggatcgcgactcctatgccgaccggacagatacggattcccgcgactcgccgccaagagcgtcaaacgcatagccggcttccaaacaggcgatctcgtccgactcgctcagccgagcggaaagtacgccggaacgcacatcggcaccgtcgccgtgcgcgcgcgaggcgacttcgacctcagaaccgccggcgcaatcatcaccagcgccggccgaaactttacgctcctccagcgaaccaacggatacgcctatgccgcagcctga

SEQ ID NO: 185 - DNA, 343 bp, unidentified
  misc_feature 1..343: note = Ga0371488_0019773 JGI
  source 1..343: mol_type = other DNA
tccaatacggtcccgtagctcagttgttgattcggcgcttcacggcttccgtgccgtgaagcaaagttgtcaggccacaacgcctagcaacgtcgacaaccagcctcagaaaggataatcatccgatctacgatcttcgagaatgatataggcaccgtcgaatgcttctccagttcgacgccctgcggtgcacgacgacacgagcatggaccgaaacaacaggctcacgtcgcgtacgaaaacctcgacgatcattggcgaggagaccgtcccccgcaaagggggtagcccggcgtaagccggatccgcgaaaagaacccaaatgaacaacgtccccgaccgc

SEQ ID NO: 186 - DNA, 1356 bp, unidentified
  misc_feature 1..1356: note = Ga0302192_10002069 | JGI
  source 1..1356: mol_type = other DNA
gtgctttgtcgagaggagcagacggttcaagccgtctcgttacccaaggagcaatccttggagactaatccggtaacggattcggaaaccaagggcaaggagaaccccaaagttttcgtgatcggtaaaagaaaatctcctctcatgccctgtcatccagccagagcaagagaacttctaaccaaggtcaagggaatcgcaatcctgcgattccccttcgttctacggttaaaaaaccgcaccgctggatccacacaaaccatagaaatcaaactcgacccaggcgctaaagcttctgggttagcactggtcaccaataaagcaataattctcctagtagagatcctgcacagagctcaggaaatcaagaaagccctccttcaaagaaagggttatcgccgtaggcgtagaacctccaaccttcggagcaggccagcacgctggctcaatcaacggagaaaagaaggctggttacctccatcccttcgctccatcatcaacaatctcattaactgggtaaaacgcttcgcacgatgggctcccttaacgggaatcaccattgaacgtatcaaatttgatatccagaaactggagaacccagaaatcagcggagctgaataccaaaagggcactctcctcggctgggaaatctgggaatacttactcgaaaaatttgatcataaatgtgtctattgcaacggagcaagtaacgaccccaagctgacaaaagatcacgtcattgctaccacaaatggcggtagcaatagagtcagcaacctcgtagttgcctgctacacctgcaaccaagaaaagggagacactcccattgaaagctatttggcaggaaatccccagctcctcggcgggatactcagtatcctcaaaaaacccttacaaggagcagccaaaatgaactccatcagaaattctctagttcgtgaaatgaaaactttcggactaccgcttactttaagctcaggagcagaaaccaaatacaatagggagaaacatagaatccctaaatcccacgctctggatgcagccttcaccggaacggtgcagaccgcaaagaactggagacaacctacttttaccatcacagctcaaggccgtggaaaacatcaacgcaccaaacctgacaggtttggattcccgcgtctcctccttccccgtaagaaaatcttttacggattcaaaacaggcaacatcgtccaaaccccattcggggtaggaagaatcgccgtccgatcaactggttactttgccttaaacggcaaagtaaccatcaaacacacacaatgctgcctgctccaaagagcagacggctacaactatacgctctcatctccggcctaa

SEQ ID NO: 187 - DNA, 284 bp, unidentified
  misc_feature 1..284: note = Ga0302192_10002069 | JGI
  source 1..284: mol_type = other DNA
gtcaaccacctctccctaaaggaagaggcttgaccagactaagccactgaaacgtgactacgcacactaacaaaaaacaccaagggatacctaagggacaacgcgaaagcgttgccacctggcctcagtcccttgctctgtcatcttaccccgaaaggggcaaggatgttcttgtgctttgtcgagaggagcagacggttcaagccgtctcgttacccaaggagcaatccttggagactaatccggtaacggattcggaaaccaagggcaaggagaaccccaaa

SEQ ID NO: 188 - DNA, 1236 bp, unidentified
  misc_feature 1..1236: note = Ga0376455_0025877 JGI
  source 1..1236: mol_type = other DNA
atgccttgcacacaaagaaaagcgagaatccttttaagggatggaaaagcaaaaatatataagtatcacccatttactattcagctgacctatgcaacaggagaaacaaaacaggagtgtagcataggggtagatactggtagtagacatatcggtttagctatcacatcagaaaataaagtattcttcaaaggtgaagtagaacttagacaagatgtaaagtctaatctggacacgagaagaatgtatcgtagagatagaagaaaccgtaaaacaagatatcgaaagcctagatttttaaacagaaaacaacaggagaattggttgcctcctagtttacaaaatagaatcaatcatacctatcattggatagatgtattacaaagtctaatacccactccagatttacatattgaggtggggaagtttgacacagcaaaaatgataaacccagatattaatggggtagactaccaacatggtaagacttatggattttacgatgaaagatattatgtatttgcgagggataactatacttgtcaggtatgtaagaaatcggttggtaaaatcttacaaacgcaccatattctttataaaagttgtggtggaacagatagggtagataatcttatcactgtatgtacagattgtcacacatcagcaaaccataaagaagggggcatcctctataaatggatgttacagcataaaaaagtaaatcaatataaagaaccaccttttatgaatatacttcgtagaagaatttttgagaggtattcaaatgcagtgattacttatggttcagagactacaccaaagcgtaaggctatggggttagaaaaaacgcattataatgatgctatcattataagtggaatcaggaatattatggagaacccagatgagtggttgttcatcaaacagtttcgtaagaagaaacgctctttgcatgaagccacagctcgtaaaggaagaaaagtaccgaatcgcaatcagaaacgtaattctaaaaatacacctttttataaagggttttatttgaatgataaagtacgtgtatttgggcgagaggggtatatcacaggttttacaggtggtggtgcttatgtaaaagatgaggatggtaaatatattacgataccaaataagacgtataaacaagtaagtatgagtaagctatcttttttatgccacaataataattggcagtatattagaaagatggctatgtaa

SEQ ID NO: 189 - DNA, 277 bp, unidentified
  misc_feature 1..277: note = Ga0376455_0025877 JGI
  source 1..277: mol_type = other DNA
gtcaacaacccaccacttgaagaagtgggggcttgcaaaaagccatgttgactagcctaagtttttttagaaactacgttgtagatgttatcataccctagaatgatttcctagttctaggctctatgtaggctctgtaaaagttctgttgggtaggaacggtcaacctagagtggtcgattacgacaagcatttataacattggcgaagggaaacaaactttctttatagaaaggtgtggaacttgagagtatccacaaaggtaaaaattatgaga

SEQ ID NO: 190 - DNA, 1167 bp, unidentified
  misc_feature 1..1167: note = GENOME_ACESSION: mgm4743569.3 MG-RAST
  misc_feature 4..39: note = MISC_FEATURE - Any "n" represents any nucleotide
  misc_feature 456..538: note = MISC_FEATURE - Any "n" represents any nucleotide
  misc_feature 791..882: note = MISC_FEATURE - Any "n" represents any nucleotide
  source 1..1167: mol_type = other DNA
atgnnnnnnnnnnnnnnnnnnnnnnnnnnnnnnnnnnnnaagaagcacgaattattatcagcagaagcagaactgcgcaccgacatttccaacaacatcacacagcgcaggacactgcgccattcacgcaggaacaggaagacgagataccgcaagccgagattccagaaccgtgtccacgcaaagaataaaggatggctcgcaccttccgtacaggcaaagtgcgacgcacatgtggataccgtgaaaaaggcgattgatatccttccggtatcagagatcacgattgagatggcacctttcgatacacagatgctgaaagccgagatggcaggccagccgcttccatccggtgaaaactaccagcacggagaatcagaaggttatgacaacatcaaggcttacgtgaaatggcgcgacggttatgaatgccgcatctgcggggccgagcatgtnnnnnnnnnnnnnnnnnnnnnnnnnnnnnnnnnnnnnnnnnnnnnnnnnnnnnnnnnnnnnnnnnnnnnnnnnnnnnnnnnnntgatcaccgtctgcccggactgccacaaagcgtatcatgaaggcaggctgcatgggaaaaacgcggaactgatggaacccggaccggaagtaaagccaatgcgtgatgccgtattcatggggatcatgcgctgggcggtatggaacaggctgaaacagttcggccttccgctacatatgaccttcggctatatcacagcgaaacagcgcgagaagtacgggcttgaaaagtcacatcgtaacgacgccagatnnnnnnnnnnnnnnnnnnnnnnnnnnnnnnnnnnnnnnnnnnnnnnnnnnnnnnnnnnnnnnnnnnnnnnnnnnnnnnnnnnnnnnnnnnnntacgtgaagaaagtacgctgccataacaggcaaatccacaagctgacgatccagcctggaggggagagaaaacggaatcagtgcgcatacgaggtaaaaggattccgcctgtttgacgaggtacgctttgccggacaggaatgttttatcttcggcagacggacgacaggatattttgacctgcggaaagcggatggcacaaaagtctatccctgtgccagctataagaaactggagctgattcacaaagcttcgtatgtattagtagaaaggaggtccgcctaa

SEQ ID NO: 191 - DNA, 329 bp, unidentified
  misc_feature 1..329: note = GENOME_ACESSION: mgm4743569.3 MG-RAST
  source 1..329: mol_type = other DNA
gtcaataacccgcggtcaaaaccgcaggcttgaaaaagcttattgactagcctaagcgcagcgacggcctcatgccagagagtctaaccgctagtgctccgttaattcagttatcacaccccggggtgttatacctggctccgcggctctgtgcaggctctgtaaacagtcctgagagggtaagggacagtcaacctggtccgtgcgcttggcgcacaagctgttttaacattggcgaaggtatccaactggccggaacattcagtacacaaggaacaatgcgaagggtaagtattaccggatttggttccggagaaaggcaactgatg

SEQ ID NO: 192 - DNA, 1359 bp, unidentified
  misc_feature 1..1359: note = Ga0265294_10008100 JGI
  source 1..1359: mol_type = other DNA
atgccgacaaatccggcaaatgccagaattttgctcaagcagggcaaggcaaaggtgattcaaagaacaccctttgcaattcacttgctttatgagaccaccgagcatattcagccgataaccgttgggcttgatgacggagggatcaatatcgggattgcagcggtttcaaacggcaaggttttatttcaacaggaagttgttttacgttcggacgtcaagtcaaaactggatacccggaggcaataccgtaaatccagaagaaaccgcaaaacaaggtatcgaaagtcaagatttctgaacagaaagtcatccattcccacatgcaaggtgtgtggcgggaatgccccggcatctcaggtgatctgtcgatcctgtctgaacagagcggatggggttcatcagaaatatgcgaagatcaaaaaaagtgttttccgaatcccaccatcaatcaaggcaaaaaaagatgcgattatccgggtggtcaagcagatcccactgcccatttcccgaattgtgctggaagatctctatttcgatttccaggcaatggagaatccggacatttccggtgagcagtatcagcatggagatctgctttatcacaagaatttcaaacagtcgtgcctggtgcgtgacaagttcagatgccgtgtttgcggtgcgcaaacaaaactgcaatgccatcatatccgtcaaagggcaaagggcgggacagacaagctctcaaatctgatgacgctttgtgatctctgccatgatcgacatcataaagaagggctcaaacttccgaaacaaaagagttccttctacatgtcggcagcacatgtccagcaggggaagcactatctgcaagctaagttgtcacgaatcgcgccattacggacgacattcgggtatatcaccagtcattttcggaacaatgccgggatagaaaaatcccatgtcaatgatgctgttatcattgcagataaacaggcaactcctctggaccggcagatacagacaaaacatgtgcagtcacggaaaagaagtttgcatgaagcaattgcaagaaaaggaaggaaaaccccgaaccgaacccagaaacggaataacaaaaacgtatttaccctgagaggttttaaccggtgggatacagtgcagtacaagggacgtgtcggttttatctccggttttacaggcagttcatcctgccggatcatcgatattcatggggaatatatcaaaaatccggaaaaaaaatatacgcaggtcaacctgcgggaagtgagaaaaatacatgggaacagatcaaccgtcagttactgcgccaattcctcccccaccttcgctgtcgctcaggaaggggactccttg

SEQ ID NO: 193 - DNA, 263 bp, unidentified
  misc_feature 1..263: note = Ga0265294_10008100 JGI
  source 1..263: mol_type = other DNA
gtcaactacccctcctgaatcaaagattcagaaggggcttgtaaaagcccaagttgactagcctcagtctctttattagggactacgttcggcaggatgtagatacctttggatgtaatcgccagtccgaagctctgtcgtggctctgtaaaagctctgtgaggaaggagcggtcaaccacgttgtgaagcctgctgaacattggcgaggcgaaccttacccctctttggagggtgtgcataactgaaaggttttttttgaaa

SEQ ID NO: 194 - DNA, 1020 bp, unidentified
  misc_feature 1..1020: note = Ga0104756_1007894 JGI
  source 1..1020: mol_type = other DNA
atggttccagtagtcaataaaaatgggcagcctttgatgccaacgactccggcgagagccaagagatggttggcatccaaaaaggctacctatttttggaagaaaggagttttctgtgttcggttgaacgatgatccatcgagtacttttacccaacagatcgcttgtggcgtcgatcccggctcgaaatgggaagggatgaccttgaaatccagggctcatactattctcaatacacagaacgacgctactacttgggtcaaagatgccgtcgaaattagaagaaatatgcgtcgaagccgacgttttcgaaagactccttgtcgaaagaataggagtaatcgcagtagcctaagtaagaagggaagactaccgccttctacccgagccagatgggaaactaagttacgtttaatccatagctggcgaaaggtcttcccgataagtgactatgtagtcgaagatatcgctgcggctacccaaccaagaaaacgacgttggaattcatcttttagcccgttagaagttggaaagaactggttctatgatgaacttcggaaactcggtaatttagttaccaaagctggctgggaaactaagaatctgcgggatgctttgggattagtaaaatctaagaataatccagatgcgtttgaagctcactgtgtcgattcttgggttttagctaattctgttgtcggaggacaccaagctcccgagaataaaaaaatcttattcctcagccctcttcgattccatcgtcggcaattacatcgcttccagccgactaaggaagtcggtcgattagcctacggtggaacgatgagcttaggattgaaaaaaggcagtttagtagaacatcctacttacggtcgatgctacattggtggtaataccaaaggacgtttaagtctgcattctctggaaaccggtggacgcttaacccagacagctaaggttgaagagtgtcaattccttagctataatagctggcgttggcgggtttcctcctccccctaa

SEQ ID NO: 195 - DNA, 296 bp, unidentified
  misc_feature 1..296: note = Ga0104756_1007894 jgi
  source 1..296: mol_type = other DNA
gtcaactacccccacctaaaggtgggggcttgtgaccaacgcagaacgttgccactttgcaaaggtcacgaggtattctctggtaacagagggtatcaggagactagcctggccaagatcaaaggtcgaaagatcgatggtcgtttgaaggcaattgaaccatctaaccgtggcaggttggaatatgctggcgatgcttcccaagttgctagcctctatgatggtcaatggcgaagggaaaaattaacctcagtttcattgaaagctgaggacttacccgcaagggtgcgttgaag

SEQ ID NO: 196 - DNA, 393 bp, unidentified
  misc_feature 1..393: note = Ga0394872_0157437 JGI
  source 1..393: mol_type = other DNA
atgtccaaaatctttgtaattgatacaaacaaacaaccattaaaccccatccacccagcacaagcgaggcaactattaagaaacaaaaaagcagccgtctttagacgttttccttttactttgattcttaaagaatcaaccccagattcatctatatctcctctgagattgaaaattgaccctggtgcaaagttcactggaatcgccttagtcaacgattctactggcgaggttgtcttttctgggaaaaaagttgggacatatattgggcgtgtagctgtaagatcttcaggaagctttaatgtttcaactaagaatggactggttcagggaatcagtcacaaatattgtactcatattcaccaaaaggatggttattcctatgtgtattag

SEQ ID NO: 197 - DNA, 244 bp, unidentified
  misc_feature 1..244: note = Ga0394872_0157437 JGI
  source 1..244: mol_type = other DNA
atcaacaacccaccgataaatcgggggcttgaaagagcctaagttgaccagactaagacctcaaaggtctacgtttaaggtaagagttaaagacctaccagggaatgcgtagctagttccttgctctagaaccaaaagattaaacaggcttaaagggttaaaccagtgtcttttggatagttaccgaccttaaacattgtcgaagctaacattacccaagcaattggagggacttatgtccaaa

SEQ ID NO: 198 - DNA, 1302 bp, unidentified
  misc_feature 1..1302: note = Ga0376456_0000023 JGI
  source 1..1302: mol_type = other DNA
atgcgagtatttgtagtaagccaaagaaataaacctctgatgccatgtacacagagaaaggcaaggttattattaaaggaaggcaaagccaagatatataaatacaatccatttaccatcaaattaaaatatgcaaccggtgaatcactgcagccttgtcatattggaattgataccgggtttaaacatattggacttgcagtaaccagtaatgataaagttcttttcaaagggaaagtcgaattaagagaatatggagaacctcagaaagatgcaaacggtcataatgcttttatgacatgtgttggaaaaagaaaaatgatgaggcgaagtagacgtaatagaaaaacacgttacagggcacctcgttttcgtaatagaaaaaagccggatggttggctgccaccgacaacgcaggcaaagcttaattctaatttcaaatggatagatttattagctgagcttgtacctaatcctattcttcacatagaaatagctaagtttgatgtacagaagatgatggatccagatattgaaggtgtcggttatcagaacggacagactaaaggcttttgggatgtacgatattttgtgtttgcaagagataattatacatgccaggtttgtgaaggaaagtctaaggacagtattttaaggactcaccatatcgtgtataaaagcatgggtggaacggacagagctgataacttaattactatttgtaactcttgtcataccggtaagaattataagccaggtggaatcctttacgattggtgtcaaaatgaattcaaaataaatacatataaggaaccaccttttatgaatataatcagcagcagaataagaaacagatatccggctgcttatatgacttatggatcagtaaccaggtctaaacgtacagagttaaaacttgaaaaaacgcattacaatgatgctatagcaataagtggtattgaagatattaaagaaaatcctaatgatctgttttatgtaaagcagattagaaagaaaagccgacagttgcattatatgcagccatataaaggacataatccaaatcagacaagacgtagtgctaatatactaaatgtaaaaggtatatataaaggtgataaagttcaatatagaaataaatatggatatgtaaccggatttacgcactcaagtgcatatgtaaatgataaaaatggaaggctgcctattccggaaaataaaactcaaggtgtaatatcaataagtaagcttaaattagtatgtcataacgcaaactggatgtacttcacaaccactgtataa

SEQ ID NO: 199 - DNA, 342 bp, unidentified
  misc_feature 1..342: note = Ga0376456_0000023 JGI
  source 1..342: mol_type = other DNA
acctcaaatgtgaacacctacaaaaatgtgtgtacctcattctagcctaagtcttaactgactacgttaattatgttatcacacctacggatggttccctagtccgtagcatctgtgcaggctctgtaaaagcttcacgagtcttagattggaagcagtcaacctggagtgtccgatatcggcaagcatttttaacattggcgaagggaaaatgccttatggcatgacaactaactacagatgattctgtagttaggtatggcacttgagagtagccataaaacattaaagggtatgttacagtacccttttactttttagaaaggagcttttaggatgcga

SEQ ID NO: 200 - DNA, 1338 bp, unidentified
  misc_feature 1..1338: note = Ga0370511_0001040 JGI
  source 1..1338: mol_type = other DNA
atgcaaagagtattagtacttagtaataacaggaatcaacttatgccgtgctcttcagcgagagcgcggatgctgttgcggaacaagaaggccgcggtcttacggaagtatcccttcacgatcatcctcaaggaccgagaggaaggcgctatacagtctatcgagttcaaagcagatcccggcagcaaagtcacaggcatcgctctcgttgccgatttcgcaacgagaggtaagacagtagtctttgccactgagcttcatcacagagggcatgcgatcaaagagtctctggattccagatgtgcggtccgcagaagccgcagaaacaggaagacaaggtatcgtgctccacggtttgataaccgaacaagaccctccggatggctgccgccatctctaatgtcccgagcctacaacgttcagaccttagcactgagacttcagcggttttctcccctttcttctattgcggtcgagaccgtccgtttcgacatgcagaagatgaccaaccccgagatatccggcatcgagtatcagcagggcacactccaaggctacgaagtcagagagtatctgcttgagacgtggaacagacaatgtgcttactgtggcaagagggatattcctttgcagattgagcacattgttccgcgcagccgaggtggaactgaccgggtgtcaaacctcacattatcgtgtgagacatgcaacacgaagaagggaacgaagactgccgccgagttcgggttccccgatatccagaagcaggcattgcgaccgcttaaggatgctgcagcagtcaacgcgactcgttatgccattggggatacgctcaagactcttggactgccagtatcgttctggtccggtggacggacaaagttcaatcgcacccagcaaggctatccgaagtctcattggatcgacgcggcctgcgtcggagaatctggctccaatgtccatctcgatcctaatatgttactgcttacagttaaagcttgcggtcatggatccaggcaaatgtgccgaatggacaagttcgggttccctcgtacttcagccaaagcgtctcgtgtcgtccaaggtttccgaaccggagatattgtaaagacgattattccgtctggcaagaaagtgggcaaccatttcggtaaagtcgctattcgcacttcggggagctttaatatttcaactagcgccggcgttgttcagggcatcagtcacaaatactgctcagtagtgcatgctgctgacggatattcgtatccccggccaataaagggaggctctcctctcagcaataaattaccgcgtatccgcgcccaggaggtgttatga

SEQ ID NO: 201 - DNA, 267 bp, unidentified
  misc_feature 1..267: note = Ga0370511_0001040 JGI
  source 1..267: mol_type = other DNA
gtcaacgactcgggattaagatcccgagcatgcgaagtcatgcatgctcaagttggccaggctcagtcctaatgtttaggactacgttaccggcgaatacataggcaccttgggatgcacgccagtcccaggctctgcggcagacagttaaacaggtctaagagttaagccagtattgtttgcatataaaaccgtcggataacattgccgaggcacacattacccgcgcaagcggagaacgatggagtaatcgtcaatatgcaaaga

SEQ ID NO: 202 - DNA, 1296 bp, unidentified
  misc_feature 1..1296: note = JGI25616J43925_10003507 JGI
  source 1..1296: mol_type = other DNA
atgtcgcgtgtgttcgtcgtggacgcgaagctgcgaccacttcagccttgcacgcctgctcgtgcgcgtctgctgctcaagcagcagaaggcagcggtcctgcgtcatactccctttatgctgatcttacaggaaacgcgaactgaggcagtcattgagccgttgcgtctcaaaatcgatccgggctccaaggtgacgggactggcactggtggacgatcagcgcggcgaactggtctgggcagcagaactgacccaccgcagcgagcagattcgggagcgactgcgcaaacgcagggccgtacgccgtgcccgacgcatgcggcacacccgctatcgacctgctcgctgggccaatcgacgacgaccgcgaggttggctggctccgtcgttgctcagccgtgtgcttcaggtgatgacctgggtccagcgactgaaacgctggtgtcccattggggcgatcagccaggaactggttcactttgatccacaggcattgcaagatccagaaatccacggtagtgcctatcagcgcggaccctttttcgggatggaggtccgtgaatatatcctggcaaaatggcagtatcggtgtgcatattgccagcgcgaacaggttccctttgaactggatcatatgctcccgaaaagtcgtgggggcagtgagcgtgtgagtaatctcgtgctcagttgccatgactgtaaccagaccaaagcagaccgaacagccgaagaatttggacatccagaggtcgcagcacaggcgcaaacgcctctcacggatgtggcagcggtcaatagtacgcggtggcgactctatcaggacctgtgtgccaccgggttgccagtcgaaacaggcagcggtggacggaccaaatggaacagacaacggcaaggactgccaaaaacccattggctggatgcagcggcggtgggagcctcgacgccagtacgattgcgggtaggccatctacgcagtctatcgatccgggcaaccgggtggcaacgaaggcagatgtgcctcatgactgaggcgggttttccacgaacccgtgcgaaacagcagagttgtgtcaagggcttcagaacgggagatacggtgcgagccgtggtcccgaaagggaagagagccggagtccatgtgggacgagtcgcagtgcgtgcgtcaggatatttcaatataaggacgcagagcggaaccgtcgaggggattcacgcgaagtattgccgcctgctccatcgcagagatggatacgagtatgggaaaggagatgcggcgtttcctcctgccccgtaa

SEQ ID NO: 203 - DNA, 300 bp, unidentified
  misc_feature 1..300: note = JGI25616J43925_10003507
  source 1..300: mol_type = other DNA
gtcaggcacccaagccccctaaaagggggcgggcttgtacccctgcctgaccagtcccctgggtgcttgcattcaggagccgttcacacggagcgctcaaagacgcacctgtggctgaccgatccaggccacagccctgctagttggcggttaaacatgcctggtggacaaagcacgtgccgcaaacacatgccgcgtgtgaacacggacgaggatcactttacctgtctgggcgaccgggcagcgatccctcattagcgagggccccttccggggaaaggaggcttacgtatgtcgcgt

SEQ ID NO: 204 - DNA, 1314 bp, unidentified
  misc_feature 1..1314: note = Ga0315295_10008866 JGI
  source 1..1314: mol_type = other DNA
ttgagagcgtttgttttagatatgcacaaaaaccccttgatgccttgtcatcaagcgagagcgcgaaaacttctcaagagtaaaaaagctaaagttttcagaatgtttccattcactatcattttgcaacaagaaacgactaatcaagttcaaaaagtagaaatcaaaatcgatccaggctcaaaaaccacaggagtcgctttagtttctaatcaaaaagtaatttgggcttgcaacctttcacatcgaggctcgctcatcaaaaaagcattactacaacgcagacaagtcagacgcagcagacgatttagaaagaccagatatagacaagcacgtttcctcaatcgcaaaagaatttccgaatggcttccaccatctttgatgtcgagagttgacaacgtttcgacctgggttcaaaaactaaattcactcgtcagattgacatcagcttgtatcgagacagttagatttgatacgcaaaagatgcagaaccctgaaatttcaggtatcgaatatcagcaaggtgagcttgttggatacgaagttagagaatacttgttagaaaagttcaatcgaaagtgtgtatactgtggcgcagagaacattcctttagaaatcgagcatcttcatcctcgaagcttgggcggttctgataaaattagtaatttagctttagcttgtcacaaatgtaatcaaaaaaagagcaatacacctttagaattgtttgttaaagacaagactaatctggcgaaaatcaaagctactgcaaaagctccactcgctgataccgctgccgtaaatgcaacaagatatgcaatcggcagagctgtaaaagaaatcattcttgatacctcgttttggtcaggtggtagaacgaaatgtaatcgaacaaaacaaaactaccaaaaagatcattggattgatgccgcgtgtgttggaacgactggtgaaaatatctggctcgatccaaacgataacattttgttagttcaagctgctggacggggcaaccgtcaaaaatgtttagtaaataagttcggattcccttgctcaaaaccgcgaacaatcaaacgagtttttgatttttctagtggtgatatctgccgtctcgataaatcgaagggcaaagatgccgggcggtatgtaggaaaaatttcggttcgtgtccgtggtgattttgacattcaagtgccaaaagaaaaaaacaagactgggaaagttggagcgaattggcaattcttcaagttagtgcagcgggctgatgggttcgcctatcaaatggcgggtacaaccgccagggctgcaacaacttag

SEQ ID NO: 205 - DNA, 279 bp, unidentified
  misc_feature 1..279: note = Ga0315295_10008866 JGI
  source 1..279: mol_type = other DNA
acgaacttcctttgacttccctgtcaaagagtttcgcccgttgtgaccccagggacagccagactcaggcgaaagcctacgttagaggcgaatgtataggcacttcgaggtgcttctccagtctcgaaccctgcggctagtgattaaacagcaaaactccgggtgatgcagtgttgctagagagaaaccgcctcataacattgtcgaggagacctttaccagcgaaagctgagttcgctagcgtaagctagcacaaaagcgaggtgacaagctttgaga

SEQ ID NO: 206 - DNA, 693 bp, unidentified
  misc_feature 1..693: note = Ga0256845_1000645 JGI
  source 1..693: mol_type = other DNA
atggtttttgtattaagcaaaaacagaacacctttagcccccacccgtgaggctaaagctagaattttattaaaagagggaaaggctgttgttcataaagtctatccttttactatacgactaaaggagaacagagagtgcattaaaagatatataattaaatttgatgttggagcatcagtcacaagtgtagctattgtagatgctctgaaatgttttttcttcgctgaaatagtgcatcgaggaaaagtcattaaaaaagcaatggattcaagaagagcaattagaacttatactctaaaagagttaaatctacccaaacaacactattatgacgctatgtgtattggagataagtataaatataaaatagtaacaaataaggttttagaggtaaaggcacaaggaagaggagatagacaaatgtgtcgaatggatagatttggatttcctagaacaaaagctaaaggctctaaagtagtaaaaggtttccaaacaggtgatattgtaaaagcagtagttaccaaaggaaaaaagataggaacttatcttggaaaagtggctgttagagttagtggtaattttaatattactacaactttagggactatacaaggtattaattttaaatattgtaaaactatacaaaaaggagacggctatgcttatgcagtggcaacaatcaaacaataa

SEQ ID NO: 207 - DNA, 273 bp, unidentified
  misc_feature 1..273: note = Ga0256845_1000645 JGI
  source 1..273: mol_type = other DNA
gtcaataacctaccacaatccttgacggatatggaggaggcttgattgaccagattgagttgctagagatagctaactacgatatttttgttatcacaccttggggtgcttctccagctccaagctctgtgtaggctctttaagttgggttaaagccctgtgaacctaaggacgatttgccattgcaaacaagcatctatatcactatcgaggagagagtcgcaagaccgtcaccaccataaggtgcgttaatttgaaaaaggattgtaaatg

SEQ ID NO: 208 - DNA, 2412 bp, unidentified
  misc_feature 1..2412: note = Human gut metagenome
  source 1..2412: mol_type = other DNA
ctgggcgaaggattacaaccgggcgcaagcccgaggagacaaaacttgagagtatttgttttgaacaaacgagggcaaccgctcatgccgtgttcaccggcgaaggcgcggttgcttctgaaggagaaaaaagcggtggtcaagcgccgtacacctttcacgattcaactcacgcaggccacgggcgaaacccgtcagccggtgacgttgggcgtggatgctggggcgaaattcatcggcctttcggcttcaacggacaaggccgagcactatgcttcggaggtcgaactgcgtaaggacgtggtggacttattgtcagcgcgtcgggagctgcgttgtgctcgccgccaccgcaagacgcgctaccgcgctccccgattcgataaccgtgtccattccaagaacaaaggctggttcgccccgagcgttgagaacaaaatcaacgcccacctgtctcgtgtagcggctgtctggaagattcttccggtgacgaagatcgtcgtggaaacggcggccttcgacatccagaagatcaagaacccgggcattgaatgcacggagtaccaacagggcgaccagctcggcttctggaacgtccgagaatacgtcctcttccgcgacggccataaatgctgccactgccacggcaaatccaaagatccgattctcaacgtccaccacctcgaaagccgtaaaacgggtggaaacgcgccgaacaacttgatcacgctttgcgagacgtgccataaggcgtaccacgcaggaaagatcgttctcaagcagaagcgtggacagtccttccgagacgccgccttcatgggaattatgcggtggacgttcttcaatcgcctgaaggcacagtgtccggaactcgaagtccggaacacctacggctacctgacgaagaacacgcgcattcggcacggattggaaaagtcccatcatacggacgccttctgcattgccggcaacttcgaagcaaagcgattgggtgagtacttcttccagaagcagacccgcaagcacaatcggcagattcacaagatgtcccttcttaagggcggcgtccggaaacggcagcaggctccctacgaggtgaaggggtttcggttgttcgacaaggtgcgtttcaacggtcaagaggctttcgttttcggtcgccgcagttctggttcgtttgatgtccggacactggcgggacagaaactctctgccgaggttaactgtaaaaaacttcggctgttggaaaagcgacggactttcttaacgcaacttttaaaggagaacgcgattcctatgaaagaacttcgatttgacgtcaccggcatgagttgcgccgcgtgttcggcccgcgtggaaaaagcggcccgcagcacggacggtgtgacggacgccgcggtgaatcttttgaaaaatacgttggtctgccgtttggcggattcggcggatgcggcaagcgtgacggcggcggtgtccgaagccgttgaaaaagcgggctacggggctcgtccggcgggaaagaccgaggacgcccaaaaagcaacggtcgcaaaaaatgaggcgcagaaagcggcggacgccgaggccgcggcgttaaaaaagcggctttgtctttccgtcgtgttctgtctgattctcttcgggctcgcgatggggccgatgatcggggtgacggtgccgggacttgatcccatgaagaaccccgcggggatggggctcgcgcaattcattctcgcgctccccgtggcgtttttaaaccgcaaattttttgtgaacggcgcaaagggcctcttaaaccgctcacccaacatggatacgttggtggcgatcggttccggggcgtcgctttgcttcgggatctttgcgcttttccggatgattgcggaagtgacggcggggaatcttgcggcggcgcagcactacgcgatgaatctttattttgattcgtcggcgatgattctcaccttgatcaccgtggggaaattttttgaggcccgcgcaaagggcaagaccacgcaggccatttcaagcctcatgaaattggtgcccgaccgagccgtgcgcttgacttcggacggtcgcgaagaaattgtggtggcaaccgacctgcgggttggcgacaaactcgtcctcaaaaccggggagcgcattgccgtcgacggcgtgattctcgaaggcgcgggaacggcggacgaatcggcgatgacgggggaaagcctgccggtcacgaaaaaggtcggtgaccgggtgtcgggcgcgacgctcgtgacgtccgggcgctttgtgatgcgggcggataaagtcggcgaagacacggccttgtcgcagatcatccgtttggtggatgaagcgacgtcgggaaaagcccctgtgtcgaggttagcggacaaagtgagtgccgtcttcgtgccg

SEQ ID NO: 209 - DNA, 246 bp, unidentified
  misc_feature 1..246: note = Human gut metagenome
  source 1..246: mol_type = other DNA
gtcaaccacccctgcctgaaggcagaggcttgtgaaagcaagccttgattgactagccccagtgaggaaacgaactacgttggttgggaatgtataggcaccgcgggatgtcaatcctagttccgcgctctgcggcccgtgattaaaagcactgagaggtaggtgcggtgttgcgggtaagaaaccccttccaacctgggcgaaggattacaaccgggcgcaagcccgaggagacaaaacttgaga

SEQ ID NO: 210 - DNA, 915 bp, unidentified
  misc_feature 1..915: note = Chloroflexi bacterium
  source 1..915: mol_type = other DNA
atgtcacatgtctttgtcatcgataccgacaaacagccgctttctcccgtgcatctggggcgagcacgcctgctactcaaagagggaaaggctactgtttacacgcttttcggttttgaggtgcgtgaatatgtattcgcaaagtggaaccgcatgtgtgcctactgtggagccagggacctgcccttagagctggagcatatcgtgccacgcgcacgcggtggcacggatcgcatcagtaatttgtgcctagcctgcgagtcctgcaatagacgcaagggaacgcaggatattagcgacttcttggccgatcagcccgcacggctctgccgtgtactagctcagacgaaagcgcctctcaaaaatgccacagcggtcaacgcaacccgttgggaactatcgcggcgcttgcaggccactgggctacccctggaaacgggttcaggtggacagaccaattataaccgcagtgtgcgtggcttgccaaaagcccactggacagatgcggcctgcgtgggagcatcaacccctacgcctctttccactgagggggtaatcccattgctcatcacggccactggtcacagtagacgaaaaatgtgcaataccaacgatttaggcttcccgaccagtcatcgcaagaggtgcaagcgctactttagctaccagactgccgatctggtgcgagcggtggtgccagatcgactcaagtgcgcggggacgcatgtaggcagggtgacagttaaagctgcgagaacctttaccatccaaacccggcatggcaaaatcactgatgtcccacaccgcttttgtcagcccgtccatcgctgcgatggatattcttattctcaagtggtgagggttgccccacccccaaccaacccgaaaggagcgcctgtttcctcctccgcctag

SEQ ID NO: 211 - DNA, 307 bp, unidentified
  misc_feature 1..307: note = Chloroflexi bacterium
  source 1..307: mol_type = other DNA
gtcaagtccccccactgtgacgtgtcacagtggaggcttggaagcaagactttcaagcccgaaacttgagcagacagaggtttgaaagacaaccaacgttatcagcaagtgtaaaagaacctacctacagctgcttcaccagcttgtaaacctagaaccgttcagttaaaccggcgtagagggagaaaccagtgctgagcggaaagtagcgactgataaccgtgtcgaggtgagtatcacctgggaaaccagaggccccacggggcacaaaacaaaaagaaggaacgcaacgaccgtcatgtcacat

SEQ ID NO: 212 - DNA, 1041 bp, unidentified
  misc_feature 1..1041: note = Ga0376455_0000343 JGI
  source 1..1041: mol_type = other DNA
atggtcattacattagacaaacacaaaaagcctgttggattttgtacggaacgccgtgctagaatcctgatgggtaagcggagagcgtgtttgtatcgtcgatttcctgctatcatcatcctcaaagacgttgatgtgcgggacttagagaatctgcacagctaccgcatcaaaattgaccccggctctaagtacaccggcattgcgattgtagacaacacagacaatagtgttgtgtttaccatgcagattgagcatcgtgctactacaatcgtaaagtcattaaaaacacgcaatgccgtacgtagaaaccgcagaaatcgggaaacccgttatcgccgttgcaagtggattaaccactacacgaaaaagggtagccgctacaaagcagattcgccccgccctgatggttggttgcctccgtctgtcaagtccattggtgacaatatcatcaactgggtcaagcggttgtgcaaatggattaacattacagagtgcagtttcgaggcagtgcgtttcgacactcagttgatggacaaccccgatattgagggtgtggaatatcagcacggaactctgtacggttacgaaatccgtgagtatctgctggacaagtacaagcatacttgccagtattgcaacggcgaatccaaagatgatgttctggaatgggagcataaacttcccaaatccagaggcggcagtgattcggtcaagaacgctacccttgcctgtcacaagtgcaaccaggacaaggggagtatgacccccgctgagtggttggaagttgtcaagaaacagcgttcttccaaactgcgtgatgctcgtattcagggaatccagcgtgtcattgataacaaaacaactggtagcaatcggtattgtgcgtgggtgtctgcaactcgtagatacatcgagcgatttctgtttgatgcgtttggcgatgtcgaatgttccagcggcggtagaaccaaatacaaccgcacgaagctgggacttcccaaagaccatcactacgatgctctgtgtgtcggtacagtg

SEQ ID NO: 213 - DNA, 308 bp, unidentified
  misc_feature 1..308: note = SL_8KL_010_SEDDRAFT_10003558 JGI
  source 1..308: mol_type = other DNA
gtcaacaactcggctattgaataaccgagcatgaggacggggaatatccctttaaaactcatgtgaggttgtttgatagatttgttgagcagactaaggtctctcgaatgagagaactacgttatttgagtggcggactaggtgtgcttctccagcaccagtatccgaggctggcagtctaaacaggcaatccgagatgaaatagccagtgctgtcagcgtgaaacctcagataacattgtcgaggggacgtggctttttgccacacaataagcccgtaattgggatttaattaaggagcaacttatg

SEQ ID NO: 214 - DNA, 1359 bp, unidentified
  misc_feature 1..1359: note = Leptolyngbyaceae cyanobacterium CCMR0082
  source 1..1359: mol_type = other DNA
atgtctaactatgtttttgtaattgaccaagacaaacaacccctcaaccctgtgcccccaggtctgggccgaaagatgcagaccgaccagaaagcggcaacattcaaaaagtatccgtacacgctgatacttaatcattctgttgtcgcgccaaggctaaaggggctaaccctcaagctcgatcctggttccaagtttttggggctctctatcttggatggcaacaaagtgatttgggccgccgaactagaacatcggggatggggcatccatgaaggacttgagaaacgttccggctatcgtcggaatagacgctcacgtaagactggctaccgaaagaaccggggacagtttgagtttaagcctgatggatggctccccccatcactgcttcaccgggttcaaaccacaatgacttgggtgaatcgactgcgcaagcttgcccccattgagtttgtcaagatggagctagtcaagtttgacactcagttgatggacaatgccgacattgaaggcacccagtaccagcaagggacattagccggatataccgccagggaatacctacttgaaaaatgggggcggcagtgcgcttattgcagcaagtcaggcgttcctctgcaggttgagcatgttcaccccaagtcgaaagggggatctaactcaatccgtaacttgtgccttgcctgtgagaaatgcaacacccgcaagggtagtaagtctgttgaggagttcttaaagaacaaacctgaggctcttaaaaggattcaggccacactcaagccccctctgaaggatgccgccgctgttaatgcgacccgttgggcgctttaccatgccctgcaagacacagggcttccagtgagcaccgcaacgggagcgcggaccaaaatgaaccgggctaaacaggggctacctaaggagcattggatcgatgcggcgtgtgttggtgatgggggagaaaacctcgatatcaagaccgctcaaccgctgagaattcaagcaaaggggcacggtagccgccaaatgtgtaaggtgtacggcaccaaaaagaacggtgaaccgatccgaggactgccctacccaactgctcccggcatgcctaagcgcagaaaggacggcacccgagaggcccccaagtttcgcctgcatggttctgttgagtcaggcgacattattgatgtccaaatccctaacggcaagtacaagggcatttacaagggagtcagagtggctgtcaggggtgacggtcggatagccataagacccaagggctttagctctaagttcgatctgaccaccgcatctatctacaaagttgttcaaaggaaagatggctatgcttactcggttcaatga

SEQ ID NO: 215 - DNA, 292 bp, unidentified
  misc_feature 1..292: note = Leptolyngbyaceae cyanobacterium CCMR0082
  source 1..292: mol_type = other DNA
tctgactgctcgaccctatcgggcgagatgagaaagccgttagcttaccagctcaccgggttattggttttcccggtaaaggataggacacccgcaagggttgaaaaacgccaacaccttctctaatgcgagacgctaaccagtcgagagccagttgtgtagagggttgcccaaagctaagcgaggtcacggggttgactacagtgcgagggcagagcgaatgctcaaaagctgcttatccgagcgaggctcacattacccgatttatcggaggactcttatgtctaactat

SEQ ID NO: 216 - DNA, 447 bp, Moorena sp.
  source 1..447: mol_type = other DNA
cgctcaagaaaaactagatatcgtcaaccacgcttttctaatcgtagccgtaggcaaggttggctagctccttctctacttcaccgctttcttagtatagaaacttgggtcaaaagactttgcaaatattcacccatcacagaaatagtgatggaattagtgaagttcgatacccaaaaaatgcaagcagaaacgatagaaggtgtacagtatcagcaaggaactctctggggttatcaagttcgtgagtatctgttagaaaaatggggacgttgctgtgcttactgtaattcttctggtgttccacttcaaattgatcacatcaaaccaaaaagtaagggaggcagcgatagaatttcaaacctaacgttggcgtgtgaacgttgcaatctcgccaagggaaataaaccagttgaagactttctaaaaaaagattctgcgcgacta

SEQ ID NO: 217 - DNA, 325 bp, Moorena sp.
  source 1..325: mol_type = other DNA
cgtttgaccggcaatccccaccatgctcgcaatctgggattggtactgggacgcttggcacagggtgcaacaattttgttgggtctatttgtttctctgtccattgtgattcccacatttcgggcgggcgatttagtgcaactgctaggaattagcggtgtggcgattggctttgctttccgcgacattttgcaaaactttttagccggcattttaatcctgttgacagaaccattccaaattgatgaccagatagtctttaaaaactttgagggaactgtagaaagtattcagacacgagctacaacaatcagaacctacgatg

SEQ ID NO: 218 - DNA, 762 bp, unidentified
  misc_feature 1..762: note = Ga0310150_005743 JGI
  source 1..762: mol_type = other DNA
atggtgtacgttatttcaaaagatggtaaaccacttatgccaacaaaaagacatggtaaagttagaagacttttaaaacaaggtcttgctaaagttgttagaagagaaccatttacaattcaactattgtatgatactacaacctatacacaacctgttactgtcggaatagacattggttcaaaagtagttggtatttcagcagtaacaaacaaacaagaattgtgcagtgctgaagttgaacttagacaagatatcagaaagttgctactgaagagaagagaacacagaaggtttagaagatatcgcaagagaagatatagaaaaccaagatttttgaacaggcgtcgatacaaaggatggcttgcaccaagtgttcaatggagggttgatgcacacatcagactggttaatttaatagccaagatactaccagttactaaagttgttgttgaaatagcaccatttgatacacacaaaatagttaatccagaagttagtggcaaagaataccaagaaggaccacaaaaaagttttagtgatgtaagagaatactgcttgtggagagcaggttataaatcagaactgtcgggtaaaaaaggcatacttgaagtccatcatattattccaagaagtaaaggtggtactgataatccctctaatttaatagtgttaaccgttgaggaacacaaagcaatacatgaggggaaaattaagattccacgtagtaaacttaaaaaagttaaaattctcaaagatgca

SEQ ID NO: 219 - DNA, 266 bp, unidentified
  misc_feature 1..266: note = Ga0310150_005743 JGI
  source 1..266: mol_type = other DNA
gtcaactacccaccacttaaagcctaacggcttttgaagtgggggcttgccaagccctagttgactaccctcagccaggggaagttaatcttcctatcggactacgttagactggtcatgacaccctgggatgctgctcaagttccaggctctgtcgtatgtacctaaacagtcctgaggggtagggacagtggtacatacctaacaagccagtctaacattggggatgagcacctaactccttcaaaggaggcttaccacatatg

SEQ ID NO: 220 - DNA, 2244 bp, Leptospirillum rubarum
  misc_feature 966..1015: note = MISC_FEATURE - Any "n" represents any nucleotide
  source 1..2244: mol_type = other DNA
atggcccgtaagggcatttgcaaaggagagatcgtggctgtgtttgttctggacaagaaaaagaaacccctgatgccgtgctcggaaaaacgggccagactcctcctggaacggaaaaaagccgtggttcaccggatggctcccttcaccatccggctgaaagaccgggtcgggggcgtgacccaacccgtccgggtcaagctcgatcccggatcgaagagcaccggcctcgccgtggtccgggaggaggagggggacgggaagaccaccgcccatgtcctgtttcaggcggagatccatcaccggggagccgccattaaaaagaaactggaccagcgccgggccttccggagacggcggagggggaacctccggtaccgaaaaccccgggtcgacaaccggacacgtccggacggctggttgcccccgagcctgcgccaccgggtcgatacgaccctctcctgggtcgaccggctccggagacgggttccggtcacggggatcagccaggagctggtccggttcgacatgcagaagatcgaaaacccggaaatctccggagtcgaataccagcagggaaccttggccggatacgaggtccgggaatatctcctggagaagtggggccggacctgtgcctactgtgggtccgagaacgtgcccctcgagatcgaccacatccacccccggagccttggcggatcggaccgggtctccaacctgacgctggcttgccgttcctgcaacctgaagaagggaaaccgtccggtcggggagtttctggcgaagacgccggagcgtctgtcgatgatcctcgcccgggccaaggccccgctgaaagacgcggcggccgtcaacacgacccggtgggcgctgtttcaggcgttaaaggcgacggggcttccggtcgagaccgcctccggaggacggacaaaatacaaccggacccggctcggaatccccaannnnnnnnnnnnnnnnnnnnnnnnnnnnnnnnnnnnnnnnnnnnnnnnnngcgaaacccagcccattcgggtcaaactcgatcccggatcgaagaccaccggactcgccgtggtccgggaggaagagacggacggggagaagaccgcccatgtcctgtttcaggcggagattcatcaccggggatccgccatcaaaaagaaactggaccagcgccgggccttccggagccggcggcgaagtcagcttcgctaccggacgccccggttcgacaaccggacacgtccggacggctggttgcccccgagcctgcgccatcgggtcgacacgaccctcgcctgggtcgaacggctccggagactggttcccgtttccgaactgtcccaggagctggtccggttcgacatgcagaagatcgaaaacccggaaatctccggagtcgaataccagcagggaaccttggccggatacgaggtccgggaatatctcctggagaagtggggccggacctgtgcctactgtgggtccgagaacgtgcccctcgagatcgaccacatccacccccggagccttggcggatcggaccgggtctccaacctgacgctggcttgccgttcctgcaacctgaagaagggaaaccgtccggtcggggagtttctggcgaagacgccggagcgtctgtcgacgatcctcgcccgggccaaggccccgctgaaagacgcggcggccgtcaacacgacccggtgggcgctgtttcaggcgttaaaggcgacggggcttccggtcgagaccgcctccggaggacggacgaagtggaacaggactcggcttgtgctccccaagacccatgccctcgatgcagcgtgtgtcgggaatatcgacaggatcgagggctggaaccgtccctacctttcgatcaagtccacgggacggggatcgtatcggcggacccggctggatgcgttcggcttcccccgtgggtctctgacccggacgaaagcccacttcggttttcagaccggagaccgggtcatggcgatcgtgacgaagggcaaaaaaaccggaacctatgccggacgggtggccgtgagaagctccggcagtttcaacctccagaccggctccggagtggtgcaggggatttcttacaaggactgtcggcttctccagcgggccgacgggtacggatattctatccatccgatcactgagaaaggagaagcgggagaggcgctatccctccccggcatgaatgccggagtctcccgcgcaagaggatga

SEQ ID NO: 221 - DNA, 298 bp, Leptospirillum rubarum
  source 1..298: mol_type = other DNA
gtcaaccaccccgccctgaagggcggagcttgaaaggaggttcgacaggctcgggttgaccagggaaagcggtacccaacccgctccgttggcaacaggtacaagacccaccccgggatgcttcctcagtcccgggctctggaagccgccgatgcagacaaccgcgagggccaggacgaaacggtcggcggcaagggagcgatcccgaagccggttgccaacattcccgaggggagacgcgtcgtaagacgcgcgttacatggcccgtaagggcatttgcaaaggagagatcgtggct

SEQ ID NO: 222 - DNA, 972 bp, unidentified
  misc_feature 1..972: note = Ga0209061_1001914 JGI
  source 1..972: mol_type = other DNA
atggtcccggtgctcgacagcagaggggccccgctcgacccatgcacggagaaacgggctcggctgctgcttgagcgtgggcgcgccgtggtggtgagccgcaacccgttcgccatccggctgaaggaccgcacggcagagcagtcggtcgtccacccgctcgtctgcaagctcgacccaggctcggccaccgacggtgtggcgctcgtgcgcaggcaggaaggcacggacgtgctcgtggccgcagcccacgtcgagcacaagcgctcggtgagcaaggccatcgccaggcgcgccggttacaggaagcggcgccgctccaagctctggcaccggaaggagcgctcctccaaccgcaggcccgccccctgtacctcctgcggggccaacgccgtgcacggccgggaccgctgcaggccctgtgccgaggcaagggccccgcgcaccgagggcgcccgcccacggcggctcccgccgtctctcagggcacgggtggacgagaccgtccacgccatagagaagctggccaagctctacccgctggcggccattgccatagaggtcgcccgcttcgacgcacagctgttgcgcgacccaggcgtctcgggcgaggggtaccagcaagggccgctctaccagtcaaacctgcgcgagtacgtgctccaccgcgacggccacaggtgccgctactgcggccgccgcggcgtggcgctcaacttggaccacgtcaccccgaggtcgcgcggcggggccaccagggccgacaacctcgtggcgtgctgcctcaagtgcaacaaggccaagggcaaccgcgacgccgccgagtacggccacccggaggtccaagcgcaagtcgacgtgccgctcagggacgccgcctacgtcaactaccccgccctaaagggcggggcttgtgggaaggtcccacaagcccaggttgaccaggccaagacatcgacgaaagagaggtga

SEQ ID NO: 223 - DNA, 354 bp, unidentified
  misc_feature 1..354: note = Ga0209061_1001914 JGI
  source 1..354: mol_type = other DNA
gtcaactaccccgcccttacgggcggggcttgtggggcaacccacgagcccaggttgaccagagggcttggcaggaaggaggcaagaaagccaagcagaagcgcgtcaggtaggcgcaaaagcacctcgggatgcttctccagtcccgagcactgcgcaccacgcaaggagacaaccgtgagggcaatgggcgaaaccgtgcgtgggagccgaggatcctgacaaaacgcacccccgaggagagaccaaagcctcccgcctccatctgggaggttgcggcgtcactaggcccgtaagggcacctataaggacaaggaaggagcatgaagaaatgagaggagggcaaggctgatg

SEQ ID NO: 224 - DNA, 816 bp, unidentified
  misc_feature 1..816: note = Ga0334887_1007052 JGI
  source 1..816: mol_type = other DNA
atgctagtctatgttcttaacaggcacgggaaaccgctgatgccgtgtaaaccacagaaagcacgaagactattgaaagaacaaaaggcaaaagtagtaaaaagaacaccgtttactattcaactgttgtacggttcctctggatacaaacaagatgtaattctcggtgtagatgccggtagcaagacaataggagtatcggcctcaactgagaacaaggaagtgttttcagcagaagtcgaattgagaacagatattgtagatctgttatctaccagaaggacgcttagaaggtctagaagaaacagaaagacgcgttatagacaatctcgtttccttaatcgaagaaagcctgaaggttgggtagcaccgtcggtacagaataagattgacactcacattaaagtggttaagctggttcacgcaatcctgccaataactagagtagtagtagaagtggctcaattcgacatacagaaaataaagaaccccgacattcttggcgaggattaccagcaaggcgaacagctgggattctataatgtcagggagtatgttttgttcagggataaacatacctgtcaacactgtaatggtaagtcaagggatccaattctaaatgtgcaccacatcgagtcgagaaagacaggcgggaactctccggataatttgattactctatgcgaaacctgtcataagagataccataaaggggagatcagacttaaagtcaagcgaagttcttcattcagggatgcagcctttatgggcataatgcgatgggcttcctataacaaactaaaagaactgtattca

SEQ ID NO: 225 - DNA, 239 bp, unidentified
  misc_feature 1..239: note = Ga0334887_1007052 JGI
  source 1..239: mol_type = other DNA
gtcaaataccccacggctaaagccgggagcttgtaaaagctctgtttgactagcctgagtgcttcgagcactacgttatcggcaaatgtataggcaccgtaggatgcgttcccaagtcttacgctctgcggttggtggttaaacagtcctgatgggtagggacagtgctgctaacgagaaactgtcgaataacattggcgatgggaagattactccgtaaggaggtagactatatgcta

SEQ ID NO: 226 - DNA, 1344 bp, Moorena sp.
  source 1..1344: mol_type = other DNA
atggcggttttcgtgttggacaaacgcaagcagccgttgatgccgtgcagcgaaaagcgcgcccgattgctgctggaacgcggtcgcgccgtggtgcataaacgctatccgttcacgatccggctcagggatcgggtgggcggcgacacgcaggcgcttcgtctgggcattgatcccggcagcaaggccacggggctggcgctgatgcgtgaatcggacggtcagcagcgccatgtgctgtgtctgttcgagcttttgcaccgcggctttcagatcaagaaggcgctggaacagcgcgccgcgtttcggcgtcgccgccgttcggccaatctgcgctaccgggcgccacgctttgataatcgcactcggcccgaaggttggctgcccccttcattgcaacatcgggtcgataccgtcacggcctgggtggaacggctgcgcaggcttgcaccaatcaccgcactggaccaggaactggtgcgctttgatacgcaaaagctcgacaacccggaggtcagcgacatcgagtaccagcaaggcacgctgctcgggtacgaggtgcgcgagtacctgctggagaaatggggccgggaatgtgcctactgcggcgccaccgagacgccgctggaaatcgagcatgtcgagccacgcagccggggcggttccaaccgcgtcagcaacttgtcattagcctgccatgcctgcaatcaggaaaaggatcggcaatcgctgactgacttcttcgctaccagcaaacgtctcaaaaagcgcctcaaagccaatggtctgtcggcgaacgtgcagcttgagcgcgtacagcgccagctcaagcagccgctacgcgatgccagcgcggtcaatgcgacccgctgggcgctgtttgacgccctcaaggccaccggcttgccggtcacggtcggcacgggtggacgtacaaaatacaaccgccagcggctcggcattcccaaaactcacgccctggatgccgcctgcgttggcgcgatggaggcgctgcacgactggccggtgccaacgctgatgatcaaggccaccggacgcgggagctatcagcgcactcggctgacccggcacggttttccgcgtggctacctgatgcggcaaaaacaggtacacggttttcagaccggcgatagggtcaaggccatcgtccccgccggcaggaaagccggcacgcatatcggtcgtgtggccgtgcgcaaaaccggccgcttcaacatccagacgccacagggggcagtacagggcatttcgcacaagcattgcaccctgattcaacgcggtgatggctacggctaccacctcacaccatccatcaaccactaa

SEQ ID NO: 227 - DNA, 1344 bp, Moorena sp.; identical to SEQ ID NO: 226
  source 1..1344: mol_type = other DNA

SEQ ID NO: 228 - DNA, 1410 bp, unidentified
  misc_feature 1..1410: note = Ga0222658_1000616 JGI
  source 1..1410: mol_type = other DNA
atggaaacagaaaagactaagaacagacctgggaatgctccacaagttccctgctctctggtgcgagttaaacagagttcaaagactcagtgcgtagcgctattgacttctaataacaacctcgatgtggatctacctcagcatagagaggggcggaacttgagagtctccgccaacgtctatgtacttaatatgagaggggaacccctcatgccatgttctccgagaaaagctaaaaagttattaaaagagagcaaagccgttgtccgtaaaagatgtccatttacgatacaactgacaacccaaacaggggaatcttgtcagagcattagtttaggcgttgattcaggcacgaaattcataggaattagtgccacaacagagaagaatgaactattctcagcggagttagttcttgacaccaacctcaaggaaaggcttgctagcagacaaatgtatcgcagaaacaggagaagcaggctatggcatagagaacaacgctataataataggagaaaaccccgtggttggttaccaccatccatagaaagacggtataatactcatatcaatatcattgaatttattaagactgttttgcctgtgtctaatgtaactattgaacttggaaactttgatacgcagaagattaaaaatcaagatatcaatggaaagttatatcaacaaggtgatatgtatggatatcaaaatatgagagcataccttatagcaagagaaaaaggtatctgtcagttttgtgggaaatctgttaagggaaagaagatttctttgcatcatatagaatcaaggaaatctggttcaaactctgcatctaatatggctttgcttcacgaaccatgccataagaagatgcataaaatgggtttagaaccaaaaataaatagaaataagcagttccgtgaacatgcttttatgaacataatgcatgaaaaaatacagaaagaaactgactataaacgaacatttggttacgtaacatttgttgacaggaatgctatcggcttagaaaagtcacatattaacgatgctttcgttgtctcaagtggaggaatccaaaaaagatgtataccattctctattgagcagaaaagaaagaataacagatcactacaaaagaacagaaaaggttatgctcctagcatcagaaggcaaagatatccaatacagatcaatgatctggtaaaaataaacggacagtgggttcagacaaaaggtacacattgcaaaggaacaagaattatggtaaataaaaaatctattaacattaaaaatgtggaaagtgtatttcatcgaggaactcttaaatggagtatagattcttcttgtacatatgaagctgatgggattgtaacttttaaacatcatgaagggagcaaatatgacgaatga

SEQ ID NO: 229 - DNA, 295 bp, unidentified
  misc_feature 1..295: note = Ga0222658_1000616 JGI
  source 1..295: mol_type = other DNA
cggaagtaaagcataacatatataatgacaatcttcctgttggtaatgatgacaagggtgatccatatttagatgaaagaactgactttattactatatctgatctcgtaaatgaaaaatatgacaagagtgatggtaaatctatatatgtacaagaaagaagggatgccgtgcttcttctgtatcgggctattagcaaaaggatcgtatcgtcaactacctccggttaaacccgcgggcttgtagtgtgagctacaccgataaagagttgattagagggcttgaaaaaagcaga

SEQ ID NO: 230 - DNA, 1374 bp, unidentified
  misc_feature 1..1374: note = GENOME_ACESSION: IMG_2061766007_$F_2061766007 JGI
  misc_feature 104..113: note = MISC_FEATURE - Any "n" represents any nucleotide
  misc_feature 259..795: note = MISC_FEATURE - Any "n" represents any nucleotide
  misc_feature 1360..1369: note = MISC_FEATURE - Any "n" represents any nucleotide
  source 1..1374: mol_type = other DNA
atgtcttcgacgagaagagctctaagaagctctaccgcacgatgtccctgctcgcggaggtacagtgatttaccgtgcagcatacctggtgctttttctccatnnnnnnnnnntaccgaggacgagcgcatcgcctactaccagaagcagctcggcaaggtccgggagatgctatcgcagaagttcttcaagccggaaccggcatacgaggaagcctaccttaataacacaaaggtgacctacatagcgacttccggannnnnnnnnnnnnnnnnnnnnnnnnnnnnnnnnnnnnnnnnnnnnnnnnnnnnnnnnnnnnnnnnnnnnnnnnnnnnnnnnnnnnnnnnnnnnnnnnnnnnnnnnnnnnnnnnnnnnnnnnnnnnnnnnnnnnnnnnnnnnnnnnnnnnnnnnnnnnnnnnnnnnnnnnnnnnnnnnnnnnnnnnnnnnnnnnnnnnnnnnnnnnnnnnnnnnnnnnnnnnnnnnnnnnnnnnnnnnnnnnnnnnnnnnnnnnnnnnnnnnnnnnnnnnnnnnnnnnnnnnnnnnnnnnnnnnnnnnnnnnnnnnnnnnnnnnnnnnnnnnnnnnnnnnnnnnnnnnnnnnnnnnnnnnnnnnnnnnnnnnnnnnnnnnnnnnnnnnnnnnnnnnnnnnnnnnnnnnnnnnnnnnnnnnnnnnnnnnnnnnnnnnnnnnnnnnnnnnnnnnnnnnnnnnnnnnnnnnnnnnnnnnnnnnnnnnnnnnnnnnnnnnnnnnnnnnnnnnnnnnnnnnnnnnnnnnnnnnnnnnnnnnnnnnnnnnnnnnactaccaaaaagaaggtattgttcgaggctcagcttgaactgcgtgacgatatcgtgaagaaactcgccaccagacgcgagttccgtcgggcaagacgaaaccgtaaaaccaggtatcgtaaagctagattcttgaatcgtaccaagaccaagaaggaaggatggcttgccccgtccatcaagcacaaggtatggtctcatctatggaacatcgctagaatcaagcgaatccttcctataagcaggataaccatagaggtggcccagtttgacacccagttgttaaaggctaaagaacacggtttgcctgttccacagggtacggattaccagaatggtgaacaactgggtttctggaacgtaagggagtacgtattgttccgtgacggtcatagatgccagtgctgcaagggaaagacgggcgattccgttctcaacgtgcatcacatagaatcccgaaagaccggtggtaacgcacccaacaaccttgtgactctttgtgaaacttgccacaagagataccataggggtgaaatcaagcttccgacatctataaaacgtggtnnnnnnnnnncttaa

SEQ ID NO: 231 - DNA, 328 bp, unidentified
  misc_feature 1..328: note = GENOME_ACESSION: IMG_2061766007_$F_2061766007 JGI
  misc_feature 149..158: note = MISC_FEATURE - Any "n" represents any nucleotide
  misc_feature 315..324: note = MISC_FEATURE - Any "n" represents any nucleotide
  source 1..328: mol_type = other DNA
gtcggcgccacgtccgagcgcggagtgttcaagatatattccagggaggaactcaggaagagccatagggcagcggcaacggcatacgcagtaatgtacgcgataatgccgtatcctcccggactggactatggcaagttgaatagctnnnnnnnnnngggcaagggtcggcgccgcgtccgagtacggagtgttcaagatatattccatgaacgagctcaggaagagcccgagggcagtggcaacggcatacgcagtaatgtacgcgataatgccgtatccgcccggactggactatggcaagttgaatagccnnnnnnnnnntcca

SEQ ID NO: 232 - DNA, 657 bp, Microcystis aeruginosa
  misc_feature 298..397: note = MISC_FEATURE - Any "n" represents any nucleotide
  source 1..657: mol_type = other DNA
atggcaagagttcctgttatctcaaaagacggaaagccgttgatgcccaccaaacccagtcgggccaggcggtggattaaggaaggaaaagctatcggtaaattcaacgacttagatattttctatgtccagctaaccactgaaccttccgataacaaaacccaaccgattgctattggtattgacccgggtaaattattctctggaattggcgttcaatcctctctttttactctttggaaggctcacttagaacttccttttaagcgagtaagagagtgcctagacaatcgatgcnnnnnnnnnnnnnnnnnnnnnnnnnnnnnnnnnnnnnnnnnnnnnnnnnnnnnnnnnnnnnnnnnnnnnnnnnnnnnnnnnnnnnnnnnnnnnnnnnnnnccgatatttactttgagtacatcaaagccgatattgatttaacttccagtagaaaaggagctaagtctggaaaaggtttctcgtcggttatggtcggacagaaatgggcgattgagcaactatctcaattggcaaaagtccatacccgctttggttggcaaacctctaatctcagaaaatatttgcgactagaaaagtccaaaaataaagcaaaacaatcaccagaaagtcatgctaacgatggcattgctaagaggtag

SEQ ID NO: 233 - DNA, 222 bp, Microcystis aeruginosa
  source 1..222: mol_type = other DNA
gtcactaaccccgccctaaaagggacggggcttgcctagaccaatttaggcgacgcaagtagagactaccgcatcgagacacaatctggcccagacctccgaatacttccctagttcggattccctctcagctctattggtaaagcgttgttagacaagacatctggattgtgttgcggtaagggactttaactttactcttaaggattatctccatggcaa

SEQ ID NO: 234 - DNA, 813 bp, unidentified
  misc_feature 1..813: note = Ga0255147_1001158 JGI
  source 1..813: mol_type = other DNA
atgttagcgtatgttctgaacgcccaaggcgaggccctcatgccgtgctctcccgccagggcgagaaaacttttgagggacaaaaaggccaaggtcgtccgccgtatgccttttaccatcaaactcctccatggctcgtccggctatcggcagaaggtctcccttttggtcgacgccggggctaaccatataggggcggcggcaaaaagagaggacggagtagtgctctacgcgtccgagacaaaaacaagaggagacatcacagaaaaaatgacccaaagacgctcctatcgaaggacaagacgtggaagaaaaacacgctatcgggctccgaggttcgacaataggagaagaaaggacggctggctcaccccgacggtctggagcaaaatcgaggcgcacgtcgccgagatagccttcgtcaaaaaaatgcttcccatatcgggaacaaaaatcgagacggcctcgttcgacatccatgggatttctaatcccgacgtcaaagactatcagaatggactacaaaagggcttttataacctaaaagagttcgtccttcatagggattcccacagctgtcaggagtgtcggggtaagaaaaaggacaaaaggcttcacgtccaccatgtgaggtttcgctctaacggcggcacaaatgtcccggagaacctcatcaccctgtgcgaaagttgccacaatgcccttcacgcgaaaaagaacgcccaatccgtatcgctggaaagatacgggaagaagaaagccccttcgctgaagggtgcgaccatcatgtcgacggtatcggcggccctcgaa

SEQ ID NO: 235 - DNA, 309 bp, unidentified
  misc_feature 1..309: note = Ga0255147_1001158 JGI
  source 1..309: mol_type = other DNA
gtgaagcctccccgcgactaaagatcgcggggcttcctggaaacagggagcacttcaccagaccaccaacaaagaaaggagtttaggctaaatgttggtagacgatggacaggaatatataggcacttcgggatggcgactcagtcccgaaccctgcgccgtagcgttaaaagccggaagaggtgtcggcggtgcgctgcggatagaaaaccctgcattcatcaggtctagagtaggtcggagtcctttggcggctttcccgccgaaggatacgcacgactccagttcagggaggtacgctttatgtta

SEQ ID NO: 236 - DNA, 1257 bp, unidentified
  misc_feature 1..1257: note = Ga0137716_10010158 JGI
  source 1..1257: mol_type = other DNA
atgttagccttcgtattaaacaaatatggtaaaccacttatgccctgtcatcctgctaaggcaagaatactgctcaagcagggtaaggcaaaagtggtaaaacaaactcccttcaccattcagctactgtatggcagttccggttacaaacaaccagttgtgcttggagtggattctggatatagcaatgtcggattatcagcagtctctgagaaaagagagctgttttcagcagaagttgccttgagaacagacatagtcaaacttttatccgaaagaaggcagtatcgtagattcagacggtatcgtaagacatggtatcgtaaaccgaggtttcagaacaggaaaaaacctgaaggatggctcgctccatctattcagaacaaactggatactcatattaaggttatcaatcaggtcagcagaatactccctgtaacagaggtaaaagtagaagtagcagcatttgatattcaaaaaatcaaaactcctgatatatctggtgtggattatcagaatggggtgcagaaggggtttagtaatgtcagggagtatgttctgtctagagatgggcatatctgtcagcactgcaaagggaaatccaaagaccctgtgttagaagttcaccatatagtatcgaggcagattggcagtaatagccctgataacctgataaccctttgcaggacatgtcatcaaaaggtttctcaaggaaagattaagctacaggtgaccccttcaaaggagtttaaggcagagacctttatgactacggttagatggaaactgatagagagactgagagaactcggttatgaggtttcacacacctacgggtatatcacaaaggacaaaaggatagcgttagggatagggaaatcccatgctaacgatgcctttgtgatagcagggagaaacggtcaaaggagactatcagttcagtattttattcagcaggtaagaaagtgtaatcgtaagctattcaaaggtgacaggtcacatatcaagaacatagccgacaggtttgtaaaagggtatcagaggtttgataaggttttgtggaaaggtatagagtgtttcatctttggcaggagggtaacaggatattttgacctgaggaaattagatgggacacggttaaacccatcgttaagttataaacaaatctctctccttgagagagcaaagacattgctaatagaaaggaggataggtctctcctccccatgtctgaaggcaggggtctccgagacctga

SEQ ID NO: 237 - DNA, 260 bp, unidentified
  misc_feature 1..260: note = Ga0137716_10010158 JGI
  source 1..260: mol_type = other DNA
gtcaatcaccccatgcctgaaggcaggggcttgtcccgtgagggataagggtaactggttgaccagggggcatggagaaccatgcagcagttatcaggaagagatacatacacaccccgggatgttccgccagttccgggcaactgtggtctgtcattaaacgtggtggaaacacccagtgtggcaggcttaaaaactcctgataacatcccgaggcggcacttactccccgtaaggggaagagaggaggctttatgtta

SEQ ID NO: 238 - DNA, 1341 bp, unidentified
  misc_feature 1..1341: note = Ga0257068_1000081 JGI
  source 1..1341: mol_type = other DNA
atggcagtttttgtactggaccgtcacaagaaaccgctggacccgtgcagcgagaaacgcgccagacagcttctggagcgaggacgcgcacgtgtccacaaactgaaacccttcacgattcgcatcgtggaccggctttttgaaaacagctgcgtcaacggcgtcgcggtcaaaattgaccccggcagccgggagacgggcatcgctgtcgtccgcgaggacggtgacggagcccacgccctagcgttcatcaatctcagacaccgcggtctcgtcatccgcaagaagctggagcagcgggccgcatatcggcgtcggcgccggtcctcgaatcttcggtaccgcgcgccgcgttttaacaatcgtcgcaggcccgaaggctggcttgcgccaagcctgcggcaccgtgtcgactccacggtcgcctggatgcgcagactgtgccgtattgcgccggtgcgccgtatctcgatggaactcgtgaagttcgacatgcaggccatgcagaatccggaaatctccggcgtcgagtaccagcagggagagctcgccggctatgaggtgcgcgagtacctgctggaaaaatggggccggaagtgcgcctactgcggcaaggaaaacgtgccgctggaaatcgagcacatcacggccaaatcggtcggcggcagcaaccgcgtttccaacctgaccctcgcctgtcatgactgcaaccaggccaagggcaacatgccggtcgaggcgttcctgaagaaccgcccggaagccctggacaggatacggcggcaggcaaaacagccgctcaaagacgcggctgcggtcaatgccacacgctgggagctctacagggagctgcaggtcttcggactgcccgtggagactgccagtggcggcaggacgaaatggaaccggacgcgtctccatgtgcccaaggcgcactggctggacgccctctgcgtcggcagtgtggacgccgtgtccgggattgggaagccagtgcttgagattgcctgcacaggccgcggctcgcatcagcgcacccgcgtcgacaggaacggcttcccgcgtggtttctgtctgcggcagaaacgtgtccacggctttgcgacgggcgacctggcggccgctgtcgtgcccaggggcaaacatgcagggaaacatgtcggaagactcgccgtgcgcgagaacggttccttctgtgtggctgcggcagacggtaagcacgacggcatatcgtggcggcactgcaggctgctgcagcgtgccgacggctatggctacgggcatctgctcggtaacgtcaaccaggaaaattttggaggcagcgtttcctccccggcttga

SEQ ID NO: 239 - DNA, 283 bp, unidentified
  misc_feature 1..283: note = Ga0257068_1000081 JGI
  source 1..283: mol_type = other DNA
gtcaatcaccccgccctgaaggacgaggcttgtaaaagctgaatcccaagagccgattgaccagcccaagtgaggtgtaaccggactccgttgctatcaggctaaagaccaacgccagaatgcttcctcagttctgacctcttgaaattcctgttgcagacatgcccggggtaggcgcgaaacgggcaggagtgtgacaccggacagcaacatgggcgagaggagccggcgggcaaccgccgcgtaacagggccccttgcggggcaggaaaacgacaatggca

SEQ ID NO: 240 - DNA, 1284 bp, Desulfobacter sp.
  source 1..1284: mol_type = other DNA
ttgaacgtatttgttttagatacaaacaaaaaaccacaaaatccagtgcatccggcaaaggccagattgcttttatcggaagagaaagcggcggttttcaggcagtatcctttcacaattattttaaaagaagagattggggtaaatccacaagcacttcgggttaaaattgatccaggcagcaaaacctccggcattgccgtcactgatgatgccacaggtgaaatcgtttttgctatgcaattagaacatcgaggccaacaaatcaaaaacgatctggaatccagacgggcaatcagaagatctcggagaaacagaaaaacccgatacagaaaaccacgatttgaaaacagaatcagaccggaaggatggttggcgccatcattgaaaagccgggttcacaatattgagacgtgggtcaatcgattatgccgattcagtaatattcaggcaatctcaatggagcttgttcgttttgatatgcagaaaatactcaatcccgaaatctccggggttgagtatcagcaaggggcactttcgggatatgaggtacgggagtatcttcttgagaagtggggcagaacgtgtgcctattgtggcaaaacgaatctgccactggagattgagcacattctcccgaaatcaaagggcggttcaaatcgcgtcagcaatttgaccctggcatgtaccgaatgcaatcagaagaaagggaacaggccgattgacatcttcctttcaaagaggccggaattactgaaacggattcaagccagggcaaaagcaccgctcaaggatgcggcagccgtcaatagtacccgatgggatctattccgcacactgaaagagacagggcttcctgtggagattggttccggcggattgacaaaattcaaccggacaattagagggctttccaaaacacattggcttgatgcggcttgtgtggggaaaagcacacctgaaaaattattccaaactgacaaggctgttttgattgttaaagcaaatggtcatgggagcaggcaaatgtgccgggtcaatacgtttggattccccaggacaaaagcgaaatcccggaagaaaaaagttaacggttttcagacaggtgatattgccaaagcaattgtgacttccggaaaaaaggttggaacatatattggtcgtgtcgccgttagaaaaagtggattttttaacattaagacaagagaaacgaccatacaaggtattaattggaagtattgtcatatgcttcatatgtctgatggatattcatataacatttga

SEQ ID NO: 241 - DNA, 246 bp, Desulfobacter sp.
  source 1..246: mol_type = other DNA
gtcaactacccctcctgaatcacagattcagaaggggcttgtaaaaagccctatgttgacccgtctaagtgctttgcgcactacgttagatcggaaataggtaccctggggtgcttgccagctccaggcgctacggcaagtagttaaacaggtgtaagaggttaaaccggtgctgcttgcgctaaacccggtcataacattgacaaggcaaacattaccctggaaacaggagaatttagattgaac

SEQ ID NO: 242 - DNA, 915 bp, unidentified
  misc_feature 1..915: note = Anaerobic digester metagenome 6175
  misc_feature 63..72: note = n is a, c, g, or t
  source 1..915: mol_type = other DNA
atgggcattatgcgctggacagtctacggtaaactcaaagaattataccctaatgtcaaattnnnnnnnnnncatatcggtctatcagccacaacagataagaaagtcttatttgaatctgaagtcgaattaagaaacgacatagtaaaactcctatcaaacagaagagaattaaggagaggcaggagatatcgcaaaaccagatacagaaagccaaagttcaataaccgcaaaaaacctaaaggttggttagctccttcaatcaggaacaaaattgatactcatctgaaggttatcgctttagcttgcaatatactgccgataacaaaactgaccattgaagtagcacagtttgatattcaaaagattagaagccccaacatccaaggcaaatcataccgagatactgctttcatgggcattatgcgctggacagtctacggtaaactcaaagaattataccctaatgtcaaattgacctacgggtatataactaaacataccagaattaacgcagggttgaacaagtttcatcgtacagatgcacgctgcatcagcggcaacccatcagctgaaccactaaacatctggtactacttcaagcaagtaagaggccagaaccggcagctgcacaaagccaacccgaaaaaaggcattcgcaaggccaacaaagccccgcgatacgttcacggttttcagttatttgacaaggtactgtatcagggacaagaatgttttatctttggcagacgatcatccggctattttgatttaaggaaattggatggtagtaaagtacacgcatctgccagccataagaaacttaaattgctagaaagcgcaaatacattattatgcgaaagagaggaagtggcttcctccctacgactaaagtcgggggtatacgccgcgtaa

SEQ ID NO: 243 - DNA, 240 bp, unidentified
  misc_feature 1..240: note = Anaerobic digester metagenome 6175
  source 1..240: mol_type = other DNA
gtcaatcaccccacgcctaaaggcgggggcttgcaaaagtcttgattgactagcctcagtcttaattgactacgttatattagaatacatagttaccctgggatgcgtgcccaagttccaggcactaaggtcggtggttaatcagttctgaggggtaggaacagtgctgctggtacaaaacctaatataacattggcgatgggcaaccaactccaaaaaaaggaggtaggcttaatgcta

SEQ ID NO: 244 - DNA, 981 bp, Moorena sp.
  source 1..981: mol_type = other DNA
atgaactcaaatgctcgaattccagttttgtcaccagatggtaagccattgatgccaaccttgtatcgacgggcacaggtctgggtagaacaaggcaaagcaaaatggatcggcaatgacctgaatattaagcaagttcatctgttacaagaaccatccggtaacgcaactcagcccgttgcgatcggcattgaccctggtaaaaagttttcaggaattgctgttcaatctagtcagttcactttgttcgcagcacacttggtattgccgtttcctaatgtcactaaaaagatgacggggagacgaattttaagacgtgcgagacgctcaagacgtatcaaccgcaaaattccattccatcttagggcgcatcgtcaaaaacgctttgacaatcgcaggcacaaaaaactggttccatctatccgtgctaaccgtgaatttgagttgcgagttgtcaaagagttgatgcgactattcccagtctcaactattgtctatgaatacatagaagcaaagggggataaagcgtttagtcctgtaatggtgggtcaaaaagtcatgttggagttcttaacagaactagctccagtggcaacttgttttggttggcaaaccgctaacctcagaactcacctgaatttgattaagcacaaaaacaaggcctcacaatctcctcaatctcatggagtagacggaattgcgttggcttctagccaattcgtaaactacgaagccttccaaaccaagcgagaacatgggcgtcgctgggttggaagcgtgcgtctgacgccttctccgtttcgggtgattactcgccccaatctattccgtcgccagttgcactttgagaatttcaggcaaggcgctgtacgtaagcgtaaggggggaactgttacgccattcggatttcgttctggtgatttcgttcaaggtgaaaaggctggaaagattcatagaggttggattggtggctttaagtga

SEQ ID NO: 245 - DNA, 238 bp, Moorena sp.
  source 1..238: mol_type = other DNA
gtcaagaacccccacctgcactcttgcaagtgggggcgtgaaacagccaggttttaccggtaactcctgactagagccaatgagccactatctcgcacggacttccgcttatttccctagagcggattatctccaaacctactggctgtaggtgcttgagggtcgctcaaatgattcggaggcaacctccgaatccgcgacctccagaaaggacatcgtgatagtggtggcgtaaggg

SEQ ID NO: 246 - DNA, 1152 bp, unidentified
  misc_feature 1..1152: note = Ga0187846_10005139 JGI
  source 1..1152: mol_type = other DNA
gtgttcgtttacgtattaaattgtcacggtgaaccgttcatgccctgtagaccacgaaaagcacgcctgctcttgcaagagggcaaggcgaaggttgtgagaatggttccgttcacgatccaactgctgtatggcagcagtggctacaaacaagcaatctctcttggtgtcgatgcaggcacccaacggatcggggtttctgcgaccactgagcggcaagtgcttttcgaagcagaggtgcagcccagaactgacatccaggcattgctggcgacccgccgtcaattccgccatgccaggcgcagtcgcaagacgcgctatcgccagtgtcgtttcctcaatcgaaagaagcgatcaggctggctcacgccttctgtgcggcacaaagtagcagcccatctgaaaacaatccgtttggttcaccagttggtgcctgtgagtaggaccaccatcgaggtggcacagttcgacatccagaaaatacgcaatcccgagatcgagggcagagagtaccaacacggtccccagctcggtttctggaatgtcagggcatatgttcttgccagagaccgtcatgtgtgtcaatggtgtcagggccagtcgcaagaccccattctcacggtccatcacatcgagtcccgcaagacaggcggggataggcccgagaatttgatgactttgtgtgagacgtgccatgatctcattcaccgaatgcaccaggaacacacgatcgaacagaagtccaggggctttcgagatgcggcgcaaatgggcatcatgcgctggcgcatctatgagcaggcgaaagcactcttcccgcatgtccatctgacctatgggtacatcacaaagcacactcgaattgccaaccactttgaaaaatcgcatgtgatcgacgctcgctgtatcagtggtcatgcgctggcatgctcggatgagacgtggtatctgatcaagtacgtgaggagaaataagcgtcagttgcacaaagcgaccatcagaaggggcggcaagaggcagtgtcacacggctcccaagtatgtccacggctttcgcttgtttgattgcgtgaactatcaagggaagtgctgttttgtgtttggcagacgcagttctggctactttgatctgcgtctgcttgacgggacgaag

SEQ ID NO: 247 - DNA, 237 bp, unidentified
  misc_feature 1..237: note = Ga0187846_10005139 JGI
  source 1..237: mol_type = other DNA
gtcaagaacccaatcgcctccaggcgatgggcttgtgtgaacaagccatgcttgactagcctgagtctagactacgttcgacaggtcatgctacctacgggtgcctactctagcctgtagctctagcgtctgtgattaaaagctctgatgggtaggaacggtgttgcagacacgacaagcctgttgaaccttggcgaagagtaccatacatccgaaaggatggtaaacgttgtgttc

SEQ ID NO: 248 - DNA, 825 bp, unidentified
  misc_feature 1..825: note = Moorea sp. SIO3G5
  source 1..825: mol_type = other DNA
gtgaagccagtgtcaggagcatgcacaagctttgatagccgagcgaggcacactttaccctcaacgggagtaaacacatgcgccatgtgtaattacgtctttgttttagatgcaaatcataaacccctcaacccctgccgtcccgttaccgccaggaagctgttaacggctggtaaggcggctgtatatcgccgttaccctttcaccattatcttgaaaaagcaggtagaggccgaacccaaaccgatgtctctcaagatcgatcctggctccaagatgactggtctagctattgtgtacgggaatcaggtggtatggtcagctgaaatcgaacatcgtggctccaaaatcaaatcagctcttgactctcgtcgggcagtgcgtcgttcccgtagaaacaggaaatgccgctaccgaaagccacgtttcaacaaccggaaacgcccagaaggttggttggctccgagcctacagcacagagtggcaaccactatgacctgggtgctgagattaattaaactcacccccattggttcgatatcccaggagctagttcggtttgatacccaaaagctgcaaaatccggaaatctctggcatagagtaccaacagggggagctgatgggctatgaagtgcgggagtacttgtatcagaaatggggtcgtcaatgtgtttactgtggggcacactcggtcaagctagaggtggaacacatagttcccaaatcaaagggaggaaccaatcgtgtcagtaacttaaccctagcctgtcatcggtataatcaggccaaaggaaatcttaatgctcaggattttttattgggg

SEQ ID NO: 249 - DNA, 271 bp, unidentified
  misc_feature 1..271: note = Moorea sp. SIO3G5
  source 1..271: mol_type = other DNA
cagaagcagaccaattactaaaccttagcaaacctgctcaaatcggggtttacctgagtcttcagattggtcaagctcaccaaatggtaaacgctatcaaggtcaagataccctggggtgcgagccagctccaggctctatcgcttctgattaaacaggtgatgagttaattttagtgaagccagtgtcaggagcatgcacaagctttgatagccgagcgaggcacactttaccctcaacgggagtaaacacatgcgccatgtgtaattac

SEQ ID NO: 250 - DNA, 534 bp, unidentified
  misc_feature 1..534: note = GENOME_ACESSION: IMG_3300000938_$F_3300000938 JGI
  source 1..534: mol_type = other DNA
aaaactcggtatcgtcaaccacgctttgataaccggaaacgccctacagggtggctcccacccagtctgcaaagccgagttgagaatatcgtaacttgggttcgtaggttacaaaagctagctttgatttctgatatttctcaggaattagtcaagtttgatactcaactcatggagaatccagacatcagtggattcgcataccaacaaggtgagttagctggttacgaagtgcgagaatttctgcttttcaaattcaatcatacctgtatgtactgtggggctaaagatactcgtttggagattgagcatcttttacccaagtctaaaggtggttcaaatagaattagtaatttaggcattgcttgtaggaattgcaaccaaaaaaaaggccgtcaagctctcagagaatttttagcccaaaaacctgacttgttacagcgcattctgagacaagtaaaacaacagaaagccgacactgctgccgttaattctacccgttgggcattatttaatcgactcaaagagactgga

SEQ ID NO: 251 - DNA, 257 bp, unidentified
  misc_feature 1..257: note = GENOME_ACESSION: IMG_3300000938_$F_3300000938 JGI
  misc_feature 216..257: note = MISC_FEATURE - Any "n" represents any nucleotide
  source 1..257: mol_type = other DNA
gctatccgcgaaccactggacaaacctggacaatcccgataaatccttggtagagatagcccggttaagtctaaccacagactacgttaagaaggtcacgacaccctgtgagtgcttgccagctccttgctctgtcgctaccagttaaacatctttatttcgctaaggaagtgctgctagcatgacaagccctcttaacattaccaaggcaaaagnnnnnnnnnnnnnnnnnnnnnnnnnnnnnnnnnnnnnnnnnn

SEQ ID NO: 252 - DNA, 1377 bp, unidentified
  misc_feature 1..1377: note = Ga0172380_10006798 JGI
  source 1..1377: mol_type = other DNA
atgcagaagtttaaagcaaagttaaagaacgtacctacaaatgcttcactagtttgtagctctacaaacacacaattaaacagagacgacagtcttagtgttgtgagtggtcaagaaattgacaaactgactttaaacaatcccgaagtgaatcaaccggaggaaactccgggacaggagttgagactacctgtcaaagtttttgtattgaatcttaggggcaagcccctgatgccttgctcatgccgacaggcaaagtgtctcttaaaagagaaaaaggcaaaagtagttaaaaggagtcctttcacattacagttgttagttgcaacaggtgaaacaaaacaagatattgttttaggaatggattcaggttattcaaatgttggaatttcctgtgttactaaaaaacaggaattattgagattgatttgtgttttagaaaatggaatgagtaaaaggcttgaagaaaaagcaatgtacagacgcggcagaagaaataaattgtggtatcgtaaaccgcggtttatgaatagggtttcaactaagaaaaaaggatggttaccgccttcaacactaagacgttttgaaacacatataaggcttattgaaagtattaaaaaacttttaccaataacaactgttagaattgaagtgggtaattttgatattcagaaaataaacaatcctgaaatttcaggaaaagattaccagcaaggttcgatgtatgaatatcaaaacaaacgaaattatttaatgagccgtgaaaatggaaagtgtcaattttgtggaaaagattttaaaggtcagtcgagtcatatacaccatataacaccacgaagtaaaggaggtactgacaaaactaacaatctggcaatcttacataaaaaatgtcatgaagaacttcacgccaaacatttagaaaaaacactgaaaaaaaataaacagttcaaagatgcgacatttatgaatattattcaacataaatttcaagaagtgttagattgtgaaatcacttttgggtatgagactttcataaaaagaaaggagttaggaattttgaaatcacattcaaatgatgcttttgtaattgcaaacgatactaataataaaagggttaaagaaattcaagtaatccagaagaagaaaaataatagatgtttacaattaaatagaaagggttttaagccaagcataaggaaagaaaaatctaaaataagtccacatgatttattttggattggtaaaaaacagtatacttgtaaaggtatgcacagttatggtagatatgttctttggggggatataagaaaaaaagaatatgttagattttcagatgtaactaaaatatttcgtgttagtggtttagtatggatataa

SEQ ID NO: 253 - DNA, 264 bp, unidentified
  misc_feature 1..264: note = Ga0172380_10006798 JGI
  source 1..264: mol_type = other DNA
gtcaactaccccttaacaagttaaggggcttgtccggtaacggacagagcaaaagttgattagggagcgttttaaaaaaatgcagaagtttaaagcaaagttaaagaacgtacctacaaatgcttcactagtttgtagctctacaaacacacaattaaacagagacgacagtcttagtgttgtgagtggtcaagaaattgacaaactgactttaaacaatcccgaagtgaatcaaccggaggaaactccgggacaggagttgag

SEQ ID NO: 254 - DNA, 462 bp, unidentified
  misc_feature 1..462: note = Ga0114359_1005163 JGI
  source 1..462: mol_type = other DNA
atgcgaagaggacgtagaggaagacggattaaccgccaacttccttttaatctaagagcgcatcgacaaaaacgattttcaaatagaagaacaggaaaattagctccctcaatcagagctaatcgtcaacttgaacttcgagtcgtttctgaactaaccaaaatctatccaattactgacatttactttgagtatgtcaaaaccgatattgatctaacttccagtagaaaaggagctaagtctggaaaaggtttctcgccagttatggtcagacagaaatgggcgattgagcaactatctcaattggcaaaagtccatactcgctttggttggcaaacctctaatctcagaaaatatttgcgactagaaaaatccaaaaataaagcaaaacaatcaccagaaagtcatgctaacgatggcattgctaagagggagggagcatctcacctttgtaacccctaa

SEQ ID NO: 255 - DNA, 112 bp, unidentified
  misc_feature 1..112: note = Ga0114359_1005163 JGI
  source 1..112: mol_type = other DNA
gtcactaaccccgccctaaaagggacggggcttgcctagcttaatgcgaagaggacgtagaggaagacggattaaccgccaacttccttttaatctaagagcgcatcgacaa

SEQ ID NO: 256 - DNA, 873 bp, unidentified
  misc_feature 1..873: note = Ga0394881_0010240 JGI
  source 1..873: mol_type = other DNA
atgtctaattttgtctttgttgtcgatactaatggacaaccgcttaacccagtaccaccgggacaagcaaggcgattgttaaaacttcaaaaagctgctatttatcgacgttaccccttgacgctcgtactcaaatacacagtatccgctccccaaatacaaccccatcaattaaaaatcgatccgggtgccaaagttagtggattagcaattgtccgagacgacaaagtaatctggggtgctgaattaacccacaggggacaacaaattaagcacgataacgaagccaagggaaatcaggaacttaaagatttcttagcacagcaacctgagttgttcgagcgaatcgcaaaacaagccaaacaaccattgaaagatgcagcagcagtcaatagcacccgctggcaactctttaacagactgaaagaaacatcattaccagttgaaatcggaacaggcggtcagaccaaatacaatcgtactcgattggaattaccaaaaactcattggttagatgcagcttgtgtgggactcgtgtcccaattaaaaattttgactgccgggcctttgttaattcaagcttcaggatggggtagccgtcagatctgccagccaaataaatatggcttcccaatcagacacaagacacggtgcaaggaatttttcggctttaaaactggcgacatggtacaagcaactctgcctacaggaaaatttgcgggtactcatagaggcaggctaattgttcgagcgagtggagtttttgagatgatttcaccaacgggaaaagttagcccagtacgtcacaaatactgtagggcaattcaccataatgatggttatacgtatacattgtccacttgcgtccagtaa

SEQ ID NO: 257 - DNA, 242 bp, unidentified
  misc_feature 1..242: note = Ga0394881_0010240 JGI
  source 1..242: mol_type = other DNA
gctatccaccaaacagcagacaagagtggacaaccacttccaacgctcgagagatagccagcctcagttacaaactacgtttcgagggtcatgacacctacaggtgctttccagcttgtagccctgtcgtcaatagttaaacatccctatttggttaaggaagtgcgattggcatcacaagccctcaaaacattggcgaggaaaacattaccccgcaagggaggacatccatgtctaatttt

SEQ ID NO: 258 - DNA, 1242 bp, unidentified
  misc_feature 1..1242: note = Erysipelotrichaceae bacterium SG0102
  source 1..1242: mol_type = other DNA
atgacaagctatgcttttgtattggatgctgataataaacaattagcgccaaccaaagaacagaaggcttggtttcttattcgtaagaaacgagcaacattgctcagcagatatccaatggtaatacaactcaaaaagaaaatttcagatcaagaaatctgcaaagatgaaattcgttgtggaatagatgacggaggtcttcatgttggtgtcgcattagtacagaaatgtcagacgcgaaacaaagtcatttttaaaggaactattgaacagcgtaatgatgtaaaacatcttatggacgttagacgtggatttaggcgttatcaccgtgatcataaaagatatagaccagtgagatttgacaacagaaaatcctctaaacgaaaagggagaattgcaccaagtattttacaaaaacgtcaatcaacaataagagttatcaatcaacttaacaaatgggtaaatataacgaattattggttagaagatgttgctattgatataagagcattgacagatggctataaaccatatcggtggcaatatcaaaaatcaaatagactggacgagaatatccgtaaagctgtcattttacgagacggttgccaatgtatggaatgtggaaaatctaattgtagattagaggttcatcacattaagccaagaagactgaaaggttcaaatacgcttggtaatcttattacgttatgtacaggatgtcaccagaaaacagaaggtgtagaagaattatacatgaacagatacttcgctttgttaaattcttctgacaataagaacctgaattatgcacagcatgtaatgataggtaaaaaatggctgagaaaacagttatcaaatttaggaatgttacatttaaccaacggaggtgatacagccaataagcgtattgactggggtattgcaaaatcacattctaatgatgccatctgtatcacagacttgcggccagacacatgtgaaatcaaagaatgggtaataaaacctatgcgaagacaaagtaaggctaagacagataatgttcttggaattaaacatagggatttggttgagtacacttttatgaacggtgaaacacatagagggtatgtaacagctttatatccagaacaaaacgttcttaattttcaaagtccaacaaaacattgcaagaaagttaacgcaagaaaatgcaaagtgctttggaaatattctaagatttattggttagataatgttagttag

SEQ ID NO: 259 - DNA, 289 bp, unidentified
  misc_feature 1..289: note = Erysipelotrichaceae bacterium SG0102
  source 1..289: mol_type = other DNA
tacgtaaacatagacaggagtggacacattaagtctcttgtctatggcttaacaataggtttcgagcctaagtgactgctgctatcgaaagatatgttgcagatatgaactacattaagcagtaaggtaaagacacacctttagatgtaatcttcagtctgaagctctgtgagtgcaaaccaagaaacaatgctaatgtcctgcattgataacagggaaacacatgtcctctactcgatattggcacgaagagaaatactccgaaaggaaggtgtcagaaatgacaagc

SEQ ID NO: 260 - DNA, 753 bp, unidentified
  misc_feature 1..753: note = Ga0247609_10038159 JGI
  source 1..753: mol_type = other DNA
atgacaagttactcatttgtgttggatgctgatggtaaaccgttaagtccaacgaaagaaacaaaagcgtggtatatgatacgtaaaggtaaagccaaactcgtatcaaaatacccaatggtagtacaactgaatcggataatccctactgatgaaatctgtaaagatgaagttcgtggcggaattgatgacggtggtttgcatacgggtattgctgtcgtacagaaatgtcaaacaagaaataaagttttatttaagggtactattgaacagcgtaatgatgtgaaaaatcttatggatgttcgtagaggttatcgcagataccacagacagcataaaaggtatcgtgaagcaagatttgataaccgaaattcaactaaacgacaaggcagaatatctccaagtatcttacaaaagcgacaagccacaatgcgagtgatatatcatttgaataaatggataaatataacaacttattggcttgaagatgttgcaatagatataagagcattaacggatgattacaagccttatagctggcaatatcaaaaatctaatcgtttagatgaaaatatacgtaaagcggtaatacttcgtgatggatgtaaatgtatggaatgcggaaagaaaaatatcaaactcgaagtacatcatataaatccacgcagaaagaatggctctaatacgttaggaaatctgataactctttgtgaaaagtgtcatcaaaaaacggaaggtaaagaagaacaatat

SEQ ID NO: 261 - DNA, 291 bp, unidentified
  misc_feature 1..291: note = Ga0247609_10038159 JGI
  source 1..291: mol_type = other DNA
tagtcaaacatactcaaaagtggacacgattaagccttttgagtgtggacttagcagtaggtttcgagcctcagtgagtgctgacagtgaaaactgttctgcacgatgaactacgatagagaagtaaggtaaagatacacctgcggatgtactttcagtctgctgctctgtgagtgccaaccaagaaacaccgctaatgtcctgtggtgataacagggaaacacacgaccttctttctgtcattggcacgaaggaaaattctccgaaaggaaggtttcagaaatgacaagt

SEQ ID NO: 262 - DNA, 1305 bp, Moorena sp.
  source 1..1305: mol_type = other DNA
atggcggtctacgtgttggacaagcaagggcatccactgatgccgtgcagcgaaaaacgggccaggctgcttctggagcgtggtcgtgcacgtgtacatcgccagatgccgtttgtgatccggctgactgaccgcctgcagaccgaatcgcagtaccagccgctgtcgatcaagatcgatcctggcagcaaattcactgggatcgccgttgttcgccagcgggacaagcaggtctttgtcctgtcgctgatcgaattggtacatcgtggcgccatgatccaaaagacattgctgcaacgcgccggctatcgccgtggacgtcgcagcaggaacctgcgctaccgggcgccgcgcttcaataaccgtacccgcaaggccagttggctggcgccgagcttgcagcatcgggtggacaccacgatgagctgggtgcagcgcctgcgccgctgggcgccggtgactgatctggctgtggagcgagtaaaatttgatatgcagctgatgcaaaaccctgaagtcgcgggtgttgagtatcagcggggtgcgcttcaaggctatgaggttcgggaatacctgttagagaagtggggtcgcctttgcatgtattgcaacactcctaacgtcccactacagatcgagcacattcttgccagagccaacggcggcagcgaccgcgcttcaaacttgggcctggcctgcgacccatgcaatcaacgcaaaggaaagctgctgatcgaagtgtttttgaagaaaaatccagaattgctgaagcatattttggccagagctaagactacattacgcgatgcggcggcggtgaactccacacgcaacgctatattcgcatctctgtcagagaccggcctgccggtcgaggcaggtacaggaggtcagacaaaattcaaccgctgcacctatggcttgccaaaaacacatgcgctcgatgctgtctgtgttggggatatctcaggggttaaaaactggaaaattccgacacttgccgtcaaagcgatgggacgtggaaattatcaacgaacgcgggttttcggcagtggctttcctagaggatatctaacacggcagaaacggcattttggtttccaaacgggtgacatggtgaaagcaaacgtaaccagaggtaaaaaaatgggcatttaccaggggcgcattgcagtgagagcaactggaaaattcaacatccaacttcatgatcgtgttgttcaaggaatcaaccacaagtattgcgcaatcgtccaaagggcggatggctacggttaccagcaaataaatacagaagcttattaa

SEQ ID NO: 263 - DNA, 293 bp, Moorena sp.
  source 1..293: mol_type = other DNA
gtcaactaccccgccctgaaggacggggcttgctgaggaatcggtgagtcgggttgaccagggggccgagattttttcggcagatgtttgcaacaggtcgttgagacccactccggaatgcttcctcagttccggacactggaaattctagatcacgctggcgaaaggtaaagcgccgaaggttttggatgccgcgcaagcgggagccggttgcaaactccccgaggggagcgaggcctaaaaacctccgtcactaggcccgtaagggcataaattaggaggatcgcatggcg

SEQ ID NO: 264 - DNA, 585 bp, unidentified
  misc_feature 1..585: note = Ga0307373_10033165 JGI
  source 1..585: mol_type = other DNA
atgcaacatgttttggcgctggatgcccagcagcgtccactcgcgcactgccgcccggcccgcgcgcggctgttgctcacccagcgcaaggccgccgtcgttcggcgttaccccttcaccatccgcctgaagcaggcgttgccagcggcgtcttcgccgctgctccggctcaaactggatccagggagcaagacgaccggcttcgcggtggtcaacgacgtcaccgggcaggtggtgtttgccgcctcgaatcgggtgagcaatctcacgctcgcctgccatccctgtaacacggccaaaggcgcccagacagcggcggagtttggtcatccgaaggtccaggcgcaggccagcgccccgctcaaagacgctgccgctgtcaataccgcgcgctgggcgctctatcaccgcctcaaggcgggcgtgtatgtgggacggctagcggtgcgagcaaccggatcgtgcaacctcaagacggcgacagggacgattcaaggcatccatgtccgctattgtcagccgctccagcggggagatggctatgcctatgcgaaagggggcgcggcgttgcttccccacgcctga

SEQ ID NO: 265 - DNA, 295 bp, unidentified
  misc_feature 1..295: note = Ga0307373_10033165 JGI
  source 1..295: mol_type = other DNA
atcaacgacttcacgcagcagcggcaatagctgaccagtccccttgccgtctcggcggcagggagccgttcacgaggagcgcccaagctcctaccctgggatagcatctcagtcccaggccctagaatgctcaggttaaacagagacgtggggtatgaaactcagtgcttgagcaagatggccgctcgtgagccgggacgagggaacccttacctgcgcaagcagcgtcgccgcgtacggcgccccctcacgggggatagcacagacaagaaagcgacccgacacgatgcaacat

SEQ ID NO: 266 - DNA, 282 bp, unidentified
  misc_feature 1..282: note = Ga0118725_1008328 | JGI
  source 1..282: mol_type = other DNA
atgcaaaaagtatttgttttggatacaaagaagcgtccccttgcacctactcatcctgcgcgggcaagacaattacttaaaaaagggaaagctggtatttatattggaaccgtggcaattagaacttctggcagttttaatctcaagaccgacaacggcacaatacaaggtatcagttatcggtactgtcatttacttcaacgtgctgatgggtacaactaccaaaaaggaggaacggcacttcctcccaccccattcaatggggtgggtttccgtgcctaa

SEQ ID NO: 267 - DNA, 333 bp, unidentified
  misc_feature 1..333: note = Ga0118725_1008328 | JGI
  source 1..333: mol_type = other DNA
gtcaactaccctaccccttgaaggggtagggcttgtggctttgcgcggttacttcgtgaaccgcttagcaactcaagcccggagttgaccagctttagtcccgagaatcgggactccgttaggggtgaatatataggtaccgtcgcgatgcttcaccagtccgacgctctacggcaagtcgttaaacgagcatacgggtagaagccggtgcggcttgcatcttactgaacgatatttactttaggattcaaaaccacccactaacattggcaaggtgactgttactggaacttaggttctacgactgaaaggagactttcaccaatgcaaaaa

SEQ ID NO: 268 - DNA, 1365 bp, unidentified
  misc_feature 1..1365: note = Ga0247841_10001800 JGI
  source 1..1365: mol_type = other DNA
gtggctctgtggtctgtcattaaaagttctgagggtaggaacggtgtggcagacttaaaaaccttttccaacaacctcgatgcgtctctaactctgaaaggagaacgtaacttgagagtatacgttgttaatttaagaaacgaacctttaatgccaactactccacgaaaagcaaaaatcctgcttaaaagtggcgaagcatcggtattcaaaagaactccgttcaccatacagttgctacatgctagtggcgaaacaaaacaacctataacattaggtgttgatagtggatttcagaatgttggattatctgttataacagaaaaagaagaagtctttagtgcagaagttaagttgagaacagatatagtaaaactaaattcggagaaaaggcagtatcgcagggcaaggcgtaatcgcaagacttggcatcgtgagccaagattccttaatcgcaaaaaggatagtggttggttagcgccttctatacaacacaaattagattctcatatcaggttgatagatatggtaaagaagatattgccgataaccaagataaatattgaagttgccaattttgacatacagaagataaagaatcaagacatagaaggaacagattatcaaaatggagaacagtgtggcttctggaacgttcgtgagtatgtattgcatcgtgatggtcatatctgtcagcattgcagaggtaaatcgggtgataaaatcctagaagttcatcatataaacaccagacaaacaggtggagatagaccagataacttaataaccttatgtggtttatgccatgagaaagtatcacaaaataagttacaactcaaaatcaaagctagtaaaggatataaagccgaatcgtttatgtcaatggttagatggcgcttggttaatattataagagacattggagatattgtgtctcatacttatgggtatataaccaaagggaatcgaatagcactaggtataagcaaatctcatgctaatgatgcttttgtgatttcgggaggtactaatcagatacgtcttaatggttatttaatccaacaagtgcgaaagtgcaaccgcaaactctataaaggcatacgaagtcacatcaagaatacagccactagattcattaggggattccaacgttttgataaggtattgtggaaaggtgtattccctactcggcggagcagaggtgttgagtgtttcatatttggtcgtagaacatcgggctattttgacataagaagacttgatagcacgaaattaagtcaatcagttaaatatacggaattacgactattagagacatttagaacattttcactagaaaggagagtggcagactttcccgaataa

SEQ ID NO: 269 - DNA, 253 bp, unidentified
  misc_feature 1..253: note = Ga0247841_10001800 JGI
  source 1..253: mol_type = other DNA
ccatgatttgtgggtaaagattagcataaatgcggaggcttgcaaaagccttgattgactagagggtgtttaattacacagaagttggttaagagaaatacatacacacctacgaatattacgcaagtttgtggctctgtggtctgtcattaaaagttctgagggtaggaacggtgtggcagacttaaaaaccttttccaacaacctcgatgcgtctctaactctgaaaggagaacgtaacttgagagtatac

SEQ ID NO: 270 - DNA, 1299 bp, unidentified
  misc_feature 1..1299: note = Ga0194121_10011106 JGI
  source 1..1299: mol_type = other DNA
atgttagtgtacgttttgaacaaagaaggagagcctttaatgccctgtagcccttgtaaagcaagaaaactcctggcatccggaaaagcaaaagttgtcaaccgagagccttttaccattaaacttatgtttggttcatccggatataagcaaaaggtcactgtcgggtgtgatagcggttcgaaagtagctgcttttgcagcaacggtgagtaacaaaaccctttacgtatcggaggttaaattaagacaagatattagatccaacatggaccaaaggcgatcttttagaaggatgagaaggtctagaaaaactcgttatagaaagcctcgtttcaacaatagaaaaagggatggatggttgacgcctacagtgcaaagcaaagtaaactctcacaaaagggaactggcttacattaaaaaacttattcccgtacacaaaatcattattgaaaccgcaagtttcgatattcacaaaatcacaaatccagaggtctcctcttgtggttatcaagaaggaagacttaaggacttctataatgtaaaacactatgtattacatagggatcatcacacctgccaacaatgcaaaaaaacaaagcttgcgctgcatgtgcatcacattatttttagatctaatggaggaagcagctctccggacaaccttattacactttgtaaaaactgtcatgagactctacacggttcctctcaagctgaactgctctccaaaaaactcttcacaaaacttaaaagcaagcctacccttgatgccacgcaagtggctaccattggctcttttttgaaaaaagaggtagtatgcgaggaaacttttggttatgaaacaaaatacaaaagagagtccctaggcctgcaaaaaactcactaccatgatgcaatttgcattgcaatcaagcaagggcaacctatgcagattggggtgcctcttttaaaaaaagtacacatagctcaaggagattacaagctttgctcaggagatagatcagagaaaatccttcctacagggaaggttatggggattaagaaatttgacaaagtaaattctaatggggtaactgcttttgtcaaaggtagaatgtcgacaggttatgctatccttatggatatcgagggtcataagctaaatattaaacccatccccaagcttaaagaattaaaacgcgttgctgcaagaaaatcatgccttacaagtcttgttcccatcgaaaatatcttcttaggtaccacatcatcttggtcacaaaatacagaaaaccactcttttgcaatgagtccataa

SEQ ID NO: 271 - DNA, 306 bp, unidentified
  misc_feature 1..306: note = Ga0194121_10011106 JGI
  source 1..306: mol_type = other DNA
gtgaagctcccctagactaaagatctaggggcttcttagaaactaggaagcctacttcacaagaacacaaacaaaaggaagtaaaacaatgtttgtaaacgatagaacagaaaatataggcacttcaggatgccgactcagtcctgaactctgcgaattgcagttaaacagtcctgagggaagggacagtgctgcaattgtcaaacctgtttatatccgttcgagagtaagtcagaaaaagcatggccatccttgggtctgctttcttatgcataaccctagttcaagggggtgcactttatgtta

SEQ ID NO: 272 - DNA, 441 bp, unidentified
  misc_feature 1..441: note = GENOME_ACESSION: ElkSloMetagenome_4_$F_3300000354 JGI
  source 1..441: mol_type = other DNA
atgaaagtctacgttataaacaaacatgggcgtcccttgatgcccacaactcctagaaaagctagattgttactcaaaaatggtcaagccaaaatcgttggacgtgacccgttcactatccagttaatttatggctcctctgggtacactcaacctgtggacaaagggaagcgtcgggaattagagatagaaaaatctcaccataatgatgcttatgtcattgctggtgggatgactcagccccgtgtactcaagcctttgatgcaacatgacttagttctgtttgagggacgaatttatcctgttgtcggagtccaaaatttgggaactcgcctcagtttaaagccagagccaggatgcaaaaccaagtataaaactgcggcaatgaacaaggttaaacctttaaaaacaagaggaggaatctgtgagcaacaagcataa

SEQ ID NO: 273 - DNA, 319 bp, unidentified
  misc_feature 1..319: note = GENOME_ACESSION: ElkSloMetagenome_4_$F_3300000354 JGI
  source 1..319: mol_type = other DNA
ccgtcacgaacccaacgctgaccgatacgagcggtacagcgtgggcttgagagaaatcttaagccctcgtgattagcctcagtattccgacgaaagcaaggaatactacgttgatcggaaatacataggcaccgtgaagtacagggttggcaacccgtttcctagcttcacgccctgcggttttcattaaacattcctattgggtagggaaagtgtgaaaacatcaacatctcgactccgctcgatgttgaaactccgatgaacattggcgcaggaaaccacaccgcaaggtgaaaacctacttgttaggtctatgaaa

SEQ ID NO: 274 - DNA, 1275 bp, unidentified
  misc_feature 1..1275: note = Museum specimen metagenome
  source 1..1275: mol_type = other DNA
gtgtgccaaggtgacaacttatttcaacattggcgaagggaatctacgggagttatcccgaattacatttttaaaaataacaaaatggtttatgtgttagacaagtctggaaaacctatgatgccgacaaagcggtatggctgggtacgtcgtgctttgcgtgatggacgcgctaaggtagtcagacgtgatccttttacgatccaattaacctacgagccggacacacacgtgttgcaagacactacgcttggtattgacattggctatgagaacgtaggtacaagtgtgctaacaaaacaaaaggaattgtttagcggcaattttaagctacggacagacatccaaaagcgtttgtcatatcgtaggatgtacagacgaactagacgaggacgaaagacgcgttatagaaaagctcgttttttgaatcgcaaaaagtattatgccgacgctccgagcgtaagacacaaggtacatagccacgtaagaatcattaatctgataacatcaattttgccggtcaatcaattgattgtcgaggttgccaattttgatgcacaaaagattaagaatccagacattcagggtgaagaatatcaacaaggttgtcaattaggctatcagaatgtcaaggagtatgtaaagagtcgagattgtcaccgttgctactttaacacaggcaagtgtagcaaaaagctagaagtacatcacattgtattcaaaagtcaaggcggatcggatgctccaagtaatttgattactgtttgtgataagtgccataagtctattcacgatggtaaaaagccaaacccaaaagctagtaaatacaaatcactaagacctattagctttatgaaaacagtatctaagcgtctacaagaaatgctaccagacattgagtatacctatggttaccagacaaagcaaaaacggtataatctcaatctcggaaagtcacacgtaaatgatgcttttgtaattgcaaatggtacaagtcaggttcgatgtaagacaacgaattatgttttcaaaagaaaaaataacagacaattgggtaagctaagaaaaggctttgctccatcgagtagaaagcaacgttatccgatacaacctaaagatttagttgagtacgaaggaaaaaagtattatgctattggcacacattgtaaaggtaaaagagtgattgtgatgtacaacggcaaaaaaaaatcaatagcaattaagataataaaattattatttaaccaacgaagtttgttagccctcacgggctga

SEQ ID NO: 275 - DNA, 248 bp, unidentified
  misc_feature 1..248: note = Museum specimen metagenome
  source 1..248: mol_type = other DNA
atccacaccaagcgctaatgcgctatggaatgggtttgaaaaaacctggttgattagcctaagtcttaactgactacgttgaaataattatcataccctaggatgcttcccaagtcttaggctctatggttgagtattaaaagttctgatgggtaggaacggtgtgccaaggtgacaacttatttcaacattggcgaagggaatctacgggagttatcccgaattacatttttaaaaataacaaaatg

SEQ ID NO: 276 - DNA, 1338 bp, unidentified
  misc_feature 1..1338: note = Ga0170573_10661034 JGI
  source 1..1338: mol_type = other DNA
atgttagtctttgttctaaacaaaaatgcacaaccgttaatgccctgcgctccgcgcaaggcgagactgttgttgcgaaatggagaagcaaaagttgtaaacagaactccgttcgtgattaagttaaatttcggctcctctggatatacccaaccagtaggtttaagtttggacacaggggctaaaaatgcgggatttgccgcgacagcgaatggaaaggttttgtacacaagtgaggtaaagctgcgtacagacattccagaaaaaatgaagcaaagattatcgttcaggcgaactcgtcgcggacgcaatacacgctacagagcgtcgcgatttgataatcgctctagactggaggggtggctctctccaacgatgacttcaaaggttaattctcatgttcgagaaattaattttattaagaaaataatgccagtgaaatcaatggtcgctgagattgcgcaatttgatattcacaaaatcacaaatccagaagttgtaaatgacttaactgggaaaagttatcaaactggccgacaaaaggatttctataacacgaaggcttttattttatcgagagataattacgagtgtaaaaaatgctgcggcaagaaaaataacccaaaactccacgttcatcatattattttttgttcaaatggcgggacaaattcgccagacaatttaattacgctttgcgaaccgtgccataacgggattcatgcacacaagaccccagaaaaagaatcattaaaattttcaacagaaatcaagaagcaaagacacaccgcaagtgccgttcaagtttcaacggtcagttcgtatctgcaaaaaatatatccagaaatgaaattaacctacggatacgagacaaaatttaagagagagatttttggcgctaaaaaggaacattataatgacgcaatttttgctggacttgttgaaggtgaaatttgcgaaatgccaaaatcatattttaaaaaagttcatatcgcaaatggcgattacaaattaagaaatggcaaccactctgaacaagtaattccaactggaaaaattatgggatttaagaagttcgataagattgagtatctaggagaaaagtattttattaaaggtcgaatgtcgacagggtatgcaattttaatgaacgaaaaacacgaaactgtaaaattaaaaccgataccaaagttttcaaaaatgaaaagaatttctgcgaggaagtcgtgccttacaagtcagattgtcatcggaaattcactctcaaatatcacattatcttcgtctgcaaatacagaaaaaatctccttgcaagaaaagaagttggtgaatttatga

SEQ ID NO: 277 - DNA, 321 bp, unidentified
  misc_feature 1..321: note = Ga0170573_10661034 JGI
  source 1..321: mol_type = other DNA
gtgaaggctccgctaagctaaagacttagcggcttctataggaggcggaatttatttcgcctcagaccaagaagtacttcacaagaacaacaacagaagggttgagagaatgttgttaaacgatagaacagaaataggcactttgggatgtcgacttagtcccgaacaatgcgaatgcaagttaaacaacgataagagtaatcgcagtgcttgcattgttaaacctgttcatatcagttcgaaagtaagccgtgcaaaaacaaaattccttggtttgtttagtgcgcactactcgagtttagcgaggaagactttatgtta

SEQ ID NO: 278 - DNA, 951 bp, Moorena sp.
  source 1..951: mol_type = other DNA
atgttagtctatgtcattaataaaaatggtaatccattaatgccttgcaaaccagcaaaagcgaggaaacttttgcgcgctggaaaagccaaaatcgttaatcgttgtcccttcaccattcaattgcaatgggactgtgaagaaaatgtgcaacccgttacgttggggattgataaaggaagtcattacaccggtttgtgcagtgtgggttttggtcaaattttactttctggcattattaatcatcgcaccgatattaaagacaaaatgaccgcacgacgtggtaatcgctgtcaaagacgttatcgtaaatggtatcgtcccaaacgatttttaaatcgtgcaactagtaagcacagcggacgattacagccttctattaaagctaatgcagaagaggtaataagggttgtgcgtcaaattcctttgcccctcagtcaaattgtgattgaagatgtgcaagttgatattgctcgtctcaacaatcctgatttgcttgggattgagtatcaacgatctaatcgtttagatgaaaatcttcggatagccacattgatgcgagataaatatcaatgtatctcttgcggaaaaaaaaaggttcaacttcaagcacatcacatagtgcctcaaaatcaaggcggtaaggatacgattaaaaacttaataacgctttgtcaatcctgtcataataaagtacatcaaggccaaatcactcttcatgctgatggcataagtggttttaaagaccagatagcccaaagaaccatgcaaggaaaatcttttatttaccaaattttagaaaactttgccccggttttcaaagtgtttggttaccaaaccgcttcgtttagaaaatatttaagcttacctaaagaacatgatgttgatgctctttgtgtggcaaccttagataaaggaacaaaagtgcctctctttgtgtggcaaccttag

SEQ ID NO: 279 - DNA, 264 bp, Moorena sp.
  source 1..264: mol_type = other DNA
atcataatagttcctaaatctatagaataatgttctaaatatagaaatttattcctagacatggaactaacagtgggctacttgaatgagtcgcagaagttagataggccatcacaccttccgatgtgattccagtcggtcgctctgtggtctagtattaagggtagcggaaacgtgaaagtgtgctaaacgtaaaaaacctatttaacaaccacaaggagtacctcactctcactaacaggaggtcctaaagatattatgtta

SEQ ID NO: 280 - DNA, 1050 bp, unidentified
  misc_feature 1..1050: note = Groundwater metagenome
  source 1..1050: mol_type = other DNA
atggctgtattcgtactggacaagcacaagaaaccactaatgccctgcactgaaaaacgggctaggctgttactcgaacgcagacgtgcggtggtgcacaagatgtcgccttttactatccggctcaaagaccggacggtagaacaaagccaacttcaaccgttacgtctgaagttagatccaggtagcaaaactaccggtatcagcatcttacaagaagcagtgtccgagaaagcagatgtcgtctttttggcggagctgcgccacaagccgggcatcaaagagaagctggccgacagaaagacacagcggcggaatcgtcgcaaccgcaaaacacgctaccgcgagaaacggtttgataatcgtaccaggccaagcggctggctgccgccgtcgcttcaagcccgggttaatcaggtcgagaataccgtaaacaaattgcaaaagctgttgcccataaccgcaatcagcaccgaacatgccaaattcgacacacaacttatgcaaaaccctgccattgccggtatcgagtaccagcaaggcgaacttttaggttacgaggttcgggaatatctattagaaaaatggaaacacaaatgcgcctactgccgtaccgccgacacaccgctggaaatagagcacattacccccaaatcaaggggcggcagtgacagaatcagcaacctaacattagcctgtcgcccgtgcaaccaagccaagggcaacaggacggcagaagagtttggccaccctgaaatccaaaagcaggccaaattgccgttaaaagacgcggccatgatgaacgccacgcggtgggcattgtttaacaggctaaaagaaactggcctcccggtcgagtgcggtactggcgccagaaccaagaaacagcgtatagaacataaactcccgaaaacccattactacgatgcgtgttgcgtgggtgccggcaccccggcaaatcttgcgatcaggcaaaagtatgtttccatttggaaagcgatcggcagaggcaccaggaggatgtgcaacacagacaaatatggttttccg

SEQ ID NO: 281 - DNA, 265 bp, unidentified
  misc_feature 1..265: note = Groundwater metagenome
  source 1..265: mol_type = other DNA
gtcatagaccccacggctaaagccgggggcttagcatttgccccactatgaccagcctaagtcccacgaggactacgtttacttagccatgacaccctggggtgcttctccagctccaggcactgtcgtccggactaaacagcgagtaggggttgtacgagcagtgccccggacgcgacaagctaagctaacattggcgaggagagactaaaaatagcgttaccggccccttaaggggctccgaaaggagagaaaaagatggctg

SEQ ID NO: 282 - DNA, 1167 bp, unidentified
  misc_feature 1..1167: note = Ga0315276_10000018 JGI
  source 1..1167: mol_type = other DNA
ttgactagacagtttgtaactgaactcactggacgtggcagtccaaaagacgtagaggatgcttccctagtcttcttcctctctgtgagtcagtgtcgaagggacgtacaaacgagtttttcaaggttctcggcttactgcaacaaaaaccttgagttgaggagttcaataaagatgtttgttcctgttactgacaagaatcataaacccttgatgtcgactactccttcaagagcgaggaagtggataaagacaggcaaagcgacaccgtattggagcaaccaaattttctgtgttcggttgaatcaagaaccaagtgacgacaagaagcaaaagattgtgatgggtatcgacacgggcagcaaaagagaggcattcacgatcaagtcacagggtcatacatatctgaacattcttgctgatgcggtgacttgggttaaagatgctattaaaataagaagaggagcaaggcaggtaagacgtcaaagaaaaacgccataccgtcaatgtagatctaacagatcaaagagagaaattgcaccttcaataatatcaagatggcaactgaaattaagaatcatcaacagaatgatgcgtatctttccaatcacagattttgttgttgaagacatcaaagctgaaacaaagaaaggaaagagacgttggaacaaatctttttcgcctcttgaaattggaaagaagtggttctataatgaacttaggaaatttggtaatcttgagacacgacagggatatgaaacaaaggaactacgtgatacatggttattgaataaaacagagtcaaagatgtcattgtcatttgattctcataatgttgattcttgggttcttgctaattatcttgttggaggtcatattaaaccagataacaaagaaatcaaaaggatgataccaattcagtttcatcgaagacaattacatcgatttaagattgaaaaaggaggtgaaaggaaacgatatggcggtacgatgagtttgggatttaagaaaggaagtttggttaagaataagaagcatggtatttgttatatcggtggaaattcatatggtaaattgagtcttcattctcttaaaacaggaaagagactatgtcaaggagctaaaattgaagaaataaaatttttaacatattgtagttttagatga

SEQ ID NO: 283 - DNA, 335 bp, unidentified
  misc_feature 1..335: note = Ga0315276_10000018 JGI
  source 1..335: mol_type = other DNA
gtcactcatgagcccgggcagcgcatggaggtgaatgacgtcaaggacctggccaagcagctcgtgcggacactcggtgacaagaaccagatcctacgcaacgcgaagatcacgaaggacaacatcgcacagctcgtcaaggcggtgaaggaggagaagcgcttcgcggtggtcaacaaaaagcgcgtccttgttgaccgagctgacgcggtactgaacagccttcgcgagatgtacccggaacttgttatatgagatgcatattaaaacttattttaaaagaaagatgtaccctgaggtcaattacctagggtatttttttaggcacaaagaaa

SEQ ID NO: 284 - DNA, 1362 bp, unidentified
  misc_feature 1..1362: note = Ga0117909_1048905 JGI
  source 1..1362: mol_type = other DNA
atgcgtgtgtatgtaataaacaaaaacggtaacccacttatgccctgcaaaccagccaaagcaaggcatcttctacgggacggcaaggcaaaatttgtcaatcgaaaaccattcacaattcagttactttgggattgctcagaaaatgtgcaagacgttcgttgtggtattgacaagggatgcatggtaacgggtgttgcttgcgtaggtaatggagaaatcctgttctctgccaatatcaaacacagaaatccggtagcattacaacaaaaagacggttcaacgaaaacatttatacaagtgagagcagaaaggcgcaaaagtcgtagacatcgccacaaatggtatagaaaaccaagattcaataatagagcatcatcaaaaagatctggtaggttgccaccgaccattaagatgaatgtcatggaagttgtcagggttataaagaaaattcctttgccaatctcccatattaccgttgaagatgtccaggtggatattaggagattaagtacccctgacgtggaaggtagtaagtaccagcaatctaatcggctagatgagaatttaagacttgcttgtttaatcagggataattttacttgtcagaaatgtggaaaaaagaatacccgattggaagctcatcatgtaatttggactgctaaaggcggaaaagatagtatttacaatttgattactctttgtgaggattgtcatgagaaagtacaccaaacaggggaaagtagcaaagtcaagctcaaaagaaacaaagtagtaactggcatggatggattcaaggataagatagctgcccgaacaatgcaagggaaaactttgatgtatcaagaactggaaaagattgcgccgctgtcttgtgtatacggttatcagacttctgaatttagaaaagcattagatttacctaaagagcattggatagatgctatttgtgttgcctatttagaaaccggtgagattgttccattagatagtaataatcattattctatatggtttcgggctaaacaaaccagacgcatttttgacacgcaaccatcaaaaggtggaatgataaagcagtggcaaaagtacaaaggattagcaagtaatggcaaagattgtattttagtagacaaacggactaaaaacgttgttttaccagaaggctataccctttaccaaaaaggcgatgttattgacattttaggtttacagactgaaatagcttctatcaatggaaagggcaaaaggttttattattggatatatcagcctgatggaactagaaagtatgcttctgtatcccataagaaagtcaggttggtagaatatgctaagacactcatactatatctcaagtaa

SEQ ID NO: 285 - DNA, 303 bp, unidentified
  misc_feature 1..303: note = Ga0117909_1048905 JGI
  source 1..303: mol_type = other DNA
gtcaacaacccctcctgattcacagaatcagaaggggcttgctgaataactcggtaagccctgggttagaccagtccccttcatccttgactttgatgaaggagcagttacctgttgtatcacacctttgggtgttcttccagcctgaagctctgtggtttattcgtaaacagttctacggggtaggaacagtcggataagcgtaaaaacacgggtgaagacataggctttgtctatgtctgtaacaaggacgaggaggaacatactctttacacgtaggaggttataaaaaacataatgcgt

SEQ ID NO: 286 - DNA, 1266 bp, unidentified
  misc_feature 1..1266: note = Human gut metagenome
  source 1..1266: mol_type = other DNA
atgttgcaaaaacaagaatatgcgttagtattggatagtgatgggaataaacttgctccaactaaagtacagaaggcttggttcttaataagaaagaaacgagcaaaactaattcaaaggtatcctatggttattcaattaaccaaaaaagtgaatatgataaaagatggcacaactctagaatgtggaattgatgatggttctaaatatgttggcattgcattagtgcaaaagtgtaaaactaaaaacaaagttttcttcaaagggactattgaattaagacaagatgttaaaaagaaaatggatatccgtagagaatatcgtagatatagaaggagtcataaacattatagaccagcaagatttaataatcgtgtttctatgataaagaaaggactgcccccaccaagtattaaacaaaagaaagactcaataattagagttgtaaatagtttaaacaaatttgtcaatattgataatatccatttagaagatgtaaaaattaatattagagaaatggttgaaggcaagaaactttatggtgatgaatataatattccaaataaagaaaatgccaatctaagaatagcgactttgattagagataattatacttgtcaagagtgtagcaaaaaaacaaatttggaagttcaccatataattcctagaagtaaaaatggttctaatagtatttataatacaataacattatgtgcggattgtcatcaaaagacagaaggtaaagaatttttattcgctggtaaatatttaaggcaaataggaagtgattttcttaaaggtcttaattatgcacaacacgtaatgcaaggcaagaagtatttaagggctagattgagagaaattgtaaacttggacacaaccgatggtttaacaacttcagaaagaagggaaatgtggggtatagacaaatctcatagtaatgatgcagtttgcatcacaggattaaaacctaatgacatagaaattactgaatatactataattccacaaagaagaaagagtaaagctaaaagtaaagggttaaatgggtttaaacatcgtgatatagttacatatcatcacacaaataacatagattatattggtaacatcaccgcaatttatactgatggaacaaatacattgaatgtaaaaaccaaagaaaaacattttaaaagagtttcttacaaaagatgtaaattattttataggtttgataaaatttggtggttacaagataaatttatacaattttatataatttag

SEQ ID NO: 287 - DNA, 298 bp, unidentified
  misc_feature 1..298: note = Human gut metagenome
  source 1..298: mol_type = other DNA
tagaaaaatatatgataaagtagatgcttggcctttattacatagattttctaacaggtttcaagccttagtgattgtcaatattgaaaaatatttggctgatatgaactgcattgagagaaaaagttaaagacatacctttagatgttatctccagtctgaagctctatgaactccaaccaagaaacatatctaacatcttgatatgataacagggaaaagtaagaactcctcttgatttgggcaaggagaaaatactccgtaaaaggaaggtgacagagatgttgcaaaaacaaga

SEQ ID NO: 288 - DNA, 921 bp, unidentified
  misc_feature 1..921: note = Human gut metagenome
  source 1..921: mol_type = other DNA
atgtccgttgctgtgattagcaaaactggcatagtactcatgccaacaagtgaataccgggcacgtaagctgctggactccgggaaagcaatcatttatggataccgtccattcacgatccagctaacagaaagggaaaccggtgatgttcaaccggttgaactctgtgtggatacaggatatatccatattggagtatctgtaaagtcagaaaagcacgaatatctgggattacaggtcgatacattaactgacgagaaggcaaaacacgatgaccgccggatgtaccgcaggcaaagacgaaaccggaagcgataccggaagtcgcggtttgataaccggaaacggaaatctggctggcttgccccgtcactggaacataagaaagagatcaatctgcagatcataactgctatctgtggagtatatccaattgcagacatcacgctggagatgggaaactttgatacgcaggttctgaaagcaaaggaagaaggtaagcagataccgcaaggaactgattaccaacatggagaacggtatggaattgcaacgctccgggaagccgtctttacaagggatgggtataaatgccagtgctgtgatcgaggcatcaaagatggcgcaatcttgcacgctcatcatatccagtatcggagtcagggtggaaccaaccggatgtccaatctgatcacggtatgtgaaaagtgccatacaccagccaatcataaaccgggtggaaaactgtatggttggaagccgaaaattgcttcgttcaaggacgcaacttacatgacagcagtccggtggcaactgtatcgtaaagtgaaagagatgttcccggggatccatgtcaaaattacctatggagcagaaaccaaggaacgccgtagaatcctggatatcaaaaatcccatgtga

SEQ ID NO: 289 - DNA, 418 bp, unidentified
  misc_feature 1..418: note = Human gut metagenome
  source 1..418: mol_type = other DNA
gtcaacaaccccgtctgaaataaatttcaggcggggcttataaaagatctgattttttattggatcttagtcccgtcttaggtttattgatggcgacgaccgcaaggccgtaaatgattagcctcagtgcaacgaaaccggtcagaccagacacggtgaatcattagcactacgttaccggtaaaattaggcactccgggatgcacctctagtcccagaccctgcggtatcttattaaacatctctgagggtaagagaagtgtgagatacgcgaaactaccggataacattggcgaagaggaccaccgattctgagtaggtgcttgtaccgaaaggatagagaacctgtatgggatacctaggatatctgatacagaaggcgtaagccaaatttcaggaaggaggacagcttatgtcc

SEQ ID NO: 290 - DNA, 1278 bp, unidentified
  misc_feature 1..1278: note = Ga0074469_10883752 JGI
  source 1..1278: mol_type = other DNA
atggtttatgtactatcgcaaacaggcaaaccgttaatgtcgactgagcgacacggaaaagtcaggcgcttgcttaagtcgggcagagcaaaggttgtcagtcggacgccgttcactatccagttgctttacgagactacccaacatactcaacctgttactctgggcattgatcccggatataagaatgtgggtttatccgcagtgacagacaagagcgaggtcttcagtgcagagactaaagttaggacggatattccgaaattgatggaggttaggaaacagtatcgcagagctaggcgcaataggaagaccaggtatcgcaagcccagattcaacaacagggtacgtactaagcataaggggtggctagctccatcagtagaaaacaagatggatgcacatatcaagctgttaaaattggtgtgttctatactgcccataagcagtattgtgattgaagccgcccaattcgatatgcagaaactaaagaaccccgaaaccaaatggactgactaccagcagggagagcaagctggcttctggaatgtgagagagtatgtattatggcgtgatgcaaatacatgccagcattgtgaaggcaagtcgaaagacgttatcttggaagtccatcaccttgagagtagacggacaggcggggatcgacctgcaaacctgttaacactgtgcaaaacctgccataataggtatcataaggacggttttgaacttccaaagcccgggtgtggattcaaagcagcggcgcacgcaaacataatgcgctggaagttatacgaacgcgcaaaggcgttaggcttccctgtaaagataacgtatggctatcaaaccaagtgcagtcgcatatcacaaaagctggagaaaagtcatatcaacgatgcgtttgtcattgcaggcggcagtggtcagctacggaagcaaggaggattccagtttcggcaggtacggaagcagaatagaaagctatacaggggtatcagaagtcacgttaggagcaaattggctagagttctattcggattccgtcaatgggacaaggtgagatacaagggtcaagagtattttattaagggacgcagatcatctggctatttcagcttatcggatattcatggccaaagtgtttcactggacggcaagaaactagatggtgttaagtattcagaactctgtttagtagaaagagcatcgactttattatcaaggaggagcgacttcctctccccgatgaatcggggagtatccgtcgctgatattcta

SEQ ID NO: 291 - DNA, 250 bp, unidentified
  misc_feature 1..250: note = Ga0074469_10883752 JGI
  source 1..250: mol_type = other DNA
gtcaactacccccgcataaatgcgggagcttgtagaaagcttctggttgactagcttaagtgcttcgagcactacgttggttgggtcaggataccctggaatactcctctagttccaggcactatcgttaggcattaaaagctctgagggagtcggagcagtgtgtttagcgtgtaagccctaccaacattggcgaagaggacacaacagatacctcggtatctgatttatccgaaaggattctcctatg

SEQ ID NO: 292 - DNA, 819 bp, unidentified
  misc_feature 1..819: note = Ga0209253_10060444 JGI
  source 1..819: mol_type = other DNA
atggcagtctttgttttggaccgcagcggcaagccgctgatgccgtgttcagaaaagcgggcgcggctgctgctggaacgcggccgggcgcgggtgcatcggcgcgtgccgttcgccatccgcctgaccgaccggcgtgtggccgactgcgagaggcagccgctggcggtgaagctggacccgggcgcgaagacgacgggcatagccgttgtgtgcacgacgggcaaagcggtggccgtgcttggtctattcgaattgcagcatcgcggcgacgcgatccgggacgcgctcacgtcacgcagccagaaacgccgccgtcgccggggtgcaaacctgcgctaccgcgcaccgcgtttcgacaatcgccgtcgtcccgacgactggctcgcaccgtcgctgcagcaccgcgtcgataccgtgctgacgtgggtgcgcaggttccaacgatgggcgccgatcgacagtcttgccgtcgagcgcgtgaagttcgacatgcagttgatgcagcacccggacatcgccggcattgagtatcagcagggcacactctccgggtattcggtgcgcgagtacctgctggagaagttcggccgccagtgcgtctactgcgatgcacagagtgtgccgctggaaatcgagcacgttgtgccgcgggcagccggcggatcgaaccggccgagcaatctgacgctggcctgccggccgtgcaacgcgaacaaaggatcgcgtccggtcgagcagttcctgaacgggcagcctgaccgtctggcgcggctcaaacgccagttgaacgcgccgctcgcggctgccgccgcggtg

SEQ ID NO: 293 - DNA, 293 bp, unidentified
  misc_feature 1..293: note = Ga0209253_10060444 JGI
  source 1..293: mol_type = other DNA
gtcaatcactccggcctgaagtgaaggccggagcttgtggggggtcactccacggctcgggattgaccagagaaagcggtaaccaacccgctacgttatgtagaggttcaagacccaccggcgaatgcttcctcagttcgccgctctggaacctgcgaccgcagacacgcttcgggtaagcacgaaacgggtcgcaaggatgtgccgctacacaacattctcgaggggagacagccgaaaggctgcgtaacaaggcccgtaagggcagcaacacaggagagattgccatggca

SEQ ID NO: 294 - DNA, 1266 bp, unidentified
  misc_feature 1..1266: note = Ga0172378_10009394 JGI
  source 1..1266: mol_type = other DNA
atggtttatgtaattaacaaagacgggagtccgttaatgccttgcaaacctgtaatcgcaagattacttttaaagcagggtaaggcaaaatgtatcaagagaacgccttttacaatcaagttattgtatcaggcaacatcgtacactcaacatttgacattgggaattgatactggtagcggtacaatcggaactgcggtggttgataacgataaccaagtggtttacgtgtcgcaagttgaagtcagaaatgatattaacgacaaaatgacacagagggcgaagtacagggtgaacagacgaagcagaaaaaccagataccgaaaagcacgttggttaaacagggcaaacagtatcagaaaagaccgtttttcgcctacaatgacaagcaagattaattcacacttgaaggaagtcaagtttgtaaattcgatattaccgattagcaaaataattgttgaaacggcaacatttgatcctcatgccttaaaaaatcccgccgtcctacaaaacaagtggttgtatcaaaaaggcgtgaattacggttttgcaaacactaaggcgtatgtattggacagagataggcacaagtgtcaatattgcaaaggcaaaacaaaggattcaaggttgcatgttcatcatattacattcagacgaaacaaaggttccgataaacctgaaaaccttgtaactttatgcaagacttgtcatgacaagttgcacgccggggaaattatattaaagacatacggcaaaactaagaataatttaaaacatgctacgcagatgaatagtatacggattcaattattaaagtgcttgccggatgcgcaggaaacattcggatacataactaaggaacatcggcaattgatggacttgccgaaagaacattgttttgatgccgtggctatcgcttgtttgaacaatatctccaatgacgggttgttgagtgtagattttaaaagcgacaaaataattttaaagaagtgcataccagatggagattatcagcagacaaagggcgtgagaagcgaacaaaggattccgacgggtaaaatacaaggatttaggaagtttgacaaggttatgtatttaggaaaagagtatttcattaaaggtaggatgtcaacagggtatgcaatattgatggatattaacggtaataaggttgattcgaaacctattcctaagtttgacaagatgaaacgaataagatcgagaaaatcatggatggtgagcgacgcattcatccctcacttatag

SEQ ID NO: 295 - DNA, 302 bp, unidentified
  misc_feature 1..302: note = Ga0172378_10009394 JGI
  source 1..302: mol_type = other DNA
gtgaactaccaccacttaacctgaaggtttgaagtggtggcttctacggaagcctaagttcaccggactaagttggtagaaatatcagctacgttgaaacggttatgacacctacggttgacgcaccagaccgttgctctgtcgcatatgtttaagtagagccgaggtaaggttcggtgatatatgcatgtaagccgtttcaacattgtcgaagtgaagtcggattccttgcatggttacagtgcaaggatacgcacgacttaccgaaaggcaaagtattttctgaaaggattcacaacatg

SEQ ID NO: 296 - DNA, 447 bp, unidentified
  misc_feature 1..447: note = Ga0137388_10019024 JGI
  source 1..447: mol_type = other DNA
ttgagcaaagttttcgtcgtcgacacgaataagcagccacttgatccagtccatccaggacgagctcgtattttgcttaacactggaaaagcagcgatctacaagaagtttccattcacaattattctacaagaagaaatacatgatccagaggtaaaagagctgaggatcaagattgatctaggaagccgggtcacgggaattgcaattatcaatgatcagtcaggtgaagtgatttttgcagccgagctttcccatcgcggacaagcgattaagaacaagaacacgggcctgcatatcggacgagtattaacacgtgcaactggatcatttgatatgacaacgcgggctggacgtgtcggtaacgtcaattcccaatattgccgacctatccatcaaagggacggctatagttatcagaaaggtggcgggctctccgttcgctag

SEQ ID NO: 297 - DNA, 296 bp, unidentified
  misc_feature 1..296: note = Ga0137388_10019024 JGI
  source 1..296: mol_type = other DNA
atcatgaaccacccactgaaaagcgggagcttgtagtgacccgaaaggggaactacaaacccaacatgaccagactcagtgctagggcttgtctccagcactccgttaggagcgaaactaggtacgttgggatgcgcggccagtcccaacctctacggtagcaggttaaacatctctacagtggttaaggaagtgcttgctacgctaaaccgctccataacgttgtcgaggccaacatcacctgggaaaccagaggctcaatgaggagcaaatacaggagtatacacttgagcaaa

SEQ ID NO: 298 - DNA, 1146 bp, unidentified
  misc_feature 1..1146: note = Ga0126377_10033159 JGI
  source 1..1146: mol_type = other DNA
atgagaatagccgttttagacacagccaaaaaaactctggcgccgacgacgccgcgccgcgcccgattgctgttgaaatcgggcaaggccgcggtgttcaagcgctatccgttcacgatcattctcaagcgagagatcgaaaaccccaccctgcccgacctgaagttaaagattgatcccggctcgaaaacgaccggcgtcgcgatcgtcaaccaagaaagcggcgaggttgtcttcgcggccgagatcgagcatcgcgggcaagcgatcaaatccagactcgatgcgcggcgctcgcttcgccacggacgccgcgccagaaagacccgctatcggaaggctcgcttcgacaatcgaaggcggccggaaggctggcttccgccttcgctcgaaagccgcgtcgagaatgtccatacctggacgcgcaggctcattcgcgtgtatccgatcagtggcatcgcgatggaactcgtcaaattcgacacccagttgatacagaaccccgagatcgaaggaattgaatatcaacaaggcgagctccagggctttgagctgcgcgaatacgtgttgatcaaattcaatcacaaatgcgtctacgccggcgacgacagtccctgcgatcacgccctgaacgttgatcacatcatccccaggtcgcgcggcggctcgaaccgcgtcagtaatctcgtttgcgcctgccgcaagcacaatgaagagaaaaacaatctatcgctcgaagaatacgggcgcatgcgaggcaaagactttgcccatgtgaaggcgctggcaagagcgccgttgaaggatgccgcggccgtcaacgcgacgcgatgggcgctcttcaaccggctcaaatgcagggagttgccgatcggaacaggttcgggcggactcacgaagttcaatcggaggctgagaggattaccgaaggcgcattggatcgacgcggcttgtgtcggcaaggagacgcctgaaaagctcgacatatcaaacgttcacccgctccggatcaaggcgatggggcatggggcgcgtcagatgtgccgaaccgataagtacggcttcccgaaagcgcaccggacacacaagacgatgtttatgggatttcaaaccggcgacgtcgtgaaggctgacattccaggtgga

SEQ ID NO: 299 - DNA, 297 bp, unidentified
  misc_feature 1..297: note = Ga0126377_10033159 JGI
  source 1..297: mol_type = other DNA
atctgctacgccgcgagcatgagaatgcttacggcgggactcaacccgactaagcgtctctcgcaagagagcgtcgtgagcgtcacacacgtcgagctacgatctttgcgaataaatagtcactctgggatgcgacgccagtcccagactctgaggcttgcgattaaacaggcgacaaacgcgaagcccgtgtcgcaggcgaacaaaccgcaaaagatcattgtccaggcgaacatcacgtgacagcgatgtcacgccgaaatcgaaagatttccttttgaatatgagaatagccgt

SEQ ID NO: 300 - DNA, 1407 bp, unidentified
  misc_feature 1..1407: note = GENOME_ACESSION: mgm4581772.3 MG-RAST
  source 1..1407: mol_type = other DNA
atggccgtactagtgttggacaagcgcaagtgtccgctgatgccttgcaccgagaagcgtgcccggttgctactggatcgaggtcgggcggtggtagtgcgaattcacccgttcacgatccggttgaaggatcggatcggtggggccacccagccggtgcgactcaagatcgaccccgggtcgcagacaaccggcatggcgctggttcgagtggatagcgatggcaccaagcatgttctcttgctcgcagaactccgccaccgcagctatctcatcagcaagcaactgacccagcgccggtaccgtcgaaagcgtcgcagaagcaagctacggcatcggccagccagattcaaaaaccggtcccgcccacagggatggttgtccccaagccaacaacaccctgtcgacaacgtcatgacttgggtcgagcgattccgacgctgggcgccgatcaccgacatcattcgagaagtggcacggttcgacaggcactgccgggagaccctgggcatcgatgacatccggcagcaaaacgccccccagctcagaaccaccagtgtgcgagagcgcctactgcatctgcacgatggcacctgtgcctactgtgaagggctgtcaggtgaaactcgcctggaagtagagcatgtgcaaccacgaagccgaggtggcagtcagcgcctagcaaacctggtgatcagttgccggagatgcaacgaagacaagggtggccggaatgcggccgaatgggccgaggcattggccaggtctcgaagcaggctgggccagacgcgccatcgcaatgccatgctggtcaatgccggccagcgacctagcggtcgagaccctgcggcagtccatcgcaccagctcggcactatccggctacctgaaagcaacgggcctgcccttgtcttctggacgcggctggctaactcaggagaatcgtcgacgccttgggataccgaagacccatgcattggatgcagcctgcgtcggtctagtcgacagcctggtgggctggaggcggccgacccttggtatcacggccgcgggccgagggagctatcggcggacaaacgtggaccgtcacgggttcccgaggagctaccggccccggcgaaagatgtcacatgggtaccaaaccggtgaccacgtacgagccaccgtgccgaccggaaagaaggcgggcactcatgtcgggcgggtagcgatacgtgccggcaggcaggtggacatagtgacagccaccggacgtgtacagagcatcagttatcgccactgccgcctgatccagcgggccgacggttatgggtacgccactcttccctcaccacggatggaggaagccgggctagcgaagtgcaacgaacccgccctcctcaccaccctattcgttcgaccgaagtaa

SEQ ID NO: 301 - DNA, 291 bp, unidentified
  misc_feature 1..291: note = GENOME_ACESSION: mgm4581772.3 MG-RAST
  source 1..291: mol_type = other DNA
gcctactgccccgccgtgatcggcggagcctgtgaacaggctgggtgggccagggagagcggtacccaacccgctacgtcggcaacaggtcgttgcgatccactccggggtgcttcctcagccccggaccctggaaggtgaggtcatgctggtgaaaggcaaagcaccgaaggctgacaccgctgccgcaaggcaggagccagttgtcgacattcccgaggggagacggagcacttatgctccgcgtcacaagcgtccgtaagggcggagatcaggaggtatggcatggcc

SEQ ID NO: 302 - DNA, 1647 bp, Moorena sp.
  source 1..1647: mol_type = other DNA
atgactacgtttcatacaggtgagcagacccaccctgccgtacttcctcagcggcaggctctggaacccacggctgcagacaaccccgggagctgggacgaaacgggccgtgagcgcatcacccgccagggtgatgcagccggtatggaacatgggcgaggggagaccgtacgcacgtcacctcccggcgtacggcgacaccccgacgctgccgcgtccgcggtagtgaagggaggagaggctgttcgtgagagcagcattccgcaggcaggagcgagtcaaccgagggcaggggcacaaatggtcgccgtcctcgacaggaacgggtgtccgctgatgccctgccatcccgctcgagcccgcagactcatggccggtggccgggcggtcgtagtgaaaaccgcaccgttcgtcatccgtctgaaagaccgcgttgcggagagctccgaggtatccggcgttgcggtacgcatcgaccccggttcgaagggtacgggcatcgccgtcaccgccgatgtcgagtgctccgaccggggcagcggtgaggtcacgacaagtcgccgggggctgcacgcaacggaactccagcaccgtggcgcacagatccacaagagcatgcgacagcgggcggatcaccgccgcaggcgacgcggcgcgaatctacgctaccgggcgccccgatttctcaaccggtcacgtcccaagggatggcttgccccgtccctgcagcaccgggtggacacgaccctgagtaccgtcgctcggctcacaagatggttcccggtcactgaactccatgtcgagcgtgctgctttcgacaccgcggcgtttggccttgatcgtggcggcccgaacagtgtggagtaccagcagggcgctctcgcgggatacgaggttcgccagtacctactggagaagtgggatcgctcctgcgcctactgcggagcgaagaacgtcccgctccagatcgaccacatccaccctcgcgctaccgggggctccgaccgcatcagtaacctgaccctcgcctgtgcttcctgcaatcaggacaaagccgcgcgtccggtggaggagttcctggccggcaggcccgtgcagttggcgcggctcctcgccggagcacagacgccactgcgggacgcggcagccatgaacgccacccgctggaagctttggcaggccctcgagagcctggggctgcctctgtccgcgtggtccggcggacggaccaagtacaaccggtcgatgcagggcctcgcgaagtcgcacacactcgatgccctcgcggtcggcgaggccggccccagcacccgggttgtccgataccccggcacagtactggtcacctcagcgtgtgggcgcggctcctacgcacgcacgcgctcggacaagcacggcttccccaggctctacctgccacgtcagaagcagcaccacggttttgcgactggcgatctcgtccgggcccacattccacgcggcaagtaccgaggtacacacaccggtcgcgttgctgtgcgtgcttccggcacccaccgcatctccatccctggcgggtacgccgacaccagccacagcaacctgcgccttcttcaacgaggcgacggatacgcctacaccatgaggaaggaggacgcgcggccttag

SEQ ID NO: 303 - DNA, 291 bp, Moorena sp.
  source 1..291: mol_type = other DNA
gtcagccgctccccggccgaagaggccggggcccgcccgcccctagtgggcgagtccctggttgaccagcccgagtcatcggtgaacggaggtgttcgatgactacgtttcatacaggtgagcagacccaccctgccgtacttcctcagcggcaggctctggaacccacggctgcagacaaccccgggagctgggacgaaacgggccgtgagcgcatcacccgccagggtgatgcagccggtatggaacatgggcgaggggagaccgtacgcacgtcacctcccggcgtac

SEQ ID NO: 304 - DNA, 1440 bp, unidentified
  misc_feature 1..1440: note = GENOME_ACESSION: GCA_009843725.1_ASM984372v1_genomic
  source 1..1440: mol_type = other DNA
atgccgggtcaggctcgaaacggggcgaaccgcagcgcgggcggtcaggttgtgcgaggggagtccggcgcaagccgcgtcttcgtcctcgaccggtggggcgacccgctgatgccgtgccatccggcgcggacgaggacgcttctgaggaaggggcgcgccgtcgtggtgcgtctccatcccttcaccatgcgcctcagggacaggaccggagggaagacccaggaggtcggcctcgggatcgacccagggtcgaagaggacgggcattgcgcttgtccgtagcgacggcgaggtcctgtcccttgccgagatcgagcacaggggaaatagggtccggaaactgatgcttcggcgcgcggcatgtcgaaggcggcggcgatcagccagcctgagataccggaagaagcggttcctgaaccggcgctcggggagacggctcccgccctctcttcagtcgcgggcggacaacgtgctgtcctggtcggcacggttcagcaggcttgcgccagtgaccgggatccggtgcgagacggtgcgcttcgacatgcaggccatggacagccccggcatcgagggcgtggagtgccggcaggggacgctcgccggatacgacgccaaggagtgccttctggagaggtgggggcgcaaatgcgcctgctgcgacgcgtcaggcaaaccgctccagatcaaccacgcctggccgaaagccctgggcgggtcccgccgggtttcgaacctgacgctcgcctgtgcgtcctgcaacccggccaggggatcgcggtccgtggagaccttgctggccggccggcccgatcggttgcggaggatcctggctgaggccagggcgccgcttcatgacgccgccgcggtcaatgcagcccgtcgcgtccagttcgaggctctggagcgaacggggcctcctgtcatcggcttctcagggggacgaacgaaggtcaaccgggcgcggctggggatccccaagccgcatgcgctggacgcggcctgtgttggcgagacgtcttcgctttcgggctgggaccagcccgtgttcggaatcagggccatgggccgggggacccatgcacggacccgcgtcatgcgcttcggctttcccgtcggctgcctggcggcgcgaaagtccgagatgggcttccggacgggggacgtcgtgcgcgcggccgcgcccgcgggcacgcggcaaggccttcatgccgggcgcgtcgcggtgcgcgcctcgggctccttcaacgtccagacggtcagcggcaccgtccaggggatctcccgccggcaccgccgcatcgccgagcgcgatgacggttacggataccacatcgacgcgtcacggaagaaggggactgcgacgatgcacggaacacggaatcccgcattcctccccgcccggaggtgcagagtttcctgcgggtcggaccgatga

SEQ ID NO: 305 - DNA, 247 bp, unidentified
  misc_feature 1..247: note = GENOME_ACESSION: GCA_009843725.1_ASM984372v1_genomic
  source 1..247: mol_type = other DNA
gtcagcgacccctccctgaagggaggggcttgaggggcggaagccccgagagcccatgctgaccagcgcgagaaaggagaccatcatccaatctaccctgaaccatacgttgaagaccgaccctgggatgctgcctcagtcccaggctctcgaaggttcgcctgcagacatgccgggtcaggctcgaaacggggcgaaccgcagcgcgggcggtcaggttgtgcgaggggagtccggcgcaagccgc

SEQ ID NO: 306 - DNA, 540 bp, unidentified
  misc_feature 1..540: note = Ga0376441_00010 JGI
  source 1..540: mol_type = other DNA
atgcaaaaagtgtttgttttaaattcagagaaagaccccctgatgccctgccatccagcaagggccaggcaattgcttaggactaaacgagcaaaggtgtttcgcaggtatccttttgtcattattttaatcgcaaaaacaaccaatgcaattcaaccgattgagattaagttcgatcccgggagtagaacaacgggagtatgtgttggggaaacaggtgagaacgttttaatccagaaaaccacgttgccgatcttaatcaaggccatgggaagaggatccaggcaaatgtgtcgggttgatcaatttggatttccccggacaggcgcaaagtctgcaaaaaccgtcaaaggattccaaactggggaccttgtaaaggcaattgttaccaagggaaagaaaattggcatatatactggtcgagtagctgtacggacatctggtagtttcaacatcaagactggatcagaaacggtgcaagggattagttggaaatactgtaatctaattcaaaaaacggatggttatacttatgggtaa

SEQ ID NO: 307 - DNA, 278 bp, unidentified
  misc_feature 1..278: note = Ga0376441_00010 JGI
  source 1..278: mol_type = other DNA
gtcaactaccccgccctgaaggacggagcttgtagaaagctctcatgttgaccagcctacgaagtcttgaaacaaaggctacgttactgaagaatatataggtactttggaatgctcttccagttccaaacactacggataagtgttaaacaggtttaaggggttaagccggtgctcttatcaaacaaaccttcggataacattggcgaggaagtatttaccggcttaaacgccgagcgacaggtaactgtcaatttaaaggatgtttgatgcaaaaa

SEQ ID NO: 308 - DNA, 1290 bp, unidentified
  misc_feature 1..1290: note = Human metagenome
  source 1..1290: mol_type = other DNA
atgttagtgtatgtattaaaacaaaacggacaaccttttatgccaacagaacgctttggcaaggttcgtagattattgaaagaaggaaaagcgaaggttgtccgtagagagccattcaccatcaagttgctttatgaatctgaaacagatgtggttcaggaatgttactgtggtgtagatacaggctcaaaatatgttggtgtagcggttgttggaaatgacaaggtgttgtaccaatctcaaacagaattaagaagcgacatcaaaaagaagatgggccgtagacgtggttttagaaaagtaagacgctcaagaaaaacacattacagaaaacccaggtttttaaatagaagaaattctatcaaaaaagatagacttccaccttcagtaaaacataaagttcaggctcacatagatgagatagagttctgtaaaaagattttacctgtttcagacttaattttagaggttagtcagttcgatatagctttgatgaaaaatcctagtttaatcaatgagagagtaaaacactggagctatcaacaaggtttcaactatggctattcgtctagaagaagtgcgattcttcatagagatggttatacttgtcagtgctgtggaaagaagaactgtagattagaggttcaccacattaaatttagaagtgatggtggtacagatgatgaagaaaatttgattactctgtgtgaagattgtcataaaggtattcatgcaggtactatagtcttgaacaagaaacctaagaagaataagaatttgaaatacgctactcacatgagcataattaggagttggttgttgaagaaatatccggacgctattgaaacctttggttttattacagcagaaaataggaatcacttaaaattagaaaaagaccattatatagacgcttgtgtaatcgcaagtggcggattagagttcaaaatgttagatgtgatttatagaaaaagacgtgttccggttcaagataggattttgacaaaaggtgttcgagatgaaagaaaaataccaactagcaaaattcatggatttaagagatacgacaaagttaaatatcttggagaaattcatttcattaaaggtagaaaaagtattggagcgtttgttttgatggatattgacaacaactctattgattttagagatagaggaggaaaacagaatccaccatataggtttatcaagagattaaacacgagaagaagtgttttatgtattaaagaaaaaatagaaagagaggtaaggcttattcctgtattaagctaa

SEQ ID NO: 309 - DNA, 332 bp, unidentified
  misc_feature 1..332: note = Human metagenome
  source 1..332: mol_type = other DNA
gtaaatatgcactaggttaaaaacctagtaccattaaggtacgattgtttacaagactaaggttagagaaatttaacctacgatagttagatgaaacacatacacaccctcggttgaatgctcaagactgaggctctgtgattactgattaagttgagttgagagtgctaaaagaactctgtgtcagtaatttcaaaactctaattatctttgtcgatgagaagaccgacaccaactttggtaacagaagttggttaggcgctacagttcgataagtactgtcttaaagagttaaacttgtcatcaacgaaaggaattgaagtgtgatgtta

SEQ ID NO: 310 - DNA, 1593 bp, unidentified
  misc_feature 1..1593: note = Ga0307374_10008841 JGI
  source 1..1593: mol_type = other DNA
gtggctacgttgcaagcaggcgagaagacccaccaagggatgcttcctcagtcccttgctctggaatccgcgccagcagacactcccaggggtgggcacgaaacggggcgcggaggcaggccgagacggcctgcaaccggcttgcaacttcgtcaagaggagactgccttgggccacaccgcccaagacggcgtcaccccccaacaggagaccgctcctggcaagggcgctggacggagcaatccgtcaaaccatgtgttcgtgctcgataagcatgggcatccacttatgccctgcaacgcggccagggccaggcaactgctcggcgcaggccgggcaagggtccaccggatcgccccgttcgtcatccggctcgtggaccgcgaacagggggcggcgacaactcagccgatccgccttgggatcgacccgggctccaagggcaccggattggccctctacaggatcgagagccccagccagtgtgaggtgcgccatgtgctcttcgggctggagctccagcaccgctcagggatcatccggaagcggataggccagcgggccgcgcaccgccgccggcgccgctcgtccaacctccgttatcggtcgccgcggttcgacaaccgcaccaccaagcagggctggctggcgcccagcctctactctcgcgtgcagcacatcgacagctggactgcgcggcttttgcggtgggccccaatcaccgggacggatctggaacttgtgcgcttcgacatgcagcagatgcagaacccggagatcagcggcgtggagtaccagcagggcaccctcgccggctacgaggcccgggagtacctgctggagaagtggggccggaagtgcgcctactgcgacgccgagaacgtccccctcaacctcgaccacgtggcgcccaagtctcgagacggctccgaccgggtctcgaacctgactcttgcctgcatcccctgcaaccaggcaaaggacaaccggccagtcgaggagttcctggcacatgacgccaagcggctgggtcgggtgaaggcccaactcaggtcgccgctccgcgacgccgcggctgtcaatgccacccgctgggccgtcaaggcgcgacttgaggcccttggcacgcctgtggcctgctggtctggagggcgaaccaagtggaatcgccaccggcttctcgtcgcgaagtctcacgtcgccgacgccgccgtctgtggggacgttcagggtgtgcgccatgctggagtcgtttatctggtggcagcggccactggccggggaagtcaccagcggacacgcaccgacgccttcggcttcgcgcgcctctacttgcctaaggtcaagcggttccacggcttcgccaccggcgacctcgtggtcgccgacgttccactcgggcgcaaggcctcaggacatcacaccggtcgggtcgcagtgcgtgcctctggctcgtttcgcgtcggaaccctggacgggatcaattggcaacactgtcgcttgctccagcgagccgacggctaccgctacacacaaggagccgctcctcctcccggccctgaacgaccgggtctccggaccggcgggatttga

SEQ ID NO: 311 - DNA, 314 bp, unidentified
  misc_feature 1..314: note = Ga0307374_10008841 JGI
  source 1..314: mol_type = other DNA
gtcaaccaccccgccctgaaggacgggcttgtgaggcggccgagccgccttccgggctctgctcgaagggaaacggttgaccagaccaagccgctgacaggaggtgtgacacaggtggctacgttgcaagcaggcgagaagacccaccaagggatgcttcctcagtcccttgctctggaatccgcgccagcagacactcccaggggtgggcacgaaacggggcgcggaggcaggccgagacggcctgcaaccggcttgcaacttcgtcaagaggagactgccttgggccacaccgcccaagacggcgtcacccc

SEQ ID NO: 312 - DNA, 1365 bp, unidentified
  misc_feature 1..1365: note = Ga0111052_100017 JGI
  source 1..1365: mol_type = other DNA
ttggatactgtagctgtaataagtgcatcaggcaaaaagctgatgccgaccaattcttacagagccagagggctcttaaaatcaaagagagctgtcatacacaaatacagacctgtatttaccattaaactggtagataggactaacgggtatacacagccgatagaatacaaatgtgatactggatatcaaaatatcggtatttccatttgttcagatacaaaagagttcgtcaacgagcaaagagatctgcttaaagacgaagtaaaaaagcatagcgacagccgtaaataccgcagaaccagacaaaatcgcttgcgttacagaaagaaacgattcaataaccgcaggggtatgattagcagagatgggtttgccccatctatccgcaacaaaagagacgtacatattcgtctgtatgaggagtattgcaaaatattcccaatcgcaaaagctatctttaaaatggggcagtttgatacgcaggtcttaaaagccatagaagctggacttccagtccctaaaggagcagattatcagaggggtgaacagtatggttatgccacgcttagagaagctgtatttgcaagagataactataaatgtatctgctgcgggaagtcagcaatcaaagatggggtaaaactaagaatccatcatatcggatatctcagtggggacagaagcaacagaatggcaaaccttggttctgtatgtgaaaactgtcatacgccaaagaaccataaacagggtggaaagttgtataacctaaaaccaaagctaaaagaactcaagggagcgacttttatgacgacggtccgctacagcatggtaaaaaatcttaaagctgcaacaccaaacgtagatatcaaagttacctatggagcagcaaccaagctcgccagaaaagatctcaatgttaggaaaacgcactctaacgatgcatactgtatgggagaatttcatccaaaacatcgaagcgactttaggcattacaagaagtgtcgacgtaataatcgtgtgttaagtaggttttatgatgcaaaatatcgtgatctcagagatggttctactaaaacaggctctcagttatcctgcggacgaacaaaccgaaagatctcaagacatataaagcttgatgaacgtatttatcgagctcacaagatctccaaggggcgtgtttctacaagaagacaacattactcattaagacctggagacaaggttttatacgatggaaaagtatacttcgtaaaaggagtacagagtaatgggaccagcatcaaattagcgaatggaaaagtttgcccattaaagaaagttaacatattgcagcactgcaacgcatgggcttttatttgctaa

SEQ ID NO: 313 - DNA, 310 bp, unidentified
  misc_feature 1..310: note = Ga0111052_100017 JGI
  source 1..310: mol_type = other DNA
gtcaacaaccaaccacttaggctaaagccttgaagtgggagcttttgtaaaaaagccctgttgattagcctaagcacttcgagtgctacgttaaagcagaatagataggtacgtcagaatgcttcacaagttctgacctctacggatatatattaaacatctctgacgggtaggagaagtgtgtatatcgaaaaacctgttattaacattggcgatgtgaaccactcccgtaagggaagaacccgacatcttcatggtcggaggcgtaagccaaatattttagaagaaggaggtatcagttttggatact

SEQ ID NO: 314 - DNA, 888 bp, unidentified
  misc_feature 1..888: note = Ga0210003_1012872 JGI
  source 1..888: mol_type = other DNA
atgcagaagttagggaaaaagctaaagaacgtacctatggatacttcacacgtccatagctctataagttcttctttaaacagagttcaaagactcagtgagaagaacatgtgctgttcccataacaatcccgaagtgaatcaacctcaatgtaaagaggggcagaacttgagagtatctaccaaagtttacatattgaatatgctaggtaatcctttaatgccatgtagtccgagaaaagcaaaaaaattattaaaagaagggaaagtagtagttgtcaaaagatttccattcacaatccaattgttaattccaacaggggaaacaaaacaaaaaataacattaggaattgattctgggtatatgaatattgggtttagtgcagtatcagaaaaagaggaattagtatctggtacagttaaattagatgaaagaacatcagaaagattaacagaacgtaggatgtatagaaaaattagaaggagcaaactttggtacaggaaatcaagatttttaaatcgctccaaaccaaaagactggcttcctccatctatacaaagaaaatatgatgcacatttgaatcttattaacagaattaagaagattattcctgtttctgaaacaattattgaagtagcaaatttcgatattcaaaaaattatgaaccctgatatttcaggaacaggttatcaacaaggttctctatatgaatatcagaatatcagaagttatttaatgaccagagaaaaaggaaaatgtcaactttgtggtaaggattttaaaggacagtcaagtcatatacatcactgtaaacaaaggaatgagaatggaagtaatagacctaaaaatcttgctattttacataaggcttgtcataaaaaactgcaa

SEQ ID NO: 315 - DNA, 266 bp, unidentified
  misc_feature 1..266: note = Ga0210003_1012872 JGI
  source 1..266: mol_type = other DNA
gtcaaataccacgcactaaagtacgtggcttgagtcgtgagactcaacgtaagagttgattagggggcttaaaggaatttatgcagaagttagggaaaaagctaaagaacgtacctatggatacttcacacgtccatagctctataagttcttctttaaacagagttcaaagactcagtgagaagaacatgtgctgttcccataacaatcccgaagtgaatcaacctcaatgtaaagaggggcagaacttgagagtatctaccaaa

SEQ ID NO: 316 - DNA, 720 bp, unidentified
  misc_feature 1..720: note = Ga0310695_10070301 JGI
  source 1..720: mol_type = other DNA
atggtctatgtactgagcgcatcagggaagcccctgatgcctacaaaacgcttcggacatgtaaggcgcatcctccgcggcggcagggcgaaagtcgtaagacgcacgccctttacgatacagctgacgtatgatggcacggcttacacccagcccatatccttgggagtcgacgccgggtcaaagcacattggtctctcggcgacaacggaaacgtctgtcctctacgaggcagacctggagctgaggaacgacatcacagggctcctctcagcgaggagggagtcgagacgttcaaggcgcagccgcaagacgcggtaccgcaagccgaggttttcacaccgcacaaagtcaaagcataagggatggctggcgccctctgttgagcagaaggtacagtcacacctgacagcggtaaggaaggcctgtaagatgctccctgtttcggagatcacggcagagacggcggcgttcgacacacagcttttaaaggcacaggaaaagggatttccgctcccggaaggagaaggctaccagcagggggaccagctcggctgctggaacgtaagggagtacgtactgttcagggacggtctcacctgccgctgctgcagggggaagtccaaagaccccgtactggaagtacaccatatacagagccgtaagaccggaggcgactcaccggacaacctggtgacgctgtgccgtacctgccataag

SEQ ID NO: 317 - DNA, 306 bp, unidentified
  misc_feature 1..306: note = Ga0310695_10070301 JGI
  source 1..306: mol_type = other DNA
gtcaactacccaccgcttaggcgctgatgcgccttgaagcgggggcttgaggagaaaggaaaagcgcttgctttatctttctcctgcaggcccggttgaccagcctgagtgcttcgggcactacgttaagagggtcacggtacccgtgggcgtacagcctaacctgcggctatgccgcccgtggttaaacagtcctgagggcaagggacagtgctgcgggcatgacaagcccccttaacattggcgcaggctgcactacagcgaaagctggcttactgactattgtcagttaaaggaggaacgatg

SEQ ID NO: 318 - DNA, 1344 bp, unidentified
  misc_feature 1..1344: note = Ga0137371_10000096 JGI
  source 1..1344: mol_type = other DNA
atggttttcgtgcttgatcgtcacaaaaagccgctgatgcccaccacacccaaacgagcgcgcctgctgctggctcgaggtcgggcggtcgtgcatcgcgtcagccctttcgtcattcgattacgcgaccgacgcgtcgaggagagtcggttgcaagaggtcgccctcaaaatcgatcctggcagcaagactaccggcatcgccctggctcgcgtggaagagggagaggttcatcacgcgctctttttggcggaagtggcacatcgagggcaccaggttcatgagaacaaagtcaggcaagctcaagcccgcagacgtcgcaggagtagcaacttgcgctaccgcgcaccccgtttcgaccaccggggtatccccgctggttggctggcaccctgcctgctctccagagttggcaacacgctcgcctggacgcacagactcacgcgctgggcacccctcacacgtcttgagatcgagcaggtgcgcttcgacacgcagttgcttcagaacccggaaatcgcgggcgtgcagtatcaacggggcgaactggcaggttgggaaacccgagcgtacctgctcctcaagtacgcgtatcagtgcgtctattgtggtaagacggattgccccttggagatcgaccatctcctgcctagaagcagagggggctccaaccgcctggcgaatctggtgctctgctgtcacgactgcaaccaggccaagggaaacaagacggccaccgagtttggacaccccgaggtcgaggcacaagccaaacgccccctcagcgatgcagcagccgtcaatgccacgcgcttcaagctggtggaggccttgcgggtctgtggacttcccatcggcacctggacaggtgggcggaccagatggaatcgggcgcgctttggcgtggagaagacgcacgcgttggatgccttgtgtgtgggagaactggcgggggtcagcataggcaggctcaaaacactggctgtcaaggcgaccggcagaggcgagcactgccgaaccaactgggacaggtacggcttcccgcgtggctacaagatgcggcagaaggtggtgcgaggctttcaaacgggggaccgagtgcgagcggtcgtgccagctcccctcaagacggcgggtacgcacattggacgcgtgcaggtgcgcaaaagcggctcgttctctgtgcaaacccgcgacaaggacctcgatgggatcggtgcgcactacatacatctgatccagaaagcagatgggtatgagtatgctctggcggagcaccaaaaccaaccaggaaggccacccctcccctctccaacaaggaacggccattcctccccgtcctga

SEQ ID NO: 319 - DNA, 333 bp, unidentified
  misc_feature 1..333: note = Ga0137371_10000096 JGI
  source 1..333: mol_type = other DNA
gtcacgaacccccggattcatccgggggcttgcagcgggggcgcgcgtcgtttgcgctgcaagccctatagtgtccagcctcagcgtccaatggcgtaggcagccacgtgcgggcgctccgttcgacaggtcagggtacagccggacgcttcttcaatctggcgcatctaccgtccagggttaaaaggtccgcaggggccagaccggtgccctgggcaagacaagcctgttgaaccttggcgagaagagatgcctgcgcacgccggtgcaggcgcgtcagaccgccccttacggggactcttccttctgggaagaggaaaggatgtccagatg

SEQ ID NO: 320 - DNA, 1227 bp, unidentified
  misc_feature 1..1227: note = Human gut metagenome
  source 1..1227: mol_type = other DNA
atggtgtacgtacaagatataaatggtaaacctatgatgcctacaacaaggcatggtaaggttaggagattgcttaaagacaaaaaggcagtcgttgtaaacctatgtcctttcacgattaaattaacctacgaaacaacaaattacaaacaagaaattgtgttaggcgttgatactggcactaagcatgtaggaatttcagcaacaacaaaaagcaaagaactttatagtagtgaagtgatccttagaaatgatatcgttgatcttttggcaacaaggagagagctaagacggacaaggcgatcaagattaagatatagaaaatctcgttttgataatagggtaaaatcaaagcgtgaaggatgggtagcaccttcggtgaagtacaaaatagacgctcatattcgtgttattaataatgtttgctctatactaccaatatctcgtattattatcgaagtagctcaatttgatactcaaaagattaacaatcctgaaatatcaggtaaagaatatcaggagggaaatcaacttggtttttggaacgtaagggagtatgttttggcaagagatgggcataaatgctgtcattgtaaaggaaaatcgaaggataagatccttaatgttcatcatattgaatctcgtaaaataggaggggattctccgtcaaatcttgtaaccttgtgtgaaacctgtcacaaggaatatcacaaaggtaatatagatttaaaaatcaaaagaggtaaatctttacgtgatgcagctataatgggaattatgaaatggagactttatgagactttaaaatcaaaattttctaatatttcaatgacttttggttatattacgaaatacaatcgtattcgtaataacattgaaaaatcccatatctctgatgcctttgttatttcaaataactttaatgcaaaaaggttaggattcttatataagataaaattggttagaagacataatcgtcaaatacataaaatgaaaatccaaaaaggtggagtaaagagacttaatcaatctccttttgaggtttttggattccgtttgtttgatagagtgaaggttgacaataaattctattttatctatggaagacgtaggactggcagatttaacattcgtgatataaatggagaaaattcaaaggatgttacgcataaaaagttaaatttgtcaaggtgtaagcgttttatggtgaaaattgaaatgaaataa

SEQ ID NO: 321 - DNA, 269 bp, unidentified
  misc_feature 1..269: note = Human gut metagenome
  source 1..269: mol_type = other DNA
attaagttttatactatatcttgtgtgttgaatgaaagttcaattcggttattagcctaagccttgaaacagaggctacgttatttaagaatatatagttacctacggatgtttgcccaagtctgtaactctaaggtaagtgattaaacagtttttgtatttgagaaacagtgttgcttacaaaaacctttaataacattggcgatgggtactaacaggattttatcctgatttatgttgaataaacattaaaaacgtttgtagatatg

SEQ ID NO: 322 - DNA, 753 bp, unidentified
  misc_feature 1..753: note = Ga0129284_10010797 JGI
  source 1..753: mol_type = other DNA
atggtgtatgtaattaacaagaacggaaatcccttgatgccctgtaaggcagcaaaggccagaaagcttttgcgaagtggtaaagcgaaggttcttctcagaattccctttgtaattgctctgttgtgggattgtgaagaaaaggttcaatccgtgatcggtggaatcgatagtggcagcaaggtaattggttcggcagcagttggaaatggaaaagtgctgtatcaggcagagactattcttcgaggcgaggagatcaggaagaagatggacaagagaagaatgtatcgccgaaacagaagaggaagaaagacccgctaccgagaggctaaatttctcaatcgatccgcttccacaagaaagggcagactggcacccagcgtcaatcataaggtagaagcccatctgagagagaaaggatttatggaaaaaattctcccgatagcaaagtggttggtcgaggtggcccagtttgatattcacaggattaccaatccagaagtaaggggcgctggctatcaggatggcaacaagaagggcttttacaacgccaaggcctatgtgcttcacagggacgattataaatgccagaagtgcagggcaaagaattgcgccctccatgttcatcatataatttttcggagcaggggaggaaccaactctacagagaatctgatcaccctatgcgagagttgccacaaccgtttgcatgagggagaattcgagatcaaagcgaagagatcgaaaaccaga

SEQ ID NO: 323 - DNA, 293 bp, unidentified
  misc_feature 1..293: note = Ga0129284_10010797 JGI
  source 1..293: mol_type = other DNA
gtcaactaccccggcctgaaggccggagcttgtaaaagctcaagttgaccagagggctaacagaggatcttgttaatgttagcagccgttagaaccgagaaatacatacataccatcggatgccaccccagtccggcgctctatggcctcagattaaacagtcctgtgggtagggacagtgtgtggggcacaaaaaccggttctaactcttcgaggggaagtcggattccagtcgagactcctacccgactggatacgcatcactccaacatacaggaggtcctaaagacatg

SEQ ID NO: 324 - DNA, 1011 bp, unidentified
  misc_feature 1..1011: note = Human gut metagenome
  source 1..1011: mol_type = other DNA
ctgactaggcgccggcttgccggagccgaaaggatagagaacctgtatgggctgcttttaaatatcttcggatgtttggaagtagttggtacagaaggcgtaagccatcccggcttgccgggaaaatataaacacaaaggagggcagcttatgtcagttgcagtcattagtaagacagtcgaaagattgatgccaacaagtgaatacagagcacgtaagttgctcaaatcaggcaaagcaataaaacatagttatcatccgtttaccatacagcttactgaaagggaaactggagatatccagctaatagagctttgtatggataccggatatatacatattggaatatctgtgaagtcaaagaagcacgaatatctggcagaacagattgacacgttaacagacgaaagaagcaagcatgatgcatgccgtatgtatcgaagacagagacggaacagaaagagataccgtcagccacgattcaataatagaaagaaagataaaggctggattgccccttctttggaacacaaaaagaaaatacatattcaggcaatttcacgcatcagcagagttatgcctgttactgatatcacaatggaaatgggaaattttgacacacagattctgaaatctaaagaggaagggagaccattaccacatggcgcagattatcagcacggcgaacgttacggcatcgcgacgcttcgcgaagcagttttttctcgtgatagttataaatgccaatgctgcggaagaacaataaaagacggagcaatactccatattcatcatattaaatacaggagccagggtggaaccaacagtatgtcaaatctggctacggtatgtgataaatgtcatacaccgaaaaatcacaagccaggaggaaaactatataattggaaaccaaagctttcatcctttaaaggagcaaccttcatgactgcgatacgatggcagctttacaatgaagttaaagctttattcccagatattgatattcacatt

SEQ ID NO: 325 - DNA, 475 bp, unidentified
  misc_feature 1..475: note = Human gut metagenome
  source 1..475: mol_type = other DNA
gtcaataacccgcgccagaggtaaacctcggacggggcttgcaaaagaataaattttcttatttccacttttgtttagtcccgttacagtttacggaaagctgttggctgtaaagccttattgattagccttagcagtaacgaaaccggccaagccaggtcaggtaaatctttaactgctacgttaccggtaaaataggcaccgtgggatgctcctcaagtctcacgctctgcggtatgctgttaaacatctcttagggtaggagaagtgcagtatgcgctaaactatcggataacattggcgatgaggacaaccgattctgactaggcgccggcttgccggagccgaaaggatagagaacctgtatgggctgcttttaaatatcttcggatgtttggaagtagttggtacagaaggcgtaagccatcccggcttgccgggaaaatataaacacaaaggagggcagcttatgtca

SEQ ID NO: 326 - DNA, 1020 bp, unidentified
  misc_feature 1..1020: note = Ga0315288_10027781 JGI
  source 1..1020: mol_type = other DNA
atgtttagagtgcctgtgataactggtgaccgcaaagcgttgatgcctacgcatcaagcgaatgcgagagtgcttataaagagcgctcgtactacaccgttttttcataaaggtattttttgcattcgtctcaataaatggttaagtgaaaatattcaacctatatcaataggcattgatcctggttccaaaaaggaagcatttactgtgatgtgcgaacatcacactctgctaaatattcaattggatgcggtgactcatgttaaagatgcagtggaagcgaaacgaaatgctcgtagagcaagacgctatcgcaacactccgtgcagaaaaccaagatacaaacaatgcagaagaaaaggatgggttcctccatcaaccaaggcaagatgggataataaaatcaatccaattattgcattgaaaaaagtttatcctatttccgttgtggttgccgaagatgtgtccgcaaggacaatgaagaatggcaaaagatggaacaagtctttcagtcctgtacagtgtggaaagcactatttcgttgaatctattaaatcacttaacttaaatttaactttgaaagaaggttgggaaacggctgctctacgagcaattaattctctacctaaatcaaagaataagatggataatacatgggaagcacattgcgttgactcttgggttctggcaagcgttccgcttgctcaaacaccaatagttaataaagcaatgatagttgcaaagccattgcggtttcaccgcagacaattgcatgtctttcaacccgccaaaggcggtattagaaagtcatatggatcaacacggagttttggacttcgtagaggttctattgttactcatccaaaatttggaaaatgtattgtaggaggttcgtccaaaggacgaatatctttacatagcatttccgacaataaacgattaacacagaattctaaaatagaagatattaaatttttgtgttataacaattggaattttaattttaatcccacccgctaa

SEQ ID NO: 327 - DNA, 297 bp, unidentified
  misc_feature 1..297: note = Ga0315288_10027781 JGI
  source 1..297: mol_type = other DNA
gtcaactacccactgattaaatattaatgggcttgtagagtgaaacgagttgctacgaggtagcactacgagattcaaagcagttgactagcctatgtcagtttgttcacgagcaatcgtgaatggatatgacgaactgaatcaactgactatagcaggtcgaattcgttccgaatgctcgtctagtttggagtagcgatgttggtcagtggcgaagatgtacacggagcgtaagctccatatacccaccgtaaggtggagattgctcgtaagagctaaaggagatgaatgtttaga

SEQ ID NO: 328 - DNA, 1248 bp, unidentified
  misc_feature 1..1248: note = Ga0123349_10013493JGI
  source 1..1248: mol_type = other DNA
atgtcaaacatatgttatgtcgttgactatagtggtacaccattaagtccaaccaaagaagttaaagcatggtacatgatacgtaaaggtaaagcaatactcgtatctaaatatcctatggttattaaacttcttaaagttatacctaaagaagatatatgtaaagatgaaatacgaatgggtattgatgatgggccattacatacaggtatagcagtagtacaaaaaggtaaaaagtataataaagttctatttaaaggaaccatagaacatcgtaaagatgttaaaaagaaaatggaattaagaaaattttatagaaggaatagacggtctaataaaagacatagagaagaaagatttaataatagaacttctcataaaagatctaatatagctccttctattaaacaaaagaaacaagctaccattagagttattgataatattaataaatttattaatatagattcttattatctagaagatgtcaaaatagatattagatgtctatctgatgactatacaccatataaatgggaataccaaaagtctaataaattagataataacctaagaatagctactttaataagagataattatacatgcaaaatgtgtggtaaaaagaaaggtgtacttgaggtacatcatatattacctaaaagactatctggtacaaataatatagataatcttattacactatgccataaatgtcataagaaagtaacaaataaagaaactaaatatatatcttattttcataagatactaaataatgaagataaagatattaataaaaaacttaaatatgcttctcatgtaatggtagggaagagttatttacagaatagtattaaagatagaggtagtctatttttaactactggaggtgatactgctaataagagaagtgattggaaaatagaaaaaactcactctaatgatgctatatgtataacagatttaaaaccaagaagagacactatagatataaaagattggaatattaagccattaagaaagaagtatgataataaaaagaaaaacgataacttagttatatttcagcatagagattatgtttcatacaaaactaaagataataaattacatgaaggatatataaccgcgttatatccaaataaaaaattacttagttttaaaactaaaaataaaagttataataaaataagtagtaaaaaatgcaaattactttggcattttgataaaataatgtatttataa

SEQ ID NO: 329 - DNA, 347 bp, unidentified
  misc_feature 1..347: note = Ga0123349_10013493 JGI
  source 1..347: mol_type = other DNA
cctttaaatatattataaagtggacgcttagtctttatattatttattatttgacagctttctagcctaagtgagtgttgctggtgaaaatcacgctgcatgatgaactacgttgaatagtaaggtaaagacacaccctcggatgtaatcttcagtccgttgctctgtgagtgccaaccaagaaacaagtgctaacgtcctgcacggattatcatagctaaatactatgagtaacagggaaacacatgtcctctatttgacattggcaagaagaaaaatactcaatttgattgtaaatataataaattatataaactcttagaaagaaggtgatagaaatgtcaaac

SEQ ID NO: 330 - DNA, 1062 bp, unidentified
  misc_feature 1..1062: note = Ga0117908_1041818 JGI
  source 1..1062: mol_type = other DNA
atgcctactaagccagctaaggcaagaaagctggtagagggtggagtggctaagaaatgctggtcaaaggtaggtgtgttctacataacgatgttaatacctgtgggcgaaaaggtacaggatgtggcactggctattgacccaggcagcaaatacgacggctacgccgtatcaggctcaaaagatgcggcactcaaggcaatggcagtgatgcctcaaaaggtacacaagaaggtaacagaacgccggcagttaaggcgcagcagacgctatcggaataaacgacatggcaagtgcaaatttaacaatagaaagcgtaagcagggatggatagcaccaagccaattagctaaggtgcaattccgcatcaagataatacgcgaccttgttaaggtattccctatcaacttcattgcagtagaagatgtgcgatttaaccattacaagaaacggtggggcaagcacttttctactgttgagataggtaagagtatgctatatgacgagttagagaaacatggcaaggtaataaagtatgcaggctggcagacagcagaagcgaggcagtattggggtattaagaagtcaagtgctaaggatgctttgacacctgagtctcatgctaatgatgctcttgcgatgctcaatgaggtattcggggataatgtggataattcatgcatattcatggtatggcgtcgacttgagttttcaagacgctcattgcatcggcaaaattatcagaagggtggtactcgtccccgctttggcggaactaccaacggacattatctccgtaagggagatattgtctatggagagattggagacaggcaattggtgggatgggtatgtggattaccgacagacaggacaaaagccgttgctatagctgatgcttcaggtaaacgtttagcacagtgctctgagcaaaaggtgagactgatacgcagagccactggtatcacatgggaaagtcagtatataaccagggtccctatggcaatcatagtacaaaagccgattcaattagagtatacctctggcaattcctccccttag

SEQ ID NO: 331 - DNA, 292 bp, unidentified
  misc_feature 1..292: note = Ga0117908_1041818 JGI
  source 1..292: mol_type = other DNA
agtcaataacccctcctgaatcagagattcagaaggggcttgggggacacaggactcccgacgcaagtgttgactagagtgcttaggaactcctgagcagccgcactgcgatggtacatacgttagggtgtttcgctagctcttacctctataaactgtctcttgtgggcagtggggataaagccccgacatacttcgcagtcgcaatctcaaagcgacctttacttagaggaaagggcttgccctttcctccagcctgtatatcaggctccgagaggagacaatcatgaga

SEQ ID NO: 332 - DNA, 999 bp, unidentified
  misc_feature 1..999: note = Ga0395718_000631 JGI
  source 1..999: mol_type = other DNA
atgataccagtaattgataataaccagaaaccattaatgccttgctcagaaaaaagagcaaggaaaatgattgaatccaagaaagcaacaccattttggaagaaaggagtattttgtattagattgaatcaggaaccctcagcaaggaatcttcaaccaatagttgttgggattgatcctggatctaagaaggaaggatgtacagtaaagagcgaggctcatacattattaaatatcaatgcagatgccgtaacatgggtcaaattctcagttgaaacacgaagaatgataagaaaaaacagaaggcgtagaaaaacaccatgtcgcaaaagaagattaaataataattatcataagcctgggtggctggccccatcgaccagggccagatgggagtggaagattaggatatgtaattggcttgttaaaatgtatcccattactgattttgtaattgaagatattaaggcaaacagcaatgtgcataaagggttttctatacttgaaactagtaaaaagtggttttataaaaatcttacaaaattaggagtggtatatattagacaagggtgggaaactaaagagcttcgtgatagtcttggattatttaaagttaaggaaaaattagccgaagtatttgaagctcattgtgttgatagttgggtacttgccaactgtattgttggtggacattctaaaccagagaatactagattgttatgtataacaccaattagattacacagaagacaacttcattatctacagccagaaagaggtggttttagaaagacgtttggtggcactagtagttgtggtttgaaaagaggatcatattttataaacccaaagtgtggggctttttatcttggtggtgaaatgaatggtaaaataacaatgctttcaattattgatggtaagagaaaatctcaaaaaacaaatccattgaaagtaaaatttaaatcgtataatacatggaaaagacacgtaatagcataa

SEQ ID NO: 333 - DNA, 245 bp, unidentified
  misc_feature 1..245: note = Ga0395718_000631 JGI
  source 1..245: mol_type = other DNA
gttaattatccagaaatggatttgaaggagtaaaaaagccaactttgaaacaacaaattaaaatagaaactagagtggtcaagattcgcgtaaaccgggtcgtttgaaggcaactgaattaactaaccatggcaggttgaatgatattgaggatgcctccctagtcttcattctctcagttattcagtctcgaagggaagtataatcaaggtgcgtaagcacatttctaggaaataatgatacca

SEQ ID NO: 334 - DNA, 1350 bp, unidentified
  misc_feature 1..1350: note = Ga0187860_1009162 JGI
  source 1..1350: mol_type = other DNA
atgcagaagttaagacagagaactaaaaagaacacacctacggatactccacaagtccgtagcaactgtgatcagttattaaacagagaccaaagtctcagtgtaactgatttaaaaacctgttttaacaatcccgaagtggatctacgccaacaacatagtggcgagcttaaagctaaggtctatgtattaaataatgatagtacaccattaatgccgtgtagtccatgtaaagctagaaaattgttaaaaagtaaaaaagctgcagtaattaaattatatcccttcacaatcaaattgacttatgaaagtgaatttcatgttcaagtcattaaattaggcattgatagtggttataaaaacattggtttttctgccattactgaaaatgaagaattattcggaggtgaattaattatagatgataaaactagtgaaagattaagtgacaaaagtatgtatcgtagacttagaaggagaaaactttggtatcgtaagcaaagatttctaaatcgcaaaagaatgtttggatttttaaatcccagtatacaaagacgttataatacacacataaaattaatagataaaattaaaaaacttttaccaatttccgaaataattattgaagtgtctaattttaatattgctaaaatagaaaatcctgatattaagggaattgaatatcaagagggaaatatgtatggttatcaaagcataagaagttatttaatggcaagagaagaaggaaattgtcaattatgtggtaaagacattaaaaataaatcaagccatattcatcatataattcctagaagtaggggtggaacaaatcgtcctaaaaatcttgcaatacttcatgaagattgccatgaaaaattacacaaacaaaatttattttatttattaaaaaaatcaaaacaatataaatcagaaatttttatgtcaattataaataaaagagttcaacaagatattccaaatttaaaaattacttatggttatattacttggattaatagaattaagttaagtttagagaaatctcatcataatgatgcttttataattgcgggaggaggtactaatcaaattagaattaaaccaattattataatacaaaaacatagaaataatagaaaacttcaaacacaaagaaaaggattaaaacgaggtattagaaaagaaaaatataaaattcaaccattagatttattttggattaataataaaaaatttatttctaaaggtatgtgccataatggagaacgagtgatgataaataaaaatgaaagttttttacttaaaaaagttgaaaaaatatttcattttggcacttttgtttttaattaa

SEQ ID NO: 335 - DNA, 260 bp, unidentified
  misc_feature 1..260: note = Ga0187860_1009162JGI
  source 1..260: mol_type = other DNA
atcaattgtcaacgaatgttgattcaaatcgtgaggtttgaggtaagtgttgattagggagcttaaaaattaaattttatgcagaagttaagacagagaactaaaaagaacacacctacggatactccacaagtccgtagcaactgtgatcagttattaaacagagaccaaagtctcagtgtaactgatttaaaaacctgttttaacaatcccgaagtggatctacgccaacaacatagtggcgagcttaaagctaaggt

SEQ ID NO: 336 - DNA, 1527 bp, unidentified
  misc_feature 1..1527: note = Ga0074046_10018987 JGI
  source 1..1527: mol_type = other DNA
atgcaatctacgttgaaatgcaagtcaaagacccactccggagtgcttcctcagctccggaccctggaagtcttggttgacgttacgggaaaggtaaagcccggcacgatcgagacgggttcgctacgcgcggacgaggctggctttcaacatggtcgaggggagagtccgcaaggaccgtcaccttctccgcaaagagaagagaagagcggggtaacccgcgtttttgtgttgtcgaaggacggcaggccgctaatgccatgccacgcggccagagcccgagaactgctaaggaaggggagggcggtcattgtgcgccgctacccgtttgttattcgccttaaaaacaacccgaaccaacccacaacgcagcctattactatcaaacttgatcccggagcagaaacgaccgggatcgcacttgtgagactaacttcatctgctcacatcgttttgcacctgtccgaactgacgcatcggggcgcaaggattagagagaacctcgatcagcggcggagtttcagggctaatcgacgaaggcgcaaaactcggtatcgcgcatcgagattcaataaccggaccaggcgtgaagggtggctggcgccaagtctgcaatcacgggtagacaacgtgacttcatgggttgcgcgttaccgatgctgggcgccgattacggcgatcgtcattgagacggtccgctttgatacgcagaagcttatcaatcctgaaatatcgggtgtcgagtaccaacagggcacattgttttcctacgagcttagagagtatctgctggaaaaattcgagcgtacgtgcgcctactgcggaaggacgaacgtgccgcttgaaatcgaccacgtgcatccgcgttccagaggtgggaccatgagccctaccaaccttgtcctggcgtgccacgggtgcaaccaggctaaagggaatcagttggtagaagactttctggctgaggagccagaacgcctgaagcgtatcaaaagtcagctcaaaagcccacttaaagcaaccgcagctgtaaacgccacgcgcgcaaaaatcctgagcggactattcaagacgaagctacccgtagaaatagcaaccgggggcaagaccaagttcaaccgggctcgtctctccatcccgaaaatgcacgccctggacgcggcatgtacaggtgatacgccagaattgctgggatggaatatgcccgtgctggctattaaagccggcggaaggggctcgtatcagcggacgcagctggacaagtacggtttcccaagaggctacatgatccggcagaaaaaagccaaaggctttcagaccggcgacatcgttcgagcatcgattgccaaaggcaaaaaggcaggcgtgcatgtcggacgcgtcgcgatccgggcgagcggttcattcaacatccaaaccctcaccaccaccattcaaggcatcggctacaaaaattgtcgtctgatccagcgagcggacggctacaactactgcaataacaaggacagcgattcatcccacggctga

SEQ ID NO: 337 - DNA, 275 bp, unidentified
  misc_feature 1..275: note = Ga0074046_10018987 JGI
  source 1..275: mol_type = other DNA
gtcaactacccacgactaaaagccgtgggcttgtagaaatacgagccgacggttgaccagacccagaaagcagaaatgcaatctacgttgaaatgcaagtcaaagacccactccggagtgcttcctcagctccggaccctggaagtcttggttgacgttacgggaaaggtaaagcccggcacgatcgagacgggttcgctacgcgcggacgaggctggctttcaacatggtcgaggggagagtccgcaaggaccgtcaccttctccgcaaagaga

SEQ ID NO: 338 - DNA, 1500 bp, unidentified
  misc_feature 1..1500: note = Ga0307380_10077270 JGI
  source 1..1500: mol_type = other DNA
atgatttacgtacagaacgcagacggaacgccgttaatgccgacgacacgggcaggatatgtccgccggttattgaagaagaaagaagctattgttatgtctagaaaaccatttgttgtgaggttagcgcagcagacacatcaagactgtcaaccccttattttggggatagaccctgggatgacgattgggtttgccgtgatacacgataacggggatcctcttttactcggagagctaaccacgcggtcagcggaaatccctgcactaatggaagaacgacgcatgcatagaatggcacgccaccgctatcgacgaatgagaaccgtcaggcgggcaaaaaaggcgggaacgatatatgacggagagcgcgaattccaactcccagggacaaaccctgacggtgacccgctcggttcgcttcattgccatgcgataaagccgaggttagcgcggttttctaaccggacacgaccggacggatggctaacaccaacggcgtcgcatttgcgggcaacgcatatccgacttgttgattatctctgttcgattttgccaatatctcggattgttattgaatacgctgcctttgaccaacagaaacttgataccccggacatatcagggaaggggtatcaacaaggtcaactcttgggatttgaaaacgtcaagcaatacgttctggagcgtgatggacacctgtgccaattatgtaaaaagaaatcacaggtatttctccacgttcaccatgtaatttggcggagtcaagggggcgcgaatacgcataaaaaccttgtgacgctctgtgacggatgccacgacaaggttcatacatcacaaaaaacaaacacaatgcttcaagaaaaaatgccggggatacgcaaacgaaagatgaagacaacgctcatcaatacgattatgccacatttttatcggtgggtagaatggaaacacgatgtcgggcgaacgtatggattcctgacaaaacacgtcagaaaagagtctgggcttgacaaaacacatgcccttgatgcctatattatcgcacttcgtggggcaccaacgacggggcgcatcaatatggatgttaaaacatttcccgtgatgtatgggaaacaatatcgtcgccataatcggcaagagattacacgacaaccagatcggaaatattataatgggaaaacgtgtgttgcgaaaaaccgggcaaaacgcgagtcacagcatgacgacagtctaactgaaatacgtcaacaattcggggagtcatatgtttctgcactgagggtcgtcaagggaacccatgctaaaaaaagtgggtttactctggtgcagagaggagataaagtcgatattggtggacatgtaaaagtcgtcagagggtttgggagctatgggacaagattactgattgagggcgaagggaagacaccaactccaacccgaaacgcctctcttcttttaaaaaacacaggcattgtgtggggggaataacatggaaaa

SEQ ID NO: 339 - DNA, 376 bp, unidentified
  misc_feature 1..376: note = Ga0307380_10077270 JGI
  source 1..376: mol_type = other DNA
attgacacattacttcatctcgcgcgcgtgcacgggatgccataacaattgagtaaaagaaggagtaaacactatgtcgcttcatctcgcgcgcgtgcacgggatgccatcagcaacattgacaccaggcgcgagcttgccagagcttcatctcgcgcgcgtgcacgggatgccatcaataaattatcatgaagatctgagtaaatccaagcttcatctcgcgcgcgtgcacgggatgccatagcgtgcgcgggatgaagacaggatagacagataccagtaacaccctgtggtgagccgagctgcaggccctgtgcaaatccggtatctaatccacggcaacctactccgcttcggcggagccttataggagatt

SEQ ID NO: 340 - DNA, 924 bp, unidentified
  misc_feature 1..924: note = Ga0209647_1007495 JGI
  source 1..924: mol_type = other DNA
atgtctgtctatgtaaaaaatcatgatggagcagcactgatgccctgcacagaggcaaaagcacgcaagttgttagaggcagggaaagcaaagattgtggactatcgtcctttcacgatccaactcagctggcagtgtgagggacacgttcaggaagtcacgtgtgggattgataaaggcagcagtatcacaggccttgcctgcgtgggcaatggtgtggtcttgcttgccgccgagatccagcatcgtagagatgtgaaagacaaaatggaggatcgacgggatcgacgcaaaagccgcagagcatgtcgctggtatcggcctgcacgctttctcaatcgtggaagtcacctacggagcggacggttgcccccttcgatcagaaccaatgtggaggaagtcattcgtgtggtcaagcttcttcctcttccgatcagttctcttgtcatcgaggacgtccaggtggatattgctcgtttgaacaaccccgaactcaagggaagtcagtaccaagatccgacgcgattggatgagaatttgcgcatggcctgtttgatgcgtgatggttatcagtgtcagcactgcggtcagagtgccagaaaactggaagcccatcatctcatcttccgtgctgatggcggcaaagacactctgaccaatctgttgacgctttgtgagcggtgccatcaccaactgcacaagggcaaaatcacgctcaaggtaacgggagtaagtggtcatctggaccagattgctcaacggactatgcaggggaaaacacatctatatacaactttgaggacgtttgctcctttgaccaccgtgtttggctatgaaacatccacgtaccgtaagtaccggagtttgccgaaaacgcatattattgaccattgtgtatcgcaacccttgggactggcgaagtag

SEQ ID NO: 341 - DNA, 242 bp, unidentified
  misc_feature 1..242: note = Ga0209647_1007495 JGI
  source 1..242: mol_type = other DNA
gatcatagttgctaaaagtatggtgttttcggacatcctattcaaggaactaccagcgggcctcttcggaggcagcagtttgtcaggtcatcacaccctgggatgttcgttccagtcccaggctctgtggttccggtctaagggtagccgaaaggcgaaagtgatcggagcatgacaagcctgatgaacaatcgcgaggagcaattcactcttgacagaggagggcttatagctagatgtct

SEQ ID NO: 342 - DNA, 1296 bp, unidentified
  misc_feature 1..1296: note = Human gut metagenome
  source 1..1296: mol_type = other DNA
atgccaaacaaagtgtatgtcatcaacaagcacgggcgtccgctgatgccctgcacaccggcgaaggcccgtcatcttctggatgcgggcaaggcaaaagtgagacacagaacaccatttaccattcagctgctctacggcagtaccggctatacgcaggaggtcatcctcggtgtggacgccggcagcaaaaccattggcctttcagctgccaccgaaacggaggaactgttctccgcagaggccaagccgcgcaacgatgtagtcgagctgatgtccgcacgcaggcagttccgccgtgcgcggcgcaatcgtaccacccgatatcgcaagccacgcttcgacaatcgcgtgcggagcaagcacaaaggctggctcgcaccctccgtggaggtcaagattcaggagcacatgaccgccatccggcgtgcctgcgccatcctgcctgtcagcaaggtggtcgtggagaccgccgagttcgacttgcagctcctcaaggccgttgcggaagggaagcctgttccgcagggcgaggactaccagaagggcgagatgtacggccactacaacgtgcgccagtacgtcctgtggcgcgacagctatacctgctgcatctgcggggtgcatggctccgtcaggaagggcgtcccgctccatgtgcatcatcttgagagccgcagggtaggcggtgacgctccgggcaatctggggacgctctgtaccgcctgtcacgataagctccacaagggcattatcatggcagcggacatcaagaagcgcaagcgccgctccacccgcgacgcgaccttcatgggcatcatgcgcatgacgctgctgcggaggctttgggagcagcttcctgtccccgttgtggagaccaggggctacatcaccaaagttacgcgggagaagctgctggtgctgccgaagagccatgccaacgacgcgctggcaatcgcgcacggcccgcagggctttcgcgcagaatatctgccaaatatccgtcaggcggaccgactttacaccatccgccctgtgagacatcacaaccgtcagctgcacaaggcgaccatcctgaagggcggtgtgcggaaggccaatcaggcagagaagtacatctgcggcttccgcctctacgacaaggtactctacaacggtatcgagtgctttgtctgggggagacgtaccagcggttccttcctactgcggcagctcaacggagaaaaggtcaaagacggcgtgagctacaaacacttaaaactattggaacgcagccaaagttatttggttgcatag

SEQ ID NO: 343 - DNA, 304 bp, unidentified
  misc_feature 1..304: note = Human gut metagenome
  source 1..304: mol_type = other DNA
gtcaataacccccaccaaatctaatgatttggagggggcttgcgagaaaacgtaagcccagattgactaccctaagcattacgaatgctacgttactcaagaatgtatgtataggcaccggcgggcgtgaatccgaacctgccgcactgcggtgtgtgattaaaagctctgagggtaaggagcggtggtgcacacgaaaaccttgagataacattgggtacggatacctgacggccgaaaggccgcgtggctttttcgttagccacaatcaaagaagaaggaggaaggcatcatgccaaacaaa

SEQ ID NO: 344 - DNA, 972 bp, unidentified
  misc_feature 1..972: note = Ga0070698_100018796 JGI
  source 1..972: mol_type = other DNA
atgtcgttcgtgttggtcgtcgatcaggagcgcaagccgctcgctccggtgcatccaggccgtgcccgcttgctgctgaacgcggcgaaagcggcggtgctgcggcgctaccccttcaccatcattctcaagaccgtcgtgcccgctgcccagcccgactcactccgcctcaagattgacccgggctccaagacaacaggcatcgccgtggtccacgacgccaccggacaggtggtgtggaccgcggagctcgcccatcgtggcgagcaggtcacggaacgcctcacgcagcgccacgcctgtcgtcggtctcggcgtcaacgccacacgcgctaccgcccggcgcgctttgccaaccgcgggcgacgggagggctggttgcccccctcgctggagagtcgcatcgccaatgtgctcacctgggtgcagcgattgcgtcactctgcgcccatcgacgccatcagcttggaactggtgaaatttgacacgcaactgctgcagaacgccgagatcagtggggtggagtatcaacaggggactctggcggggtacgaagtgcgggagtatctcctcgagaagtggggcaggaagtgcgcgcactgtggcgcgaccgaccgaccgctgcaagtcgagcatatcacgccgcaggcgcgccacggctccgatcgggtctccaacctcaccctggcctgcaagacttgcaatgacgccaaggggaagcgcacggcggaggagtttgggtatccccagatccaggcgcaggcaaagcagccgttgcgtgacgcggcggcggtgaatgcgacgcgctgggcgctcttccaccggctcagtgcgctgggattgcccctcgagacggggacgggaggacgcacgaagtggaaccgcacccggcgtgatctgcccaaggcgcattggactgacgccgcctgtgtgggcgccagcacgcctgctatactggacatgcgcggtgtt

SEQ ID NO: 345 - DNA, 275 bp, unidentified
  misc_feature 1..275: note = Ga0070698_100018796 JGI
  source 1..275: mol_type = other DNA
gttagcgaccccagccagaaatggcggggcttgaacgagccccgatgctgaccagtcccctggcagttgccaggagccgttggcgaggagtgtcaaagttcacaccctgggatggcatctcagtcccaggcgctgcaatcggttggttaaacaggttgatggggtagaacagccagtgccgaccgaagatggccgctcgccaactcggacgagggaatccttacccgcgtcaagcggaggcgcgcaagcgcacgaaggagtcggagatgtcgttc

SEQ ID NO: 346 - DNA, 1323 bp, unidentified
  misc_feature 1..1323: note = Tepidimonas sp. SPSP-6
  source 1..1323: mol_type = other DNA
atggctgtacttgtattggataaacgcaaacgcccgctgatgccatgctcagagaagcgggcgcggcttttgctggagcgcggtcgggcgcgggtgcattgcatggttccgttcaccattcgactggtggaccgtcgaatcgaagacagtgtgttgcaacccctgcgcgtcaaaatcgaccccggtagccaaaccacgggtattgcgctggttcgggatcaggacgatgtggacgtggacactggcgaggtgaagaaggtggcgcatgtcgtgctgttggccgaacttaagcatcgcgggcagacgatccgggatgcgctcacgcagcgccgcgcgtttcgtcgtcggcggcgcagctccaacctgtgctaccgtgctccacgttttgataaccgtgtgcgcaaggctggctggttgccgcccagtctgcaacatcgggtggatacgatcatggcctgggtgaatcgactcaggcgatgggtgccggtcacggcgataaaccaggaactcgtgcgtttcgacactcaggcgttgcaaaaccccgagatcggcggtgttgaataccagcaaggcacactagccgggtacgaagtccgggaatatctgctggagaagtggggccggaagtgcgcgtattgcgatgcgaaggatgttccgcttgaaatcgaccatatccttcctcgtagccggggcggtagcgaccgggtgagcaatcttgtcatcgcctgtcacgactgcaaccgggccaaaggcaatatgcctgtggaacggtttctggcgaaacaaccagagcgcatccgaaaaatactggcccaggccaaggcgcccctcagggacgccgcagccgtcaacagcactcgttgggcattgttcaacgcgctgaaggcgactggcttaccggtagagagcggcaccggtggcaggacgaagttcaaccgcacacggctgaatatccccaaggggcatgctttggacgccgcctgtgtcggaaatgtggacgacgttcaggaatggcaaaagcccgtactttgcatcaaggcgacgggtcgaggaagctatcagcgcaccaggctggatcggtttggcttcccgcggagctacctgacacggaacaaaagcgcctttggctttcagacgggcgacagcgtgaaagccgtggtaccctcgggcaagaggacaggcagatatcgaggccgcgtagccattcgcgctagcggaagtttcaacatccagacgccgcaaggcgtcgttcagggcatccattaccgtttctgttcgctgatccagcgggcggacgggtatgggtattcgtgggcaagatag

SEQ ID NO: 347 - DNA, 289 bp, unidentified
  misc_feature 1..289: note = Tepidimonas sp. SPSP-6
  source 1..289: mol_type = other DNA
gtcaactaccccgcccttcagggcggagcttgcgatagcaggctcggttgatcagggaaagcggtaaccaagccgcttgcgtcggcaacaggtcgtcaagacccactccgggatgcttcctcagtcccggacactggaaggttgggatcatgctggcgaaaggtaaagcgccgaaggttccaaccgcctcgcaagagggagccggttgccgacattcccgaggggagatggggccgcaaggctccgcgtaacaagtcccgtaagggataacaggaggtacaacatggct

SEQ ID NO: 348 - DNA, 1398 bp, unidentified
  misc_feature 1..1398: note = Human gut metagenome
  source 1..1398: mol_type = other DNA
atgagcacttgcgtttgtgttctcggcaacaatggtgaacgcttaatgcctaccttccgtcttggcaaggtacgccgactcttgaaagacggaaaagcaaaaatcgttaagcatcatccttttactattcaactgctgtatgacagcaaaacaaacacacaacccatcgaaatctgcgaggatgtgggctacaactacatcggcatcagcgtgaaaagcgaatcccacgaatatgtgtctgcgcagtatgatacattacaggatgagaaagcctgccacgacagttgtcgtaagtatcgccgtacccgcagaaacagactgcgttaccgtaaaccgcgcttcgataaccgcaagcgcagcgaaggttggcttgctccttctttgaggcataagaaagaactcaatgtcaacgttgtcaagatgtattgtgcagtaatgcccattacgcatgcaacggttgaagttggttcttttgacacaatgttgctgcaagccatccagaaaggcaaatcaaaaccggaaggtgtagactaccagaaaggtccccgctacaacttggcaaccttgcgtgaggcagtgttctaccgtgataattacacctgccaagtttgtggacgcaaaatcgcggatggtgccattttacatatgcaccacatgttttattggaaaggaagacacggctaccagcttgatgagttggttacagcgtgtgaaaaatgccacacgccagcaaatcatcaaaaaggtggcaagctctacggatttggcgaagataaagaatttgccaatctttcaggtgcagcatttatgaacgctgttcgctggcagatagtaaatgcattgtacgccacatacggtaaagaatttgtaaccatcacttatggcgctatgacaaaagaaaagcgtatcgcgcttcatcttgaaaagagtcataacaacgatgcgtatgcaatgggcagctttcatccagttaaccgctgcgcgtttgaacattatgaaaagatgaaacgcaataaccgcattctcgaaaagttttatgactcgcagtacattgacactcgcactggtgaactgactaacggcaaaagcttattcaacggtagaatcagccgcagccataaaaaggattccgagaacctgcacaagtaccgtggaaagaggatttgtaaagggcaccgcgctctacgccgaaaaaagttggccctcaatcccggagatttagtttctctcaacggagaaattcttgttgtccatggcactcataccaataaaaagggtgctgtaaatgtagaattcaaagcacccgcaaaaaacggtcaaaaatccgcgagccttaaaaaactcaaaattgtaaaagcagcagattccatacatcccgcatgggaaaaagtatcttaa

SEQ ID NO: 349 - DNA, 324 bp, unidentified
  misc_feature 1..324: note = Human gut metagenome
  source 1..324: mol_type = other DNA
gtcaacaaccccgcctaagccggttcgccggttatagacggggcttgcggggcaacccgtaagcccagttgattagcctaagtctgctgctccggcggcaggaaactacgttgtgtactaataatataggcaccttactcatgctccacaagtggtgagctctgcggatgtttgttaaaaatctctgagggtaggagacgtgcaaacatcataccgaaaggtaaaacagtacaacaacattggcgaagtggaccacagggcgcaagccctgacttatagttttattactgttttacgaaaggagtgccttgcatgagcacttgc

SEQ ID NO: 350 - DNA, 1158 bp, unidentified
  misc_feature 1..1158: note = Ga0190367_1011244 JGI
  source 1..1158: mol_type = other DNA
atgtcacccgggctgagacccggcggggtaatccccaaggtgattgatatgggaaaggggaggagtgggaagggcactgtgaagagagtaccggtagttgatgcgagagggtttccattgatgcctacgacgccagtaagagcacggcgaatgttgaaagaaggggaggcagtagcgagaaggaacaagttgggcattttctatattcagttgaagcgcgctgtcgatccggtgccgaaagaagtgcaagaaagaacgcagccgatagcagcgtccgtggatctgggttcttcctttgctggtctttcagtggtagggactaaggacacgattctcaacataatgacggagccagtgaattgggtggaagatgctctaaggaagcggcgagagatgagaagattgagaagataccgcaagtgcaggcgtcggaagaagcgtttcgacaatcgtaagagaccagagggatgggttccaccatcaacgaaggcgagatgggatacgtacctaaggataatagaccatcttaggaaaatagtaccgatcacgcatgtcggcgtagaggagggcaaagcgaggacaaagaagggacagaaaagatggaacaataacttttcccctttacagaacggcagaaactacttcattaaagagctgcaaaagagaggcttgagtgtgactttgcttccagcgcgagaggttgcgaggctgagaaagaagcatggtttgacaaaggtaaaagataaagccgagaagagtttttactcacactgcgtggatgcgtgggttatatcagcttggataacaggtgctgcgacgccgaactgtcttgatatctggtacgctgttcctttaaggtttcacaggaggcagttgcacgggttaaagccgtcaaaagggggagtgagaaagaggtatggtggtacaagatctctcggcttcaagagggggacgctggtgaaatctgggtacgggctgtgctacatcggcgggttcgacgagaaaaggaaaaggctgagtttgcacgacgttaagacggggaagagaacaacaaaagctgccaaacccgacgacatcagagttctaacttctgtcagcttcaggagtttttacattcccgcaattcccccgcaagcttgcggcacccttgcggggtga

SEQ ID NO: 351 - DNA, 306 bp, unidentified
  misc_feature 1..306: note = Ga0190367_1011244 JGI
  source 1..306: mol_type = other DNA
gtcaacgaccctgggctaaagcttggcttgggttggcgggcccaagggccgaagaggcttcgttgactagcctcagtcccgcccgaccgaggcggggctacgccccgcgggctacaaggacggtggggtgctcccccagcctcacccgctccggcagaaccgctgaatgccgtggtgggcggacgctcacctaagcctgcggggcattggcgagggggaatgtcacccgggctgagacccggcggggtaatccccaaggtgattgatatgggaaaggggaggagtgggaagggcactgtgaagaga

SEQ ID NO: 352 - DNA, 1287 bp, unidentified
  misc_feature 1..1287: note = Azohydromonas sp. 13393
  source 1..1287: mol_type = other DNA
atgtattccgagaactctgtgttcgtgctggatgcggcaaggcggcccctttcgccttgccgcccagcgcaggctcgccgactcctgcgcgacgggaaggccgcagtgctgcgccgctacccgttcaccatcatcctcaccgaagaaaagccgcaggctgacccgaagccgctggcgttcaagatcgacccgggctccaaggcgaccggcctggcgctgctggacaaggcgggccgcgtggtgttcgcagccgagttggagcatcgcggcgagtcgatcaagaaggggctggacgaccggcgcatgtaccggcgcaaccgccgcagccgcaagacccgctaccgcgccccgcgctttgacaaccggcgccgcgcgaacggttggctgccgccatccctgcaacaccgcgtggacacgaccatgacctgggtgcggcgcatttggagcagttccaacgtcgcgcagctgtcggttgagcgcgtcaagttcgacacgcaggcgatgcagaaccctgaagtcagcggcgccgaataccagcagggtgagttggccggcaacgaagtgcgggagtacctgcttgagaagtggcagcgccgctgtgcctactgcgatgccagccgcgtgccgctccagatcgagcatgtcgtggcgcgctcgcgcggcggcaccaaccgggtgagcaacctcaccctgtcttgcgggccttgcaaccgggccaagggcgccgatccggtggagcagttcctgtgcaggaagccggacgtgctggcacacatcaaggcgaagctcaagcagccgctcaaggacaccaccgccgtgaacgcgacacgttgggcgttgttcagcgcgcttgccgcaacggagctggccgtcgaggcaggatcgggcgcgcgcacgaagttcaaccgcacgcgacagggctaccccaaggcacactggatcgacgcggcatgcgtgggtgagagcggcgccctggtcgcgctcgatcccgccctgcgcccgttgcgcatcaaggcatgcggccatggcctgcgccagcggtgccgccccgacaaatacgggtttcctaggacggctgcgccgagggccaagttcttcttgggattccagacgggcgatctggtcaacgcccgcgtgcctacaggcaagtacgccggccggcacacaggacgcattgccatccggttccgcccctcatttcgcctgacctccaaggacaccacgttcgacgtgcatcccaagtacctcaccgccgtgcaaagggctgacggctatgcctacttctga

SEQ ID NO: 353 - DNA, 275 bp, unidentified
  misc_feature 1..275: note = Azohydromonas sp. 13393
  source 1..275: mol_type = other DNA
cccgattcgatgaattggatggagcttgcgaaagcaggctccccggttgaccaggctcagtgattcaggagcgatcttgatgaactacgttcagacggtcatgacaccctaggatgcgtgccagtcccaggctctgtcggcaggaatcatggtgccagcagggagaaggctggcgaaggttcccgcctcaacaagccgttgggacattgccgaggcaaacattaccggccgcaaggccgtgaaggagttttgaaaccatgtattccgagaactct

SEQ ID NO: 354 - DNA, 1389 bp, unidentified
  misc_feature 1..1389: note = GENOME_ACESSION: IMG_3300000053_$F_3300000053 JGI
  misc_feature 132: note = MISC_FEATURE - Any "n" represents any nucleotide
  misc_feature 150: note = MISC_FEATURE - Any "n" represents any nucleotide
  misc_feature 183: note = MISC_FEATURE - Any "n" represents any nucleotide
  misc_feature 199: note = MISC_FEATURE - Any "n" represents any nucleotide
  misc_feature 273: note = MISC_FEATURE - Any "n" represents any nucleotide
  misc_feature 288: note = MISC_FEATURE - Any "n" represents any nucleotide
  misc_feature 303: note = MISC_FEATURE - Any "n" represents any nucleotide
  misc_feature 306: note = MISC_FEATURE - Any "n" represents any nucleotide
  misc_feature 315: note = MISC_FEATURE - Any "n" represents any nucleotide
  source 1..1389: mol_type = other DNA
gtgagtgtcttggtactggacaaacagaaacaaccgttaatgccatgccgcagtgcacgggcgcgtcagctcttgcgcgatggcaaggccgcagtgtttcgtcgttatccgttcacgattatcttaaaaganagagtgggcggtgatacncagccgctgtctctgaatgttgaccctggcagnaaaacaaccggtgtgnctctggtcgcagagtatcagcgcggccagtgcgcagtattggctattcacattggccaccgtggtcagcagatnaaatccgcattgganggcaggcgcggtatncgncggtcacgncgaaaccgcaaaacccgctaccgggcaccgcggtttttaaatcgtacacggcctaaaggttggttagcgccatccattatgtcacgggtgcacaatgttgatacgtgggcaaagcggttaatccggcttgcacctatcattagcgccaatgtggaaaccgttcgcttcgatatgcagttgatggaaaacccgtcgatggccggcgcggactatcagcaagggtcattgtttggttgggagcttcgggaatacctgttgtatcgccacaagcatacctgtgcctattgcgatggattgacgggcgattcagtgctggagaaagaacacattattccaagggcattaggcggcagcaaccggctggcaaatcatgttatcagttgccgcacctgcaacgaggataaaggttctctgcaccccaatgcctgggcgcagctttgcatgcagcgcggtgggaaattaaatacgacacgggccaaaaacatgcagcgcattctggccggttaccggccatccttaaaggatgcagcggcagttaatgctacgcggtatgccgtgggtggcgttgttaagcgcttaataccagatacgcagttttggtctggtggccgcaccaagaaaaaccgctcagaccagggttatcacaaagaccactggattgatgcggcctgtgtcggtgagaaaggtggcgcggtgtcactgttatgcgatgctgtgcttatggccaatgccaaaggacatggttcacgccagatgtgtctggtggacaagtacggtttcccgcgcaccagcgccaaaacaacctcggtcgtacacggatttaaaaccggcgacatggtggcggccagtgtgccaacgggcaagaaacaaggtgtgtatgtgggacgagtagcggtacgtagcagcgggtttttcaacattcaaaccaaaatgggcgttgtgcagggtgtatcccacaagcattgtcggatactccagcgcaacgatgggtataactttacctatggagcggcaattcctccgacgactgattcaaagaattcagtcgcggtatccttgccgaatagttggtga

SEQ ID NO: 355 - DNA, 289 bp, unidentified
  misc_feature 1..289: note = GENOME_ACESSION: IMG_3300000053_$F_3300000053JGI
  source 1..289: mol_type = other DNA
gtcaacgacccacgacttattcgcgttgcgaattaagtcggggcttgtaaagccctaagttgaccagaccccatcaggcaacggatggagacgttatcgaagaatacataggcaccgtgggatgacttgccagtcccccgctctgcgcaaaacgattaaacaggtgtaatgggttaagccagtgtcgttttgaaaaaaccttcgaataacacggtcgaggcacacataacccacttcggtggagaacgacgggtaaccgtcataattttggagattggataacgtgagt

SEQ ID NO: 356 - DNA, 1287 bp, unidentified
  misc_feature 1..1287: note = Moorea sp. SIO3I8
  source 1..1287: mol_type = other DNA
atgcgagttttcgttttagatcaaaataaaaaacccctggatccatgccacccggcacgagctagggaactacttaagaaaagaagggctaaagtatttaagcgctatccattcactattatcatgcaggacagaagtgttaataattctgtaactcatccacacagaatcaaaatagatcctggttcaaaaacaaccggaatagctgttattcaagaacagactggacgagtgacaagtgcattagaaattaaccatcgaggacagagtatcaagaattctttagaatccagaagagccttaaggcgaggtaggcgaaacagaaaaactcgttaccgcaagcctcgatttcttaatcggaagcgcccagaagggtggttacctccgtcactaatgagtcgaatatttaacgttgagacttgggtaagacgactgaggaagttgtgtccagtgactgcaatatctcaagagctagtgcggtttgatactcagaagatgcaaaatccagaagtatcaggtgttgaatatcaacatggcgagctatacgggtttgaggttaaagagtaccttcttgccaaatggggacacagttgtgtttattgtggtgctatgaatacgcccttagaagttgaacacattgtcccaaaatcaaaaggtggcagcaatcgggtcagcaacctaacccttgcttgtcggtgttgtaatcagaaaaaaggtaatgaccccattgaaaaatttttaaagaaaaaaccagcaattctcaaaaaagtattagctaaagcaaaaattcctttaaaagatgccgcagtcgtcaactcaacccgttgggaattatggagaagactacaatcaactggattacccgtcgaaacaggctcgggtggattgactaagtttaatcgcaagactaggggtctcggaaaaactcactggatcgatgctctttgtgttggtaaaaccacccctgagcaaatattactgaacggaacaaagccactaacagtaacagctaaaggtcatggtattcgtcaaaggtgccgacctaataaatacgggtttccaaaggctcatgctccttctgctaagtcgtttaaaggctttcagacaggagatatcgtcaaagctgacataaagaaaggaaaatatgccgggcagtatacaggacggatagctattcgttatcgtccaagttttgtacttcagactcccgagaagaagttcgatgttcatccaaagtatctgagaataatatttaaagctgacggatacgaatatgcgtctaactag

SEQ ID NO: 357 - DNA, 253 bp, unidentified
  misc_feature 1..253: note = Moorea sp. SIO3I8
  source 1..253: mol_type = other DNA
gtcaataactcaccgctaagtcctatgggactatagcgggagcttgtagaagctcatagttgaccagactgagacttagattaggtctacgttatttgagttataacacctgtaggtgcgtgccagccttcagctctgttgttaacaattaaacatctgtagcgagttaaggaagtgttgttaacctctcaagctcttataacattgtcgaggcaaactttacccacatcgtggagtgttcaaagtaatgcga

SEQ ID NO: 358 - DNA, 717 bp, Moorena sp.
  source 1..717: mol_type = other DNA
atgttagttttcgtaatcaatcaaaacaaaaaaccactgatgccctgcaaaccctcaaaagccagaaagctactgcaagcaggcaaagcaaaagtggtccgaaatacgccattcacaatcaagttacttttcagaagcagtggctatactcaacctgtaactgcagggatggataccggctctaaggtagtgggctgtgcagccattgctaacggaaaagtgttgtatcagtccgaaatctacctgagagaaaacgtttcgaaaaagatggaacaacggaagatgtaccggagaacccggagaagtcggaagacaaggtatagacccgcaagatttgataaccggggaaattcaaagaaagaaggaagattggctccttctatccgaagcaaacttgaagctcatttccgggaaaagaggtttgtggaatccctgcttcctgtaaccgagtggaaggtagaacttgcttcctttgatattcacaaaataacaaatccggaagtttccgggatcggatatcaggaaggggaccttaaagggttctacaatatcaaagcttacgttctggacagggacggctacacctgccagcactgcaggggaaagtcaaaggattccaggctgcattgccatcatatcgttttcaggtcacaaaagggaacagatgcaccggaaaacctgataacgctctgtgaaacctgtcacaaagccctgcac

SEQ ID NO: 359 - DNA, 289 bp, Methanosarcina sp. 2.H.T.1A.3
  source 1..289: mol_type = other DNA
gtcaactacccctgagctaaagactcaggggcttgtctaacaagccctggttgaccagatcaccgattaggagcaacggaaaatcggtaaacgataggaaagaatacatagttacccttgaatgtcgcctcagtttaaggctctaaggatgccggttaaacagtcctgagaggtagggacagtgcttgcatcgttaaacctttccatatcagatcgagaggaggacggattcctgaattgactccacaattcggatacgcataactcttcggaggaaaactatatgtta

SEQ ID NO: 360 - DNA, 471 bp, unidentified
  misc_feature 1..471: note = GENOME_ACESSION: IMG_3300000938_$F_3300000938JGI
  source 1..471: mol_type = other DNA
ttggaatctcgccgttcattgcgtagaagtaggagaaatcgtcatactcgttatcgtcaagggaggttcctaaataggactcgccctaaagggtggttggctcccagcttgcaacatcgcgtcgaaacaaccctaacctgggtaactagattgatgaagctcgcccccattgcctctattactcaagaacttgtacggttcgacttacaacaattagaaaatccagagatttctggaatcgaatatcagcaaggtgttgtatgtggctacgaggttcgggaatacttgctcaacaagtgggatagaaagtgtgcttactgtggtgttacaaatacaccattacaagtcgaacatattcatcccaaagctaagggtgattctcatcgcatttctaatctttgccttgcttgcgatgcttgcaataaaaagaaaggtactcaaggtattgagcaattcctctctaaaaagcca

SEQ ID NO: 361 - DNA, 260 bp, unidentified
  misc_feature 1..260: note = GENOME_ACESSION: IMG_3300000938_$F_3300000938JGI
  misc_feature 246: note = MISC_FEATURE - Any "n" represents any nucleotide
  source 1..260: mol_type = other DNA
gtcaacaacccggcaccgatcggattaccgatacggtgcgggcaagaaattcgccaagttgaccagtctaaatggttcgcccactacgtttaaggtaagcgttaaagtacctaccagaaaatgcgtgctagttttctgctctagaaattaaaagttaaacaggtgtaagggttaagccagtgcttttaatatagttaccgaccttaaacattgacgaagcaagcattaccccgcaagggaggactnaaatgtctaatttt

SEQ ID NO: 362 - DNA, 696 bp, unidentified
  misc_feature 1..696: note = Ga0376654_0004951 JGI
  source 1..696: mol_type = other DNA
atgagcaaagtattcgttgttgatacgcataaacgaccagtaaatccgatccatccggggcgtgcccgcctcttgctttcccagggcagagcagcagtactcaaacgctatccttttaccattgtgctcaaaggagcgatagagcaaccgcagcttcagctattacgtgtcaaacttgatcctggctcaagaactagcggactcgccatcgtcaatgatgcgtctggtgaagtcgtctttgcggcggaaatcagtcatcgaggacaggccatcaaagcggctctcgatgatcgcagatctgtgcgtcgttctcgtcgccatcgcaaaacccgctatcgcaaagcaaggtttgctaatcgacgccaacccaagggatggatccccccatcgctcgccagtcgagtgaccaacgtcgtgacctgggtccagcgtttacgcaggctctgtccactcacgaacatcagcatggagttggtcaagttcgatttgcaacagatggagcaccctgaaatcagtggtactgagtaccagcagggtacgttagcaggatatgaagtgcgtgaatatctgctgggaaagtggaaccgccaatgtgcctactgtagcgcgaaggatatgccgttgcaagtggagcatattcatccccgtgccactggtgggacgaaccgggtgagcaatcttgcgctggcctgtgaa

SEQ ID NO: 363 - DNA, 241 bp, unidentified
  misc_feature 1..241: note = Ga0376654_0004951 JGI
  source 1..241: mol_type = other DNA
gtcaaatacccccggctttcagccagaggcttgttcgcaagcctgaatttgaccagactcagttcttcggaactagcgctcggagcgaaataggtacgttggggtgcgcggccagccccgaccgctacggtgaagcattaaacaggcgtacgggtgaagccagtgtgtttcacgttaaaccgctccataacattgtcgaggccaacatcacctgcgcaagcggaggctctgtatgagcaaa

SEQ ID NO: 364 - DNA, 774 bp, unidentified
  misc_feature 1..774: note = Ga0070741_10036040 JGI
  source 1..774: mol_type = other DNA
atgccaacccatccagcaagagcacgtgtgttgctctcatcgggcaaggcggctgtctttaaacggtttccatttaccatcattctcaacaaggccgttgagcaacccacgtgtgcccccttgcgcatcaagattgatcctggcagcaaaacgaccgggttggccattgtcaatgatacatctggggacgtggtctttgccgctgaactcgctcatcgagggcagcagatagccaaagatctggagaaacgacgagccgtgcgacgaagccgacgacaacgcacaacccgctacagaaaagcccgttttcagaaccggagcaacaaaaagaaggggtggttggctccctcgttcgagagtcgcatggtcaacatgctcacctggatcaatcgactcaggaacgtgtgtcccattgtggccatcagccaagaactggtcaagttcgacttgcagaaaatggaacatcctgagatcagtgggattgaatatcagcaaggcacactctacggctatgaggtcaaagagtatctgcttgaaaagtggggcagacagtgtgtctactgcggagcacagaacgtgcctttggaggtcgagcatatccatccacgttcaaagagccgtgacaatcgggtcagcaatctgacccttgcatgtcatgcttgcaatcagaaaaaggatgatcgcgatattcgagagttcctggcacacaagcccaaactgctagagcaactgctcgcccaagccaaagcaccgctcaaggatgcgtcggctgtc

SEQ ID NO: 365 - DNA, 286 bp, unidentified
  misc_feature 1..286: note = Ga0070741_10036040 JGI
  source 1..286: mol_type = other DNA
gtcatgaacccaccggctcaagccaggggcttgcgggaggccgaagagcgttctgcaagccgaacatgaccaatctgagtccgggagaccgggctccgttacaggcgaaaataggtacgtccaggtgcgagtccagcctgcgaccactacggtacagcattaaacaggactacgggttaatccagtgtgttgtacgtcaaaccgcttgataacattgacgaggccaacgtgacctgagcgatcaggggtccgaaaggacaaaaaaggagtgactgcattgagtcac

SEQ ID NO: 366 - DNA, 882 bp, Moorena sp.
  misc_feature 686..873: note = MISC_FEATURE - Any "n" represents any nucleotide
  source 1..882: mol_type = other DNA
atgttagtgtttgtactgaataaacacggaaatccgcttatgcctgcatcgccagccaaagcgagacatttactggataacggacaggctgtagtcgttagacggactccattcacgatacaactattatacggttcaagcggatacaaacagggcgtcacccttggcatagacgccgggtactctacggtcggctttagtgctgtggcaggcagagaactcatcgcgggtgaattgaccttacgcaacgacattaaacgacttctcgaaaaacgaagagcatatcgccgcacgcgaagaagtcgtaagtggtacagagaaccgcgatttaacaaccgcggaaagaaaggttggcttgcaccaagcatcaaacacaaactcgatagccacatcaggctcatcgaaaaactgaagaaaatcctaccgatcacacgaatcatcgtagaggtcgcttctttcgacacgcagaagatgcagaatccagaaatctctaacatcgaatatcagcagggagaactgcagggatacgaggttagagaatacctgcttgagaaattcggacgcaagtgtgtttattgcggcaaaaccgacgtaccactggagatagagcacatcgtaccgcggtcgagaggaggttcagatcgagtctctaatctgaccacagcatgtcacgagtgcaaccaaannnnnnnnnnnnnnnnnnnnnnnnnnnnnnnnnnnnnnnnnnnnnnnnnnnnnnnnnnnnnnnnnnnnnnnnnnnnnnnnnnnnnnnnnnnnnnnnnnnnnnnnnnnnnnnnnnnnnnnnnnnnnnnnnnnnnnnnnnnnnnnnnnnnnnnnnnnnnnnnnnnnnnnnnnnnnnnnnnnnnnnnnnnnatcaggtaa

SEQ ID NO: 367 - DNA, 249 bp, Moorena sp.
  source 1..249: mol_type = other DNA
ctctccctgaccctaacgggtcgaggaaaggacttaaaaagccccttagttgatcaggaggcataagaatatgcagaagttacgcggaagaaatacatacacaccttggaatgctgctccagttccaagctctgtggcaggatggttaaacagttctgagagggtaggaacggtgctgtccagcttaaaaaccccgcataacaactccgaggagcatttactcggaaacaggaggaacactttatgtta

SEQ ID NO: 368 - DNA, 1329 bp, unidentified
  misc_feature 1..1329: note = Ga0376443_00295 JGI
  source 1..1329: mol_type = other DNA
ttggaggtcttaaatttgaaagtatttgttcttgacaacaataagtaccagcaagcccctgtacatccagcagaagctcgattgctactaaaagagcagaaagcggctgtatataggaggtatccattcaccatcatattaaaggaggtttccaaacaacaaccagaagaactaaggttaaagatagatccaggcagcagaaatactgggctcgctgttatttctgataacaccggagaaattgtttttgccatggagttagaacatagaggcctcaggatcaaaagtctacttgattccagaagatgtgtcaggggaagccgtagaagtagaaaaacaagataccgacaacctcggtttctaaatagagctctgcccaaaggttggctggctccatctttaaaaagcagggttcacaacattgagacgtgggtaaggagattgataaaaatttgtaatatccaggctatctcaatggaacttgtacgctttgatatgcaaaaacttcagaatccagagatatcaggagtagaataccaacaaggcgaacttgcaggtttcgaggtaaaggagtacttgttggagaaatggggcaggtcttgtgtttactgcggtaaggagaacgtatcactggaagttgagcatattatcgcgaaatcctgtggaggctcaaacagggtcagcaatttaacaatcgcttgcattgattgcaatcaaaagaaaaacaacaaccctatagaactatttctgaaaaataagccagaattattgaaaaaaattctatccaaaaccaaaacacctttaaaagatgctgctgctgttaatattgttagatggaatctttatcacaccctgcagacttttggattgcctgttgaagttggctctggtggcttaacaaagttcaatcgtaaagctcgaagcttaccaaaaatacattggcttgatgctgcttgtgttggaaagagtacgcctgaaagattattccaaacacacaaacaggtgttggaagtaaaagctatggggcatggcagtatacaaatgtgcagagttgataaatatggctttcccaggacaacgtcaaaaccaacaaccaagaaagtaagaggattccagacaggagatataataaaatctgttgtaaccaaagggaagaaggttggaacatatgttggcagggtagcggtaagaaccagcggatcatttaatatcaaaacaaagaaagacacagtgcaaggtattggctggaaatattgtaagaaaatacattgcatagatggctataactacaacaatagaatggaggcggcaattccccccctgagctaa

SEQ ID NO: 369 - DNA, 247 bp, unidentified
  misc_feature 1..247: note = Ga0376443_00295 JGI
  source 1..247: mol_type = other DNA
gtcaacaacccctgagctaaagactcaggggcttgcaaggtaacttgtaagcccagttgaccagtctaagtgcttagcgcactacgttagatcagaaataggtactctggggtgcttgccagctccagactctacggtaaacagttaaacaggtgtagggattaatccaatgctgtttacgttaaacctgatcataacattgacgaggcaaacgtaacccaagaaattggaggtcttaaatttgaaa

SEQ ID NO: 370 - DNA, 1350 bp, unidentified
  misc_feature 1..1350: note = Ga0211577_10055383 JGI
  source 1..1350: mol_type = other DNA
atgtcccaagtttttgttgtcgacaaagaacgtcgtccactagccccctgcaccccgaggcgagctcgcttgctcctctcggagtgcaaagcttccgtatttcgacgataccctttcaccatcatcctcaaggagtcccacgccacagccactccacgacctctcaggctcaaaatctaccctgcgagtaaaacgacagggttggctgtcataaatgagtctacagctgaagtggtctgggctgccgaacttaagcatcgtagccaactgatcaagaaagcactggagagtcgtcgttctttacgtagtggacgacgcagtcgcaaaactcgctaccgaccagctcgctggctaaaccgcgtacgtaataatcctgtgtttaccaatacagagggggctgtcatcacaggaaagtggttgcctccctctcttcaacatcgggttgaagtagtaatgacctgggtagaacgcctccagcgctatcttccgatcacagcgctatctcaggagattatgcgctttgatacgcagaagctacagaatccggagatcagcggtgttgagtatcagcagggtactctgcacggttatgaagtgcgtgagtatcttctagaaaagtggtcacgaaaatgtgcctactgtggagctagagatactcgtctggagataaatcatatcgttgctcggagtcgtgggggtagtgatcgggtcagtaatttgaccctagcttgtagatcctgccgagagcagagaggagcttccaatttggaagaatttctggcaacaaggcccgcgttgttgatgaaactccaaagtcaggctcaggtctccttgagagatgtagcagcgatcaactctacacgttttgtgttgttagagcgcttgaaggctagaggcttgcccgttgaagtttccagcggaggagagacaaagtttaatcgtaatcagcaacaaatacccaggtcccattggcttaatgcggtttgtattgggcccaataccccagaaaatttaaaatgggatcaggtacagccgttagcaatcaaggcaatgggccatggcaagcggcagatggtcaatgttgatgcctttggattcccgaggggtaaaccgaaggggactccggttcacccatttcgtacaggtgatgtcgtacgggcagcaatacccaagggtaagtacgttggagaatacgaggaacggatctcatcaatcaagacttcagaaacaagggtggggattccaaataaaaaaggccaaggaaccatctatctacagactaaatacatcactacaaaaatatttagttcagatggctttgactatgaatttcttaccagtgaatcataa

SEQ ID NO: 371 - DNA, 295 bp, unidentified
  misc_feature 1..295: note = Ga0211577_10055383 JGI
  source 1..295: mol_type = other DNA
atgttcattaaaaagagtgaactctgggctgactctcgcaaatgaagtgcggtttttccgcagctacaaccagactaagttcttcgagaactacgttattttcgtgatcatacctacgggtgcgtgccagcccgtagctctatggccattgcgttaaacagagactttggagggtgctcagtgcgcgtggcgtgacaagcgatgataacattgtcgaggcaaactttacgtgagggtctagcttcctcggaagcaaacattcgatcgctagcttcaaggctaaccaaatgtccca

SEQ ID NO: 372 - DNA, 1338 bp, unidentified
  misc_feature 1..1338: note = Burkholderia turba
  source 1..1338: mol_type = other DNA
atgccgtgcagtgaaaagcgcgcgagattgctgctcgcgcgggaccgcgcacgcgtgcatcgagttgtgacgttcgttattcggctcacgcaccgtaacgccaattgcagcaaatttcaaccgttgcgcctcaagttcgaccccggtagcaagaccaccggtctagcgcacgtgcgcgacatcgtaacgccgagcaaggagtccgtcgaactcatccgcggcgcagccgtacttaatctattcgaactggcccaacgcggccggcaaatcagtgaggcgcttacggcgcgtcgggccatgcgttgccggcgacgcggtaagctgcgctaccgtgcaccacgcttctcgaaccgcacgcgctctatgggttggcttgccccctcgctccagcacagggttgatactacaaaggcctgggttcatcgtatcatgcgctgggcaccgatcagcgcattctccagcgagctcgtgcgcatcgacacgcacctgctcgaaaaccctaaagtcactggggtgggctatcagcggggaacgctggcaggctacgaaatacgcgaataccttttggagaactggggccggcgttgctcatactgcgacgcaagtggtgcgccgctgcaagtagatcacatcgtcgctcgggcccgcggtggcaccgatcgagtgtcgaacctgacgctggcctgcgaaccttgcaaccgggcaaagggggcgctgtctgctgaagcatttctagcgaagcggccaacgcgattggcgaagatcctgtcccaagcgaagcgtccactgaaagatgctgcagcagtgaacgccacacgcggggcgctgaccaacgcactggacacgatcggcctactcttggaacttgcctcaggcggacgtaccaaattcaatcggttggcagtcggtgtaccgaaaacacatgcgctcgacgccgcttgtgtcggggcagtatctgtcgtaacaaactggattagaccgatcctgtctatcagctgcaccggtcgcggcagttaccagaggacagggctcgaccgctgtggcttcccgcgcggcggatatctgacaagggcaaagcgtgtgcacggattccagaccggcgacctcgtgcgcgccgatgtaccctttggaaagaaggctggcacatacgtcggcagagtggcgatgcgtgctaccggttacttcaacattcaaagagctgggaaagttgtacagggcgtcgcgcatcggcattgccgattggttcaacgtggcgacggctacgcatactcccggataagcccggcccacgcaggcgcccgcagacgcggtgagggcccgtcgccctatcccttgtga

SEQ ID NO: 373 - DNA, 318 bp, unidentified
  misc_feature 1..318: note = Burkholderia turba
  source 1..318: mol_type = other DNA
gtcaatcaccccggcaaagcccggagctttttgaagcactcgaaagctcgagattgaccagacctagcactgtaaagcgctacgttgtgcagagacagcaaacccaccgtcgaatgcttcctcagttcgacgctctggaagtcgcagcagcagacaagccccgggtaggtacgaaacgggctgcgacggaagcgaaggcttcacctgctgcacaacatggtcgaggggagccatacccgaaggtatgcgtcactaggcccgtaaggccaaccgcgccgaacggacttcggcggtgatcgaataggggctgccttggct

SEQ ID NO: 374 - DNA, 1593 bp, unidentified
  misc_feature 1..1593: note = Human gut metagenome
  source 1..1593: mol_type = other DNA
ttgcaaccccgtgcatcaagttctgtagaccttggcgatgggcaacacacaccgatttgctgtgaatcaggagtgaggacgcagagatgcggacaggacagtgttgttcctgtcatatctgaagaaaggaggcgtaagcctatgaacagatctgacaagtcagttcttgttattggaatgaatggtatcgggcttatgcctaccacaccacgtaaagcaagacttctaatcagacaaaaaaaagctgaagtggtacgaaagatgccattcacaatcagactgcggtacaaaaccggcagtgccacgcaacatgtagaacttggcatagatacgggttctcagcatattggagtcgctgttgcggcagacggcaaagtattgcaaaaatctgagcatgtgctccgttcaacaatggataaaagagtgctgaacgaaaaacgcaaggctcagagaagatccagacgatatcgcaaaacagaataccgtcatccgaagtttagccagcatacgaaatatgtgtacgtagagaaaacagtcactcggaagaagcacaagacgcactggaagaaaatcagcaacaggtacggtacaaaccgtaaagaaggatggcttccgccatctattcagcagaaaatcgacatgcatatcatgatcatcaggagatatcaggaagctctgccacttgatacgtcaacaaatatcgaaattgcaagatttgatatccagaaaatcaataagccagatatcgaaggcattggatatcagctgggcagaatgtatcagtttgaaaatgtaaaagcatacgtgctatggaaacacagctaccgctgtcccgtctgtggtacggaattcgggacaaaaagaaaatctgatggaatcatggctttaccagaacttcaccataagcatttcagaagcagaggagccacagacaatccggatgagtatatgcctgtctgtacagtagatcatcgtgctgcagagcatggtgacagtggaatacttggaaagctgcgaaaagcagaagaaaagacaatccgtggacagagagatatgacattcatgaatatcctcagaaaacgaatgtgggaggcttttccaacagctgtgtttacatatggcaatgtgacgaatgcggacagaaaaactatcggtctatcaaagactcatgcaaatgatgcggtggcaattgccatgcacagacagatactgtctggcgtgcgaagcgttgcagatgctgcagatactacatactacaagcaggtacgcaaaaagaaacgttcactgcatgaagcaactgcaagaaaaggtagagccagaccaaatactgctgcaaaacgcaatgcaaaaaacacaaagtctttgactgtaaaaggaaagaagtactgcctgcgtgacaaagtagaatacaacggacagattgcgtggattgctggcttttcaggaaaaacaggttgtagaattcagtctattgatgacaaatatttatcccaaccaggaaaatcatacacatcaatcaatctttcagacgttaatgtactcaatcacaacaataactggatcgtaggatccatacaagaaaaatcaatataa

SEQ ID NO: 375 - DNA, 355 bp, unidentified
  misc_feature 1..355: note = Human gut metagenome
  source 1..355: mol_type = other DNA
acaagtaaccgagcatgtcagcaccgacgtgcctgttgtagcttatgtgggtgtcctgcataggatactccgtcgactagcctgagatcgcttatacagattgcgatgactaagtttgcagaatcaatactcgaaccagtgatgcccaagttggatagagttggggcaatgtatttcagagagaacagaatgattgcaaccccgtgcatcaagttctgtagaccttggcgatgggcaacacacaccgatttgctgtgaatcaggagtgaggacgcagagatgcggacaggacagtgttgttcctgtcatatctgaagaaaggaggcgtaagcctatgaacagatctgacaagtca

SEQ ID NO: 376 - DNA, 882 bp, unidentified
  misc_feature 1..882: note = Ga0061017_10387965 JGI
  source 1..882: mol_type = other DNA
atgcctacggaaaaccatgcaaaagtccgtattctgctaaagaacaaacaggcaaatgtaattaaaaggtgtccgtttacaatacagttagcgtatgatagcacgaattatacgcaagacgttactttaggtgtagatagcggcagtaaacatatcggtctttcagctaccacaaaagacaaagtattatttgaatctgatgtggaacttcggaacgatatagtggatttgctttctacccgtagacaaaaccgtagaaccagaagaaaccgcaagacccgttaccgtaagccacgtttcgataatcgtaaacgcaaaaacggatggttagcaccttcggttcagaataaggtagattcgcaccttacggtaatccgtaaaatacacgaaatcttgcctatcggtaaggttattgtagaagtcgcttctttcgacatacagaagattaaaaatcctggaataagcggtacggagtatcagcagggtgatcagttaggcttttggaatgtacgggaatacgtacttttcagagacggacacgcttgccagtgctgtaaaggcaggtcaaaagacaaaatccttaacgtacaccacattgaaagcagacataccggaggagatgctcaaaacaaccttattacattgtgcaagacctgtcatacaggataccataaaggtacagtaaaactgccaaaaactataaggcgagggatgccttttaaagatgctgcctttatgggaattttacgatggtctatgtataacaaattaaagcagatatatcctaatgtaagtctgacttatggatatatcactaaatccactcgtatagagaatggtctcccaaaagaccattacatagatgcccgttgtataagcggt

SEQ ID NO: 377 - DNA, 277 bp, unidentified
  misc_feature 1..277: note = Ga0061017_10387965 JGI
  source 1..277: mol_type = other DNA
actaatacccacgggcaagcccgtggggttgcttgacaacccagagtgagtagcctaagtgaagccttttggctgaactacgttaagagagaatatatagtcacctacgagcgtaatgcctaacttgtagctctgaggtcagtgattaaacaatcctgtggtataaggatagtgttgctgatataaaacctctcattaacattggcgaaggcatacaaccgctcttcggagcgagtaattaaatccttatgggatttggaaaggagacagacttatt

SEQ ID NO: 378 - DNA, 1071 bp, unidentified
  misc_feature 1..1071: note = Ga0310140_0030813 JGI
  source 1..1071: mol_type = other DNA
atggtaccagtattagatataaataaagttccaatgatgccttgctcagaaaaaagggcaagaaagtttatggataaaaaagaagcaaaaccatattggcaacatgggatcttttgtataatgcttttgaaagaaccaagcaatagaaattatcaaaaggtagtagcaggtatagatccgggaagcaaacgagaagggtatacagtagtaacggaaaagaaagtaattctaaatgtaactacagatacaccatattgggttaaagataaggtagagacaaggagaacattaagaagaacccgaaggcaaagaaaaactccatatagagcgtgtagaaataatcgctcatctttaagaaggattaataggctcccaccatcaacgaaagcccgatgggatgccaagcttagaatcttaaatatattatctaagctattcagaatcacagatatcaatgtggaagatatccaagctatgaccagaaaaggaaaaagcaaatggaacatttctttttcccctcttcaaactggaaaaaattccttttataataaaataaaagaaatttatccaaaagttaatttagttttaacagaaggttataatacgaaattacatcgggataaaagaagctttttcaaatcaaaagccaaattagattatatttgggatcggcataatgttgatagtcattcattatgtgagatggccttgaataaagagataaaaccatataaaggaatgtataaaatagagtttatgcaatttcatagaaggcagttacatatgaagcagccattaaaaggaaatgcccgcaagcaatatggcggaacagtttcattagggtattcgcgaggatcaattttaagatataagagagataacaaaatatattatttgggtggtactggagttactcgtaaaaataaaatagccatacatagtgtggtaacaggcaagagaataaagcaacatacaaatttatcagatatagagattatgtataataatacaattagaacgcaatttctgccatctttaaagaaatgggcatctttgtgcactttaggataa

SEQ ID NO: 379 - DNA, 254 bp, unidentified
  misc_feature 1..254: note = Ga0310140_0030813 JGI
  source 1..254: mol_type = other DNA
gtcaataacccttaaataaaattaagggcttgtgcgaagaaaaatagtcaatttcttttgatcaagactaaaatattgtactagacaaggcagtatgcaaatagctggatcagctttcgttatgacaagaaggcaaagtacgttatggatgtttcgctagtctttaacctctatgattcaggtatgtcgaagcgagttggacaagggtgcgtaagcatcgtttttgtagtaaaggaaaaataagtaaatggtac

SEQ ID NO: 380 - DNA, 1515 bp, unidentified
  misc_feature 1..1515: note = Human gut metagenome
  source 1..1515: mol_type = other DNA
atgggagggaacagtgagctagtcatattaacatatttaattaaaaccttatataacattggtgatggtaaccacccacaaatgtggagaaacttagtatgctgtactatttatttagtacattgtagtatacagaaagaagacgtaaatcattttattagaaaggaggcaacaattatggttgctgtattaagtagtattggcactaaattgatgccaacttctaattacagagcacggaaattacttaaaaaggaacgtgctaaaatttataagtatagaccatttactattcagttattggatagggaagagggtgatactcaaccaattgagtataaatgtgatactggatatcaacatattggtattagtatctgttcacaaaagcacgaatatgtgaatttacaagtagacatgttaaaagacgagactgaaaggcacaacgatcaacgtaaatatcgtagaactagaagaaatcgtctcaggcatagagcacctagatttaaaaatagagtttcatctaaaaagaaaggttggttagctccatctgttaggcataaaaaagaaatccatattcaatggttcaaaaaatattatgaggtaatgcctataacagatgctacttttgaagttggtgaatttgatactcaacttttaaaagcattacaaactggatctcctataccaactggtaatatgtatcagcagggacctaggtataaaataagtacattgagaaatgcaatatttacaagagataattacacttgctgtatatgtggtaatggaatacctcaaaataccatattatgtgtacatcatattggttattggtgtggagatagaacagacagactagataatttacttacagtttgtactaaatgccatgtgccagcaaatcatcaaccaggtggcatattatatggtcttaaaccaaaattaaaaaatttcaaaggtgccacttttatgacaattatcagatggcaattgttagatgagttaaaaactaactttcctgatatagatttccatgcaacttatggtagtgaaacaaaagaaagaagacgcatattaaaggttaagaaatctcatagtaatgatgcttatgtaatgggtgattttcatccaaaacatagaactgattttgtactactaaccaaaaagagatgtaataatcgcatattagaaaagttctatgatgctaaatatatagatagtagagatggatctaaaaaatcaggcaaggatttatcttctggtagaacaagaagaggtatatattctacaaaccttagatgttatagacaacaaaaagtttctaaaggaagacgttctatcagaagaaaccattatttattacaaccacatgatgttgtaatatggaacaatcaaaaatatacagtaaaaggggtacataataatggaacacgtgttatattaaagaaaaataataaatctgttaagatatctgatattaaaattattagacattgtaatggatactattaa

SEQ ID NO: 381 - DNA, 311 bp, unidentified
  misc_feature 1..311: note = Human gut metagenome
  source 1..311: mol_type = other DNA
ataagagttaattattactttgtaataattttctagaaatcagttggggcttgtaattcttattgcaagccttattgaatagcctaagtatttcggatactacgttatataagaataatataggtaccaaggtgatgcttaccaagtcccttgctctacggattagctttaaacagttctcatgggagggaacagtgagctagtcatattaacatatttaattaaaaccttatataacattggtgatggtaaccacccacaaatgtggagaaacttagtatgctgtactatttatttagtacattgtagta

SEQ ID NO: 382 - DNA, 1488 bp, unidentified
  misc_feature 1..1488: note = Ga0120377_1000528 JGI
  source 1..1488: mol_type = other DNA
gtggcgaagagcaccaccctcgcaagaggagaatccggcggttctatgaccggggaagtaattcacgaaaggagacacaaagtgatggcatacgttgcagtcctgtcagcatctggaaaatcgctgatgcctacaactgcatacaaagcacggaaactcttaaagagtagacgtgcaaagatctacagctacagaccgctgttcaccattcagctgcaggaccgtgaagaaggtgctacacagcctgttgagctgaagatggataccggtgcacagcatatcgggatcagtgtctgctctgaaaagcacgaatattggaacaggcgctacgatatgctgcctgacgaaaaagagatgcatgatgaggcaagaaaaaaccgccgtaacagaagaaacagccttcgttatcgcgctccacgctttgataaccgcactcacggtcataatcgcaaggaagataagtggtttgccccttctctgaaacacaaagaaaacatccacattcagcttgcaaaaaaaatctgtgcagttgtcccggtaacagacgctcacttcgagatggggcagttcgacatccagactttgaaagcctatgaagcaggaaagcccatccctgtaggaaacgactaccagaaaggtgagcggtatggttatgccactcttcgcgaggcagtctttgcgcgtgacaattacacctgtcaggtatgcggcgccaaactggatgacaagcaccatccgattttgagaatgcatcatatcggctattggaagcacgatcattccaatcgcatgagcaacctgatgaccgtttgcaccaaatgtcataccgcagcgaatcataagcccggaggcaggctgtatggtctggagccagagcttccaacattcaagggtgccgcattcatgaatacggtgcggtgggatatgtttgcacagctgaaaaaagcattgccgaatgtcaaatgccacatgacatatggtgccatgaccaagctgaaacgctcagaactcaatgtcaagaaaacgcacagcaatgatgcgtattgtatgggaaagctgcatccgaaatggaggaccgactttcagcattatcagaaagtacggcgcaataaccgagtgctgtccaaattctacgatgcacagtatatcgatacacgcgacggagagaaaatgagtggttctcagctttcctgcgggcgaaccaaacgcagtgagtccagacacagcataaaagatcttcgtggatacagagggcatcgggcaacatcaaaaaagggaaaaatatccaaaggccatatttcaacaagaagacataaatatgtattcaacaccggagacattgtaatcgtcgaaggcaagaaactgacggtttccgggacacagcattacggtgaatatgtagtgtttcgggacaaaacacatgcatctgcaaaagcaaaagaggtaacaatgtatcgacacggtgatggctgggtacgtgttgtataa

SEQ ID NO: 383 - DNA, 261 bp, unidentified
  misc_feature 1..261: note = Ga0120377_1000528 JGI
  source 1..261: mol_type = other DNA
gtcaaccaccccgcccatttacttcggtaaatggacggggcttgcggggaccagaatacccccgtaagcccggttgaaaagccagttacatgttgcggaggaaatatacaataggcacttcggaacgctgctcaaattctgaacactgcgggcgtgcattaaacatcctataggggaagggaagtgtgtacgtctcggcggactgacagcaacatcgccagaatgccgtaaaaccctctgataacagtggcgaagagcacc

SEQ ID NO: 384 - DNA, 915 bp, unidentified
  misc_feature 1..915: note = Ga0209066_10011920 JGI
  source 1..915: mol_type = other DNA
atggcagtttttgttctggaccgaagcggcaagccattgatgccgtgcagcgaaaagcgcgcaagaaagctgcttgccgcgggtcgtgcgcgcgtgcatcgggtgatgccgttcgtgatccggatcgtcgatcgccgcctgcaggatagcgcgttgcaaccgcttcgcgtcaagatcgacccgggcagcaagacgaccggactcgcgctcgtgcgcgaagtcgattcgatcgatgtttcgagtggtgaagtgcgccgcgaagtcttcgtgctcaacctcttcgagctggtgcatcgaggtcgccagatctcggagacgctcacccagcgcagtgcctttcgccgtcgtcggcgtagcgcgaatctgcgctatcgcgcaccgcgcttcctgaatcgcaagaagggccagggctggctcgcgccttcgctgcgccaccgcatcgagaccacgctcgcctgggtgcgtcggttcgagcactgggcgccggtcaccgcgctctcgcaggagctcgtgcgcttcgacacgcaaaagatggagaacgccgagatctccggcgtcggctatcagcaaggcacgctcgcgggctacgagctgcgcgagtatctgctcgagaagttcaaccgcacctgttgctactgcgacgcccaagatgtgccgctcaacatcgagcacattcacccgaaggcgcaaggcggcacgaaccgcgtttccaatctggcgatcgcctgcatcccgtgcaacacaaaaaagggcgcgcgctcaatcgaggtctttctcgcgaaggatcctgcgcgtcttgcacgcatccgggcgcagttgaagcgtccgctcaaggacgcggccgctgtcaatgcgacccgctgggcactcttcgaggcgctcaaatcaacggggctgcaagtcgaagtcggcagc

SEQ ID NO: 385 - DNA, 316 bp, unidentified
  misc_feature 1..316: note = Ga0209066_10011920 JGI
  source 1..316: mol_type = other DNA
gtcaattacccgccacctggcgtaaccgccgaggtgggggcttgtgaacaacaagcctgattgaccaggcccagctgcgatgcatcgcagctacgttgcaacgaagtacaagacgcaccgccggatgcttcctcagtccggcgctctgcaagcggcagcagcagacacgccttcgggttggcacgaaacgggctgtcgcaagatcgggatcatcgatcgaagctgcgttgcaacatggccgaggggagcggcacgaccggaagggagtgcccgtaacaaggcccgtaagggcatgcattaaggagtcgacatggca

SEQ ID NO: 386 - DNA, 1182 bp, unidentified
  misc_feature 1..1182: note = Ga0373621_017898 JGI
  source 1..1182: mol_type = other DNA
atgaacaatatctaccaggacaaaccgctacaagcaccggcggatgcttctccagtccgccgctctgctggctgcgcccaagccgatgaccataagaggtctaagcggagttctgctggtcgaggagagaatacttcccgaaagggaaggccgattatcggcaagcatggcgtgtgggtggtgggggtggacgggaaaccgttgacccccacctctcccgcccgtgcccggaagttgattgaggatggtcaggcagagaaggcgtggaataagtttggagtattcggtatcaggatgttggtagccgtcgggaatactaccccgcagacgaccctgacggtggacaacggcacgaagtacgaaggctatacggtagtctgtgggacggagaacaatcaggcggtgaaccttaatctgcctgacaagaagaagattgtgcgaaaactggaaggccgtcggcagatgcggcgggcaagacggcaacgcaacacccgacggagagcggcgagatttgacaatcgaagtcgcaatggtttcattgccccgagccagatggtgatggtcaattcccggctaaagatcatcaatgaacttgctcggtgctatccgatttcggatgcggggattgaagatgttcgttttaaccatgcccagcatcgttggggagtgaacttctcaacggtggagattggcaagaatttgattcgggagttctttaagtctcggggcattaagatatttgagtttgcgggttacgagacgaaagaactgcgatccaaatacggctataaaaagattaaggataagtcggcggatcggtttgaagcgcattgctctgacgccctggcgatggcctgcgaagtcgggcctggggaacgaattgagcttggaccattggttatcgttgacgacacctaccgcccggttcgacggcagttacatgacacccaaccggcaaagggcgagattcgggcgagttattctcggggtacggtgttcgggttgagaaagggcctgctgattggccgccccgatggacagatggggcggttgtgcggcgagtatcgggggggataccgttattttgattcaagaggcaatcgccaatcgactaaaaagctgttatttatttcggatcaatttataaccagaagggaggtgggcgcttctcccgccccttaa

SEQ ID NO: 387 - DNA, 293 bp, unidentified
  misc_feature 1..293: note = Ga0373621_017898 JGI
  source 1..293: mol_type = other DNA
gtttgatcgttcatccttggaagctgcgggagtttcacgaatgccgaatgcgggagatgtagtttgcgcttggaatcgttattatgatattattcagcaggaactaatgggttatcttgatgacataaactatttcactcaagttcaatgcgatttgaagaatcggtcgaagtttgaacctcagagaaagattgtataaggagaaaaagagtcaactacccgccccctaaaggggacgggcttgtgtaaggactatcacaacgtaagagttgactaggccaagagaggttcag

SEQ ID NO: 388 - DNA, 1632 bp, unidentified
  misc_feature 1..1632: note = Ga0209726_10008685 JGI
  source 1..1632: mol_type = other DNA
atgttgaccagggtaagcaggattagggcaggcaacccgcttgagtcttgctccgttgcggatagtgccaaagaccgacggcagagtgcttctccagccctgccctctcgaactcacgccagcagacacgccgggtcaggcacgaaacggggcgcgagagacgaccggtccgcaacattcccgaggagagccttcgagacggatgccaatctcgacgcgtcacggcccaagggtacgaccgaaggccgtctcgtcgcgaggggtaacccccgcgttttcgttctcgaccggcatggacgcccactcatgtcgtgccgattctgccgggcaaaggaattgctcgataagggtcaggccgttgtctacagtatccgccctttcacgattcgtctcgttgaccgtgtgggtggcgcggtccaaccggtccgcgccaagatcgatcccggctcgaagatgaccggcatcgctgttgttcgcgatgttgagcacgttgatgcaacgacaggtgaagtcacccgcgaagccgtggtgctgcacctgcttgagttagagcatcgcggcgcgacgattcgaaggcgccttcagcagcgtcgcggattccgtcgccgtcgccggtcggcgaatctccgatctcgcgccccgcggttcgacaaccgaacaagacccgatggctggctcgccccgagcctacaacaccgggtcgtcacaacaatgacgtgggtctcgcgcctgagacgagcgtgtcccatttccgctctctcggttgagagggtacgcttcgacactcacgctctcctcaacccggaaatcgatggcgttcaataccagcgcgggacgttgttcggcacggaaattcgtgagtatctgctcgcgaagtggagccacgcctgcgcgtattgtgacaaggcaggcgtgcccctgaacacagatcacctcgttgctcaggcgcggggtggctcggatcgggtgagcaatctcgtgatgtcctgcatcgactgcaacacacgaaaggccgatcggctgatcgaggagtttctcgcgcatgaccctgagagactcgcgagcattctcgcgcaggcaacggctccactgagggacgccgccgcagtcaacgcaacgcggaatgccctgttcttcgctcttcgggacacggggcttccaatcgaagccggaactggtggtcgaaccaagtggaatcggtctcggctcgacatcccgaagacccacgctctcgacgcagcctgtgtcggcattgttgattcggttgccaactggcagatgccggtgctctcgatcaaggccactggccgtggaagccgaaagcggacgcggctcgataggtacggcttcccgcgaggctacctcatgcgggggaagaccgttcgaggattccgaacaggcgatctcgtccgggccgtggttccatccggcacgaaagcgggcacgtggacgggccgggtagccgtgcgggccaacggttcgttcaacgtacagaccccggccggcacgatccaaggcatctcacacaggcattgccgcctcctcatgcgaggagacggctattcgtacacgatcgaagtagcgctcctccccgccgtgaacggcgaggtttccgcgccgggagaaatttga

SEQ ID NO: 389 - DNA, 327 bp, unidentified
  misc_feature 1..327: note = Ga0209726_10008685 JGI
  source 1..327: mol_type = other DNA
ttggcaatcaagacaagcacaatctttgaagtccaagacccgcaaggtttagccgtcatcctcgaacgcaatacatggcagcacattagcggtggtcatcccgaaatgcgagatcgcctcgatgatatcttccaggcaatcaagacccccaatttcatccaaaaggaccctcttgatcctgatagccgacgctattattggttgaaaccaacttcatttgggaaacactccaggctgtatgtactggtggttgtagggatagacaaagagtcggtaaacgggaaagtgcgcactgctcatctggttgaaaaaccgaagaagggaaca

SEQ ID NO: 390 - DNA, 918 bp, unidentified
  misc_feature 1..918: note = Ga0376502_004060 JGI
  source 1..918: mol_type = other DNA
gtggatcacttgcgaatgcaagggcagagcttgagagtctctgccaaaataatcaaaggaatctcaatgagcgtttgtgtaaaaaatatgcggggcggcacattgatgctgacgacaccgcaaaaggcaaaaattctattgaaacaaggaaaggcagtcattgccggctatcacccgtttaccatccagctgaattatgctaccggtgaggccaggcaggctctggttcttggcgtagatgccggttttaaaacaatgggagtttcaatcaccggcccgacaaaagagttctattcttgcgaaatcagcctgcttgagggacaggtggaacgaaataaggaacgaaggatgtaccggattcaaagaagatcccggctgcgtcacagaaaagcacgctttgataatcgcaggagaagtgacggttggctgcccccaagcatccagcataagcttgatagccatatcaacatcattgagcggctgaagtccgtattcccgattgcaaataccatcgtggaagtggcggcctttgatattcaaaaaatcaagatgcctgaaattaacggcacgcagtatcaggaaggggctcaatcaggattctggaatctaagggaatatatgctgcaccgtgataaccatacatgtcaaaatccggactgcaagaacaaatccaggcatcccgttttggaagtacatcacatagggtattggaaattggacaggtcggacagaccgggaaatctgatcacactatgcaacaagtgtcatacaccggccgaacataagaaaaatggttttctctatggttgggaacccaaaaccaagtcgttcaagccggaaacattcatgagtacagtccgttggaaactggtgaatacacttaagtgcgaccacacatacggttataagacaaaacaa

SEQ ID NO: 391 - DNA, 312 bp, unidentified
  misc_feature 1..312: note = Ga0376502_004060 JGI
  source 1..312: mol_type = other DNA
gtcaacaacccctcggctgaagaccgaggggcttgtggggaagcccgcaagcccggttgattagcctcagccctgcgttattggtaagcggggctacgttactgcagaatacataggtacttcgggatacagatctgaccaatcgtccacacgtcccgaatgttacggtcagtgtttaaacatctgtgagggtagcagaagtgatgctgatattaaaaacctgcggataacattggcaatgtggatcacttgcgaatgcaagggcagagcttgagagtctctgccaaaataatcaaaggaatctcaatgagc

SEQ ID NO: 392 - DNA, 1242 bp, Moorena sp.
  source 1..1242: mol_type = other DNA
atggtttatgtgataagtaaagaccgacatcctcttatgcctacaatgcggtatggcaaagtgagacggatgcttaaatcaggtcttgctaaagtaataaacagatatccgttcacaatacagcttttatataatgctacagattatacacaggatgtattattaggtgtagatgcaggcagtaagaacataggattatcggctacgaccattaaaaaggtattgttcgaagccaaagtcacactaagaaacgacatagttgaacttataggcactagacgcgagcagcgccgtacaaggcgtaaccgtaagacaaggtatcgtaagccgcgattcgataaccgtaaacgttccaataagtggttagctccatctgtaagacagaagatggagtctcatatcaacatggtacagaaggtgcataagattctccctgtatcacgtataaaggtagaaacagcttcctttgatatcaagaagataaaggcccccaatatacagggtactgactaccaaaacggtgaacaaacggggttctggaatacaagggaatacgtactgtggcgagacggtcatgtatgccagtgctgtaaaggcaagtcaaaggataagatacttaatgtccaccacatagaaagtcgtaaaacaggcggtgattcacctgacaacctcgtaacactgtgcgagtactgtcataaacagtatcatatgggaaaaataaaactccctaagacgatacgcaggggaatgagcttcagggatgcatcatttatgggtatcatgagatgggcggtgtatgacagactgaagggattatatcctgatgtaagcctcacatatggatacatcacaaagaatacacgcatcaggaataacctgcctaaagaccaccatatagatgcacggtgtatcagtggcaacccgacagctgaaagtgatggcacagtatatatctataagaaagtacggtgtcataacaggcagatacataaatgtaagatactaaagggcaacatacgtaaaagaaaccaggcaccatataaagtacatggattcaggctgtatgataaggttctgtataataatgagctgtataccatatatggacgaagggccagtggttttttcgatataaggaaacctgatggtacaaaagtcaataatggaagtatcagctgcaaaaaactgaaactcgtggctatgcagcatggctatatagtagacatgactgcatccgcatga

SEQ ID NO: 393 - DNA, 282 bp, Moorena sp.
  source 1..282: mol_type = other DNA
gtcaatgatacccaccacctaaaggtagtgggcttgcgtaaaaacaagctatgttgactagcctaagtgcctcggcactacgttaagagagaatacatagtcacctgtggatgtagtaccaagtctgcagctctgaggtcagtgattaaacagccctgtggtataggggcagtgttgctgacaaaaacctctttttaaccttggcgatggtacaccaacggtcagatatgtaccggcttacagcataaaacatatcaatacacgaaaggagtaccgcatatg

SEQ ID NO: 394 - DNA, 735 bp, unidentified
  misc_feature 1..735: note = Ga0099364_10003290 JGI
  source 1..735: mol_type = other DNA
atgcctaccgctagaaacggttgggtacgtagggcgttacgtagtggacgtgcggtcgttacttcccgcatcccgttcactatccagttgtgctatgattctactgaacatgtgcaagaatgcacttgtaaagtagatagcggaagtacgtttgttggaatttcagtaactacaggagaaaagattataaaagaggtattcgcagcagaagcacacctgagaacggatattgttgagttgctatctgctagaaaggtgcttcgtcgaaaccgtcgcggtaggaaaactcgttatcgtaaggctagatttaagaatcgtaaaaagcctgatggttggcttccgccttctgtgcgttggaaacttgatgcacataagcggctgattgctatgttgcataagtttttgcctataagtgacattttagtggaaactgcaccttttgatattcagaaaataaataatcctactatttctggtattggttatcaatgtggagatcagttaggcttccagaatgtcaaggaatatgttttgtatcgagataaacacaagtgtcagatttgtggtaaatcgaaagtgaaacttcatgtacaccatattgagtcaaggcaaacaggtggagatgcgcctaataatttggttgctttatgtttagaatgtcatgatatgttgcataaaggcgaagtaaaattaaagaaaaacgagggcaatcttttcgcgatgcaacacagatga

SEQ ID NO: 395 - DNA, 278 bp, unidentified
  misc_feature 1..278: note = Ga0099364_10003290 JGI
  source 1..278: mol_type = other DNA
agagctccgctcataaagtaaacaacccacacgttttattgcgtgagacatattagtctttgtttactagattaagttttaatgcccggctttcgttcgggaacataactacgttgattaggaaatacataggcacttcgggatacttgtcctagtcccgaatgctgcggtttatgattaaaagttctgatgggtaggagcggtgtcataagcttaaaaccccttttcaacattatcgaagggcacctcacgggaggaatcccgtcttatagaatttt

SEQ ID NO: 396 - DNA, 1116 bp, unidentified
  misc_feature 1..1116: note = Human gut metagenome
  source 1..1116: mol_type = other DNA
atgagtgtgttcgtggtagggctgaacggatgccggctgatgcctacatctgaaagagaggcccgtttattactgaaacatgggaaagcttctgtttatcggaaagtcccatttaccataaaactaaattataagacaggcagtaccacacagcctggttatttgggaatcgataccggatcgcagcatatcggagtgtccgttgtccgcgaagatggtaccgtgttacataaggaagagatcggtctcagggattccatgagtaaaagaaaactgatggagtcaaggtcttcattaagaagaggaagacgtcatcgaaagaccagatatcgccatccaaaatggagactaaaagccaaacgtgtttattacgaaactccagaccgaaaaggaagacactggaagaagcaaaagatcacgttcgcgtccaaacgaccgcagggctggcttcctccatcgctgcagtcaaagacggatcatcatatccagtggatcaagaagttacaggatcttcttccagatggatatcgtctttcgatcgaacttggtcgtttcgatccggcaagaatgaaagatacagagatccatggagatctataccagaaaggaccacagtatgactatgaaaatgttcgtgcttatgtcctcgatcgtgacagatatacttgtcaggtatgtggaaagaagggtggaaaattacatatacaccatatcctgtacagaagtcatggtgcgaccgataatccacagtatatggctacgatatgcagcgattgtcatagcacagagaaccatcaaccgggaggcatcctttatcagtggatgcaggagcagaagaaatttaccagaggactaagagatgctacattcatgaacatcttaaggaaacgtctgatgaaagcatttccaaaagcaacttttacctatggaaatatcacaaaagcagacagagagaaactgaagattcctaaaagccatggaaatgatgccactgcgatcgcaatcgtaaaaactgggatcatgacggtaaaggataacgaacctgtgatctatatccaacaggtccgaagaaaaaaacgttctctgcatgaagaaactccgagaaaaggacgcaaa

SEQ ID NO: 397 - DNA, 320 bp, unidentified
  misc_feature 1..320: note = Human gut metagenome
  source 1..320: mol_type = other DNA
tagaataaccgagcatgcagaaatgtatggatcagttatctgtagtacctgaaagggcatgctgactagactaagcacaacggaacttacagcttccatgctgtgaaggataccattagtgctacgtcccagatatcaatacccgacccggtggtacctaagccggcacagggttcaggcaacggatgtcttcccggagaagaagataccgacctggtgcaggaagtatccggaacattgtcgaagggtgaacactcccctgtgggagggcaggacttttgcgtacctgccataataacataaggagggaccagccatga

SEQ ID NO: 398 - DNA, 1368 bp, unidentified
  misc_feature 1..1368: note = Ga0209948_1000490 JGI
  source 1..1368: mol_type = other DNA
atggtatttgtattgaataaaaacaaagaatcagttatgccttgcagtgaaaagaaagcaaaaaagttattagaaaaagaaaaggcggttattcaccggcttgtgccgatggttataagactaaaggaaaacaaagattatgaaataaaaggtttgagattaaaacttgatcctggtgcaaagacaacaggatttgcagttctgatgcaaaaaagcaaaaacgaagcggatgctattttgttaggggaaattatacacaaaacaagtattaaaggcgcattggatgacaggcgttcaatgagaagagggaggagaaacaggaacacgagatatagacctgcaagatggttaaacagagcagcttcaaggaagaaaggtttatccccttctcttgaatcgagattgaatcaaaccgttcacgctgtacaaaaattaatgaagtggttgccgataggtgcaatatcggtagaacacgttaagtttgatactcagaaaatggaaaacaatgcaatagaaggaaccggataccaacaaggcacattagcaggttatgagatcagagaatatttactcgaaaaattccagagaaaatgcgcttattgtggggctgaaaacataccgcttgaagtagagcatatatacccaaagagtaaaggcggcacaaacaggattgacaaccttgcaatagcttgcaacgattgcaacaaagacaaaggaaacaaattacctaaggtatggcttgaagaattgcggacaagcaaaaggaaatcagacaatgacagagcgaagaagtttgaaaaatcactcagagatgcaaagaaaacactgaaagatgctgcggctgttaattcaaccagatggcgtttatatgaaaaaatgaaagaacttacacccttcgttgaatgtggttcaggagcacttaccaagatgaatcgcattcggcataatttgcctaaagaacattactttgacgcttgttgcattggaaaaagcacgccggaaataatcaacattaaaacaaattatattgaagaatggaaagcagttggtagagggaaaagacaaataattatgcctaataaatacggattcccaagaggacacacgtattttttgccgaaagataaaaacgggaacaaagtaggacacaggagaagaaagaaagttaaaaacggattcatgaccggtgacattgtgaaaggcacgcaacccaaaaaagggttgactgtaaccggtagatgtgacagcgtgaaagccacaggctctattatggttcctcacaacggtaaaagaatagcgtttagctctaaaaacaccgttttgattcagcggggagatggatggcaatattcaaaacgtaaaatataa

SEQ ID NO: 399 - DNA, 309 bp, unidentified
  misc_feature 1..309: note = Ga0209948_1000490 JGI
  source 1..309: mol_type = other DNA
agcgtttatagaatttgcgtcaaggttccagttttaaacgtttatagtacctcagcttcggctgattgaaccagactaagttccaagagaactacgttattcaggttatgacacctccagatgcttctccagtcgggagccatgtcgctatgctttaaacaggcttaaaggtattcagggaatgccagtgagtatagtgtaaaaagcctttataacattgtcgaggagagagaacgaaagttccgtaacaagccgcgtaagcggaaacccttcggggttattttgaataccagaggaggaaaaattatg

SEQ ID NO: 400 - DNA, 1221 bp, unidentified
  misc_feature 1..1221: note = Ga0123355_10000410JGI
  source 1..1221: mol_type = other DNA
atggctgatttttgttttgttattgacgctgaaagtaaacctttagcacctacgaacgttaatcgcggttggtaccttattcgtaaaaatcgcgccgctttagtagaacgttttccaatggtaataaaactacacaaaattgtagaaaatccaagttgcaatacaactcttggaattgatgacggaagtaagtataccggtattgcagtaattcaagaatgttccactaaaaacaaatgtgtattcaaaggcacattggaacaccgacaagatgtaaaaaaattattggaacagcgcgctagatatcgtaaattacgacgtttcaacaaacgacatcgtaaaccgcgtttcagtaatcgtaaaaatagcaagcgactcggaagagtagccccaagtattttacagaaacggcaagcagtaatccgattactaaacaaactctgcaaatggatacctattaaccatatcatccttgaggatgtatcaattgatattagggcacttaccgatggatataggccttacaagtggcaatatcagaaaagcaatcgtttagacgagaatctgcgaaaagcaacaatcatacgagatgacaataagtgttgcaaatgcggaaaaagaaatcaagaattacaagtacatcatattgtaccaaagcgtatgaaaggtgctgatatattagctaacttgattacattgtgcgttaaatgccacgaaagtataaatggttgtgaatatgaatttatacaactattccaaaaaaagatagagggtcaaaatatacgatttgattacgctcaacatgtaatgcaaggcaaacattggttaagaaaccaattatcaattcttgcaactctggaattaacagacggtggcacaacagcaaatcataggattgattggggcatagaaaaatcacatgttaacgatgctgttgttattacaggattatatccaacaatcttgtcacaaaaagattgggatataaggcctaaacgtaaaaaacgcaaaatgaaacataaggttgatgtttgcggttttcgacatggtgattacgctaaatatactgatacaaaaggtgttacttggtcagggtatataactgctatatatcccgataaaaagcagtttaatttacagtgcaaaacaaaacatttgaaacgggttaatgctacaaaaagtacattgttggccaagtacccacaattgtccatgttttag

SEQ ID NO: 401 - DNA, 278 bp, unidentified
  misc_feature 1..278: note = Ga0123355_10000410 JGI
  source 1..278: mol_type = other DNA
taaacaaatgtggacacaaatggtcatatgtttataactattgagggggtttcaagcctaagtgagtgccgtaaagcgaaagcatactgcacgacgaactacgattagcgggtaagttaaagacgcaccaatggatgtatgcatcagtccattgctctgcgagtgaggcaggatggccgactactaatgtcctgtagtcaaacaccgaatcacatgaacttccgtctgtcattggcaagaagcaaagttccatgaaagtgagggtggtcagaaatggc

SEQ ID NO: 402 - DNA, 1194 bp, unidentified
  misc_feature 1..1194: note = Ga0134588_000160 JGI
  source 1..1194: mol_type = other DNA
atgctagtttatgtgttaaacaaaaatgggttaccattgatgccttgcaaaccagcaaaagcaagaaaactgttaaaagctggtaaggctacagtagttagaagaacaccgttcactattcaattaaattgggattatgaaaatcacattcaatctgctactttgggtgtagatgctgggtataaggtagttggtatatcagcagttaatgaacaaaaagaattatttgctacagaagttaagttaaaaacagatgttagtaaaaaactaactgaaagaagaatgtatcgtagaatgcgtagaaacaagctatggtatagaaaaccaagatttctaaacagaaaaagaaatgatagctggttaacaccaagtgttcaacacaggttagatagtcatttaaaggctattaagtttgtatgctcaatcttaccaataagtaaaataaatattgaaacagctaaatttgatattcaaaagattaagaatcctggtatttcaagtactgaatatcaaaatggtgaacaaaaggatttttggaatgttagaaattatgttatttatagggataatcatcaatgtcaatattgtaaaaaatccaatatacctcttaatgtgcatcatataaaaccaagaaaagatggtggtactgataaaccagataatttaataacgttatgtgaaacctgtcatcaattatatcataggggtaaaataatattaggtaagattaaatattcaaaggagttcaaagcagagagttttatgagtataattagatggagaatatataatattctcaaagctatttattcaaatgttaattttacctatggatatataactaaaagtaaaagaatagaacttggtttatctaaatcccatgtaaatgacgcttttgttatagctgggggcacagagcaaaatagaatagaagtattggatagttattttaacagaagaaataatagatcacttcaattgaatagaaatggttttaaaccatctgttaggaaacagaaatatcaatatcaaccaggtgatatagttagcttaaataatattatctattttgttaaaggggtatttaacaaaggtaaatatataaaattaatagataagtacaaaaatatagttaatgttaatattaacaaagtgaggttaataacttatggtaaaggattacaattcatctga

SEQ ID NO: 403 - DNA, 258 bp, unidentified
  misc_feature 1..258: note = Ga0134588_000160 JGI
  source 1..258: mol_type = other DNA
gtcaactaccaaccacttatagaagtgggggcttgtgagaaacaagttagttgattagggagcttatgtatgagtaagcagcagttatcaagaagagatacatacacacctacagatacttctctagtctgtagtaactgtgatctatcattaaacatgcatgagagggtaagtgcaagtgtgatagatttaaaaactcttgataacaatcccgaagagaaccaaccatatctgatagtgggctttataagcaaaagt

SEQ ID NO: 404 - DNA, 1245 bp, Moorena sp.
  source 1..1245: mol_type = other DNA
atgacaaattatgtttttgtaatagatgctaatggtaaacaattagcaccaacaaaagaacaaaaagcatggtatcttattcgtaagaaaggtgctacattagttaataaatatccaatggtaatacaattaaataaagtgattaaagataataatatttgtaaagatgaaattcgttgtggaattgatgatggtggacttcatgtaggaattgcattaattcaaagatgtcaaacaaagaacaaggttctttttaaaggaactattgaacaacgtaatgatgttaaacatttaatgcaagttagaaaaaaatatagacaatatcatcgttatcataaaagatatagaccagcaagatttaataatcgtagttcttctaaaagacagagcagaatagctccaagtatttttcaaaaacgtcaagctataattagagtaataaatcaattaaataaatggataaatataaaaaattattggcttgaagatgtttctatagatataagagcattaacagatggatacaaaccttatagttggcaatatcaaaaatctaatagattagacgaaaatattcgtaaagctattattttaagagatggctgtaaatgtatggaatgtggtaaagcaaattgtagattagaagtacatcatataaaacccagaagattaaatggttcaaatacaatagataatttaatcatattatgtaaaaaatgtcatcaaaagacagagggtaaagaagaattgtttatgaacaaatatttttctttattgggtaaatcaaaagataataaaaatttaaattatgcaagtcatgtaatgataggaaagaattggttaagagaacaattgtctaatcttggtgaattatatttaacaaatggtggagatactgcaaataaacgaattgattggaatatagaaaaaacacattctaatgacgcaatatgtataactgaattaaaacctgacacaacagatataaaagattggattataaaagctatgcgtagacaaagtaaagctaaaacagacaatgtattaggaataaagcatagagatttagtggaatataaatataaaaatggagaaatacatagagggtatgtaacagcattgtatccagaaataaaggcattaaattttcaaagtccaacgaagcattgtaaaaaagtaaatgctcgaaaatgtaaactactttggaaatataacaaaatatattggttagataatgtgaattaa

SEQ ID NO: 405 - DNA, 289 bp, Moorena sp.
  source 1..289: mol_type = other DNA
tgtttgaacatagacaaaagaggacagattaaatcttttgtctatgtcttagcaataggtctcaaggcttagtgactgctactatcgaaagatatgttgcagatatgaactacgttgtacagtaaggtaaagacacaccaatggatgtaattctcagtccattgctctgtgagtgccaatcaagaaacaatgctaatgtcctgcattgataacagagaaacacatatcctctgtatgacattgccaagaggaaaaatactccgaaaggaaggtgtcagaaatgacaaat

SEQ ID NO: 406 - DNA, 795 bp, unidentified
  misc_feature 1..795: note = Ga0066903_100182758 JGI
  source 1..795: mol_type = other DNA
atgagctgcgatcttttcgaatataacaataggcgccccgggatgcggcgccagtcccaggctctgatgcttgcgattaaacaggcgacgaacgcgaagccagtgtcgcaagcaaacaaaccgcaacggtcattgtccgggcgaacattacgtaacagcgctgtcgcgtcgaaatcgaaaggtttctttgtcgatatgagagtagctgttttagacgcgaccaaaaaacctttggcgccgacgaccccgcgccgcgcccgattgcttttgaaatcaggcaaagcagccgtctttcgtcgctacccattcacgctcattttgaagagggaggtggtcggcgttcaaacgcccgatctccgattgaaagtcgatcccggctcaaaaacgacaggcgtcgcgattgttcatcgagaagccggcgaggtcgtcttcgccgctgaaatcggacatcgcgggcaggcgatcaaaaagagcctcgatgcgcgacaaggcgagcttgggggctttgaactgcgcgaaggcaaaagcgcgcctgagaaagtcgagatcgcgaatgcgcgaccgcttcggatcaaagccactgggcagggaacgcgacaaaagtgttcgacgaacaaatatggctttccgatacgacatcgaacagggcggaaaacattaatggggtttgaaaccggcgacatcgtgaaggcggacattccgagaggcaagtatgcgggtagatatgtcggacgggtgacgattcgtcaaaggccgtctttcattttgaacggcttcgatacgcatccgaagtat

SEQ ID NO: 407 - DNA, 292 bp, unidentified
  misc_feature 1..292: note = Ga0066903_100182758 JGI
  source 1..292: mol_type = other DNA
atctgctatgccgcgagcgtgacaacgctttcggccccagctcaactctcctccggcgtctctcgaaagatagcgtcgtgagcgtcaaacacgatgagctgcgatcttttcgaatataacaataggcgccccgggatgcggcgccagtcccaggctctgatgcttcgattaaacaggcgacgaacgcgaagccagtgtcgcaagcaaacaaaccgcaacggtcattgtccgggcgaacattacgtaacagcgctgtcgcgtcgaaatcgaaaggtttctttgtcgatatgag

SEQ ID NO: 408 - DNA, 849 bp, Microcoleus chthonoplastes
  source 1..849: mol_type = other DNA
atgctacgagtaccagttctatcaaagagaagattcaataaccgtaaacagggtaaactacctccctctattcgagccaacaggcagttggagttacgagtagtcaaacaactgtgccaactatttccgattagtgcgattcactacgagctagtcatggctgacgtagataggactaggggaagaaaattagcacgatccggcgttggcttctccccggtcatggtgggacaaggacaaatgctgacttggttatctgaattagctccagttacaacccacaagggatggcagcgagacggcaatggaaccagtcaactcagaaagtggctgggactacccaaggataagaagaataaagcttgctctacacctgcgacccatgctgttgacggtgtaattctagccgctttcgagttcattcaatggcgcgaatggcattctgatcatactaagcacggtgactggagaggtgatgttcagattacacccgcgccatttacgatcatccgcagacctccaatcagtcgtaggcagttgcatttatgtgtcccgtctaaaggtggaaagcggcgtaagtacggtggcactgttactcgtcacgtagagacgcgccatggcgcgtctttacgcaagggtgatcaggttatcgctgaaaaagccgggaagtcctatgttggttggtgttctggtgatactgatcaagcgatttcggttagtgatgctaactggaagcgacttgggcagtttacggctaaaaaagtccgattgttgcagcgaagcacgggattaattgtcgcgccttcagttggattgtcaaacctaaccgcatcgagcggcgcggtttga

SEQ ID NO: 409 - DNA, 275 bp, Microcoleus chthonoplastes
  source 1..275: mol_type = other DNA
ttcaacaaccccaacctacttcgttgaggttggggattgccggacaaacggcaatttaaaccgttgaataccgcattgagtctcggtttggcacagacacccggatacttccctagtccggatcaaatctaaagccttttgtcgggctgttgtaagacaagacatcttaaccgagatggcgggaagggactacatttcgacttatctcgacttcgctcgatacaagtcgctcaatgtaaacactttcactcgtgaggattatctccatgctacga

SEQ ID NO: 410 - DNA, 870 bp, unidentified
  misc_feature 1..870: note = Ga0376082_0035695JGI
  source 1..870: mol_type = other DNA
atgtcaaactacgtctttctaattgaccgcaaccaaacaccgctaaatccagtacatccaaaacaagctagaaagttgttggatgcaggcaccgcagcagtgtttcggcgatatccgttcactttaatactcaaacgagttattgacaatcccaacgtttatcctctgacacttaaaattgacccaggctcaaagtttactggtattgcgctagtaaccaaccaagggaatgtcatttgggggatggaattgcaacatagaggtcaacaaatcaaaaacgcgctcttagcacgtaaagcactgcgtagaggacggaggaatcgcaatactcgttatcgtcaagctcgattcctgaaccgcaagcgtccaaatggttggttagcaccatctttgaagcatcgcgtcttgacaacccaaacctgggtcaaacgaattcaaaagtttgcttcaattagttcaattgttcaagaactggttaagttcgacacccaggcagtccagaatccagaaatctctgggattgaataccggaccggaactttgaaaggttacgaatgtcgcgaatacttattggagaaatggaatcgtcaatgcgcttactgtggtgtcaaggatgttccgctcgaaattgaacatatcgaaccaaagtccaaaggtggttcagaccgtatatccaatctgtgcttggcttgtcacaagtgcaatcaatgcaagggaaataaagatatcaaagactttctaaaaggtaagtcagagctgttgaaccgcgttttgaaacaagccaaaactcccttaaaggatgcggcatcagttaactcaacgggcgtgggcattgttcaatactttgaagtcttttggattgcctgttag

SEQ ID NO: 411 - DNA, 249 bp, unidentified
  misc_feature 1..249: note = Ga0376082_0035695 JGI
  source 1..249: mol_type = other DNA
cggtaaaacctacccagagttggacatttactgacaactctaccgagcgtgcagactcagctatttcggtagctacgatttttgagtcataacaccaacaaatgaacgccagtttgttgctctgttgattgtcattaagccacggattaacggtttataaatccgcgtgtggcagtccaaacaagctcttaaatcattgtcgaggcaaacattactgagaaatcaggctgacagaatatgtcaaactac

SEQ ID NO: 412 - DNA, 984 bp, Actinoplanes derwentensis
  source 1..984: mol_type = other DNA
ttgaacacaggtgagtcggcccacggccgggtgcttcctcagcccggtcctctggaatcgcggtcagcagacaacccgtcgggtcgggacgaaacgggatcgcgacgtcccatcgttgtggtggggcaaaccggtgttcaacatgggcgaggggagaccgctgttccggttccggcacagcggcgtcaccccggcacggtggaaaccgtgtcgggagcgggcggtaacgcccagcaacagaggttgaaagagtcgcgggtctttgtactggaccaggccggaaaggcactccagccatgcgctccggctcgcgcccgccagttgttgcgtgctgggcgggcagccgtgcaccgccggacccctttcgtcatccggctgcgcgatcgtggccgcgacgaatcggtcgtgccgggcgtagaggccggagtcgatcccggatcgcggtacaccgggatcagcgtcttcaccagccgatccgacgagaccgggcccgagccggtggtggtccgcaccggtgcctacagcatcggggtccagcatcgaggcggtcagatacgcgacagactcaccgcacgggccgcgctgcgccgaggtcgccggacgcggaatctcaggtaccgggcaccgcggttcgacaaccgccgacgaccggcaggttggctgcctccgtcgttgcggcaccggatcgagacgaccatgtcctggatcaaccggctccggaggtgggctccggtcaccgcggtgcacgtggaacacgtcgcattcgacactcaactgctcgccgatccgcaggtgcaaggtcgcggctatcagcacggtgaacacgcgggccgcgtcgcggtgcgctcatccggcaggttcaacatccgtacggcaatgggactcgtccagggaatccaccaccgccatgtccggctgctgcaacgcggcgacggctggtcctaccgctaccaacaggagcgtttcgaatccccgccggcttga

SEQ ID NO: 413 - DNA, 280 bp, Actinoplanes derwentensis
  source 1..280: mol_type = other DNA
gtcggggtcgccccggagagcccggtcggtcatagcgtgtgtgaccagcccgagtgagccttggaatgaggtgaactacgttgaacacaggtgagtcggcccacggccgggtgcttcctcagcccggtcctctggaatcgcggtcagcagacaacccgtcgggtcgggacgaaacgggatcgcgacgtcccatcgttgtggtggggcaaaccggtgttcaacatgggcgaggggagaccgctgttccggttccggcacagcggcgtcaccccggcacggt

SEQ ID NO: 414 - DNA, 1194 bp, unidentified
  misc_feature 1..1194: note = Ga0310375_1000145 JGI
  source 1..1194: mol_type = other DNA
atggggaaggcggccgtttaccggctgaaacccttcaccataatcctgaagagggaagtgaacaaccccgtgatcgcggagcggaccgaggtgaagttcgacccgggcagcaagattagcggcatagccgtggtcgcccaggggagcgtgatcttcgcgatggaacttcatcaccgggggcagcggataaagggagccctttacaggagggctgctctaagacgcggcagacgcaaccgcaagacccgctaccgggcgccaaggttcaacaaccgcgcacgcccgaagggatggctcccgccgtcccttcagtcgcgggtggacaactgcgtcagctggatgaggaagctcatgaggtttgtcccggtcacggagtgccatgtcgagaccgtgcggttcgacactcagagactcgagaacccggagatatcgggtatcgagtatcagcagggcacgctcatgggctatgagatcaggggatacctgctggagaagtggggaaggaagtgcgcttattgcgatgagaaaggagtcccgctcgaggtggagcacgtagtgcctccgcccaggggatccaaccgggtaagcaacctcactctcgcctgcaggtcctgcaatgagaagaaaggcaataagagcatcgaggaatttctgaaaaggaaacccgataggctccagaggatcaagtcccagctcagaaagcccctgaaggacgttgcggcggtcaacgcgacccgcaacgccatatatggggccctcaagtcgttcggtgtcccaacgtccatgtggagttccggccgcacgaagctgaacagggtgaggcagggatatgagaagtcccactggatagacgctgcctgcgtcggcgagtccggtgcccaggtctccatcgcgggggtgaaacccctcgagataagggccatgggcaggggctgccggcaagtacgcatgacggacaaatacggtttcccgagagggaaggcgggacgcgtgaagcgcgtcttcggcttcagcacaggagaccgcgcacggctagcactgcccaaaggcaagtacgcgggcacatgggaaggggccattgccgggatcagggaaaggggctatcacgacatcaggtgtgggcgcctgaagatcaaggcaaggcactgcaactttaaacttttacaacgggcggatggatatgcctacgcatga

SEQ ID NO: 415 - DNA, 265 bp, unidentified
  misc_feature 1..265: note = Ga0310375_1000145 JGI
  source 1..265: mol_type = other DNA
accttcgacgtccatgtctcaggtcaaccgggataactcatgcttcggcatgagctcaaccagcatcagccgcaaggctacgttatgggcgaatacataggcacttcggggtgcttctccagccccggaccctgcggccgcggtttaaacagcacggcagccgtgaaaacgggcagtgaccgcggcatacaaaaccgcccgataacatttgcgaggagaccattacccccgcaaggggagaaagtgaaactttattatgcagaga

SEQ ID NO: 416 - DNA, 1251 bp, unidentified
  misc_feature 1..1251: note = Ga0265297_10088569 JGI
  source 1..1251: mol_type = other DNA
atgaataatctagctttcgttaaaagcagaactggcaagcccttaatgccatgcagccgagccaaagcaaggcatttgctacaagctggcaaagccaaagtattaaggtgtgagccttacacaattaaacttcttgttgattgtagtgaacagacacaagaggttgtagctggtatggatgttggaagtaagaatattggagtgtgcgtggttagtaagaatgataatgaaattaaggagttgtttaaagaggaagtcattcttaatggtgatggtattaagaagaaaatgactcagagaaagatgtatcgtgttaataggagatatagaaaaactcgttatagacctactagatttttaaatcgagcaagtcaaaatagaattggaagattagcaccaagcattaaacataaagtggattgccatctaaaggaaaagaaaatagtagaatctttattaccagttactaaatggaatattgaaacaacccaatttgatatccataaaatctcaaatcctgaagttgtagattaccaaagtggagatcaaaagggattttataatactaaagaatttatcttatacagagataatcacacatgtcaaatctgtggttgtaaaaataagaaacttcaagttcatcatataattgaacgatcaaaaggtggtactgatgatcctaaaaatcttacaactctttgtgtagaatgccatgataaagttcatagtggagtaattgaaaatttaaaagttagaagaagtattactaaaaatgctgatcatgttaatattataagttcacaaataaaaaagcattttggagattatatttccacctttggatatgaaactaaatataaacgagaattaatgggacttcctaaaacacattataatgatgctttagctatatgtcttaatgatgaagaagctaaatctaataatatcaaattgttaaattattattatgtaaaaaagatggtagctaaaggagattacaagcaaactagaggaagtcgttctgaaattaagatacctacaaagaagttatttggttttagaaaatttgataaagtgaaaacacctaaaggaatagggtttgttaaagctaaacgtgcaagaggctattttcatatctgtgatgtgtttggtaatactgtagtagatggtattaatgctaaaaaaattactagagtgtctgctagaaaaaattatatgatggatactataaaaataacaagaaaggattga

SEQ ID NO: 417 - DNA, 308 bp, unidentified
  misc_feature 1..308: note = Ga0265297_10088569 JGI
  source 1..308: mol_type = other DNA
atcaaacaccctcccgcaaggggagggttcagaccgtgaggactgaaagtaattgtttgatcagaagacaaacaggaggatgtttaacagaatgtttgtagccgttaaaatgaagaaaaacatacacaccagcgtgtgccgcctcagcacgttgctctgtgactgtatattaaacagagttcaacgactcagtgtatacagtttaaaaactcattttaactcttcgagaggatgccgaattcacacaaacacttccaaattgtgtgatacgcatagactgttactgtacagggaaagtatatgaataa

SEQ ID NO: 418 - DNA, 1254 bp, unidentified
  misc_feature 1..1254: note = Ga0209608_1000352 JGI
  source 1..1254: mol_type = other DNA
ttgagagtgttcgtattaaatatgcgtggcaaaccacttatgccatgtaaaccacgaaaagcaagattgttattgaaacaaggtaaagccaaagttgtcaaacgagatccatttactatccaattgacaattgccactggggaagcaaaacaagatatttctcttggtgtggattcaggtagtaaatatattggtatatctgcaactaccaaaaaacatgttttgtttgaagcagaagttgaactcagaaatgatattgtaaaacttttagctgataggagacaatatcgtcgaagtaggcgttatcgcaaaacgcggtatcgtcaagcaaggtttttgaatcgtaaaaaacctgaaggttggttagctccgagtatacaacacaaaataaatagtcatatcaaaataatagatatgctaaccaagttattaccaataaccgatatcacaattgaggttgcaagttttgatatccaaaaaatcaagaacccagatattcaagacaaagaatatcaacaaggtgatcagttaggcttttacaatgtaagagaatatgttctgtggcgggataattaccaatgtcaaggtagaaaaggatgtaaaaacaaaatactgaacgttcaccacatcgagtctcgcaagacaggtggcaattctccaaacaaccttataacactttgtgaaacgtgccataatgattatcatgcaggtaaattaaagttgaacttaaaacgtggccaaatgtttaaagatgcaacatttatgggcgttatgcgatgggcaacttataatgcactcaaagagttatatccaaatgttaaattgacatatggatatataaccaaacacaagagaatcaaatatggtcttgaaaaatctcatagaatggatgctcgatgtattagtggtaatcctttggcgaaaccattagatacctattattatttcaaatgtgttcgcaaacaaaatcgtcagctacacaaagccactccatctaaaggcggtgttcgtaaaaataataaagctccaagatatctacatggttttcaactatttgacaaagtatcttaccaaaatcaagaatgttttatatttggtagacgaactagtggttattttgatttacggaaattagatgggacaaaagttactgcatcagctagtgtcaagaaattgaaattgattgaaagagcaaatacattattatgtgaaaggagggaaggcaattcctcccctgcttacactatcgtttag

SEQ ID NO: 419 - DNA, 240 bp, unidentified
  misc_feature 1..240: note = Ga0209608_1000352 JGI
  source 1..240: mol_type = other DNA
gtcaaccacccaccacttaaagaagtgggggcttgtaaaagctctagttgactagcctaagtcttaactgactacgttgggatggtcatgataccttagtgtactcctctagcactatgctctatcgtcggtggttaaaagttctaaggggtaggaacggtgctgctgacatgacaagccatttcaacattggcgaagaggcactaacccttttttaaaaaggaggtacgaaccttgaga

SEQ ID NO: 420 - DNA, 1356 bp, unidentified
  misc_feature 1..1356: note = Ga0208824_1000448 JGI
  source 1..1356: mol_type = other DNA
atggtattcgtacttaacaaacacaaagaacctttgatgccttgctccgagaagagagcaagaaagttactcgaaaacaaaaaagcagttatacacaaatacactccgtttacgattcgcctaaaaaacgaagttgaggattgtaaggttgagccattacaaataaagattgatcccggaagtaaagaaacaggaatcgctgttattcaagagaaagaagacaaattacttttacgttatgccggaatagtgaagcataaaataacggtcgcggataaccttaaacacaggtcgcaaatgcgccgtggccgcagaaacagaaacacacggtatcgaccagctcgttgggccaatagaaaaaacagcacaaagaaagggcgtttcgcaccctctatgctttcaagagtatactcaactcttaacttagttagaaaaatgaagtcattagcgcctattcaaattgtatcagttgaacacgtgaagttcgatatgcaaaagttagcaaaccccgaagtgtctggcgttgaatatcaacatggaaagttattcgggtatgaagtgaaagaatacttgctcgaaaaatacggtaggaaatgcgcttattgtggtgctgaaaaagttcctcttgaaattgaacacatgattccgaaaagcaaaggcggcacggaccgcattgataatctcgcaatcgcttgcgttaaatgcaatcaagagaagtccaatatgatgccgaaagaatatatagaatacttatcaaaacaaaaaggcgataaagccaaaaccatgatcgcaaatttcgaaaaggcgataaaggacgcaaaacagacccttaaagatgctgcaagcgtaaacacaacccgatgggttttatgcaacaagctcaaagaggaatttggagacgttgagctcgcttctggcgggagaacgaaattcaacaggcacaatcaagggttgccaaaagaacattattttgatgctgcttgtgttggtttgtgcgataagcacattgatgttaaaacacaatacgcaacaataaacaagataatgggccgtggaaacagacaaacgattataccggacaaacatggctttgcaagaggtcatcgcagtcgcaacaagaccaaagaaggattcatgactggcgattttgtaaaagtcaaaggcataaccggacgcgcaatcgcggtgaaaagcgccggaacagttcatatcagggataaaaatgggaaggaaataagttgtagcactaaaaaggcactaatgcttcaacacggcgatggttggcagcgttctattttgaaaataaactttaacagaaaatcagaaaaaatacaaacagaagaaaaacaaatttga

SEQ ID NO: 421 - DNA, 301 bp, unidentified
  misc_feature 1..301: note = Ga0208824_1000448 JGI
  source 1..301: mol_type = other DNA
atcacggattaattttaccttatgtgtagcggtttgtaacttatctatttacaaagcgggtccagactaaggtcttagagacctacgttattttgctcatgacaccagcaggtgcttctccagccggctgctctgtcgaaccagtctaaacatgcgattgtaaacacggaaggtacgcaagtgattggctcgtaaaaaggcattataacattgtcgaggagagacgaggcatatgcctcgcgttacaaggcgcgtaagcgcaagccttcgggctgtaaataaaaggagtgatacctgtatg

SEQ ID NO: 422 - DNA, 1260 bp, unidentified
  misc_feature 1..1260: note = Ga0223845_10169920 JGI
  source 1..1260: mol_type = other DNA
atggtatatgtattaaacaagaatggtgaacccttgatgccaactaagcgtcacggaaaggtgcggcgtatgctgcgcgatggcaaagcacacgtggcaaggagctttccattcaccatccaacttgactattccaccagtggctatctacagcccgtgtcgcttggtgttgacgcagggacacagcacatcggcatgtcggcaagcacggatacaaaagaacttttcagtgcagaagtggagttgcgcagtgatgtgaagaagaaaatatcagagcgaaggatgtaccgccgtaatcgtcgctataggaagacgcgctaccgcaagccccgctggcagcatcgtggacgcactgaaaattggctcacaccaaccgtgaaaaacaagattgaaagacacttgcacgttatcggtatggcacattccgtccttcccataacgaagacggtcattgaaactgcccagtttgacatagcaaaaataaagaacccaaacattagcggtgttgaatatcagaacggcccgaagaaagattacggcggcgtacgcgagtatgttttgtggcgtgacggacacaagtgctgtcattgcaagggaaactcgggtgacaaaattctcgaagtgcatcacattgagacccgtcagactggcagtaatgctccagataaccttgtcacgctgtgcaagacttgccacaaggcataccatgaccacaaaatacatttggacgtgaagagcggcatcggcatccccttccgcgatccttcacagatgaacattatgcgtaaggctttactgaacaaagctagaacgatgtttcctaatgtccataacacctatggctacatcactaaagacacacgcatcagtaatggcatagagaaaacacactgcgccgacgctttctgcatagctggtaacttgaaagccgagagactagatacattcttgctctgccactgtctaccaagacacacaaggtcattgcatgtagctaactttaggaagggaggcgtaagacgccctaccgtcgctcctcactggttaaatgaaaatctacgactacagagatacgacacggtggaatggaacggcatccgctgtttcatttccggaagtaccaatggaaggcctgttctaagagacataaactggaagcttgtaacaccaactacttccgtaaacgcaaagactgttaggttcctatgccgcctacacggaagactattatcatcacaacaaccgcaaggtgcaatataa

SEQ ID NO: 423 - DNA, 282 bp, unidentified
  misc_feature 1..282: note = Ga0223845_10169920 JGI
  source 1..282: mol_type = other DNA
gtttactcacaaaaatgctgtcattaacagtcgatagtgagtaagccgattagcctcagtcatttaaacatcatatcgagaatgtgaatattaaatgaactacgttagaagtgaatgtataggcaccttgaaatagtcgcccaagtttcaagctctgcggtcagtgattaaaaggagcgaaagcaacagtgttgctgacaagaaaccatttcataacattggcgatgggcgcataacgggcattagcccgacttacagtattttaaaattttagagtagatg

SEQ ID NO: 424 - DNA, 1230 bp, unidentified
  misc_feature 1..1230: note = Sediment metagenome
  source 1..1230: mol_type = other DNA
atgccaatccgaaacaaacaggttaaacgggagactagagtggtcaagatcagcagaaaagctggtcgtttaaagacaactgaactgtctgcttgtggcaaggcaaaggatgttggaaatgcctccctagtttccaacctctccgacagtcagcctcgaagggaaagcacattgagggattctgaaaagaaccccttggtgaccgggaaggtaacttcccctgttctatggatcccggttgtttctaagaccgggaaacccctgatgcccactcgtccaaagagggcgagagagttgatgaagaaaggaaaggcgatcccgaagtggaaaactggtatcttctatcttcaactaaccgaaaggaaagacggagatgttcagaaagtggtagttggaattgatccgggcagcaaaagagaagcattcacgatcaagagtaacaagcacacttatttgaacatattaagtgatgcggttacttgggtgaaagaggcagttgaggcgaggggacaagccagaagaggtaggaggtacagaaaaactccttgtcgaaaaaacagagaaaatcgcctaagaggaagtttggctccatcaaccaaggcaagatggcaggcaaaactgagaattgtcaacattctgaaaaaattatttccggtgaccagttttattgttgaggacattaaggcaacaactaatcacggtaaacgatggaacaaatcgttttcacctcttgaggttggcaagcaatggttttattctgagctaaaagaatttggtaatcttgaggttaagcgaggatatgaaaccaaagaattcagggatgttttgggtttgataaagacgcaaagtaaaatggaagaaaaattttctgctcacaacattgactcgtgggttttagcaaattcagtggtcggtggtcacactcaaccagacaatacttcaattttccgtttgattcctttaagattccatcgtcgccagcttcacgcctttcagccagacaaaggaaatttcaggcgatcttacggcggaacactctctcaagggctaaaaagaggttcattgattaagcataaaaaatgggggttgtgctatttaggtggatattctgaaaaaacaggattaagcttgcataagctgggggacggcaagagattgtgccagaccgccaaggaaaaagacttaataattttaaggtttaataattggcgatggtacaagagaacataa

SEQ ID NO: 425 - DNA, 415 bp, unidentified
  misc_feature 1..415: note = Sediment metagenome
  source 1..415: mol_type = other DNA
gtagtttcatttccttatccagttgaaggcactgtggttcgcccaccgggtcagggctgcctttcctgtgtgcataaaacctactgttcggcgatttactggttgcgccgtgatgacagccgttttgacgatcatacgggtcgggcttgtgcttcttggtcaaacaaccccgccgatattgttaccaccgtgacagaggatgacattgagcaaaataattacgagattgatacggggattgttgatggttgggaagataatcagttttttgaccagaaccagaaattttagcaatacaaacgggaatccctaatgcctagagatattgttaaccaccccatagagtaaaatctaatggggcttgtaaggagtaggaatgccaatccgaaacaaacaggttaaacgggagactaga

SEQ ID NO: 426 - DNA, 1599 bp, unidentified
  misc_feature 1..1599: note = Ga0310139_000809 JGI
  source 1..1599: mol_type = other DNA
atgccactcccagtcccggacgatgaagtgccgtatctgccgagggagaccaaccggcaaaagccgtgtttttaccttttttttttgaaaggtggtggattacgaatggtatatgtaatatccagggaaggcaggccattaatgccgacaaagagatatgcaaaagtcagggttctgctgaagcaaaagagagcgaaagtagtaatgtcaaagccatttacgatacagctgttgtatgaaaccacagcatatacgcagccgatagtggcgggatatgatcctggcagaactcaccaatcgataacggctgttaaagaagaaacgggtgaagtgcagatatcatcagagttaataagcaggaataaagaggtaccgaaactgatggcgaaaaggaagatgcacagaatgataaggcgtcgcaatcgtcggatgaggaaaataaggcatgcgaaaaggtgtggcgccacattcgaagtaacgaaatatatatatcagcccggtgcagacaagccaattccagtcaaatatataaagtgcaaagaagcgaggttctgcaataggaaacggccggagggctggcttacgccaacggcaaaccatctgcttcagacgcatatcaattatctaaagaagatccggaaaatactgccgataaccagggtggtactcgagtatgcgaagtttgacatacaaaaacttgaaaatcccgatattaaaggtgagggatatcaggggggcaggttatatggatatgccaatacaagggaatatatagaagaaaggcaaaaccacaaatgtttgttatgcggtaaaaatccgatagaacatttacaccacataaagccaaggcatgaaagcggaagtgacagttgcaggaataaagctggtttttgcaataaatgtcatataaaagtgcacaaaaatgaaaaagtcagggaaaagcttgccgagaaattggaaggcttaagcaagcaatatgattcaacaaacattttaaactcaattatgccgtatttgtataaggagatacagaaaataatgggtgcaaagaatgtgcaaatatgctatggatacgaaacgaaaataatgagaaagagtctgggtctgggaaagactcattacaacgacagttatgcaatggcattaatggcggcaaaacaaacaagcaagattcaagatataaccccgtatatgttcaaacaatacagaaggcataaccgtcaattctgtgatgcggaaagggacaggctgtataagaaaggcagggagatagcagccaggaacagaaagaagaaaatggagcagaaaaatccatcgctggaagattatcgggaagaactaattacaagcataggcaaaaaagaagcagcgagggtaatatccgggctaacggtgtataaagcgataaagagaataagaacgtctatcaaggaaataccgatgccgcaaggcagcatagtgatgtacaaaggtaagcgaatggtagtgatgggcgtattaaacaaaggtaatttattggtgttggaaaaccatgaaggttatgtaccggtaaaggaatgcaaattactggcaagaaacagcggtatagtatgtctgtag

SEQ ID NO: 427 - DNA, 226 bp, unidentified
  misc_feature 1..226: note = Ga0310139_000809 JGI
  source 1..226: mol_type = other DNA
gtcaactactccttaatgaattaaggagcttgcagctttgtagctgtcggttgtatctataggggaacctgctggtacagtagttgaacaggcggttgtacggcagcgcactccgaggatgccactcccagtcccggacgatgaagtgccgtatctgccgagggagaccaaccggcaaaagccgtgtttttaccttttttttttgaaaggtggtggattacgaatg

SEQ ID NO: 428 - DNA, 750 bp, unidentified
  misc_feature 1..750: note = activated sludge metagenome
  source 1..750: mol_type = other DNA
atgcaacatgtttttgtgctagaccagaacaaaaaaccacttgacccttgccatcccgcacgggcaagaaagcttttgcgttctggtcaagcggcggtgttccgtaggtttccatttacgattattctcatggagcgaacactgaaagaatctgtgacgcacaagtactgtgtcaagattgaccccggaagcaagcaaacgggaatggccttagttcgagaaggtgaccacaaggtcgtttgggcggcgataattcaacatcgtggacaggtcattcgagacaacctgcttgcacgtagagctatcagacgcgggaggagggcacatcattgtcgctaccgtcctgcacgatttgataatcgtcatcgccaaaaaggttggttgccgccaagtctggaaagtcgtttggcgaacatcgagacttgggtgcgaaggctggcgttgcacacgccattgactgccatttcaatggaactggtcaaattcgatactcagaagatagaaaatcctgaaatatcaggggttgagtatcagcaaggcaagcttgttggctacgaagtccgtgaatatctactcgaaaaatggggacgaaagtgtgcctactgcgggaaaactggcgttccgcttgaaatcgaacacatcattccaaagtcgcggggtgggtcaaaccaagtttcaaacctaacactggcgtgtgagacatgcaaccgcgccaaaaacaacctatccgccgtagaattcggccatccg

SEQ ID NO: 429 - DNA, 286 bp, unidentified
  misc_feature 1..286: note = activated sludge metagenome
  source 1..286: mol_type = other DNA
gtcaacgactgctaggctaaagacctagcggcttgggaaaatccaagcccatgttgaccagccacagccaccagcggtaacgctgacggggctacgttgtcaggagagtcaaagaacacacgttggggtgcgtgccagcctcaaccactgcaactggatgattaaaagaacaagggtcttgttcggtgtcatctggaagtgctgactgataacattggcgaggcaaactttacccccgataggggagtacaacccgtaagggaaaggacataagaaaatgcaacat

SEQ ID NO: 430 - DNA, 1287 bp, unidentified
  misc_feature 1..1287: note = Ga0373625_0000621 JGI
  source 1..1287: mol_type = other DNA
atgaaaatgcagcagttacaattaaagttaaacaacatacctacaaatgcttcactagtttgtagctctataagttttgatttaaacaaagatgtaagtcttagtgatcaagacaaagtactggattgtaacaatctcgaagtgaatcaacgcttacatacaagcggtcttaaagacattgtgtatgtattaaatgtaaatgcgcaaccattaatgccgtgtagttgtgcaaaagctagaaaattattaaaaaaaaggagagctaatgtcgttaaaaattatccttttacaattagattaacttttaattgtgaaaatgtggttcaagatgtcatgttaggcatagatagtggatttaagtatattggttattcagcaattactaaaacaaaagaattaatttctggaacattgacattagattgtcaaacgattagtagattagcaaatcgcagaatgtatcgaagaaatagaagagatagattgtggtatagaaagtctagatttaataatagaaaatctagtaaaaaaggttggttgtcgccgtcaattaaaagaaagtataatactcatgttaatttgattaataaattaaaaaaactcttacctattaaagaagttattatagaagttgcaaaatttaacagtaatattaagtcgtcaaaattaattgataatagtaaatgtcaattgtgccataaaaattttagtaatactaatcacgttaatgaacatcacattattactagactgtatggaactaatagaaaagctaatatagcttatgtacatgaatcttgtcacaaaaaaattcataaaaacaaaatgttagatatgttcgagaaagataaaatttatagacagtctgcttttatgaacattattagtaaaagatttttagaagatggttataagactatttttggatttgacacttttaataaaagacaagtttataatttagaaaagactcatactgatgatgcctttattatagcaggaggagataatcaagaaagagcaattaataaaaatgtagttcaaaaacatagaaataatagaatattacagttaaatagaaaaggttttaaacgttcaatacgacgtcaaaggttcaaaatacaacccaaagatttgatatggataaacaacaagaaatatatttcaaaagggtgctttggaaaacgcaaacgggtgacatataatgatgaaaatggtaaaagttgtcaacaatacatagatagaattgacaaatattataattttggaagtttaatttttctatga

SEQ ID NO: 431 - DNA, 361 bp, unidentified
  misc_feature 1..361: note = Ga0373625_0000621 JGI
  source 1..361: mol_type = other DNA
gtcgactgctaatttttagtttaaatggtgacatttaatgaaaaagtcgattagagagcatgaaaatgcagcagttacaattaaagttaaacaacatacctacaaatgcttcactagtttgtagctctataagttttgatttaaacaaagatgtaagtcttagtgatcaagacaaagtactggattgtaacaatctcgaagtgaatcaacgcttacatacaagcggtcttaaagacattgtgtatgtattaaatgtaaatgcgcaaccattaatgccgtgtagttgtgcaaaagctagaaaattattaaaaaaaaggagagctaatgtcgttaaaaattatccttttacaattagattaac

SEQ ID NO: 432 - DNA, 1281 bp, unidentified
  misc_feature 1..1281: note = Ga0307928_10005039 JGI
  source 1..1281: mol_type = other DNA
atggtagtgtatgtaataaataaatatggaagacctttaatgccatgtagtcctgctaaagcgagacatctattaagagatgggaaagctaaggttaaaaaacgtacaccttttactatccaacttaaatatggaagttcaggttacactcaagatttaaatttaggtattgatcctggatctaagaaagttggaacagcagttcgcagaagtggaacaaaagaaattttttactcttctgaaattactttaagaacagatataacaaaaaagttgaaacagagatcttcttatagaaaaactcgtagaaatagaaagacaagatatagaccaccaagattcttaaacagaacaagaagtgaaggttggttacctccttcagttcaaagtaaaattaattctactaagaaagagatagattatattttaagtattcttcctataactagaatatcttttgagtattctaaatttgatatccatagactcacaaataaatttgtgagaggtttctggtatcaattaggagatatgtatggttatgaatctaccaaagcttatgtcttagaaagagataattataaatgtcaatcatgtaaaggaaaatctaaagataaaaagttagaagtacatcatataatctatagaagaaatggtggaactaacaaaccttctaatctacttaccttgtgttctacttgtcatgatcttgtacataaagatcaacttattttaactaaatatcaattaaaagcttgtgttaatacaatagatgccactcaagtatctataattagtaagaggatttgggagtatcttttatctcttaaaccagattatattttagctaagacatatggatatagtaccaaagttaaaagaaggttacttaaaattaagaaatctcatactttggacgcagtagctatctcttatggtaggaataagaagtacagaaaaggacttaggaaaccaagaataatagataacttttataacaagatttgcacttctaaaggagactaccaacagactaaaggtagacattcagaaaagcaaattccaacagataaaatacaagggttcaggaaatttgatcttgttaagtaccttggtaagatttatagtattaaaggaagaagatccacaggatatgtagaattaatggatcaaacagttaagaatctgaatttaagaccaatacctaagtttgataatttaaccaggttacaagctagaaattcatggattatatttccaaatacaattcaaaatatttga

SEQ ID NO: 433 - DNA, 311 bp, unidentified
  misc_feature 1..311: note = Ga0307928_10005039 JGI
  source 1..311: mol_type = other DNA
gtaaactacctacgaactaaagtttgtaggcttcaaggtgacttgaggatagctaatagtttaccagactcagaactaagaaattagttctccgttatttaagttatcagaccaaagaatgccgcctcagttctttgctctctggaggcactgtaaacagagattaatatgtctcggtcaacctcagtacgacctacgaagtaggtaagcttagataacattgtcgagaggaagttggaaaagtttagtggtaacagctaaatttagtacacacaacttttaacttaggttaggaggtacactcaatggta

SEQ ID NO: 434 - DNA, 1365 bp, unidentified
  misc_feature 1..1365: note = Ga0315291_10038423 JGI
  source 1..1365: mol_type = other DNA
atgcagaagttacaagcaaagttcaagaacacaccaaaggatgcttctctagtcccttgctctgtaaattcttcattaaacaaagaggaaactcttagtgtgaaggataaaatactgacttgtaacaatcccgaagagaatctacaccaacatagaggtggttcgagcttgcgagtttcgaatattgtctatgtacttaacatgagaggacaacctctcatgccaactactccacgaaaagcaaggatattactacaaagcaaaaaagcaaaagtcgttaaaagaatacctttcaccattcaattaacatatcaaacaggtgaatctaaacaattaatagatctttgtgttgattctgggtacaaacacattggtctatcagctaaaacaagtaaaaatgaagttttctcagcagatattaaactcagagataatatcaaacaattacttgcagaaagaagtatgtacagaagaaacaaaagaaacagattgtggtatagaaaatcgagattcaataatagaggtaaagaaggatggtttccaccgtctataatgaacaaaattaattctcatattaatattattgacaagatatgttttcttttgccaatcacaaacattatagtagagacagcttcttttgatatacaaaagattaaaaatccagatattcaagggaaagaatatcaagaaggtccacagaaagactttgataatgtaaaagcatatgttttgtacagagacgaatatcaatgtcaatattgtaaaaaatcagatataaaacttcatgtacaccatattgaatcaagacaaaccggaacaaataatccggataatttgattactttatgcgagaaacatcatagagatcttcacgatggtaaaattaaattaaatgttaaaaagccaaaagattttagaaaccagacatttatgtctatagcaagaaataaaatgatggaaatgttaagaaaaagatataataatgtacaagagacctttggatatataacaaaagccaatagattatcattaggtttggagaaatcacatataaatgatgctttctccataggtaatggaaacatacagacgagatgtttctcaaatattattgttcaaaagagaagaaataatagatgtttacagataaatagaaatgggtttaagccgtctataagaagaaagaaatctaagttacaacccggagatttggtaaaagttaagaatattttgtataatgtggtgggtatgtttaacaagggaacatatgtaagagtgaagaacaatatgaataagatattgaattttaatattaagaagattaattgggaatatagttttggaggatttgtttggaattaa

SEQ ID NO: 435 - DNA, 269 bp, unidentified
  misc_feature 1..269: note = Ga0315291_10038423 JGI
  source 1..269: mol_type = other DNA
gtcaactaccctcacctaaaggtgggggcttgtgaagtgatttacatggtaacagttgattagggagcttaattcaaaagattatgcagaagttacaagcaaagttcaagaacacaccaaaggatgcttctctagtcccttgctctgtaaattcttcattaaacaaagaggaaactcttagtgtgaaggataaaatactgacttgtaacaatcccgaagagaatctacaccaacatagaggtggttcgagcttgcgagtttcgaatatt

SEQ ID NO: 436 - DNA, 1266 bp, unidentified
  misc_feature 1..1266: note = GENOME_ACESSION: mgm4743564.3 MG-RAST
  misc_feature 1129..1176: note = MISC_FEATURE - Any "n" represents any nucleotide
  source 1..1266: mol_type = other DNA
atgccagagagtctaaccgctagtgctccgttaattcagttatcacaccccggggtgttatacctggctccgcggctctgtgcaggctctgtaaacagtcctgagagggtaagggacagtcaacctggtccgtgcgcttggcgcacaagctgttttaacattggcgaaggtatccaactggccggaacattcagtacacaaggaacaatgcgaagggtaagtattaccggatttggttccggagaaaggcaactgatggtttatgtattaagtgcagcgggacagccgctgatgccgacaagacggtatggcaaggtccggcatctcttacgggaaggacgggctgttgtcgtaagacggtgcccgtctacgatccggctgatgtatgacacgcctgaaagaacacagtcggtctctctcggtattgatgcaggatccatacatattggattgtctgcatgcgagaagaagcacgaattattatcagcagaagcagaactgcgcaccgacatttccaacaacatcacacagcgcaggacactgcgccattcacgcaggaacaggaagacgagataccgcaagccgagattccagaaccgtgtccacgcaaagaataaaggatggctcgcaccttccgtacaggcaaagtgcgacgcacatgtggataccgtgaaaaaggcgattgatatccttccggtatcagagatcacgattgagatggcacctttcgatacacagatgctgaaagccgagatggcaggccagccgcttccatccggtgaaaactaccagcacggagaatcagaaggttatgacaacatcaaggcttacgtgaaatggcgcgacggttatgaatgccgcatctgcggggccgagcatgtacacttacaggtacaccaccgcgatcagcgtcatgatggcggaagcaacatgccggcaaacctgatcaccgtctgcccggactgccacaaagcgtatcatgaaggcaggctgcatgggaaaaacgcggaactgatggaacccggaccggaagtaaagccaatgcgtgatgccgtattcatggggatcatgcgctgggcggtatggaacaggctgaaacagttcggccttccgctacatatgaccttcnnnnnnnnnnnnnnnnnnnnnnnnnnnnnnnnnnnnnnnnnnnnnnnnagtacgggcttgaaaagtcacatcgtaacgacgccagatgcattgcaggatatggcggggcagaacctgatcctgagtggtattacgtga

SEQ ID NO: 437 - DNA, 271 bp, unidentified
  misc_feature 1..271: note = GENOME_ACESSION: mgm4743564.3 MG-RAST
  source 1..271: mol_type = other DNA
gtcaataacccgcggtcaaaaccgcaggcttgaaaaagcttattgactagcctaagcgcagcgacggcctcatgccagagagtctaaccgctagtgctccgttaattcagttatcacaccccggggtgttatacctggctccgcggctctgtgcaggctctgtaaacagtcctgagagggtaagggacagtcaacctggtccgtgcgcttggcgcacaagctgttttaacattggcgaaggtatccaactggccggaacattcagtacaca

SEQ ID NO: 438 - DNA, 3735 bp, unidentified
  misc_feature 1..3735: note = Human gut metagenome
  source 1..3735: mol_type = other DNA
atgagagtatttgtattcaatatgcgtggcagaccattaatgccatgctcacaaagaaaagccagattactcctaagggaaaataaggctatgatttataaatatcatccatttacgattcagttgacttatacaactggagaaacaaagcaggactgtcatataggtatagacacaggttctaaatatataggagctgctgtcagatcagaggataaggttttttggaaaggcgaaatcgagcttcgacaggatatcaggtcaaatcttgatacgaaacgtatttatcgtagaagcagacgaaatcgtaaaacaagataccgaaaaccaaggtttttaaatcgtaagagaagagatgaatggcttccacctagcttgcaaagcaggataaatcatacgtttcattggattgacacattgagtagtttggttccaaaccccattcttcacatagaagtcggtaagtttgatgtagcaaagatgataaatcctgaaatccatggagttgactatcaacatggtcagacatatggtttcttcgatgaaaggtattttgtttttgcaagagataactacacttgtcagtgctgtggaaagtcaaaaaataagattttgaacacacatcatatcatctaccgcagtaatggcggaacaaacagagttgataatcttattacagtttgcacagattgtcatacatcgcagaatcacaggaaaggtggaatattctatcaatggcaggagcagcataaaaaggtaaaacaatacaaagaaccgccgttcatgaataccttacgtaagaggatatttgtagcgtatccagatgctgagatcacatatggatctgaaacaacaccaaaacgtaaggcgatgaaattggataagacgcactataatgatgcgattgtcattagtggtatcaatgaaatcaaagaaaatcctgaagaatggttactgataaaacaattccgcaaaaagaaacgctctttacacgaggctaccgcccgtaagggaagaaaaaagccaaacagaaatcagacgcgtaacagtaagaatacgccttattataaaggattttatcttaacgataaggtttcagtttttggaagaccaatgattgagtactacagaagcggaacaggttcaggaggagctgtaaacgttgaatacacaacaaatattttggacggatttgaaaacagcaaccttaactttaacaagactatagttgaagactataaggaatggttaaaagaccatccatttgataacggtggcggtggctgggcatgcgagccatggttccagaaagatatggaaatcacagcagattatgcaaagaaacaggcagaatcaactaacaaggctgtatacattatcggacgtacagcaggagaagataaggacaacgccaactgggtaggaagctatcttcttacagatgaagaaaaagaaaaccttaagaatataacagaagctttcgaggatgtttgtgtagttcttaacgtttcaaatattatcgaccttaagtggattgatgaagaacagtttaaaggacacatcaaatcagtaattattgtatggcaaggcggtatggaaggtggaaacgcagtagctgaagcactttcaggcaaggctacaccaagcggtaaattacctgacacagtagcttatgatattgaagactatcctgctaatgacaactttggcaacgaacttacaaatctttacaaagaagacatttatgtaggatatcgttattttgaaacatttgcacctgaaaaagttcaatttgaatttggtttcggactttcatatacaacatttgatatcgaaacagtatcagccgatgcagatgatgaaaaaatcacattagaagttaaggtaactaacacaggcgacaagttctcaggaaaagaagttgttcaggtatattacgaagcaccacagggaactttgggacagcctgcaagacagctttgtgcatacgagaaaacagaaaatcttgcaccgggtcagagccagacattaaagattgctttcgatattaacggaattgcatcatatgatgactcaggcgttacaggcaacaagtcatgctacgtattagaagcaggagattacaacttctacgtaggtaacagcgtaaaaaataataaactagcttatacatataaaattgaagaacttaaagtaacagaacagctttcagaagctgcttgtcctaacgatgaaaatcttacattaatgaagccgggcgagagaagagaagacggaacatacgaaattacatatgtaccatcacagaagcctacagttgatatggctaagagaatagaagacaatcttccaaaagacatgaaaattacaggcgatgtaggaattacattacaggatgtaaaagcaggtaaaaacactattgaagagttcgttgcacagcttacagttgcagaattggcacagattgtaagaggtgaaggaatgagtaaccctagagttacaacaggaacagcttcagcttttggtggattaagcgatacattgtttgcttacggaatccctgcagcatgttgtgctgacggccctagtggacttagaatggaaggaaaagctacacagcttcctattggaacagcactttcagcatcatggaatcctaaacttgtaagagaactttacacaatggaaggtcaggaattatacggaaatcaggtagatacattacttggacccggagtaaacattcacagacatcctttaaatggacgtaactttgaatactattcagaagatccatacctttcaggaacaatgtcagttgcatcaacaggcggtattaaagacggtggtgcttggggaacaattaagcatttcgcattaaatggtcaggaatcacatagatttaagattgacgcagtttgctcagaaagagcaatcagacagatttatctcaaatcatttgaaatggcagtaaaagccggcacagttaaaacattaatgacagcttacaatcctattaacggacactgggcagcttcaaactacgacctttgtacaacaatccttagaaatgaatggggatacgagggtatcgtaatgactgactggtgggccaagatgaatgacgttgtagaaggtggcgaagaatcaaatcaggatacaagagatatggttcgctcacagaacgacgtatatatggttgtaaacaataacggcgcagaagttaactcaaacaacgacaacacagaggaatcaattaaagagggaagacttacaatcggagaacttcagcgagctgcaatcaacatctgcaacttcattctttcagcacctgttattgaaagagaattagttgacacagacgttgcaaaacattacgattcagttccaaatgatcaggccaagtatgaagtatttaacattgaaaaagataataaggtaatgttcaatagcggagcagaagcaacattagaagttgaagacgaaggggaatacacaattattgttaacatctcatttgacaagtccaacttatcacagtcaacagtaaacgttaatgccaacggcacaacaatggtagtaatccagactaacggaacagacggcaactggattacacagaagctttgcaaggttaaacttgacaagggtgtatacaacttaaaacttgaagaagtattagcaggaatcaaagttaaatatattcagtttaagaagattcctaagaaaaaataa

SEQ ID NO: 439 - DNA, 286 bp, unidentified
  misc_feature 1..286: note = Human gut metagenome
  source 1..286: mol_type = other DNA
gtcaataaccccgacctacagtaataactgttgaggtcggagcttgtaaaagctcatattgactagcctaagttcttcgagaactacgttgtttatgttatcacacctgcgaatgataccatagtttgcagccttgtgtaggctctgtaaaagttctgtgaggtaggaacggtcaacctagtatgttcgatcacgacaagcatttacaacattggcgaagggtaacaaactttcaaaagaaagggacagcacttgagagtagctgtcaaaggtaaaaactatgaga

SEQ ID NO: 440 - DNA, 1140 bp, unidentified
  misc_feature 1..1140: note = Ga0172382_10042448JGI
  source 1..1140: mol_type = other DNA
atgttagtttatgtcatcaacaaaaacggcaatccgttaatgccgtgtaagccgtcgaaagctcgtaaacttttacgcgacaagaaagcgaagattgtgaactatgcaccattcacaattcagcttcaatgggactgtaaggaatatgttcaaaaagtgtctgtaggaatagatagaggttcgtcttacacgggttactgtgctatttctaaagacaaagtattgatttcaggacgaattgaccacagattagatattaaagacaagatgactgctcggctcggtaatagaaaaagtagacgaagccgtatgtggtatcgtaagccacgttttctcaatcgagcatctagcagacgagcagggcgcttaccaccatcaattaaagcaagtgtagaagaagtgtttcgtgtaatacgaaaattaccaattcctatttttgaaattacttgtgaagatgtgctgattgatatcacgaaattaaatgatccaagtctaaaaggtagtgcgtatcagaagtcgaataagctcaacgagaacttgcgtctagcttgtttactgcgtgataatttcacatgttatttatgtgggaacaaacgcaagcatgaaaagctagaagcgcatcacatcgtgcccgtttcacagaatggtaagaatagtatttataatttagtaacgttatgtaataagtgccatgatgatgttcatagcgagaagttgaagttagatttaaaaggtatgggtggtattcaagatgtagtagcacaacgaactatgattggtaagacatatttgtataatttgttgaaaaaatatataacaccaaatttatatttactatttggttatgaaacgtcacattatcggaaggaattaggtctagtgaaagatcatgacacagatgctttttgtatagcaaatcaccacgcacgttacgatttaacatatgaacgtgataatgtatataatgtgactttcagagctaaacagacgagacgtagatatcatgataagcctcagaaaggtaagggtcgagttgaatatcaagtgaatgaaagtctagaaggtttccggaaaggtgatttggtgttagtaaatagttgtgtgaaacagattaattcgatatattctgatgggcgttta

SEQ ID NO: 441 - DNA, 249 bp, unidentified
  misc_feature 1..249: note = Ga0172382_10042448JGI
  source 1..249: mol_type = other DNA
gatatggtctttttagacatagttccttagctagtagtatttcatagtatggaactaacaggaggctggctgttgctagcagaagttattaggtgaacagtttacttaccctggggtgttcgctccagctccaggctctaagggacaggtttaagggtagcggaaacgtgaaggtgatctgtctgaggaaaccctaataacaactccaaggagcaaagaactctgtcaaaggagaatataactatgtta

SEQ ID NO: 442 - DNA, 1995 bp, unidentified
  misc_feature 1..1995: note = Human gut metagenome
  source 1..1995: mol_type = other DNA
atgccctgttcaccggcaaaagcgcgccttctgcttaaagagaagaaagctattgtgaagaggcgaacgcctttcactattcagctgacgattgcaacgggtgagtccaaacagccggtgactctgggtgttgatgccgggtacaaacatgtcggcctttccgcatcaacggaaaaggctgagctttatgcatcagaagtcgaactccgtcaggacgtctctgatctgctctctgctcgtcgtgcgttacggcagtcccgccgtagccgcaacacgcgctatcgtgcaccgaggttcgacaaccgcatccgcaccaaacgcaaaggctggcttgcaccgtcggttgaaaaccgaatcaacgcgcacttgtcgcgcatagaagcggttcttcgactgctgccggtcacaaagatcaccgtggaaacggcgtctttcgacttgcagctgctgaagaatcccgacatttcagggaaagaataccaggagggagaacagctcggcttctggaacatccgcgagtatgttctttgcagagacgggcatgtttgccagcattgttacggcagatcgaaagacccggtgcttaatgttcatcatctggaaagcagacgtacgggcggagattcacccggcaacctgattacgctttgtgagacgtgccataaggcccttcatcgcggtgaaatcacgctgaaggcaaagcgcggacaatcgttccgcgcggaagccttcatgggaattatgcgctcggaggtgctgaatcgcctgaaggcgtcgcatcctgagctggaagtgaacaacacctacggttatcggactaagcacgcacggatcgcgaacgacatcgctaagtcgcattgtgcagatgctttctgcatcgccggcaacctcggcgccgaaaggctcggcgaattcttcttccagaagcagacgcgtcggaacaaccggcagattcacaagctctccatcctcaaaggcggcattcgaaagcgcaatcaggctccctttgaggtcaaaggcttccgtctttttgacaaagttgcctgccagggagaagaaggcttcattttcgggcgtcgatcaaccgggtactttgatgttcgaaagcttgacggaacctgcatttcggcaggcatcagctacaagaagctgcatctgctggaaaagagacgaacctatttaacagaaattcgaaaggaggaggcgcttccccccccctgcctgaaggcaggggctccgcgcctaaatgtgatgaataacatcgactttcacggcatcgaggagatttggtcctcgctttccacttcttcccttctgtggctgacggtcacgctggccgcttacctctttgctcagaaactctataaatggagtaattggaattcgctcttaaatcccgttgcggtttccattgtcacggtcgtccttttgctgatggccacgcatacgccctatcagacttacttttccggcgcccagttcattcattttctgctgggaccgacaaccgttgctttggccgttcctctgtacgacctccgaattcagcttgctaaaaattggctgccgattctgctgggactttttgccggcgccgttacagcaattacttcgaccgtcttgattgcaggactcctcggcgcatctccggaaaccatcatcagcctggcgccgaagagcgtgacgaccccgattgctatgtccatcgcagaaaaactcggcggtctcccggccctctctgcttccctagtggtactgacaggtgtcctcggttcaatttgcgagggccccctcttcctgcttttgaaagtcgactcttcatcagctaaaggttttgcgctgggactttccgcgcacggcatgggcacttcccgtgccttccagattgattcaacagccggcgcctatggcagtttggctatcggcttaaccggtttaaccactgccctgttggcgccgctgctcacaccgcttttaatgaagcttttcttctaa

SEQ ID NO: 443 - DNA, 247 bp, unidentified
  misc_feature 1..247: note = Human gut metagenome
  source 1..247: mol_type = other DNA
gtcaactacctcggcctaaaggccgcgacttgaaaaagcctctagttgactagcctcaggccgtcatttggcggactacgttggtcgggattttataggcaccgcgggatgcagatcctagtcccgcgctctgcggccgatggttaaaagctctgagaggtaggagcggtgctgtcggcttgaaaccccttccaacattggcgaaggatcacaaccggtcgaaagaccgaggagataaaacttgaga

SEQ ID NO: 444 - DNA, 1107 bp, unidentified
  misc_feature 1..1107: note = EM338_1079660 JGI
  misc_feature 994..1062: note = MISC_FEATURE - Any "n" represents any nucleotide
  source 1..1107: mol_type = other DNA
atggtgtacgtacaagacataaatggtaaacctatgatgccaacaacgaggcatggtaaggttaggagactgcttaaagacaaaaaggcagtcgttgtgaacctatgtccgtttaccatccgattaacgtacgttacatctgattacaaacaggaaattgtgttaggcgttgatgctggtactaaacatgttggtttatcagctacgacgaaaagcaaagaactttacagtagtgaagttatccttagaaatgatatcgtagatcttttgtctaccagaagagagctacggaaaacaagacggaataggttaagatatagaaaacctcgttttaataatagaataaaaagcaagcgttcaggatggatagcaccttcggtgaagtacaaaatagacgcccatattcgtgttattgacaatgtatgttctatattaccaatatctcgtattgttattgaagtagctcaatttgatactcaaaagattaagaatcctgaaatattaggtaaagaataccaggaaggtgatcaacttgagttttggaacacaagggagtatgttttagcaagggatgggcataaatgtcagtattgtaaagggaagtcaaaagataagatccttaaagtccatcatcttgaatcccgaaaaacgggaggtgattccccttctaatcttattaccttatgtgaaacttgtcacaaagaataccataaaggtaatatagatttgaagatcaaacggggatcgtcgctccgcgacgcggccgtaatggggatcatgaaatggaagttgtatgaagaactgagatccagatacgacagagtttctatgacgtttggttacattacgaaacataatcggattaaatacggtattgaaaaatcccatacatccgacgcgtttgtcatttctatgaacattaatgcgaaacgaatcgaacgtcaatatttaaaacgtttaattcgtagacataataggcaaatacataaaatgnnnnnnnnnnnnnnnnnnnnnnnnnnnnnnnnnnnnnnnnnnnnnnnnnnnnnnnnnnnnnnnnnnnnnaattttaaaaggaggaaagaagaaaaacaatcaagctccttttga

SEQ ID NO: 445 - DNA, 271 bp, unidentified
  misc_feature 1..271: note = EM338_1079660 JGI
  source 1..271: mol_type = other DNA
atataatttcattataaggttttaatgtaccataaatggtccggatattagcctaagccttgaaacgaaggctacgttatttgagaatatatagttacctacggatgtttgcccaagtctgtagctctaaggatggtgattaaacaggagtagtgtatttggcgaaacagtgttgccattatataaaacctcttataacattggcgatgggtactaacagagttttactctgacttatgttgaataaacattaaaaacgtttgtagatatg

SEQ ID NO: 446 - DNA, 1410 bp, unidentified
  misc_feature 1..1410: note = Ga0209249_1001676JGI
  source 1..1410: mol_type = other DNA
atggatgctcgtaataatgttggacacccaactagacgtgttggatggattaacaagaaattacgagatggtactgctaagaagctcaaacaatatacaaatgtaatacaagtacaattattagataagaaatttaatacacaagagactgttgattgtgaattccggatcggaattgatcctggatatcaacatattggtttctgtatgtacaagatctacaacaataagattacaaaattattctctggagaagtaactactagaacagaggagatcaaacgattattatcagagcgtaagatgtatcgaaaagctaggcgacgatgtagacgtgagaatgttaaacgtaagtttggagctcgtaagtttcgacatcccagatggaagaatcgaagagacaagcttgattggaatcctactctcagacatttgatagaagttcattgtaatttgatgaataagatcacaaatctggttggattaaatcaaatgaaagtgcatgttgaatactcgacgtttgatatacataaactggttaatcctggtgtaagatcattttggtatcaactaggaccaaaatatgggtatcagaattcaaagttgtactcaaagaaacgagatggttattactgtcaagtgtgcaaatctagggacatccctaatcttacgatacatcatattgttcaacagattgatggtggtacagatcgtccagataatcttgtgactgtctgtagaaagtgtcatgataagattcatgccggaaagattaaacttagttctaattataaaccgaagatctttcgagatacaggagttctaaattcttgtatgaagaagatctttgaaaccttcgaagatgtaattccaactcaaaacacttatggatacataactgatgttatgagaaagagtcaagatctagagaagacacattcattagatgcaagtataattgctttgtgtgattcacttgggtttcaagaagaatttaatgattatgatttcgaagatcttaagaatgagttagaatttgtacagaaaagaagacatgtacgtactcatacaacgagactcgaagatcgtaagtattatcatgatgattacattgttgctaaaaatcgacggagacgagagactcagaaagatgatagtcttgaggactttcgaaaagattttccacgattacaaatgactgtgaaacctggagttaagagaccaagaatatcgaatacaaaagttctctttaaacctggtgacaaagtcttgtataataatcaaatttgtacttgttatgggtggggttctactcatggtgaagtcggattaattgaagttggatcttatgtcaagactcgtctaagtaaagtacttgcaaaaaatagtggactcgtatgcttacattga

SEQ ID NO: 447 - DNA, 260 bp, unidentified
  misc_feature 1..260: note = Ga0209249_1001676 JGI
  source 1..260: mol_type = other DNA
gtcaacgactacccactaaaagtgggtagcttgtaattagttctaaagaacgttttacaagccattgttttaatggggttgaacagacgtttgactagtggttcaccaacgaatgccactcccagttcgttgctctggaggttaagtacaatcctagtcctcattgccgattagtaggtaacgaaaaccggtattactgctagccaagtcgggggagactaagctttaaaggaatgtttccacaccataggagacacaaa

SEQ ID NO: 448 - DNA, 1422 bp, unidentified
  misc_feature 1..1422: note = Ga0116188_1006392 JGI
  source 1..1422: mol_type = other DNA
gtgaaacttgagggtaattggttgattagggggcttaatttggaaggaattatgcagacgttacaaagagagttcaagaacgtacctacggatgcttcactagtctgtagctctacaagtcgtgcgttaaacagagaggaaactctcagtgctcatggcaaagtactgatttgtaacaaccccgaagtgaatcaaccccagcaaggaggggattcgaacttgagagtatcgaatattgtctttgtactttctatgagtggcaagacgttaatgccatgtaaaccacaaaaagctaagaaattgttaaaaggaggtaaagctaatgttgtaaaaagatttccatttacgattcgattaactatgggtactggtgagacagtacaggatattaatttaggcattgatagtggttataagcatgttggattttcaagtataacagaaaaagaagagttgttttcaggaacattaaatcttgatctaaagactaaagatagacttaatgagaaaaagatgtatcgcaggaatcgcagaaataagttaagatatagaaagtcaagatttaataataggaaacgaaaagataattggctaccaccatcaattgagagaaaatatcaaactcatttgactttgatagaaaaaattaaaaatctattacctattaaaaatgttatagttgaggtagcaaaatttgatatacaaaaaataatgaatcccaaaattaatggtaaagaatatcagcaaggcaatctttttaattatcagaatatggttagttatttacaggtaaggcaaaataatatctgtccttattgtaaaaaagaatttaaaggtgagccaaaagctacacatcatatttatagacatggagattcaagaagatctaatagacctgatggtttattgcttttacataaaagttgccatgtagatttacacgaaaaacatagagaaaaagagtttcaaaaacctgttaaaaggtatgagccttcaacttttatgtctataatacataagagattttatgaagatattacaggtttgcaggtaacttatggttatattacacaaatgaagcataacgaatataatatagaaaaaactcatttcaatgatgcttttattattgcaggtggaactcaacaagtaagatgtaaacctataattatagagcaaagacatagaaataatagggttttgcagttaaataggaaaggttttaaaccatcaattaaaagagaaagaagtaaaatattgccgaaagatttgttttggtcaaataatattaaatatacttgcaaagggatgtttaataaaggtaaatatgttttatttggtgactctaaaaagaaagaatatattaagtttacattaatagataagatttacaattttggaagttttgtatggaatatctaa

SEQ ID NO: 449 - DNA, 236 bp, unidentified
  misc_feature 1..236: note = Ga0116188_1006392 JGI
  source 1..236: mol_type = other DNA
gtcaatcacccctgaataaattcaggggcttgagttgtgaaacttgagggtaattggttgattagggggcttaatttggaaggaattatgcagacgttacaaagagagttcaagaacgtacctacggatgcttcactagtctgtagctctacaagtcgtgcgttaaacagagaggaaactctcagtgctcatggcaaagtactgatttgtaacaaccccgaagtgaatcaacccca

SEQ ID NO: 450 - DNA, 1575 bp, unidentified
  misc_feature 1..1575: note = Ga0307376_10003019 JGI
  source 1..1575: mol_type = other DNA
ttgaatcaaagcgaaacaagacccgaacaggaaccaatctttgtcatatcaaagtcggggaaatccttggcgccaacccgtcgtcccggcaaagtgcggcatcttctcaaggacggaaaagcccgtatctattgctacgaaccattcactatccaactaacttacgagagcatcgagtttgttcctgtagaaataaccttgggtattgaccctggttccagcgacactccgatagccgctgaagagcatgtgcctggttcaggcatatgctccatcatctacgcgaaagagatcctgctgcggacagacatctcggcgcaattgaagcgcaggtctggtgttcgacgtagacgcagaggtgataagatacgccaccgtaaaccaagatttgataatcgggtgaagtcagtctgttcggtctttggtaaaaaacgcacccctaaacactggaagaaggtcaatcgtaaaaaaggcggtaaaagcctaaagaaagtagaaaacggaagggctgcgatctgtcgtaaatgtcaacatgaacgggttggcgagaaagggaaacatgatgccgacaagatcctcaatcccacgcttcagaacaaagttaacgccatcgtatccgaggtcaagaaattggttgagataatgcccgtgacgaagatccgagtagagttgactgctttcgacacccagaagatggccaatcccaaaattcagggagaggaataccagcaaggtacattgttcggatacgaggtgaaggaatatcttctccataagtatggccataaatgcgtttactgtaagggtaagagtaggaatcccgtcttggaagtcgagcatgtcatcccgaagaaacgtggcggaacgaatatagtatctaatctggtaattgcatgtgaaacgtgcaatcgtgaaaagggttcacgaaccgctgatgaatacagttttcctaatatccaaaaacaagcggtaaagtttcgggccttccgttacagcgcattgacccagagttacaaatgggcactctggcgggaactgaagaaacttggcataccggttgaagcaacatttggatatcagacaaagtattaccggttgaagatgcgtttgcctaaagcccaggtagttgacgcgatggtgatagcatccggtggtcgcagttttgatctgccgacgcaatgtctgatcgaaaggcgcctcaaggcgcggaagcctttccaccgactttcgaacgaaaacaagaaaggcaagacatgtgagaaaactcccgcgatgagacaaatcaatggttttcgcttatacgataaggtgtcttttgttgatgggaatggcataagggtctatggttatgtcaccgggttgcgtactcggggaacctttgaggtgtcccacttggaaggaaatatgatctcggacaaggattggaagaaacttaagttggaagaccatatgtatcgaaacaaattgatcgagaaacgctcaattatcggtacgattctcaaaactctgaagggtaagggtattccgaaatggattcaggaaagggggtgcgccggcgctcctccccatggataa

SEQ ID NO: 451 - DNA, 368 bp, unidentified
  misc_feature 1..368: note = Ga0307376_10003019 JGI
  source 1..368: mol_type = other DNA
gtcaattaccccacgcctaaagccgggggcttgagggagaaatcctgatagtcttaggttttagacgggagcgaaagctccataagagacagcctaagtcttaactgactacgttctttcgaatatcagacagctggatgaaactgatcttctccgggtcagccagtctggcataactttctggaggctctgtaaaagtccttttggggatgggacagtcaacctcgggacgacctgccattgcaggcaattcgaaagaacattggctgggaaatgaacggacgaaagtccgcattattccccgcaaggggaaccaaggagaggtatttccattgaatcaaagcgaaacaagacccgaacaggaacca

SEQ ID NO: 452 - DNA, 1443 bp, unidentified
  misc_feature 1..1443: note = Ga0247608_10100524 JGI
  source 1..1443: mol_type = other DNA
atgaaagcggaacaggtgaaacgccgtaaaggagatgaaccggatcctgtcaaggagaccggcaagggagtccccgtctatgtgcaggacaaggacgggaatcccctcatgccgacgttccggaacggcaaggtacggaggatgctcaaggatggtctcgccgttgtcgtgaggggatgccccttcactatccgcctcacctatgagccgaagactcaggtggtccagagggtcaccctcgggatcgacccgggatacggcactgtcggcttctcggcgggtacgatcgtgcgtgagctcatttgcggtgaagtggtccttcggaacgacgtcgtggagaaggtgtcgacaaagcgcgaattgcgaaagaccagacgctccaggaagcttcgctaccgtgccccaaggttcaacaacaggaagaggaagaagggcagcttgagcccgtccgtgcgctcgaggtgcgacgcccacctgtcggtcataaggaccgtgtgctccgtgcttccggtaaagaggatcttcgtcgagatgacgagtttcgacgtccggaagctcaaggacccggaagtgtcgggggaagggtatcagcacggagagagggacggcttcttcaacactagggaatatgtcctccaccgggacggacaccgttgccgcaactgcggcggcaagtccggcgacaggatcctcgaggtgcatcacctcgagagcaggaaaaccggaggcgacagccccgggaacctcgtcaccctgtgcaggacctgccacacgggataccatgcgggcacggtcgaacttaagataaagcgtgccgcccctctcaagtctgcgaccgtgatgaacatgatgaagggaaggcttttcctctcactgagaaaggcatatcccgacaaggaggtgctcgggtccttcgcctaccagacgaagtcgcacaggatagacgagggactcgggaagagtcacgcgaacgacgcctactgcatatccggcaacttgggggccgaccgctgcccggtcttcatccgggggaagcagatccccagacacacgaggagcctccacgtgcagaagacttcgaaaggagggaagaggagaagcacggtagccccgcaccggatcgggaagtccgacctccagagatacgacgtcgtgaagtaccgcggggaaaaggcggtcatcgccggcagcacgaacggaaggccggtcctccgcgacatggactggaagaccacgaaggaggcgtcggtgaacgcgaagaaagtgaagttcctgtaccggagacaaggatcgatcatctacatgagctcccccgccagggagacggaacttaagcggggcgccaccctgtgggacacctggatggagttcatcgaccgtaatcaggagtactgggatgatcttgcgagggagttcgccggaatgaaaaaatcggagcaatga

SEQ ID NO: 453 - DNA, 413 bp, unidentified
  misc_feature 1..413: note = Ga0247608_10100524 JGI
  source 1..413: mol_type = other DNA
ctcaactttcgcaagtgaatcccaagtcactgaaagggtccattggccgccctgcgaagggggttagccggagtccccgccaataatagggaactacgttcggaagaatactgcaaaggataggcactccgggatggtcgccctagtcccggacactgcgggtcggagttaatggagcgaaagcgacggtgctccgtccacgaaaccttaccgaacatcggcgaagggcgctttgaccttccggtcctccggaaggacttatccctgaacaggggatgcggaacggttctccgttctgtccggtcagctccggacaagaatgaaccgaaaaaactaagagtccgcattgcggacaaaacaaacaaaagacgcaatgatgaaagcggaacaggtgaaacgccgtaaaggagatg

SEQ ID NO: 454 - DNA, 972 bp, unidentified
  misc_feature 1..972: note = Ga0194060_10004581 JGI
  source 1..972: mol_type = other DNA
atggaaatcaatcacttggagcagaaagtgcaaaaatcgcaaggggggtctaaacggttactgaataagatgttgccgtttactatccgcatcgttgatctcaaggccgaaaactgcgcgtttcaggcactgcgcgtcaaacttgaccctggaagcaaggaaacaggcattgcgctggtgcgtgagacagaaagcagtggcatcgctgtactcaacttgtttgagttggctcaccgtggccagcagatcagcgaagccttgacatcaaggcgcgggcatcgcaggttacgcagggcaaaacttcgctaccgttcgccccgttttgataaccgtgccaatcagcaaagcggctggcttgcgcccagcctgaaacatcgggtcgatacgacactggcctgggtaaaacggattgaaagtttgacccccatttcagccatcagcacagaacttgttcgatttaatatgcaggcgctggagaatcctgaaattgaaggggcgcagtatcaacagggaacacttgcagggtacgagatgcgcgagtatctgttggagaaatggggccggacttgtgcctattgcgataccaaaaatgtccccttacaaattgagcacattcatccaaaatcacaaggtggctcaaaccgcattagcaacctcacactggcttgtcagtgctgcaacacaaaaaaatcagctttaccaattgaagtgtttttagccaaacaaccagagcgtctaaagcatatcaaggcacaggccaagcggccactcaaggatgctgcggcgctcaattcaacccgatgggcgcttgtcaatgcacttaaaacgcacgaactggcgattgaaaccgcatcaggtggcagaacaaaattcaatcgacatcagttttgcattccaaaaactcatgcgcttgatgccgcttgtgttggtgaagttggatcaatcacagattggcaaaagccgaccctgtga

SEQ ID NO: 455 - DNA, 316 bp, unidentified
  misc_feature 1..316: note = Ga0194060_10004581 JGI
  source 1..316: mol_type = other DNA
gtcaatctcccctgcctaaaggcaggggcttggagtcgaaagacaacgagttaggtttaaacagggaaagcggtaaccaacccgctacgttaataacatgtcgtcaagacgcaccagcaaatgcttccccagcctgtcggcagacaggtcagtttgctgcactgcaaaacttgaatcatgcaaaccaaaggtaaatggtcgaatgttttagtcgcgactcgcaagggtgggagccggttactgacattcccgatgggagatgagctgcaaggcttacgtcactaggcccgtaagggcaaaaggattgtttatggca

SEQ ID NO: 456 - DNA, 1257 bp, unidentified
  misc_feature 1..1257: note = Ga0209056_10004009WGS
  source 1..1257: mol_type = other DNA
gtgaacgtgtttgtattagcgcctgacaaaaagccactcatgccgactacgccgcgcagggctagggtgtggctcaagcagaagcgagcgcgaattgtcaatcgcacaccatttactatccaactgcgtttcgaacccagcagtggatacgcccagcatgtgaaggtgggagtggatacaggttcaaagactgtcggagttgcagctcttgctcactcccaagttctctatcaggcagagattagcttgcgtacggacattaaacgaaggttggaccaacgaagacaatatcggcgcaatcgtcgaagccgcaagacacgctaccgcccagttcgatttaacaatcggaagaagccgagaggttggttccccccatcgctgtgctctaaagccaaggcgacggtaacggcggtcgtgcaggtggctcgcatcttaccagtaaagcacgtcagggtggaggtggctagtttcgatacgcagaagatgcaatttcctgaaatttcgggagttgagtaccaacggggagagctgatgggctaccatgtgcgcgaatacctgttggcgaagtgggggaggaagtgtgcctattgcagtagggagggcatgccccttcaggtcgagcacattatacctagaatcagaggcggcaccaatcgcgtgtccaaccttactttggcttgtgagacctgtaaccaggcgaaggggaatcgcactgctgaagagttcggctacccagatatacaagcacatgctctgaaacctttgagagatgctgtacaggtttccatcataaagccatggataatcgggaccctgtcaagactattgggtcaagaaaatgtttcgaccacctatggctatgagaccaagtacaagcgaatgaaaatgttgaagctgcctaagacgcactattttgatgcggttgcaattgcctgcgagcttggggaaatagttatgccaggcacggtatggtatcaattcaagtgcgtcccacgcggtagttatcagctctataacgggagtcggagcgagcacagagtgtcaggtccgaagaaagtatttggctggaagctgtttgagcttgtcaaggtcaatggtcaagtaggctacatcagtggacgtagggtaagtggccgcttctcagtgaaagacgcgattactggcaagctattggtggatggcataggccacaagaagatcatccgattagcaagagctacgcacggcttgattgtacacgttaatttagttcagtga

SEQ ID NO: 457 - DNA, 289 bp, unidentified
  misc_feature 1..289: note = SL_8KL_010_SEDDRAFT_10003558 JGI
  source 1..289: mol_type = other DNA
gtcaacgaccatcgctgaaatgtggtggcctggagagcaacctccaggccgtgttgaccagactcagcctttgagggcactcctgctgtgcaggcttacatcaggtggtccggaaaaggctacgattgcgctaagagtttaagttcgtaccctggagtactgcctcagctccaggctctacaactcctggattaaacgttcgtgaggtcagcgacagtgtccaggagaaagtaccgggtgcaatcattgtcgaggggaaagcctgtactccgaaaggagctttacacgt

SEQ ID NO: 458 - DNA, 999 bp, Moorena sp.
  source 1..999: mol_type = other DNA
atgggcgaggggagaccgacgggcacggcaccgaggcccgtcggcgtcacgccaagcacgttgccacggcagcggaggcggcagagaacgggggcggtgacgcttccacgcacaatccggcgtacgcgggcggtgtcggcgcaagcagggtcttcgtcctctccaaggacgggaagccactctggaaccggcctcgccctcaccgacgataagaaggaagtcgacgggcaaggagttgtgatcaccgtcaggcgggggttggtctcggttgaactccagcaccgcggtgaacagatccgcctgtgcatgcggcagcgcgcgggctaccggcacaggcgccgctccgccaaccgccgctaccgagcaccccgtccggacaaccggccccgtccagcaggatggctaccgccctccctacgccaccgtgtcgataccgcctactccttggcgtctcgcctctgccgctacgcaccggtcactgaaattcatgtggaacacgttgccttcgacgtccactccatgagtacgggcaggcccttcgccggggtggagtaccagcgaggaactctggccgggatcgaatcccgcgcctacctccacgccaagtggaacagcgcctgcgcttactgcgacgccacgggcgtgcccttgaacgtcgagcacctcagaccccgcagccgagggggctcaaatcgcatttccaacctcgtcctagcctgcgtcccctgcaacaaggccaaggacaacatgcccgtcgaggtcttcctcgccgaccgccccgcccgcctcgcccgcctcgcccgcctcgcgaagatcctccggcaagccaggacaccgctcaacgacgctaccgcgatgaacgcgaccctctggcagcttgtaaaggcgctggggaccctcggcagaccagtgcatccctggtcgggtgcgcgcacaatgtggaaccgcgaggccatggggctcgacaagacgcacacgatggccttccggtccgaatga

SEQ ID NO: 459 - DNA, 400 bp, Moorena sp.
  source 1..400: mol_type = other DNA
gttttcggtacccggacgtgcgaggtcagtcgctccccgaccgcaaggttgccggctgaccagccccagtcatcgagatctgaagatcaaggaggtgccctagatgactacgtttcccgcaggcgagcagacccacgaggctgtgcttcctcagcagcctgctctggaatccgtgggagcagacacccctgggagaagggacgaaacggctcagggacaccccgccatcgggcggggcaccggcagggaacatgggcgaggggagaccgacgggcacggcaccgaggcccgtcggcgtcacgccaagcacgttgccacggcagcggaggcggcagagaacgggggcggtgacgcttccacgcacaatccggcgtacgcgggcggtgtcggcgcaagcagg

SEQ ID NO: 460 - DNA, 798 bp, unidentified
  misc_feature 1..798: note = Ga0376465_0015542 JGI
  source 1..798: mol_type = other DNA
atgagagtattcgtactgaacatgcgtggcgaaccattgatgccatgcacacagagaaaagcccgtatccttctaaaagaagggaaggctgaaatacaccgatacgatccgttcacgatacagcttacttatgctacaggtgaaacaaaacaggactgtcatatcggtgtggacaccggaagcaagcatatcggacttgcggtaacatccggaaacaaagttttgttcaaaggagaagtcgaactgcgacaggatgtaaaaccgaagattgatgcacgcagatggtaccgcagggacaggcggaaccgcaagaccagatacagaaaagcaagatttcttaaccgcaagaaatctaagaaatggctgccgccgagtatccagaacagggtcaaccatacataccattggatcgccgtgctgcagagtcttgtgccggaagcagaactccacgtagaagtcggcaagtttgatactgctaagatgataaatccggacatcaatggagtggattaccagcacgggcagacctacggtttctatgatgaacggtactttgtgttcgcaagggatgattacacctgtcaggtatgcggtaaatccagtggcaagatactgcagacgcaccatatcgtttaccggagcaatggcggcacggacagggtggataacctcataaccgtatgtaccgactgccacacctcagaaaaccacaagaagggcggaatcctttataagtggcaggaggaacacaagaaggtaaagcagtataaggaaccgccgtttatgaacacactccgc

SEQ ID NO: 461 - DNA, 288 bp, unidentified
  misc_feature 1..288: note = Ga0376465_0015542 JGI
  source 1..288: mol_type = other DNA
gtcaaccaccccgacctatggctaatgccttagaggtcggagcttgtaaaagctcagattgactagcctaagtccttcggggactacgttgtttatgttatcacacctacgaatgattacctagttcgtagcaactgtgcaggcactgtaaaagttctgtgaggcaggaacggtcaacctggtattgccgattacggaaagcatttacaacattggcgaaggtaaacaaactttcataggaaaggggcggcacctgcgggtagccgccaaaggtaacaagtaatgaga

SEQ ID NO: 462 - DNA, 1377 bp, unidentified
  misc_feature 1..1377: note = Ga0373622_0034557 JGI
  source 1..1377: mol_type = other DNA
atgaaaaagcagacgttaaaacagagagcgattaaatcgaacacacctacggatgcttcacaagtccgtagcaactgtggtttgtcattaaacagagatgaaagtctcagtgtggcgagctcaaaaacctgttttaacaatcccgaagtgaatcaactccaatcacgggcaggaggacttaaagtcaacgtgcctgtactttcgctaagggggaaaccgcttatgccctgctctccagcgaaagcccgaaaactattaaaacagggaaaggcgaaagtggtcaagcgaataccatttattatcaaactcaattttgcttgtgaaaacaaaacgcagagaattactttcggacttgattgcggatacgccaatattggattctctgcaatcacttctaagaaagagctcatctctggaagcgtatgtattgacaacaaaacatccgaacgaattaccgacaagagtatgtatcgcaggaatcggaggaggaggttgcgctatcgtcagcgtaggtacttgaacagaaagagttctaagaagcaaattccgccatcagtacaacgaaggattgatacgcacattcaattagttagaagatgggcaaaatggattcctataacaaaagtaaatattgagattgctaatttcgatattcaaaaaatcatcaatcaaaatatcaaaggcaagcagtatgctcagggaaatttatatggatacgaaaacttaaaagcgtatatcatagcgcgagaatatagcaagtgtcagttatgtaaaaatgggatggataagcaaggatggcatctacaccatattatcgaaagagcaaatggcggaacgaataggtcagacaacatcgcattacttcacaaaagatgtcacaagaagttacatacaaaagggctaaaactaaagcctaatagtcaatttaaggctgagacatttatgtcaatagcaaaatggcgcattgtaaataaattaaaattaaaatttaccacaaaaacaacatttggatatgaaactaaaatcagaagaaatgaattagaattagacaagtcgcatattaatgatgcgtttgtaattgcaaatggaggcaaccaaaacagatgcctaccaataatcatcactcaaaagcacataaataatcgctcgcttggattacagaaaaacggatttcctcttgcatccagaagatgtagatataaaattcagccaaatgatttaatttgggtggacggaaaaaaagaaaccgcaaagggatgttttaaatacggagaatgggttgtattaaagaatgacttatcgaagaaaaggaaatctgtaagcataaatagaatagataaggtgtataattttggaagttttatttatagtaattaa

SEQ ID NO: 463 - DNA, 265 bp, unidentified
  misc_feature 1..265: note = Ga0373622_0034557 JGI
  source 1..265: mol_type = other DNA
gtcaatctcccagcaatgggcttgagccgtgaggcgcaagggcaacaggttgattagggagcttcaaaatcgaaagatgaaaaagcagacgttaaaacagagagcgattaaatcgaacacacctacggatgcttcacaagtccgtagcaactgtggtttgtcattaaacagagatgaaagtctcagtgtggcgagctcaaaaacctgttttaacaatcccgaagtgaatcaactccaatcacgggcaggaggacttaaagtcaac

SEQ ID NO: 464 - DNA, 1557 bp, unidentified
  misc_feature 1..1557: note = Human gut metagenome
  source 1..1557: mol_type = other DNA
atggtttatgtttttgtactggaccgggacgggaacccgctcatgccgaccacccgctgcgggaaggtccgcaggatgctaaaaaacgggcaggctgaggtggttttccggatcccgttcacaatccgcctctgctatgagccggcttctaaggaaacccagcggctggtatacggctgcgacccggggcgtaccaatatcgggagcgccgttgtcagggaaaacggctgctgtgtctacctggacaaatgtgccacaaggaaccgggaaatcccacagctgatggcaaagcgccggcagcaccggcaggcttcccgccgcggcgaacggcttgcaaggaaaaggctggcaaaacggctcgggaccaccacaaagaaactgctggacaggctcctgccgggatatgagaagccggtccgggtgaaggatatcatcaatacggaagcccggtttaacaaccgtttccgcccgaagggctggctgacgcctacggcaaggcagcttttaaggacccacctgaacattctgaagaaggtccggaagatcctgccgataacggatgtggtgctggaagccaacaggtttgcattcatgcaactggacaacccgcatatcttccggtggcagttccagtacggccccctgcatgggaaagggagtgtggaaaatgccgtaaaggagcagcagggcggaacctgtatcttctgtaaacatgagatcgagcattaccaccacatcatcccccggagccggggaggaagcgatacccttccaaatatggcggggttatgcaatgcatgccacgataaagtccataagtcggaagaatggttccggaagctgaagaaaaagaaagccgggctgaataagaaatacggggccctgtccgtgctgaaccagatcatcccgtacctggtggacagttacacggaactgttcccggaccatacctatgtgacagccgggtacagcacgaagcagttccgggaagaccacggcatagaaaaagaccatgacagcgacgccgcctgcatcgcttgcagcattctggagaaggtggacaggatcatattcccgggaatgacataccagatggaacagttccggaggcatgaccgtgccaagataaaatctttccggaacaggtattattacctggggaaagaaaaggtggcggtcaaccggaaaaaggcaattatggcagacccttccgggaaagagaaaaacgggaagcttcagacccaggactcgctggaggactggtttaccaaagaaactgagagaaacggcttgcaggaagcggagagaaagcgttcccgcctgagggcggtgaaaagcatccggatccggaacaacatgcagaggcccctgcctgggagtatctttatctttgagggaaagaggtatctcctgacaggcaatcatggggaatattatcagacaaaagtggcaggaaaaacagtagaattcctgaagtcaaaatgtaggatagcctcggggaaccaggggctggtctataccggacaggtaaaaagcggcgcttcctcccatgtctaa

SEQ ID NO: 465 - DNA, 221 bp, unidentified
  misc_feature 1..221: note = Human gut metagenome
  source 1..221: mol_type = other DNA
gtcaataactcatgactgaagtcacgagcttgttggatggatgcgcctgcatccatcgggacagcttctggctgatgccgggttattgagcagagcagtgatacgccgatcactccggggcggctccaaactccggacactgtctataggcgtacctatgctatggaaaccttactgccccacggggcaggcttaccgcaaaggagtaacttatggtttat

SEQ ID NO: 466 - DNA, 1185 bp, unidentified
  misc_feature 1..1185: note = Ga0373620_0052976 JGI
  source 1..1185: mol_type = other DNA
atgaagactcgaaggtcaactgaactgtctgggcgtggtagcccgaaagcacgcaggggatgctcgcctagtcccctccctctgcgacagtcagtggcgaaggtgaatacaaccaaggcccgtaagggcattttcgctagcgttcctgtcgtagatcgagatcagcagcctctgatgccttgctccgtagctcgtgccttcaagatgattcggagtcggaaggcaacgcccttctacaagaagggactcttctgcgtcaggctgaacgtcgagccttcagcccggcggactcagccgatcgctgtggggatcgatccagggtcgaagaaggaaggcttctcagtcgtctcagcgaagtacaccttcctgaacctccaggcagatgccaggacagggatcaaggagaagatcgagaaccggcgaagcctacgaagatcgcgtagaagtaggaagacgccctgtcgggcacgccgcagcaaccgatcttcactgcgaaataagggtgttcccccgagtacgttggcgcggtgggattggaagctgcggctcctgggaggtctagctaagctctatccggtcaccgacgcgatcgtagaagacatcgctgcgccgacgaagaagtaccagagaaagtggaacaggtccttctcgcctctggaagttggcaaggcttggttctacgcagaggttgcaaagattgcctcgctacagacgcgcaagggttacgagacgaaggctctgcgagagcgctacgggctcccgaagctcaagaacaagatgtccagcgacttctatgcccactgcgtcgacgcttgggtgctagccgcagaagctgtaggcgcagcggctccgacggagaagcacgtcctctgcgtaacgccgctcgactttcgcaggcggtcacttcactaccaagtacctgccgaggcaggtaagcgtgggctgcatggaggcacgcgaagtctaggaagccgtaggggaagcctcgtacgatctccaaagtatggcctcgtatatcttggtggatcatccaaaggccggatttccttgcatgacctagagactgggaagaggttgaccaagagcgaggatcgcacaaagtgcaggatcctgagtcataactcagtcaggttttctgccccgctgagcacggtgctgcgtcgggcagcagaggagtttgtctga

SEQ ID NO: 467 - DNA, 285 bp, unidentified
  misc_feature 1..285: note = Ga0373620_0052976 JGI
  source 1..285: mol_type = other DNA
atgtccgaggcgaccagcacgtccatctggcggatgttgttgagacgtgcgtcctggttgctcggcataggcagctccatgtcccccaggcgaggcatgggaccggagttagctataacagccagatcgcgtgcgcgacagacacgccactgctggcgagacagttcgccggtagcgaagctcacgcagagctgacaccgtcgggcgcgctcgaaggactgcccgtgcgcccccatccccttgtggtttggatccgacatagctaaccgtgtacgccttatagca

SEQ ID NO: 468 - DNA, 1083 bp, unidentified
  misc_feature 1..1083: note = Ga0114925_10000117 JGI
  source 1..1083: mol_type = other DNA
atgccttgtagttcaagaaaagctagactgttacttaaacaaggtagagctaaggttgttagtaagtgttcctttactattcaactactatttggaagttcaggttataaacaagaagtaaaagcttccttaattccaagtagttctaaagtaggagtagcttgttcttctttaggtaaatgtttatattcttctgaagtagaattaagacaagatatttcaaagaaaatgaagaggagagctgtctatagaagaacccgtagaaatagaaagactcgttatagaaaatcaagatttcttaatagaaaatctgatagaaagtttactccaactatgaggtctaaacttgagagtcatgcgagagaggttaaaagaacaactaaactacttcctatcagtagttgggtatttgttaagaactctattaagaaagattatagaggttctaagaatttagaatggttaaatctacaaaggcaaacttttgagagagatagatttaaatgtagttattgtagaggtaaatctaaatgctatgaacttcatgctcatcatttgatactaagaagtgaagtaggtgaagatactttagaaaatcttgtaactctttgtaagacttgtcatatagcttatcataaaggtgaaattgagttaaagaataataaaagtaagggaaaagctaaaattaatactgaacttaatattattagaaagtatttagaacttccaagtagtattagtaaaatttacggctttgaagtcaaagctaaaagaaaagagttagatctggaacctacacctattaacaatgcttgtagtgtcttagagatactaccaaataatagttattatattaaaaatgttcctaaaggagattatcaaagaacaaaaggagttaggagtgaaaaattattacctaaaggtaaaatattagaattttctaagtttgataaagttatatttaaaaacaatacttattttattaaaggtagaatgagcactggttatttcataggaatgaatattttaggtaaagctttgaaaggtaagactttaaaagctaaagaatgcgaactaatttag

SEQ ID NO: 469 - DNA, 291 bp, unidentified
  misc_feature 1..291: note = Ga0114925_10000117 JGI
  source 1..291: mol_type = other DNA
gtgaattacccatagtgttttcgacaactgtgggcttcaatcgtgagattggagagtaattagttcaccagactcagttgggagaaattctaactacgttatctttgaagtagaaacctactaatgtcgcctcagttagtagctctttcgtggctctgtaaacagagattaaagtctcagtcaaccacaatgcgaagcaaagataacattgtcgagaggaagtagaattccttaactggtaacaggttaagaatactcaatacttaggaataggagatatactcaatgtta

SEQ ID NO: 470 - DNA, 1293 bp, unidentified
  misc_feature 1..1293: note = Ga0370498_000007 JGI
  source 1..1293: mol_type = other DNA
atgccaaatttagtacataaacaagttaaatcaatgactagagtatccggtcttcctgctcgtaagagtaggaagattaaggaaactgaatcatcttcctgtggcaaggaaaaatatatttctaatgtttctctagttggaaatccctatgatgatcagtctcgaagagagcaattatccaaattatcgaaaggtaatttggactggaaggtaacttccaaatttgttacgaaaatatatgttccagtaatttcttgtactggagttccattaatgccttgctctccaaggagagcaaaagaattaatgagaaaatataaagcgaaaaagcagtggagatatggtattttctatattaaattactagaaagagatataggaaatattcaagagatatcatgtggaatagattctggatctaagagagaagcgataacggtaaaatccaagaataaaacttttattaatgttttagcagatgctagaacaggagtaaaagaatctcttgaagttagaaaaaatatgagaagggcaagaagatttaaaaaaactccttgtagaaagaataaattaaatagaaaaaggaataaaaactttattccaccatcaacaagggcgagatggaattccaagttaaggttgataaatatattaaagaaaatatatccaatatcgatatatgttgtagaagatataaaggcaaaaactttaaaaggaaagaaaaattggaataagaatttttcaccattagaagtaggaaagaaatatttctataatatattaaaaacatatggaaatcttattttgaaagaaggatgggaaacatttaacaaaagaacagaattaggtttagtaaaaacaactaagaaattagataaaatattttctgcgcataatgttgatagttgggttttggctaatttcccttttaatattcaaacatatcctgaaaatattgatatgtattattttcaacaaattgaattgcatagaagacaattacacatgttacagtttgctaagggagggaaaaggaaaagatatggaggaacagtatctcttggaataccaaagggaacagtagtaatagcaaaatataaaaagaaagaaatatatagttatattggtggaaatatgaatggtaaattatcaatccataatatgcagaatggagaaagaataagtaaatgtataaataaagaagatataaaatatatgggatatatagcaaagtggaaagtagaaaaaataacagaaaataacgagcattcgtggaagaacatgcatatttaa

SEQ ID NO: 471 - DNA, 255 bp, unidentified
  misc_feature 1..255: note = Ga0370498_000007 JGI
  source 1..255: mol_type = other DNA
ctgtcataacccccatcaagttttcatcttgatcgaggcttgttagagtcatttaatgccaaatttagtacataaacaagttaaatcaatgactagagtatccggtcttcctgctcgtaagagtaggaagattaaggaaactgaatcatcttcctgtggcaaggaaaaatatatttctaatgtttctctagttggaaatccctatgatgatcagtctcgaagagagcaattatccaaattatcgaaaggtaattt

SEQ ID NO: 472 - DNA, 1245 bp, unidentified
  misc_feature 1..1245: note = Ga0247608_10002058 JGI
  source 1..1245: mol_type = other DNA
atggtgtacgttttagacatagagggcaagccgttgatgccaactgagaggcacggaaaggtcagaagacttcttcgtgacagcaaggctcatgtcgtaagactgcagccattcacaattcagttggattatgagagtaccacctacaagcaagaagttagtttaggcattgacgcaggcagcgtacatattggagtgtctgcaacaacagagaagaaagagttgttcgctgcggaggttgttcttcggacggacatagtaaagaaacttgcgagccgtcttgaaatgcgtcgcacaaggcgtaaccgcaagactcgttatcgtaagccgaggttcgacaacagacgaagaaaggaaggttggcttgcaccgagtataagaaacaaagtggatagccacataaaggttatccgtttggttcattatttgcttcctgttacaaagaccactatcgaagttgctcagtttgatgcgcagaagataaagaacgatgccattcaaggtgtggagtatcagcagggagaacagatgggtttctggaatgtgagggagtacgttctcgcaagagaccatcatacttgtcagcattgcaaggggaagagcggtgataatattctgaatgttcatcatttggaaagccgaaagactggtggtaatgcacctaacaacctcataacactatgcgagacctgtcataaggcgtaccatcgtggagagtttgagttaaaagtgaagcgtggcacttccttgcgtgacgcagccgttatgaatatcatgcggtgggcggtgtatgaacaggcaaaggcagagtttgggaacgtccatctcacatacggctatgtgactaagcatacacgtattaagaacggaattgaaaagacgcattgcgcggacgctttctgtatcagcaagaatgtaaaagcagtgcgtttaggttcgtatcttaaatgccgttgccttgcaagacatacaagaacattgcatgtatgcagtccgaaaaagggcggtattaggcgtagcgcagtagcaagccactggataggcaagtcacgtctacaaaggtacgatagtgttgagtggaacggagtgaggtgctttatcttcggcagtacacacggcagaccagtattgcgtgacattgacggaaaatctatcactccaaacgcgtcaattaatgccaaagaaatgatttttaaacatagaaacaataagattattatgcaagaattaacttgcgaaacttga

SEQ ID NO: 473 - DNA, 283 bp, unidentified
  misc_feature 1..283: note = Ga0247608_10002058 JGI
  source 1..283: mol_type = other DNA
ggttataagattcaagtttcgcaagtagtggattagccagtcagtccagcggagcggattagcctaagtcccgattggcaaaagggaactacgttagaggtgaatgatataggcactttcggatggtcgtccaagtctgaaaccctgcggcaagtgattaaaaggagcgaaagcgacggtgttgcttgtaaaaaccacctcataacattggcgatgggcgcataacagcagaaatgctgacttacaacaaaagttgtttaacaattaaaagtaaaaaagaatg

SEQ ID NO: 474 - DNA, 993 bp, unidentified
  misc_feature 1..993: note = Ga0401359_0000081 JGI
  source 1..993: mol_type = other DNA
atgctacgtctttccaggacatctttactgagatggcgggaagggactaagaacttaactcgaaggattatatccatgttacgagtgccagttttatcaaaatcaggtaaacccttgatgccaaccaaagctagtcgagctagacgttggttggaagaaggaaaagccaaagttgtacacaacgatcttgaatgcttcgcggtgcagttgaccgtctcttctagagaagacttgcagcccgttgctgtaggattagatccaggaaaactctattcgggaattggagtgcaatcgagtcgtgctaccttgtggatggcacatttgattctgccgttcaaaacggttaaagaccgaatggagctacggcggatcatgcgtagagcaagacgagggcgacgaattaatcgcaaaattccatacaatattagaaaatggctgggattagccaaagacaagaaaaacaaggctgatcaaactccagcgacacacgctgttgatggtgttaccttagccgcgtttgagttcattcggtggcgagagtggcactccggttccaacaaacatgggagctggaagggtgacgttcaaatcacacctgcaccctttgcgacgattcgtagaccacctgttagccgtaggcaactgcacttgtgtgttccgtcaaaaggtggaaagcggcgcaagtacggcggcacaattacccgccacggaatcaggaagggtgataaggtaattgccgaaaaagccggaaaagtttatacaggttggtgttctggagacaccaaaaccaaactgtctgtttccgattgttactggaaacgaattggacagtttactgcaaaaaaagttcagttgttgcagcgaagcacaggattaatcgttgtgccttcaactggaccggtcaaaccttaccgcatcgaacggttcggtttgacctggagttcctctccaagttgcttcgctgaacttggagtctcacgaggtttacgatga

SEQ ID NO: 475 - DNA, 250 bp, unidentified
  misc_feature 1..250: note = Ga0401359_0000081 JGI
  source 1..250: mol_type = other DNA
gttcacgaccctgacttacttcgttgaagtcagggattgtaaggcaaattacaatttaaaccgttgaatatccgcattgagtctcagtatggtacagacttccgaatacttccctcgttcggagcatctctaagactttttgtcgagtcgctagtagagacgtagcatgctacgtctttccaggacatctttactgagatggcgggaagggactaagaacttaactcgaaggattatatccatgttacga

SEQ ID NO: 476 - DNA, 1287 bp, unidentified
  misc_feature 1..1287: note = Ga0181589_10009757 JGI
  source 1..1287: mol_type = other DNA
atgcaaaaagtctttgtagtagataaaaacggcagacctctgatgccttgcagtccaacacgctgcaagcagttcaagaaagaaggtcgtagtagagtctatcggttgaaaccattcacgattcaactgatagatgttgaaggtggcgagactaaagatgtcgagtacaaggttgatgctggatcaaagtttactggacttgctctagtgggaaactttgagaagcaaggcaacgtgttgctttgggctgcaaatcttcagcacagaggtcaagaaattaagaatgcccttgagtcaagacgttccttgaggcgaggtagacgcaatcgtaaaaaacgctatcgggctgcacgatggagatttcgcaatggaatcaaaggcggactagcaccatcactgatgagcagagtcaacaacatcaccaattggctaaagaagttgatgaagtatgtgcctgtgaccaagatcgtcagtgagttagtacgattcgatctgcagaaactagtcaatccagagatcagtagcattgagtatcaacaaggcactcttcaaggctatgaggtcaaagagtatcttttggagaagtggggtagacagtgtgtgtactgcaacaaaaaagatgtgccactccaagttgagcatattcatccaagagctaaaggcggaacaaatcgaataggcaatctaacaatctcatgtgccaagtgtaatgagaagaagagtgccagatctatcggagactttctttctggcaaaccaacactgctgaagaagatcaaagctcaaatgggtaagccactgaaggatgctacggcagttaataccacacgctggagattaaaggaagaactagagtcattcggactgccactagagttgagttctggaggaagaacaaagtttaatcgattacaacagggttacaagaaagaccactggctagatgcagcatgtactggttccagtggtgagtctgttagcttaaacagaatcaaaccactacagatcaaggcgatgggtagaggttccagacaagtgatgaagacagacaagtatggattccctagaggatctgctggcacagtcaagcgtgtcaatggcttccagacaggggatctggtgaaactggatcaacctaaagggaagtatgcagggacttggattggtcgtttagtaggagttcgaagtcgtggaattcttgacattatgactcctcttggaaaggcaggagcgacatggaagaacttcaccttattacagcatagtgatggatacgagtatgcttga

SEQ ID NO: 477 - DNA, 288 bp, unidentified
  misc_feature 1..288: note = Ga0181589_10009757 JGI
  source 1..288: mol_type = other DNA
caccccctttagggggtggctttataaggagaagttcgttgagtccctgacttagcaccacctcaacgcatccatgctgctgaattggtgttatttggctcaaccagactagggcttgtcgaggcccacgatgcacaagaatgatataggcaactcttgaatgcttcaccagttcaagatagcggctttcagttaagttgaggggggtcaggataaccactctgtgctgttagcaaaaaccttgttcatcattgtcgaggtgactgatttttaatcaacaatctttcg

SEQ ID NO: 478 - DNA, 1578 bp, unidentified
  misc_feature 1..1578: note = Ga0080699_1005680 JGI
  source 1..1578: mol_type = other DNA
atgtggaccacggaacggaatgcgccatggggctctgccccagacgcgcatgaagggacagatgcccgtgaggccaccctgctttatgcagggatggatcacggggagggcgtaagcccagaaaggaaacttatgacagcagtagcagtaataggcaacacaggcaaaccgctgatgccgaccagcccgtacagggccaggaggcttttaaagtcagggcgtgccaagatctatggatacaggccgttcacgatcatgatccttgacagggaggatggcgctgtgcaggaaattgagtacaaaagcgacacgggttacctgcatgtgggtatctcagtatgttccaaaaaacatgagttcctgcgggaacagagggatctgctccctgatgagcgggagaaacataacgaccggaggaaataccgccggacgagaaggaaccgcaaacgttataggaaaccgcggtttgacaaccgcatcgggaagagccgtaaggcggagaaagagggcggcgtatggctgcctccgtcgctggaacacaaggtggatgcacagctccgtcttttcacccaggcatgcaggatcatgccgataagcagcgcggcatttgagatgggaaagtttgacccggcttgtttaaaagcggaagagagcggtggcccagttccccaaggcgtggattaccagcatggcgggcgttaccaggccgccacaataagggcagctgtttttgcccgggatggacacacatgcctgttctgtggcagggggataaaggatggtgctttccttcacgtacaccatatcgggtattggaagaaagaccgttcgaaccgtctggggaacctggcgacatgctgcgggatgtgccacacatcggaaaaccacaagcctggcggaatcctttacgggaagcagccggaagtatccggactggcccctgccacatacatgaatacggtacgttttgaacttttgagaaggctgaagggaagcgccccggctgtggatatccatatctcctacggggcaaggaccagcatggtccgcaaggaacgggcgatcataaagagccataccaatgacgcttactgcctgggaaggttctttccgaagcacagggcatcagaggaagtgttccagaagacccgccgcaacagccggatactccagaagttctatgatgcggtatatattgacggccgcacaggagaggaagctaagggccaggaacttacgaacggcaggattagcagaaatcataagaaagaccacaaaaatctgcatccattccggagcaggaaagtcagcaaagggcgcgttacgatccggagatccaggacagcgttaaagcctggcagtctggtggaattcaatgacgaagttttgactgtgcatggcacacatacaagccggcataaatccaaaaagacaggcaaaacggctgtcagtatcaatatagagtttaaacagccagccaggaatggcaaaaagagcgcggcattgagcaaatgccggatcattaacaagtcatataatactggctggaaaaagattactgcttcggctttaaaatag

SEQ ID NO: 479 - DNA, 390 bp, unidentified
  misc_feature 1..390: note = Ga0080699_1005680 JGI
  source 1..390: mol_type = other DNA
gtcaattaccccacctgatccagtgggtcagatggggcttgcaaaaaaaaagagaaagatgaagtttttttttctttttgcaagcccggttgattacccttagcttcggctacgttaccagttaataatataggcaccaggggatactccacacgtcccccgcactgcggcatggtgttaaacatccctgagggaaaggggaagtgcattatgcatgacagcttatcgtataagccgtctaaaacatctgggaacattgggtatgtggaccacggaacggaatgcgccatggggctctgccccagacgcgcatgaagggacagatgcccgtgaggccaccctgctttatgcagggatggatcacggggagggcgtaagcccagaaaggaa

SEQ ID NO: 480 - DNA, 738 bp, Moorena sp.
  source 1..738: mol_type = other DNA
atgtccaaagtatttgttttagattcagaaaaaagaccactcttaccaattcatccagcacaggcaaggcaactattacgaaacaaaaaagcagcagtatttagacaattcccattcacaattattttgaagggagctagtccagatgcacctacaacagatttacgaattaagattgaccccggtgcaaaatatacaggaattgcgctagtcaacgatattactggagaagttgtatttgcagcagcagtcaacgctactagatttgctttacttaaagttttgaaatcaacaggtttaccagttgaatgtggttcaggagggctaacaaagttcaatcgtaatcaacagaatttagcgaaagctcattggctggatgctgcttgtgttgggaagtccacaccgattcttaatatcaaaggtattaaaccattgttgattacagccaatgggcatggtactcgccagtcatgccgaacggataaatttggatttccgagcagatatgtgcctagatttaaatttgtcaaaggttttcaaactggagatattgttaaagctattgtcaccaacggtaagaagattggtgtgtatgtagggcgtgtagctgtgcgttctacgggtagctttaacatttcagctaaacaaggattgattcaaggaatcagtttcaaatattgtttacccattcataaaaaggacggttacgcatatgcgtttggatttgacggcgaatga

SEQ ID NO: 481 - DNA, 242 bp, Moorena sp.
  source 1..242: mol_type = other DNA
gtcataaagcccagccctaaagggcggggcttgaaagaagctctatatgaccagcttaagtcttaattgactacgtttaaggcaagagttaaagacctaccagggaatgcgtagctagttccctgctctagaaccaaactgttaaacagatgtacaagggttaagtcagtgcagtttggatagtaccgaccttaaacattagcgaagctaacattacccgcaaggagggacttatgtccaaa

SEQ ID NO: 482 - DNA, 1335 bp, unidentified
  misc_feature 1..1335: note = Ga0310136_005546 JGI
  source 1..1335: mol_type = other DNA
atgttgttgttcactgttgacaaatgcggcaaacctgggcatccaactagaaggtttgacatgataagaaagcttaaaaagcagggcagggtaagaatcgtcggtggtggcgcttccggcaaaccgccggtggtagtctttctggatagggaattcgattattcaaaaactgcagaaagaaagcttgtcatagcgcttgacccggggtatagatatatcggctttggggtctgcgaaccaaaaagcgggaaactaacagtgtactgcaaaggtgttcttgaaacgaggatacccgaaatcaaagggctaatgacagaaagaaggatgcatcggagatttagacgttactgttcccgccataagaaaaggcgtttatccaagcggcaaggcagaagtctaacaaaattcaaagcgccgagaaatgtaagaggcaagaacagggacaatgctacactcaagcatggcgtagagacacatatcaatctttgcggcaggcttttgaagttctttccatttcctaaacatcaggtcgtttttgtcatggaggacaacgtttttgacgtcagggcaatgacctggggcaagacatacggtgcaggatatcagaaatcgccgagaacagaagttgaaaagcgatgtgtaatctgcggttcgacggagaacttgcacaagcaccacataatacagcgtaaagacggaggaacggacattgacgaaaatctggtttacctctgcagggactgtcatgaagatgtgcacgccgggcgggtatatattcccataaaaggcatgaagcagtggcgcgcattgggaacgatgaacgccataataggcgaactgcggaagataccctggttagaattcatccctgcgccggatgcggcaaaggcgagaaaaacagctgggcttgaaaagggacatgggaacgacgcattggcaacagcggcggcttactgcaatcccgctgaaattgacacaacacaatcaatggaactgcatcttgttaaggtaagaaggcacagcagggcgcggatacatgctgtgagagacaggctatacaaagtaaatgggaaaattgtagccaggaatagacagaaaagaaccgatcaaatggagccgtctttggctgatgtgctgccttttaccccagcgcagcagagggatctgaaagtgtatccaggagtcaaagtgctcaaaccgtttaggagagacatgccgtccgtggaaggcgatgtgtgggttcatttagcgacaggaaagcgttttatagtgaccagcgtaatatcgaagaattacctgtattctccgcagttgagagagattgtggggaaaccc

SEQ ID NO: 483 - DNA, 246 bp, unidentified
  misc_feature 1..246: note = Ga0310136_005546 JGI
  source 1..246: mol_type = other DNA
gtcaactacccctgattaaaatcaggggcttgccagcagggggcgtgctgctggcgggtctgttaacggcaggtagttgaacgcgggtgtgcggcggcgggaactgacgttccgggacgacactcccagttccgggagacagcggtgaaatcccgcagccttacacagggtgctgccgcacgcctcggggagacccaccgccttttggcgcccggatcacagggctcctgaacgaggagggaaagc

SEQ ID NO: 484 - DNA, 1395 bp, unidentified
  misc_feature 1..1395: note = Ga0063591_100011 JGI
  source 1..1395: mol_type = other DNA
gtgttcgtgttggatcgcagcggcaagccgctgatgccgtgcagcgagaagcgcgccaggaagctcctggccgccggtcgtgcgcgcgtgcatcggctgtacccgtttgcggttcggctcgttgaccggcacgtcgaagactgcgcgttgcagcccctgcgcctatcaactgaccctggcagcaaggtcacaggcattgcgctggcgcgcatcgagccaaagctcgtcgccgagactgatgaaattctcgagccggtgatgcacatcagcgtgttgatggagatcacgcaccgaggcgcgcagatcaaaaaagacctgcaaagtcgcgccgcgctgcgtcgcggccgccgcagccgcaacctgcggtaccgcgcgccacgctttgacaaccgcacgcgtcctgacggctggctggcgccaagcctgcagcaccgcgttgacaccacgctgtcgtgggtgcgccggcttctccgccttgccgccgtcacgcacctagcccaagagctggtgcgcttcgacatgcaggccatgcaagctgaagaggaaggcaacccgcaaggcaataccatcgaaggccttgagtaccagcgcggcacactcgcaggctacgagcttggcgagtacctgctggccaagtggaatcggacttgcgcctactgcgacaagaccgacgtgcccctcgagaaggagcacatcgtcgcgcgcagcaaaggtggctccaaccgcgtcagcaacctgacgctggcctgccggccgtgcaaccaaaagaaggcagcgcgcgatgtgcgcgagttcctcgctaaagagccgctgcgcctgcagcgcatcttggccaacgccaaagcgcccctcaaggatgcggccgccgtcaacaccacccgctgggcgctgctgggcgcgctcaagcgcacaggcctgcccgtcgagacaggctcgggtggccggacaaagttcaaccggacgcgactgggcattcccaaaacccacgcgctggacgcggcgtgcgtcggtgcggtcagcgacgtgcgtcggccggcgcagccggccatccaagtcaagtgcgcaggccgcggctcgcgcagccgcacgcgcaacgatgcctttggcttcccgcgcggccacctgatgcgcgagaagtcgatcaagggcttccgtaccggtgacatggttcgagcgaccgtgacgcaaggcaagaagtctggtgtgcacaccggccgcgtcgctgtgcgcgcgaccggcagcttcaacatccagacgcccggcggcgtcgttcagggcatcagccacaagcattgcgtcgtgctcatgcgaggcgacggctactcgtactcaagaaccgcctcagcagggcaagccaaagaaaggacgcgggaagctggtcacgctatcgcgtga

SEQ ID NO: 485 - DNA, 325 bp, unidentified
  misc_feature 1..325: note = Ga0063591_100011 JGI
  source 1..325: mol_type = other DNA
gtcaatcaccccacgactgaagtcgggggctgaagaagcaaaaacttcgacagccctggttgaccagaccaagaaaggatttcgaaagaacaccaatctacgttgcacacaggtcgcaagaccgacggcaggatgcttctccagtcctgccctctcgaagtcacggaagcagacaagccaaggggttggcacgaaacggtccgtggcctggtggcgcatgtcaccaaagccggtgtgcaacatggtcgaggagagcgccaaagccgcaaggcggaggccgtcacaaggcccgtaagggcgtttacatagaggaatcgacgtgtca

SEQ ID NO: 486 - DNA, 1707 bp, Branchiibius hedensis
  source 1..1707: mol_type = other DNA
atgtctacgttgcacacgggtgcgcgaacccaccggcgggtgcttcctcagcctgccgctctggaatcggtgccagcagacaaccccggggtagggacgaaacggggcaccgacatcccgcgcacggcgcaagccgggcggcgggacaccggtgtgcaacatggtcgaggggagaccaccgggggcgcacctgtacccggcggcgtagcagcagtacccgcagggcgtaagcccagcagcaccaagcaacacagcgccacccagcagaaccgcaccacccgcatcaccagcagccccaagcagtctcggttcacggctgacaacgcggtcgtgttcgtgctggaccggcacaagcggccgttgatgccgaccgattgcaaacgagccaagaagttgttggcgcggggtcgggcggttgtgcaccgcaaggtgccgttcacgatccggttgaaagaccgcacggtcgatcagtcgatgctggaaccgctcggactggggatcgaccccggctcccagcacaccggactctccctcgacaaaaccgtggaggctgttgacgagagtacgggagaagtgaccacgacccgcaccgggctgtggcttggacagttggaccatcgcggccagcatattcacctgcgtttggtggcacgggcccagcggcgtcggggtcgacgtgggcgaaacctccgccatcgcgcagcccgcaataggaaccggagcgtgcgcgttggctggctgccgccgtcggtgcagcaccgggtggactccactatgacgtgcgtaacgcgactccagtcgctcgcaccgatcgcaagtctgcggttggaacgcgtcagcttcgacactcatgcgatgaccgcaccgggcattagcggtttggaataccagcagggcacgctggccgggaccgaaatccgtgagtacctgctagcgaagttctgtcaccggtgtgtctactgcgacgccaccggcgttggaacgggctcggtgccgttgaacatcgaccacctgttgcctcgtgcccgcggcgggactaaccgagtcagcaaccttgtcctggcctgcgtccgatgcaaccaagccaagggtgcccggtcggtggatgcgttcgtaactgacggagtgagacgcgctcggatcaaagccgaggccaaaacgccgctgcgggatgcggcagccatgaacgcttgccgcaaccggctcgcggcagaactagacgcgaccgggctgccggtggagtgggccagtggcggacgcaccaaatggaaccgcgtgcgtaacggtgtgccgaaagaccacagcttggacgcgctctgcgttggcgccgtcgacgtgatcgtccgatgggtacccacagtgctgcacattcagtgtgtcgggcgtggccggtaccagcgcgtaacgacagacaggttcggcttccctcgttcccaccggccacggcggaaacagcactacgggttcatcaccggcgaccttgtgaaggctgtgatcccaacggggccgaaggcgggtgtctaccgcggccgggtcatcgtgcgatccaccaggacgttccggcttgtgaccccaacgcaccggtacgacgggatcaactgcagatacatgacaactatgcagcgaggtgacggctactcatacaaggccagaccgtcgctgcagcgccgcctcgccccgcatggcgaccaaacgaaagcagcctga

SEQ ID NO: 487 - DNA, 270 bp, Branchiibius hedensis
  source 1..270: mol_type = other DNA
gtcgacgaccctgccctctctccgggctcgttgaccagaccaagacatcagtgatttggaggtgaccaagatgtctacgttgcacacgggtgcgcgaacccaccggcgggtgcttcctcagcctgccgctctggaatcggtgccagcagacaaccccggggtagggacgaaacggggcaccgacatcccgcgcacggcgcaagccgggcggcgggacaccggtgtgcaacatggtcgaggggagaccaccgggggcgcacctgtacccgg

SEQ ID NO: 488 - DNA, 1614 bp, Brevibacterium aurantiacum
  source 1..1614: mol_type = other DNA
atgcctcctcagtcccaggctctcgaatctgtgccagcagacaaggacggggtatctacgaaacggggcacagaagttgaaaccatttcagcaccgggtgttcaacatggtcgagaggagacagccgtacccacacccaaagacgtggtcacggttgcgcaacagcgaaacccaaacgggaatcgcagtcaccggggtaactcggtacaaccacgtgtcttcgtcctcgataagaggaagaagccgctggatcccacctcaccagctcgcgcacgcgagctcttaaagaagggacgcgcccgtgtccacaagatgatgcccttcaccatccgcctcatcgacagaatagtcgccgactcagtcgtccacgaccacacgatcggcatcgacccaggctcccgcaccacgggcattgctgtagcgcgagagacccgaaccgtagatgaggcgacgggcgaaatcacgactgatcgccaagcggtctctctcgttgaacttgtccatcgtgggccacagatcaagaagaagctccagcagagggcagggtaccggcgggggcgcaggtcacggaatctcaggtatcgcgcaccgcggttcaacaaccgtacgaagccaaaaggatggttgccaccatcgttacagcaccgtgtggattcgacgatgacgtgggtcaacaggttccaacatctggcacctgtgtcgaaggtggcatatgaggctgtgcgattcgatactcaaaagcttcagaatccagagatcacgggtgtcgagtatcagcttggtacgttggcaggattcgaggttcgcgaatatttgctggagaagttcaaccgcacctgcgtctattgcgacgcgacgaatgtgccgctgaatattgatcatgttcacccgcgtgctcgtggtggcagtgaccgagtttcgaatctcgtgaccgcatgtattctctgtaatcaagctaagggcaagttgttagttgaggagttcgtttccgaccgcaagcgactggaacatattaggaagcagctgaaagtatgtctgcgtgatgcggcaatcgtgaccgcaactaggtggagtttgcacacagcattgatgacaaccggcctgtatgtagttgcttcatcaggtgggcgcacaaagttcaatcgctcccgactgggtgtaccgaaagaacattgcctcgacgccctgtgtgtcggtgatgtcgactcggtggggcagtggcccgaccaccggctgacaattgccacgaccggtcgtgggctgcatcagcgtactcagccgaacaagtatggatttccgagatcctaccggactcgccggaaggtccattatgggttcattactggcgactttgtgcacgcaattgtcccgagagggaaaaacgctgggacacatgtgggccgagcagcggtgcgaaaatctggcagtttcgacatcaccacaactgctgggacccggcaggggatcaggtacaaatatgtgactctaatccagcgtggtgatggcttcaactactcaatcaacaaactgctaggccgaagtgaggttgccaggaccaatggcagtgcctactcctccctacgggtagagtcatcgactatctggcgcacctga

SEQ ID NO: 489 - DNA, 248 bp, Brevibacterium aurantiacum
  source 1..248: mol_type = other DNA
gtcagcgacctcatggtgtacgagcgacgcctcgaaacggcgtccagcctcatcagttcgctgaccagaccaagacaccttgaaggaggtgactacgttgcacatacgacagaagaccgaccctgggatgcctcctcagtcccaggctctcgaatctgtgccagcagacaaggacggggtatctacgaaacggggcacagaagttgaaaccatttcagcaccgggtgttcaacatggtcgagaggaga

SEQ ID NO: 490 - DNA, 1278 bp, unidentified
  misc_feature 1..1278: note = Ga0209594_1000294 JGI
  source 1..1278: mol_type = other DNA
atgagtaattttgtatttgttctcgattcaactaaaaaaccactcgacccctgtcatccagcagtcgctcgtaaactactaaataataaaaaggctgctatttttagacgctacccttttactattattttgtttaaaactgttgaagctcaaactcaaccagttgaactaaaattagacccaggtagcaaaacaacaggaattgctctagttagaaataatcaagtaatctgggcagcagagttaactcatagaggttctaaaattaaatctgatttagataatagaagggctattcgacgtagtagaagaaatagaaaaactaggtatagaaaacctagatttctaaatagaactaaagctcaaggctggctacctcctagtctagaacatagagtactaactactctaacttgggtgaaaagattaattaaattttgtcctattaattctattgctcaagaattagtacggtttgatactcaagttattcagaacccagaaatatctggagttcagtaccaacaaggaactttactaggttatgaaataagagaatatttactagaaaaatggcagaggaaatgtacctactgtcaaaaagaaaatattcctttacaaatagaatacgttgtaccaaaagctaaaggaggaacagatagaatctcaaatctatgtttagcctgcaaaccatgtaataacagaaaaggtacgaaaagtattgaggaatttctaaaaggaaagcctaatgttttacaaagagttaaaactcaacttaaaaccaccctaagagatgcagccgcagtaaattcaactagatggaaactatttaataacttaaaagaattaggattaccagtaagttgtggtagtggaggtttaaccaagtataacagaacaaaactgaacttagaaaaagcacattggattgatgcagcctgcgtgggcaaggttgagaatttagtaataaaaatcaatcaaccattattgataaaagcgtgtggttatggttcaagacaaatgaaaaatgtaaataagtatggttttccacgttcaaaagccaaacaaaagccttatggaaattggaaaactggagacatagttttactaataactaaaaaaggagaaaaatatgtgaacagattattagcaacgaataatcctagtgcatttgagataagagttgaaggtaagagaattaaagcaaaccccaaaagcaatttattaattaaggtatttgctaaagatggttactcttacacatttagagaagtttaa

SEQ ID NO: 491 - DNA, 252 bp, unidentified
  misc_feature 1..252: note = Ga0209594_1000294 JGI
  source 1..252: mol_type = other DNA
aagcaaaaacctagctaaacattaacaaactttagcaaaccttcacttgcaccagctcactgtaaaaacagtaaacgttattaaggtcataacacctacagatacatgaagctagtttgtagctctgttgctattagttaaacaggtaagaagcttaggttttttaaaccagtgctattagcttaacaagccttaataactgagcatcaggatacttttacccgcaaggagttttcagtaatgagtaatttt

SEQ ID NO: 492 - DNA, 1347 bp, unidentified
  misc_feature 1..1347: note = Ga0207997_1001251 JGI
  source 1..1347: mol_type = other DNA
atgggaaaccaacaacagaagttaggaaagagaaatacatacacacctacgaatttgcaagtttgtagctctgtggcgatgtctttaaacagagaggaaactctcagtgagcatggcttaaaaacctttcctaacaacctcgatgcaactcagcaacatcatacagttgtccagacaatatctggaattgtgtatgtaatgaatagagaaggaaaagcattgatgccaacaacatcaccgaaagcaagaaaactgttgaagaaaggattggcaaaggttgtgaaacgaaaaccttttgtgatacagctattagttccttgcaggaatgaaacgcagaaaatcatttgtaagattgatagtgggtataagaacatcggtttttcttgcacaacagacaagaaagaactattttgtggagaggttgttttggaaaacaaaacttcaaaacgattgacagacagaaagatgtatcgcaggtcaaaacgaaacaggctatggtatcgtaaaccacgattcaataatcggacaagaccagaagggtggttacccccaagcattgaacggaattatcagacacatctgagcctaatcaatagaattggtaatttgttgccgattacacgaaagattattgaggttggtaacttcgacatccagaaattagaaaacccagagattgaagggacagaatatcaacaaggaagtctatatagataccaaaatatgaaacattttgtattcagccgagaaaaaggtagatgtcagttatgtggtaaagatgcaaaagataagatggtattacatcatctaaagcaaaggaaagatgggggaactaacaaaccaaccaatattgcattattacatgagaaatgccatgataagttacacaaagaaggattaaatattaagttcacaaacaaggaatataagggagcaacctttatgaatatcatcaaatggagattcaagaaagatattgattgtctcttgacctttggctacaagacattttgtaatagattgaagttaggtttggagaaaacacattataatgatgcgttttgtatagaaaatacagataataatatcataagatgccttccaacaatattcaaacagaaacgagtgacaaacagatgttgtcagttgaataggaaaggttacaaaccaagcattagaagaacaacatataagattcagccgaaagattcagtatggattaaaggtaaagaatttattgtgaatggaatgatgaatcttggaaaaacaattttattatccaacaaaaaaactatttcaattaacaaaattgagaaatatttttcagtaggtggtttatatgtatga

SEQ ID NO: 493 - DNA, 281 bp, unidentified
  misc_feature 1..281: note = Ga0207997_1001251 JGI
  source 1..281: mol_type = other DNA
gtcaatcacccctccctaaacccgaaaaggttttgaggaaggggcttgaatcgtgagatttgagagtaattggttgattagagggttgaaaaatgggaaaccaacaacagaagttaggaaagagaaatacatacacacctacgaatttgcaagtttgtagctctgtggcgatgtctttaaacagagaggaaactctcagtgagcatggcttaaaaacctttcctaacaacctcgatgcaactcagcaacatcatacagttgtccagacaatatctggaatt

SEQ ID NO: 494 - DNA, 1287 bp, unidentified
  misc_feature 1..1287: note = Ga0193914_10090 JGI
  source 1..1287: mol_type = other DNA
atgcaaagagtatttgtcttagatcataataaacaaccgttgatgccttgccacccggcaagagcacgcaaactcttaaaaaagggaaaggctgctgtttaccgacgctaccctttcgcaattattatgacacaccgcgtaggtggtgatttgcaaacggtggaaattaaatttgacccaggtagccgcacaactggcatcgctttggttggggattttgaccgtggcaaagaagttatctgggctggcaacttaaaccatcgtgggcatcagataaaaagcaatctcaattcaagacgagcaatacgcagagcacggcgaaatagaaagactcgttatcgtcaggcacggtttaataaccgacggcggccaaaaggttggcttccaccatcattacggtcacgagttgataataccaagaattggatgcataagctggcacggttggcaccactcactcaaatagcagttgaaacggttaggtttgatactcagaaactgcaaaaaccggaaatatcgggggttgaatatcaacaaggcgagcttgccggctatgagttacgggaatatttgctagaaaaatggggtcgtgaatgtgcttattgtggtgccaaaaatataccgcttgaaattgaacacatccaagctcgtagcaaaggagggtccgatcgagtatccaacctaaccttagcttgcactccatgtaatatcgataagggcaataaggatattaaagagtttctttcgctaaagccgaaacgtttaaagaaaatccaagcgactgctacggcacctttaaaagatgcagcagcagtcaatgctacccgctacgcgactggcaatgtcctaaaatgtttcagtttaccgattactttctcaagtggtgggcgaaccaaatttaaccgtgtcaagctaggctacttaaaagaccattggattgacgcagcctgtgtcggcgaaagtggtagtcaagttgttattcctaaagcgataacacccctaattatcacatctaagggacgtgggtcaagacagaagtgtcgtatgaatcaatacggttttccgagaactggccctaaaaaacagaagcaggtcaagggttttcaaaccggcgatattgtaaaagccatcgtgactaaagggaaaaagataggcacgtatattgggcgtgttgtggtgcgatcccggggaagctttgatattggtagtggcgaaaagaaagtgggcagcatttcatataaatattgccaattgctccaaagggcagatggttacgagtacacataa

SEQ ID NO: 495 - DNA, 261 bp, unidentified
  misc_feature 1..261: note = Ga0193914_10090 JGI
  source 1..261: mol_type = other DNA
aattataagctaagtaactgtccataaataacttagtcaactaagttattttaaagttacccgcctaagttcttcgagaactacgttagggatgaaaacataggtactctcgcgatgcttctccagtccgagactctacggggaactattaaacaggtccgatggaaaggccagtgtagtttccattcaaaaccgtcctataacattggctaggagactattacccgcgtcagcggagctaggtaacaatttatgcaaaga

SEQ ID NO: 496 - DNA, 1311 bp, unidentified
  misc_feature 1..1311: note = Ga0223825_11034434 JGI
  source 1..1311: mol_type = other DNA
atgctagtatacgtacaggataaagagggcaaacctctaatgccgaccaaacggttcgggtgggttgcatattctctaaagcataagagggcgaaggtagtacggcgagagccttttaccattcgacttctttgcgatagtttccatcatcgtcaagaagttactcttggcgtcgatgttggaagcaagcacatcgggatgactgcatcaacagaaaagaaggaactatactctgcgcaagttgagatacgggatgatgtgtctaatctattgactgcccgtagggaaatgcggagggggagacgaggaagaaagcacaactggtataggcctgcgaggtgggcgaacagggcgaacgaagaaagaaatgcttctctcccgccgtctgtgaagcataaggctgattctcacatacgagcaatagagttcgtaagaaagattctgccagtaagcagattacgtgtggagattggaaagtttgatactcaaaagatacagaatccatcaatcaaaggagaagagtatcagcaaggcgcattggaaggatgggagaatttgaaatcctatgccaagtggcgggacgggaacaaatgccgagtgtgcggtgcaagtccatataaggacaagtccgtaaggttagaggtgcatcatatccgccgtagggcggatggcggtagcaattctccagacaatgtggtgactttgtgccacgaatgccacgaatcccatcaccagaagaagaaggtgttgaagtttaagagaccgcctatacacaaaaatgaggcacatatgaattccatgcgaaaatatctgattgataaacttgtgcataattcttggaagactccagtagagttcacctatgggtatgagactgcgatggcacggagggaacacaatgtcgagaaaagccacagaaacgattctttctgcatagcagggaattttaatgcacttctcaattcatataatgtctatcgtctgtatcagagaagaaggcataggaggaatctgcatgacaacacgattttgtctccaaagtcaatcaaggacaaaagtaagatgaccgctaaagaactaaagtgcggatataggagacctcaaaagatgagcggaaggattcgtggattctctctttgggatactgtcaagttcaacggagttatatatatagtatcgtcagtaaaagggtcagataacagagtgtgtcttagccgtagcgatgaggggaagacaattgtgaaagccatgagcaagtgcaagttgctctgccataacgggaacttggtaacagaaagagttggagcttga

SEQ ID NO: 497 - DNA, 340 bp, unidentified
  misc_feature 1..340: note = Ga0223825_11034434 JGI
  source 1..340: mol_type = other DNA
catttacaacctagaacctgcaagaggctttatttcaactaattttttcgggaatccgcaaggatagttcaactaggagactagaaaggaaacgaaagaaacagaaaacctagtagaagttacagggaaatgcataggcaccggcgaatagttgtccaagtttgccgcactgcggatgtacattaaacagttctgtggtagaggaacagtgtgtgcatcgaacaaaggaaactctctgcaaccctccgatgggcaccaaacaccagaaggagtaatctgactggtgacttaccgagaaatcggttaacaaaaaaagtaagacacagaaaaaagaatgcta

SEQ ID NO: 498 - DNA, 1305 bp, unidentified
  misc_feature 1..1305: note = Ga0116592_1000084 JGI
  source 1..1305: mol_type = other DNA
atgctcgtattcgtaattaatcagcatggtgaggcgctcatgccttgcccaacgcgaaaagcaagactattgctgaatgaaggaaaagcgaagattattggttatcagccattcagtatccagttattatatggatccagtggctacaaacagtcggttaaagtaggcacgaaaatcggggagaaacatatcggcattgcagttatatccgagggccgtgtactgatgaaaggtgaagtcgaattacggactgatgtgaaaagtctaatcgaaacacgtaaaatatacagacgcattcgtagacaacgaaaaacaagataccgaaaagcacgcttcctgaatcggaaaaagccaaaagggtggttgccaccgagtttggaaagtcgaaacgcaaacacttttcgttggattaatcgttttagtagtttgctacccaaccctacactacatatcgaaatcgccaagttcgaagtacataagctaatcattccaagcgtaggcaacgttgtccgtcaaatgggtcatagcgacggctattacaatacgcggtattatgtattcgcgagagacaactatatttgccaagtatgtaaaaagaaaaataaaatagtaaatgcgcatcatattctctacaggacacaaggtggaagcgatcgtgcggataacttgatcaccgtttgcaccgattgccatacgtttgacaatcatcggcccggcgagatcttttggcggtggatggaaggtgggaaaaaactgggggcctacaaagaaccaccttttacgaacagtttgcgaaaccgcgtttacgagcaatacccggatgcaatactctcatatgggagcgaaacgacgcctcatcgaaaattgattgggttagaaaagtcacttgtcaacgatgccatcgcgataacggggataccagctattatgaagataactgacaccaccttcatggtgaaacagttccgcaagaaaaagcgaagcctgcatgaagcgaccgcacgtaaaggacggaagcagccaaatactgaaagcagacgcaacgcaaagaataccaaggcgtccaaaggattctttttgaacgatgaagtgcgaacaccttgtggtaacatcggctacattagtggctttactggaaaaaacgcctgctacgtcaagtcaattaatggccagtatatcgttattccagagaaaacacataaacaacaatcgctcaagggactagtcaagagaagccatcaaggcaattggcgctaccaactcctacataatgaagaaggcgaacagttctacataaaggattaa

SEQ ID NO: 499 - DNA, 265 bp, unidentified
  misc_feature 1..265: note = Ga0116592_1000084 JGI
  source 1..265: mol_type = other DNA
gtcaactacccaccactccaacattactagctgtcgaagtgggggcttgaaagagtctaagttgtctagccatagtcttttttgactacgttggttcggtgatcacaccctgggataatactctagtcccttgcactgtgtcggcgctgtaaaagctctgttgggtcggagcggtcaaccgaatttggcgacatttaatgtcggaagccttaccaacattggcgaagggtgacaaactccaaaaaggagggaatacgctatgctc

SEQ ID NO: 500 - DNA, 1227 bp, unidentified
  misc_feature 1..1227: note = PROU1_101214 JGI
  source 1..1227: mol_type = other DNA
atgtcagtttatgttttaagtaaaaacggaaaaccgctaatgccgactaattcgggtaacgcaagattaatgcttagacaaggcaaggcaaaagtaattaaaagaacgccgtttactattcagctgacttatagcagtgataactataagcaggatgtagttttaggcatagataccggatataagaatgtaggcttatccgcagtatcggacaccaaagaattatttagctccgaaaccaagttgagaacagacatcgttaagctgttatccgaaaaaaggcaataccgcagaggaagacggaacaaactttggtatcgcaaggcaagattcttaaatcgtggtattaagaaaggctggcttgcgccgtcagttcagcataggcttgatagtcatattaagttagtcaatttcgttaagtctattttgcctatatcaagtattaatgttgaatccgccgcttttgatattcaaaagattaataatcctgaaatatcaggcgttgaatatcaaaacggagttcagaaagacttctggaacgtcagggaatatgtgttatacagggataatcataaatgccaaaattcaaaatacaagcatacggacaagatattaaatgttcatcacatcgtatcaaggcagacaggcggggatagacctgataatctgataaccttatgtgaaacttgccataaagcgtatcacaaaggcaagattaagttagagattaagaaacataaaggttttaaagccgaaactataatgtcaatattacgctggaaaatagttgataggttaagggaactcggtaataccgttaatattacctatggctatcttaccaagtccgcaagaatagtattaggattagacaagacacatagtaatgacgctttctgtatagcgggcggggataggcaggaaaaagttaatcaatcctattttatcaagtttgttcgtaaatgtaaccgttcgctgtttaaagctaaccttttaaaaggcggaaagcgtaaggttaacactattaagcaggctttcggcttccacaggtttgataatgttttatacggcaaaatggagtgctttattcacgggttgaggtcatctggctattttgatattagacttttaacgggagagaaaatcaatgattccgttaaatatagcaaattaaggttaatagaaacttttaaaacacggaggatagctctcctccccgccttatag

SEQ ID NO: 501 - DNA, 262 bp, unidentified
  misc_feature 1..262: note = PROU1_101214 JGI
  source 1..262: mol_type = other DNA
gtcaaccacccgccgcttgaagaagcgggggcttgaaagagctggctgataagggagattaaattatgtttaatcagcagttatttaagagaaccgttaaggaacacaccttaagatattgcgcaagtcttaagctctgtggattagtattaaacagtcttgagagggtaaaagacagtgtgctaatcttaaaaaccttaaataacaatcccgatgcgtatctaacccttgtaaaaggaggtaaaacattatgtcagtttat

SEQ ID NO: 502 - DNA, 1485 bp, unidentified
  misc_feature 1..1485: note = Ga0256407_10017433 JGI
  source 1..1485: mol_type = other DNA
atggcaaatatatacgttctatcaaaagacgggcagcctttaatgcctgtccacactttcggcagagtcagaaggctcttgaaaagcggcaaagctcgcattgtcgcacatattccgtttactatacagctgacctatgatatcaaagaacctgtgattgacgactgccttttagggatagaccctggcaggacaaatatcggcttatgcgtcatagacagcaaagccaacgtgcttttcgcatcagatgtagaaacaaggaacaaagcgatagcaaaactgatgctgaaaaggaagacagcacgacaggcgtcacgcaggggcgaaaggctccgcagacagagacgtgccataacggcagacaaaaccggcatggcaaagcatacagagttctggaggatgctcccgggctgcaaggagccggtgtgctgcaagatcataaggaataccgaagcccgcttcaataacagaaaacgtaaaaagggtgaactaaccactgccacggcaaaacacctattacaggcacatcttaaccttataaagaagacacaaaaactgttgcccctttcaggcatagtcatagagatcaataagttcgactttgcccgcatggagaaccctcaaataaggaactgggaataccagaaaggcaggctctttggattcagggatgtttatgacgccgtacaccaccggcaggaaggcaagtgccttctttgcgggaaagcagatatagaacattatcatcacttaacgccaaggcatcaggacggaagcaatactcttgataacatagccggattatgtaatggatgtcacagcaaagtgcatacagaccaaaaaacaaaagaggaattactctcaaagcatgaaggcatcaagaaaaaataccatgcactgtcagtgataaaccagataatgccggaacttttggggaaatgtgcagaaatccttcccacatacgtcactaccggggaagaaacaatgctgacaaggggttgcttcgcccttgaaaaagaccactatgtagacgcatggtgcatagcagcctctcggataacggaattttcggaagattacgatatccccgatttcaaaggcagtattcataatatcaggcagttccgccgtcacgacagagccattatcaaatcacagacagaaagaacatataagctggatggcaagatagtcgcaaagaaccgcaagccccgtttcgagcagcagggaccggcgctgtcagacttaaccctgacaaagcaggagatatcaagacttaaagtaaccaaaagcacgcgcaggtacaatattaaagacagactgatgcccggagcggcattcttacataacgggagctaccatataatgagcggtcaattaactaacgggcagtacctgagagcattaggagacggcaaaactaattacccaacaaggaaatgtaagatactcaaacacaatacaggattagtgtttatagcataa

SEQ ID NO: 503 - DNA, 261 bp, unidentified
  misc_feature 1..261: note = Ga0256407_10017433 JGI
  source 1..261: mol_type = other DNA
gtcaactacccaccgcctacgctaacgctaagaggcgggggcttgtgaaaacaagcaatacacaagtattgtagttgagcagagaccaaagttgagtaagcttcacgcttacaagtccgacatgccacgttccatggggtgccactcccagccccatgtattcaaagggtatgccgagtctcgggagacctacggaccagcccaccgggtttgcagccattaaagggctaatctttaagaaaggacaggattatggcaaat

SEQ ID NO: 504 - DNA, 1134 bp, unidentified
  misc_feature 1..1134: note = Ga0190346_1003230 JGI
  source 1..1134: mol_type = other DNA
atgcaaagagtatttattctggatcataacaaaaagccgttgatgccctgccatcccgcaagagcacgcaaactcttaaaaaacggaaaggctgctgtttatcgtcgttatcctttcataattattatgaagtgccgtgtaggtggtgatttgcagcctatcgagatcaaatttgatcccggtagccgcacaactgggatcgctttggttgggcattttgatcgtggcccagaggtgatctgggcgggcaacctaaaccatcgtggacatcagataaaaagaaatcttgattcaagacgggcggtacgtcgttctcgaagaaatagaaaaactcgttatcgcccagcacgttttaataaccgacagcggcccaaaagctggcttcccccctcattgaggtcacgagttgataacgtaaagaattggatgattaagttgtcgcgattagcaccactcactcaaatagcagttgaaacggttaggttcgatactcagaaaatacaaaatcccgaaatatcgggggttgaatatcaacaaggcgagcttgctggctatgagttgcgggaatatttgctagaaaaatgggatcgtgaatgtgcctattgtggtgctaaaaatgtaccgcttgaaattgagcacattcaagctcgtagcaaaggagggtcagatcgagtatccaacctaaccttagcttgcactccatgtaaccaaaaaaaaggcaacaaggacattaaggaatttctaaaacgcaaacctaagcgtttgaagaaaattcaagcacaagcgaaggtacccttaaaagacgctgcggcagtcaatgctactcgctacgctactggcaatgttctaaaagatttcggtttaccaatcactttctcaactggtgggcgaaccaaatttaaccgtacaacgcgcggctatccaaaagcccattggatagacgcggcttgtgtaggggaaagtggtgctaaagtcgttattcccccagcgataacgcctttgattatcactgccaaaggacgtggctcaaggcaaaagtgcagtatgaatcaatatggatttccgagaaccagccccaaaaaacacaagcgagtaaaagggtttcaaacgggtgacattgttaaagcggtcgtg

SEQ ID NO: 505 - DNA, 264 bp, unidentified
  misc_feature 1..264: note = Ga0190346_1003230 JGI
  source 1..264: mol_type = other DNA
aactacagactcttataagtaaccgtccataaataacttaggcaactaagtattttaaggttacccgctttagttcttcggaactacgttagggacgaaaatataggtactcttgtgatgcttctccagtccgagattctacggggagtcattaaacaagtctgatggaaaggctagtgtggctcccattcaaaaccgtcctataacattagctaggagaccattaccagtgcaaactgagttaggtgacaatttatgcaaaga

SEQ ID NO: 506 - DNA, 1257 bp, unidentified
  misc_feature 1..1257: note = Moorea sp. SIO4A5
  source 1..1257: mol_type = other DNA
atgcagaattacgtattcgttattgacacaaacaagcaaccattaaaccctattccaccaaagaaagctcgccggttattaaacaaaggtaaggctgccgtttttaggatgtacccgttcacaatcatcttaaagactgcgatcaataatccaaccatctcaccttgtcaaataaagattgaccctggtagtaaggtaactggatttgccctagtccaaaacaaccaagttatttggggaatggaattagagcacagaggaggattaattaagaaaaaactagagtctagaagcgctgtaaggcgtaggagacgtaaccgcaacacccgctacaggaaacccagattccttaaccgtaagcgtccagagggatggcttccacctagtctagaacacaggattttgactattcagacttgggtaaaacgattgattaaattctgcccagtcaatgagatttgggtcgaaagggttaagtttgacacccaaaaaatgcaaaatcctgaaatcagtggcattcagtaccagcaaggagagttagccggatatgaggttagagagtacttacttgaaaaatggggaagagaatgcacttactgtggtaagcaatccgttccattgcaaatcgaacacattcacccaaggtcacttggtggaagcgatcgcgtaagtaatctttgtttggcttgtaaaaagtgtaatcaacgcaaaggtaacaagcctatagaagacttcttaaaaaagaagccaagtctactgcaaaaaatcaaatctaaagctaagcagccattaaaagatgcaacagcagtaaatgcaactcggaacaagttagttaaggtacttcaattaatcaaggttgtggtcaccggaacgggagcgcaaaccaaatacaaccggactagattagaactacctaagcagcactggattgatgccgcttgtgttggggatattgagaccttagtgttgagaacctctcagccgctgttagtcacttgcaagggacccggagggagacagaaagcagcacttaacaaatacggttaccccatcagacacaatccattaaaaccaatcaaaggctgggttactggggacatagcccagcatcctctactaggaataggcaaagtcacccctagaagcaaaggaagctttggatttaccccgttaggaaccaagggctacaaaagttgcaaacctcaagatatatcggcaatataccgaaaagatggatacacttatagcttttgctag

SEQ ID NO: 507 - DNA, 230 bp, unidentified
  misc_feature 1..230: note = Moorea sp. SIO4A5
  source 1..230: mol_type = other DNA
cgttaaagcctggcaattcccggtaaactctgggattgcctagcgaagatgcagactaaggattagtttcctacgttggtctggtcaggatacccgagggtgacctccagctcccggctctatcgctaactattaagaaaaggcaaaatgtgtggttagcatgacaagccattccaacattgtcgaggaacacattaccgaattgagttgcactaatcatgcagaattac

SEQ ID NO: 508 - DNA, 1212 bp, unidentified
  misc_feature 1..1212: note = Ga0207747_1000200 JGI
  source 1..1212: mol_type = other DNA
atgcctacaacaccaagtaaagcgagaaaattattaaaacaaggtaaggcaaaagtagtaaaaagagaaccatttacaattcaattattatacgcaactggtgaaaccaagcaggatataacattaggtatagatgcaggaagtaaatttattggagtatctgctacaacagaaaagcaagagctattttcagcagaagtagaattaagaaacgatattgtagacttactatctacacgtagagaattcagacgtacaagaaggaatagattaaggtatagaaaacccagatttttaaatcgtgtttatagtaaaaataaaggttggttagcaccttctgttgaaaataaaatacaaacacatttaaaaataacaagtaagatacacgaaattttgcctatatcaaaaataataatagaagttgcttcctttgatatacaaaagattaaaaatcccgatatagaaggtgaacaataccaacaaggagaacaattgggattttggaatgtaagagaatatgtcctttggagagatggatataaatgtcaaggtaaaaagggttgcaaaaataaaatattaaatgtacatcatatagaatcaaggaaaactggtggaaattccccaagcaaccttattactttgtgtgaaagttgccataaagattatcatgctggtaaattaaaattaaatttaaaacgcggtcaatcgtttaaagatgcagcttttatggggattatgaggtggacattttataatagactcaaagaaatatattctaatgtaaaaataacttatggatatattactaaaaacactagaatacagaataatctaccaaaagaacataggattgatgcattatgtataagtggtaatcctaatgttaaaagattagattattggtattatattaagcaagtaagaaggcacaatagacaaattcataaagccaatatattaaagggcgacaaaaagaaattaaatcaagctccttatttagtaaaaggattcagattgtttgacaaggtaaaatacaaaggacaagaatgttttatattcggtagacgcagttctggttattttgatttaagaaaacttgatggtacagttattcataggagtgccaattgtaaagatttaaaacttataagcaaggcaaaaacattattatgggaaaggaggatagatgtggctgtttcctcacatgactaa

SEQ ID NO: 509 - DNA, 228 bp, unidentified
  misc_feature 1..228: note = Ga0207747_1000200 JGI
  source 1..228: mol_type = other DNA
gtcaataacccaccactaaagtggcgggcttgcaaaagcctttattgactagactaagcgaaagctacgttacctatatcataacacctacgaatgtttaccctagttcgtagctctgttgcttaactttaaacagttctgatgggtaggaacagtgagttaagtgtaaaaagtataggtaacattgtctaagggtactaactccagaaaggaggacataacttgaga

SEQ ID NO: 510 - DNA, 1242 bp, unidentified
  misc_feature 1..1242: note = Ga0315268_10018380 JGI
  source 1..1242: mol_type = other DNA
atgccgtgctcgccggccaaagcggggttcctgctccggcggggaaaagccgaggtcgtgaagagaaccccctttgtgatccggctgaagtacggaagcggggggtaccggcaaccggtgaccgcggggctggacagcgggtacctgaatgtcggggtgtccgtagttgcgggtgggaaagagctccacgcggaagaggtggtgttgagatccgacatcgttgtactgaacagcgaaagaaggcagcaccggcgcaaccgaaggaacaggaaaacctggtaccgccaaccgcggttcctgaaccgcaagaaaccggaaggttggctggcgccttccctccagcacaagctggacagccaggtgaagctggtggtcgggttggccaaggtagtaccggtcacgaaggtagtggtggaagtcgccagcttcgacatccagaagatcaaaaaccccgagatcgcgggagtcgggtaccagcagggcgagcaggccgggtttgccaacgtgagggagtacgttctctaccgggacgggcacaggtgcaggtgctgcaacggcaggtcaaaagacgagcggttggaagttcaccaccgggagagcagaaaaaccggaggcaatcgaccggagaatctggtgacgctctgcgagacctgtcacgaccgggctacggccggagaggatcttgggtttggaaaaactcctcttgggttcaaggcggagaccttcatgacaacggtccgatggaagctgatggcccggctccgggagtgggggtttgaggttgctcacaccttcggctacatcaccaagatgcgaagggaagaagcgcggatcgagaaaactcacgccaacgatgcgttcgtcatcgccggagggaccggggaatacgagaggcagagggtgatcctgctgaaaatgcaggtccggaagtgcaaccggaagctgttcaagggcgaccggagccacctcaggaacacggcgcctcggctggtcaaggggttcgcccggttcgacaaggtccgatacagggggatcgagtgttttgtgtccggcaggagaagcaccggatatttcgacctgcggaagctggatgggacccgagtccatgcaagcgcgaagtgggcagatctgagactgctggaacggggaggaacgatgccgtcgggatacaagcaagccaggagaggggccgcgcattcctccccaggggcaagccccggggtctcctgcgcgatgctatga

SEQ ID NO: 511 - DNA, 274 bp, unidentified
  misc_feature 1..274: note = Ga0315268_10018380 JGI
  source 1..274: mol_type = other DNA
gtcaattaccctcgggacgagcccgggggcttgcgggaagcaacggcaacacccgcagacctcgattgactagggggccgggtggaaacacccggcagcagttgcttcggtcagcacaccccgggatattccgcacgtcccgggccctgtggtccacggttaaaagggtttcaggggtaaaacccggtgccgtagacatgacaagccgaggcaacaatcccgatgcggcaccaaccccctgaaacggggagaaggagactgcttgttagtcttc

SEQ ID NO: 512 - DNA, 1377 bp, unidentified
  misc_feature 1..1377: note = Ga0209317_1000713 JGI
  source 1..1377: mol_type = other DNA
atggcagttttcgtgatcgacaaaagaaaagatccactcatgccttgttcagagaaaagggcgagacttctgctggaaaagggtaaggcagttattcaccgtcgaattccttttactatcaggttgaaggaccgcattgctggtgaagtacagccgctttgcgtcaaggtcgatccaggcagcaagactacgggattggcggtgactaccgagtatggcaaggttgtttttgcagcagagatacagcatcgagggcaacaagccagagaagcactgcaaggacggaaaggattcaggaaaggccgtcgcagccgtaatcttcgctaccgggcaccgcggttcgacaaccgaaccagactaaagggttggctaccgccatcgttggagagcagaatcggcaacatcgtcacatgggcggagagattacgcaaactcgcgccagtgacatctctgtcacaggagttggttcgcttcgatttacagcagatggagaatccggagatttccggcatcgagtaccagcaaggcactttggccggatacgaagtacgcgaatatcttcttgaaaagtggggccgtaagtgtgcctattgcgacgcggaaaacacacccttgcagttcgaccacatacatgcaaaggccagcggtggtagcaaccgaatcagcaacctcactttggcctgcgggccgtgcaatcagaaaaaggactcgcttgatattgaggttttcctgaagtcaaaaccgaaaatactcaaacgtatacttgcccaggcaaaacgaccgctcaaggatgctgccgctgtaaacgcgacacgatgggaattgtataacaggctcaccgcaactggccttccagtcgaaatcgggtctggggggcggacgaaattcaacagaacccagcagcatcttccgaaaagtcactggatcgacgccgcttgtgtaggtctctctggcgaacaggttgttatgccagcaggagtatgcgtttttggaattaaggccatgggacgcggatcgtatcagaggacccgggtgaatgcctccggttttcctcgcgggtatctatccaggcaaaagcagtatttaggtttccaaactggtgacattgtaatcgcggacgtacccaaagggaaaaagtctggtgtccatgccggcagagttgctatccgtatgtctggatctttcaacattcagactgctgatggggtcgtccaaggaatcagtcatcgccactgccgcgtaatccagcgtggcgatggttataactactcgacaacgctgatagcaaaccataaaggagagcgggcaaagggtcatgctttgcacgacgcgctatccctccccggcctgaacgccggggtttcccgcgcagcttga

SEQ ID NO: 513 - DNA, 294 bp, unidentified
  misc_feature 1..294: note = Ga0209317_1000713 JGI
  source 1..294: mol_type = other DNA
gtcaactaccccggcctgaaggccgaggcttgtgagagattacaagcttgaggttgaccagggggagccgtaaccaaccggctacgttgtatggaggttcaagaccgacggcagaatgcttcctcagttctgcccaatcgaagtcccggttgcagacacgccacgggtaggcccgaaacgggtcgggacatatcgccgccatacaacatccccgaggggagatttcccgcaagggaagcgtcacaaggcccgtaagggcgttttgaaaagaagcttcaaaaggatcaaatggca

SEQ ID NO: 514 - DNA, 1215 bp, unidentified
  misc_feature 1..1215: note = Ga0373927_0000546 JGI
  source 1..1215: mol_type = other DNA
gtgcgagacggcgagcgcaccgctcaagctcctgactaccaggccgatctgcggcagaagcgctataggacaacaagaacgttcgcgtgccaccctgttcggacgacatctcgccacgcgcagcagacgagagggaggcacacctctctcagccctcagtgccatcgggaagagttctatgacccgggcatgggcctggagaaagggagatccctaatcatacgcataccagtcggagacgcacggggagtagctctcataccctgtacacctgccaaagctcgccacctcttgatgtgtggcaacgcccggtggcctggtgtactctccgtgcaagtgtacaacgaacaggagcccactaaccaaccgttggtggcaggtgtggatgcaggcaggacgtctgagggcgaccgtgtggttggcagcatagacacggcgctcaaccttctgggagaggcccgcgatcacatccgggaggccgtggaaatatgcagaacgctgcgacgagctatgtgccgactcacacgtcggcggaaaaccagagcccgcatccggcccgtgagggaaggtgtgcccgctgtgacacgaccgagcaaaggtggccagtgccatggcgcctttcgcccggttcaggtgggcaaggagcacttctccggccttctgcgtgcgaggggacgcatggtgtatctcaaggaaggctggcagaccagagaactgcatgaaaggtatggcttgcagaggccgaaacgggagagcctgcaattttttgagtatcatgcgatagacgcccgggtcctggcagccagcagcatccgtgggacatgtgttccgactagcgcgcatccccgccaacagcatcgtttgcacgcagcccggggtggtctgcgcaaaccctctgacgggaggcatgtgcctggactcaaacgtggcacgcttgtttgtcattccgggtatgggttctgtgcggtgggtggttttggccagagagcgtccattatcagcgtgcatgcgtgttggacgaacgcacgacggacgcgaggagcacgaggcaacgattgtcggcccttgacccgggtggcgtgtcgctcccgactcgtcggtgtgatcccaaagaagcgaggcaagggaggccacccgactcctgccccatctcagaaacgcctgttttttcccactgcgggaacgctggtgggcccgcacaggcgggaggtttga

SEQ ID NO: 515 - DNA, 296 bp, unidentified
  misc_feature 1..296: note = Ga0373927_0000546 JGI
  source 1..296: mol_type = other DNA
acgaacacaaaccgtctgtgttcttgcattcgatgatcggtcactgcgggccagaacgtgtgatctctgcaaaacgtctctggtcgctgctggcccttcgacgaatatactgtatcaacgtaaggcaggtccatttttccaggctattatactgcagtgtctgcaaactggcaagcgccgaagtaccgcgtccctctcctctagccctgccacagactggctgtgctggcaggtatacccggcggccagcagaagtgggggtggtgttgctccctggcgagatatgctatataata

SEQ ID NO: 516 - DNA, 1437 bp, unidentified
  misc_feature 1..1437: note = Ga0136449_100279210 JGI
  source 1..1437: mol_type = other DNA
gtgcttcctcagccccggacccttgaagcgccgtcagcagacaaccccaggggtgggcacgaaacggggcggcacggccgtaaggcacccggcttcccggaaggggcgcgagcgcaacatggccgagaggagaccagccggaaggctggcgtcacccccgcaaggggagaccgccgagtgtttgtactcgacaagcggggtaacccgctcatgccctgtcatccgtcccgcgcccgcgcgctgctgcgttcgggccgggcggcggttcacaggcacacgccgttcgtcatccggctgaaggaccgtgacggcggcgatgttcagcaggtccgcctcggcgtggatccgggctcaaagaccaccgggatggcgcttacccgccaggacggcgacgcgacccgggaagtcctcgtactactggaggtcacccatcagtcggtcctgatccgcaaaaggatccaacaacgcgccgcgagccgccgacgtcgccgatcagccaacctccgctaccgcgcgccgaggtttagtaatcgcaccaagccgagcgggtggctggccccgtcgttgcgatcccgcgtgcagcatgttgagacatgggcgcgacgactccagcgctggtgccctatcgctgcgatcgacctggaactagtccggttcgatacccaggccatggagaagcccgagatcgcgggaacggaatatcagcagggcaccctcgccggatatgaggcccgtgagtacctgctagagaagtgggagcgcaggtgcgcttattgcgatgcgcaaaatgttcctctcaacatcgaccacatcgtgccccgctcgcgcggcggcagtgatcgcgtctccaacctcacgcttgcttgtatcccgtgcaaccaagccaagggctccatgccggtgcgccggttcgtcgcggatccggaccggctggcgcggatcctcgcacaggcaagggtttcgctacgggacgccgcagcggtgaactcgaccagattcgcctgtctcgccgcgctacgcggcctaggggtccccgtcgaatgctggtccggtggccgcaccaagtggaaccgccgtcggaccgggacaccgaaaactcatgctcttgacgccgcttgctgcggcgaggtgagccagctgaaaggaacctctgcgcctgtctacgtggtcaaagcggccggtcgaggattgcatcgacggacgtgtccagatgcctacggattccctcggctgcgcatgccgcgagtcaagcaggtgtacggattccagaccggagacctagtgcgggcacacgttcctaacgggagatatgccgggatgcatctcggtcgcgtcagcgtccgaagcagagggcagttccgcatcggcggcagggacatcaactacaggaattgcatgctaatccagcgagcggacggatatgaccatgccatttag

SEQ ID NO: 517 - DNA, 297 bp, unidentified
  misc_feature 1..297: note = Ga0136449_100279210 JGI
  source 1..297: mol_type = other DNA
gcctggctccgctcccctgagggtgaggagtaaccgatccccaatgttctacatcggttaccaggccaagtcgctaaggaggtgactacgttgcaggcaggacagaagaccgactccggggtgcttcctcagccccggacccttgaagcgccgtcagcagacaaccccaggggtgggcacgaaacggggcggcacggccgtaaggcacccggcttcccggaaggggcgcgagcgcaacatggccgagaggagaccagccggaaggctggcgtcacccccgcaaggggagaccgccga

SEQ ID NO: 518 - DNA, 1377 bp, unidentified
  misc_feature 1..1377: note = Ga0213873_10000897 JGI
  source 1..1377: mol_type = other DNA
atgcaagttttcgtcctggacaccggccgcaagccgctcgatccgtgctcgccggcgcgggcccggatcctgctggccaaggggcgggccgcggtcttccggcgctaccccttcacgatcatcctgcacgatcggaaggttgaggattcggtcgtgcacgagcatcgggtcaagatcgacccgggttccaagacgaccggcatcgcggtcgtgcaggaggccacgggcgcggtcgtcgctgcggtcgaagtcgagcaccggggccaggcgatcaaggcgttgctgcgcgatcgcaaggccctccgccgcaatcgacgggcccgcaagacgcgctatcgccggccccggagcaaggccgaggccgcgaaccaagaggcgcagaagaaggccaagggttggctccctccgagtttgctgagccggatcgccaacgtcctgacctgggtcgctcggctccggcgcctggtcccggtcgcggcgatctcgcaagagttggtccggttcgacctccagaagcacgaggatcccgagatctccggcatcgcgtaccagcaaggcacgctggccggctacgagttgcgggagtacctcttggagaagttcgaccgcacgtgcgcgtattgcggcaggaccgacgtaccgctccaggtcgaacacatcgtaccgcggagcaagggcggatccgaccgggtcagcaacctcacgctggcctgcgagccgtgcaaccgccgcaagggaaaccgacccgtcgaggactttctgaagagcaagcttgaggtcctggccaagatcctgaagcgagccaaggccccgctcaaggacgccacggccgtcaacgcgacacgctgggagctgtaccgccggctccgggcgacgggcttgcccgtcgagtgcggctcgggcggccggacgaagttcaaccgcgcgacgcgcggcctgcccaagacacactggctcgacgccgcatgcgtcggggccagcacgcccgaggtgctcgacgtcgaaggtttgcggccgttgctggtccaggcgtgcgggcacggcacgcgacagcggcagaagttggataagttcgggtcgccaaggggtaacccggcccagaggaacaagcacgcttacgggttccggaccggggatatcgtgcgtgccgacatcccccatggaaagcacagcgggatacacacggggcgaatccagatccggaatcgaccgtcattcctgctaggaaaggccgacgtgcatcccaagtatctcacgatcatccacgacgccgacggatacgcgtattcgctcggcgagaccatcgttatccgggccgagcccggaccggatttgctcccccccacggctaaagccggggggccccgcaaatcctga

SEQ ID NO: 519 - DNA, 281 bp, unidentified
  misc_feature 1..281: note = Ga0213873_10000897 JGI
  source 1..281: mol_type = other DNA
gtgaagttccccacccgtcaacggaccccagccctaaagggcggggcttggtgttgcaagacgccaagcacggtgaacaggctcagccctagcaatagggctacgttggaaggtgacgacagacgggatgcgaagccagtctccgatcctgtcgcccgcgattaaaagtccgaaggtctaggacggtgtcgcgggccgtagggatgcagaagccgaccaacattgccgaggcgaacgttactgcgaaagcaaggacctcgtaagaggcaatctacatgcaa

SEQ ID NO: 520 - DNA, 1404 bp, unidentified
  misc_feature 1..1404: note = Ga0070717_10012599 JGI
  source 1..1404: mol_type = other DNA
atgtcacatgtgtttctcctggacgctgagcggcgtccgcttgctccggtgcacccgggacgggcacggctcttactcaaagcaggcaaggctgccgtcttcaagcgcttccccttcaccctgattctcagacagctcgcagcgcaagccgcccgtgagccgctgcgtttgaagatcgacccgggcagtcacaccactggtctggcgctggtagcagagaggagtggcgaggtgctgtgggcaggggagctcacccatcaaggggaggcgatcgtcgagcgcctgcggaagcggcgagcggtgcgcagagggcgccgacagcgccatacacgctaccgagaggcgcgctttgccaaccggcgcaggaaagacggctggctgcctccgtcgctgcgcagccgggtgcaaaacgtgctgacctgggtccagcgcttgcggcggctctgtccgatcgcggcgctctcgctggagttggtgcggttcgacacgcaggccatacaggacccggacatcgcgggagtcgtgtaccaacagggcacgctggccggctttgaggtcaaggagtatgtgttggagaagtggggcaggcgctgcgcgtactgcgatgcgagcggcgtgccgctggagatcgagcatatcatgccgcgcagccgtggggggagcagccgcgagagtaatctgacgctctcctgtgtgccctgtaacacggccaaggggacacaggacattggcgtgttcctggcccacgaccccgagcgactcgcgcgcatcctggcgcaggcgaaggcgccgctgcgtgacgtggcggcggtcaatgcgacgcggtgggcgctctatgaacggctcgtagccttagggctgtccgtcgaggtgggcagcggcgggcgtaccaaatacaaccgcaacaggcaacagatgcccaagacgcattggacggatgccgcctgcgtgggggagagcacgcccgagcagttgcggaactggcagaccgtccgacccttgctgattactgccaccgggaggcaaagccgtcagatgtgccacgtggataagcgcggctttccgcgtggtaagcccaaggggccgagccggtcacacgggttccggaccggggatatggtgcgagccgtggtcaccaaaggcgtacacatgggcacctacgtggggcgggtggccatcaagtccgatggctacttcaagctcacgaccagggccagggtggtggagggcatccatgcccgctattgcaccccactgcatcgtagcgatggctatgggtacgccattgggagtctagcagcgcttcctccccaggtctcaaggaccggggctccgcgctgctttgaggggaaggggcaccggaatcgtcaagcatccatcccttcgcaagggatgggctcgtga

SEQ ID NO: 521 - DNA, 315 bp, unidentified
  misc_feature 1..315: note = Ga0070717_10012599 JGI
  source 1..315: mol_type = other DNA
gtcagcgaccccacggggaaacccgggggcatgtgcttgagaaagagcatgccctgatgctgaccagctcccctgggtgctcttgctgagagggcagccagggagccgttcgttgggagcgccaccagtcggaccctgggatggcctttccagtcccaggcgctgcaatcctgctgttaaacaggtgcacggggaagcagagccggtgcagcgggaagagggccgccaacgaacaggagcgaggaaaacttcacccgcgcaagcggaggccccaagcgggccagaccacgaaaggaagcagtagatatgtcacat

SEQ ID NO: 522 - DNA, 1329 bp, unidentified
  misc_feature 1..1329: note = Ga0163147_10008687 JGI
  source 1..1329: mol_type = other DNA
atgcaacgagtattggtgctagataagagcaaaaacccgctgatgccgtgtcatcccgcacgcgcacatcaactgctcaagcaagggaaggcggcggtctttcgtcaatatcccttcaccatcattttgaaagaacgggatggtggggatgttcaacccgtcactatcaaggtagacccgggcagtaagaccactgggataccgatggtcgctgatttcagagcgggtaagcgtgtgatttgggctgggaagctcacccatcgcgggcagcaaatccgagataggttgttatcgcaccgtcaaataaggcggggtcggcgtgtccgtaagacacgctatcgcttggctcgtttcctaaatcggcgtcgtgtgggaagcaaacttgcgccatcgttacaaagtcgagtcgagaacacactaacttgggtcgggcgtctgagtcgttggtcgcctattaactcgatctcaatggagcttgtgcgctttgatatgcagttgatggaaaatgctgaaatatctggcgtggaataccaacagggcgaacttgctggttatgaggttcgagaatatctactggaaaagtggggacgcgagtgcgcctattgtcatgccgccgataggccattagaaatcgaacatatcaccccaaaatcacgcggtggctcaaatcgtgtgagtaatcttaccgtggcttgccatgactgtaatcaacgtaagggtagccaaactgcgacagaatttgggcacgccaatatccaacagcaagccaagcaaccgctcaaagatgcggcggcggttaacgcgactcgctgggcgttgtggagacgcatggacacattgggtttgccattggaagtcgggacagggggacgcacgaaatttaatcgggtaaaacaggactatccaaaagcgcattggattgacgcggcttgtgtaggagaaagtggagaacaaatttacaccagcctaaatcatgcgccacttcagatgaagacgacagggcatcaatcgcggcaaatgtgccgcgttgataagtacggcttcccaagaaccagcgccaaacaagggcgtgtccactttggtttccaaacaggggatatagtcagggcaatggtcacaaaaggagtaaaacgcggtatgtatgttgggagagttagtgtcagggctagtggtttttttaatatcactacccctaccggaacgattcagggtatcagctatcgctacttcaccccaattcacaaatccgatggctatctttacgagaaaggagaggcgctttcccccgctaccacaagggtagcggtacccccgcgccaagttcaatga

SEQ ID NO: 523 - DNA, 255 bp, unidentified
  misc_feature 1..255: note = Ga0163147_10008687 JGI
  source 1..255: mol_type = other DNA
gtcaacgaccacccctatgaagggggtggcttgcgataagcaagcccatgttgaccagccttagtctcattcgtgagacaccgttattcgggtcacgataccggcgggtgagtgaaccagcccgtcgctctatcgttcaccgttaaacatgccgagggtctaggcaagtgcggtgggcatgacaagcccgaataccattggcgaggttcactttaccgccgcaaggcgagaataatgaggtaactcatgcaacga

SEQ ID NO: 524 - DNA, 1065 bp, Moorena sp.
  source 1..1065: mol_type = other DNA
ttgtgttacttaactgggaaatatacacaagatatagagcttggcatagatgcagggtattcagccatagggttcagtgcaacaacagacaaaagggaattaatttcaggtgagttaattttgagaaagagaatttccaaactcattgagcagaaaagaaattacagaaaaggtaggcgaaataagttatggcacagaaaattaagatttaataatcgtagcaaacctgaaggttggtttgcacccagtattcagcataaacttgagacacatctcagattgatagaaaaactgaagaagatactacccataacaaaaatcaccatagaggtggcaaagtttgaccagcagaagatgaacaaaacagagattaagggtgtagaataccggcagggcgagttacagggctatgaagtgagagaatatctgctggagaagtggaaacataaatgtgcttattgtggtaagaataatcttcctctggaaattgaacatataatccctaaaatcagaggaggaacaaacagagtttccaatttaaccatagcgtgtcacaaatgtaatcagaagaaaggagacaagacagcagcagagttcggatatccagaaatacagaagaaagcaaagcaaacattaaaagcaactgcatttatgaatatcgtcagatggagactggtgaatactctggagtgtggctggacgtatggatatatcaccaagcatgacaggattaaattaggattagagaagagccatgtgaatgatgcttttgttattgctggtggaacaacacagagcagaagtaaactgtatatggcaacacaaaccagaaggaataacagaagtattcaaaccaatagggtgggtttcaaaccctctatcagacgacagagatatgaattacagcccaatgacttagtgaaatataagaaaatactgtgtaaagtcaaaggagggttcagttatggtaaatgggtcagattggtaaccaaagcaggtaaaattattaacaccaatgttaagaaagtggaattggtaaaatatggaaaaggaatacagttttaa

SEQ ID NO: 525 - DNA, 253 bp, Moorena sp.
  source 1..253: mol_type = other DNA
gtcagtcacccacggctaaagcacgtgggcttgttctgtgaggagcaagagcaattggttgattaggaggcattgaatatgcagaagttattggtagagtttcagaacacaccagaggatgctcctcaagtcctctgctctgtaagtgaggtattaaacagagacaaaagtctcagtgtgcctcgcacagtactggctaataacaactccgctcaggaccaacactctggcaagagtggacaggtgttaagcg

SEQ ID NO: 526 - DNA, 1248 bp, unidentified
  misc_feature 1..1248: note = Ga0256404_1016703 JGI
  source 1..1248: mol_type = other DNA
atggtttatgtagtttcaaagagtggaaaacctctgatgccaaccgagagatacggtaaagttcggaggatgttaaagaatggcgaggctatcgttattaaacgtgtgccattcaccattcagttacaatatgattcaaaggaatacactcaagacttaactcttggtgttgatgcgggtagtaaaaaggttggattatctgtgtcttctaaggaaaaagaagtctttgctggggagttggcactaagaaatgatattgtaaatctcttgtctacaagaagagaatcacgaaaaacaaggcgaaatcataagacgagataccgtaaggcaagatttgacaatcgcaaaaagccaaaaggatggctggcaccatctgttcaaaataagattaacagtcatttaaaaatagtgggtgatcttaaaaagattcttccaatatccaagattgttgttgaggttgcaagttttgacacacaaagacttaaagcagatattgaaggtctgcaaacaccacaaagtattgactatcagcatggtgaacagtttggtttctggaatgtgagagaatatatcctttatcgtgataatcatacatgtcagtgttgcaaaggaaaatctggtgacaaagttttaaatgttcatcatattgaatctcgtaagactggtggtaattcccctggcaatctaattacactttgcgaatattgtcacaagaaataccacgaaggaaaagtcaaacttccagatgcgattaaacgtaaagcttctatgcgagacgccgcttttatgggaatcatgcgatgggcgctctacaataagctcaaagaaatgtatcatggagaagtgtcaatgacttatggatatattacaaagcatacacgcatccaaaatggtattcaaaaaacacatgcggctgacgctctgtgtattgcaggacatcccaaagctataagagcatatgagttttataacataagaaagataaggtgccataatcgtcagatacacaaaatggcaatctcaaaaggcggagttagaaaaaggaatcaagcgccatatcttgttaaaggatttagattgtttgatcgtgttttgtttgatagtcaagagtgttttatctttgggcgtagaagtagtggttattttgatttgcgtaagcttaacggagagaaagtgagtccatgtgcttcgtacaaaaagatattgttactttcaaaagctaaaaaatatttatgggaaaggatgtga

SEQ ID NO: 527 - DNA, 257 bp, unidentified
  misc_feature 1..257: note = Ga0256404_1016703 JGI
  source 1..257: mol_type = other DNA
gtcaatgactcacgattaaaatcgtgagcttgcggttttaattgtcgtgcaaacgaatgttgactagcctaagcaccacgagtgctacgttgttttggtcataacacctacgaatatcatacctagtttgtagctctgttgttggtgattaaaagtcctgtggagtagggacggtgttaccagcatgacaagccattacaacattggcgaaggtatataacggtcttgagaccgatttatctgaaaggatattaatg

SEQ ID NO: 528 - DNA, 1215 bp, unidentified
  misc_feature 1..1215: note = Ga0247608_10002393 JGI
  source 1..1215: mol_type = other DNA
atggtgagacgtatgctcaagtccggaaatgccgttgtagtttgtcttgagccgttcaccatacggctgtgctatgaaacgactggatacatccagccgtgtactctcggaatagacccaggtgcaaagcacgtgggtataagcgttactacagagaagaaagaactgttaaaagtacaagtagatttaaggacagacatcaaaaaacgacttgatgagagaagagaatacaggaatatgagacgatatctgctgagatatcgtcaagcaagattcaacaacagagtttctgtaaagaaagagggatggattccgccgtcactgatgagcaggaattctgctcatctcagaatactcaaatttatttccaagatagttccgtttgactgcatcagatttgaatactgtccgtttgatacaagacagatgagagaccctgatgtacagggttctgactatcaacattcagaaaaagaagactttgataacacaaagtctttcgtgaagcacagagatggtttcaagtgtcaggtgtgtcacggaaagtctggtgataccagacttgaagtccatcatcttactccagtgtcaaaaggaggcagcaatcatccggataatctggctacagtgtgtcacaaatgtcacactgagatacatcaggataaagtcaagttgaagatcaccaagaaaacattacagaaaaagaatgtaaaattgcttagggatgctgctgtaatgaatgtcattaaagacattcttgtcaagatgataagacaggaattcccagatagggaattccatatcacatacggttacaagacagcaagactgagaagagaacacaacattgacaagtcacactgctttgatgcatatgtcatagcaaggaatcttgaagcagaatcagcaaatactatgtactacggaagagtcttccgtaggcataacagacagaaattcaaggcaaacagaatcaagcacggaattctgaagaagtcaaagacagaatacaagttgttcggattctgtctgtgggacagaatcctttatgacaaccaaatatgttatattggaggaagaagagattctggatacttcaagataacttccattgatgggaagttaatcaaagacggagttaattattcaagattaaaatatacaagtcattccaaaggactgacttttgagaaaataaaatataataacaattaa

SEQ ID NO: 529 - DNA, 332 bp, unidentified
  misc_feature 1..332: note = Ga0247608_10002393 JGI
  source 1..332: mol_type = other DNA
gtcaatgaccggctggtctcgtcactggtgtgacagaggaccagcggcttgtttagacagcaacgtccggcaagccgacgttgatagagcctgaggccggatatcatccggactatgttactctgaaatacataggcaccaagggatgcatatcccagtcctttgctctgcgcactgtgattaaacagtcctgtccggtagggacagtgttgcagtgatataaaactcagagataacattggtcaggggtaactaacagacagcaatgctgtctgacttacagtgaataactgttataattaaaaaattgaaagaaacaaatacagatggta

SEQ ID NO: 530 - DNA, 777 bp, unidentified
  misc_feature 1..777: note = Ga0370498_000133 JGI
  source 1..777: mol_type = other DNA
atgagaaggtcaaggagaagtaggaaaaccccttgtagaaagaataaattaaacagaaaaagaaaaataaattttattccaccatcaacaaaagcgagatggaattctaagttaagactgataaatatattaaaaaagatatatccaatatcaatatatgttgtagaagatataaaagcgaaaacaaaagaagggcaaagaaattggaataagaatttttcaccattagaagttgggaaaacatatttctataatattattaaaacatatggaaatcttattctaaaagaaggacgggaaacaagtaaaattagggaaaaattaaatttagtaaaaactaaaaataaattaaataaagtattttctgctcataatattgatagttgggtattagctaatttaccatttgatgttcaaacttaccctgataatattgatatgtattattttagacaaattgtattatacagaagacaattacagatgtttcaatttgctaaaggaggaaaaaggaagagatttggagggacagtatctcttggaatacctaagggaacggtagtaaaagcaaaatataaaaagaaagaaatattatgttatatcggtggaaatatgaatggtaaactatctgttcttaatatagagaatggtgaaagaataagtagaagcataaataaaaaagatataaaatatatgggatatatagcgaagtggaaagtagaaagaataaaagggaagaataaagagataacgagcaattcctccatacctgcgtag

SEQ ID NO: 531 - DNA, 475 bp, unidentified
  misc_feature 1..475: note = Ga0370498_000133 JGI
  source 1..475: mol_type = other DNA
gtgtaataaccccttccaagcttttatcttggttgaggcttgttaaagtaaattatgccaaaatctaaacaacaagttaaatcaatgactagagtatccggtcttcctactcgtaagagtaggaagatacaggaaactgaatcatcttctcatggcagggaaaaatatatttccgatgtttctctagttggaaatttctatgataatcagtctcgaagagagcaattaccagagcaatctggacggaaggtaacttccaaatttgttacgaaaatatatattccagtaatttcttgtgctggaattgcattaatgccttgctctcctaggagagcaaaagaattaattaaaaagaataaagcgaagaagcagtttacaaatagtattttctatattaaattacttgaaagagatataggaaatattcaagacatatcatgtggaatagattccggatcaaagagagaagcaataa

SEQ ID NO: 532 - DNA, 1008 bp, unidentified
  misc_feature 1..1008: note = Ga0197142_1009778 JGI
  source 1..1008: mol_type = other DNA
atgtatgttcctgtagttgatcgaaatcaaaaaccccttatgcccaccacaccaagtcgcgccaggcgttggattaagtctggcaaggcgactcctttctggaagaaggggatattctgcgtcagactcaatgttgaaccttctgaccgtcgaactcaaccgattgcggtaggcatcgaccctggcagtaagaaggaaggctggacagtcaagtccaaagctcatacttatctcaaccttcaaaccaacgccgtcacttgggtgaaggagcacgttgagctacgacggcagatgcgtcgtactcgacggtatcgcaaaacaccctgtcgtcagcccagggctaatcgagcgagaggtggtattcctccctctaccaaagctagatggcagtggaaactacgcctagcaaaatggttgagtaaattatttccaatcactacctttgtggtagaagacatcaaggcaaagacgaaaggtaagcggcggtgggatgtctcgttctctcctttggaagtagggaaacagtggttttacgagcaactggctaaactatgccaggtggtaacccgttcaggttgggagaccaaacaaatgcgggatactctaggtctcaggaagacgggtaataaaactgctgaagtcttcgaggctcattgcgtcgattcttgggtgttagccaactctgttgttggtggacatcttcagcctgacaacaaaagactggtgttcgttgtacctctacaatttcatcgtcgccaactccaccgtttgcaacctggcaaacaaggaaaacgcctaccctatgggggaactttaagtctagggttgaaaaggggtagtttagtcaaacaccccgaatacggactcacctttgtaggtggtagctccaagggtaggctgagtttgcatggcctagcagatggaaaaaggttaacgcaaaacgccaaaaaagaagatgtcaagtttttaactttttgttcgtggaggttctatgttagaagcgaataa

SEQ ID NO: 533 - DNA, 267 bp, unidentified
  misc_feature 1..267: note = Ga0197142_1009778 JGI
  source 1..267: mol_type = other DNA
gtcaagtacccccagctttagctgggggcttgtgggattagagcctagccagctggaaaccacaggggcaaggaaagactagcctgcccaagcaacctaccttcgagtagggggcgtttgaagggaactgaaccagctggacgtggcagtccgaaagacgtagcgaatgcctccctagtttgctacctctctgctggtcagtggcgttagcgaagcgagccgcaaggcttagggaagtatacactccactaggagacttactctcat

SEQ ID NO: 534 - DNA, 699 bp, unidentified
  misc_feature 1..699: note = Human gut metagenome
  source 1..699: mol_type = other DNA
atgccaaacaaagtgtatgtcatcaacaaacacgggcgtccgctgatgccctgctccccggcaaaagcccgtcatctgctggatgaagggaaagccaaaataaagaagaggacgccctttaccatccagctggtctacggaagcagcggctacacccaagaagtcattttgggcgtggacgctggaagtaagaccatcggaatgtccacatccacaaagaaggaagaagttcggctccatgtccatcatctggagagcaggaaggtaggcggcgacgccccggacaaccaagttaccctttgcgagagctgtcacgagaaactccacaaggggttgattacggcgaaggacttcaaaaagcgtaagcgtcgttccacacgggatgccacattcatgggcatcatgcggaagactttaatgcagaggctctgctctgagttgcctatccccgtcattgagaccaggggctacatcacaaaggcgacccgagagaagctgctggtgcttcccaagagccacaccaatgacgctctggcaatcgcacaggggaagcagggcttcaatgtgggctacctaccgggaatcgtacaaattaataagatttatacgatttgccccgtaaggcatcacaaccgccagctgcacaaggcgactatcctcaagggaggcatccgtaaatccaatcaagcagaaaagtac

SEQ ID NO: 535 - DNA, 310 bp, unidentified
  misc_feature 1..310: note = Human gut metagenome
  source 1..310: mol_type = other DNA
gtcaataacccccaccaaatctaacgatttggagggggcttgcgagaaatcgtaagccctgattgactaccctaagtgtttcgagcactacgttactcaagaatgtaagaataggcaccggcgggcgtgaatccgaacctgccgcactgcggtgtgtgattaaaagctctgagggtaaggagcggtgttgcacacgaaaaccttgagataacattgggtacggatacctgacggccgaaaggccgcgtggctttttcgttagccacaatcaaagaagaaggaggaggaggaaggcatcatgccaaacaaa

SEQ ID NO: 536 - DNA, 1197 bp, unidentified
  misc_feature 1..1197: note = Ga0307988_1006404 JGI
  source 1..1197: mol_type = other DNA
gtgaaagtctatgttttaacaaaaaacaaaaaatcattgatgcccacaacttgctctaaagcaagaatattaattaaaaaaggcaaagctagggttcataagagacaaccttttacaattcagcttttaaatagagtagctggagaggttgaacatgttaatctaggtattgacagcggagcaaataatattggtttttccgcagtatcaggaagagaagagttaatttcaggaacagttatacttgatgtgatgatgaaatcaagacttgatgacaggcgaatgtaccgaagaaacaggaggaaccgcctctggtacagaaaaccgagatttgataacagaaaacgcgctgacgactggttgccgcccagtattaaaaggcgataccagtcacatctgactattatcaataaaattaagtcactattacctgttaagtatatttgtatagaagtaggtaattttgatatacaagctattaaaaaaccgggaataagtagtacaggttatcaacagggcgataggtatggttatgcaaatctaaagtcttatataatagccagagaaaaaagtcattgtcagttgtgcggtaagagtgttataggaacaaagattaatctacatcacataatatcaagatgtaaaggcggaacgaataaagctgataatttggcactgttacatgtaaaatgtcataaaagaatacataaaaaaggtcttggaaaaaccttaaagagaaataaacagtaccgggaatctacatttatgaatataattaaatggaaatttaagcaggatttagtttgcactttaacttttggatttaaaacattctgcaaaagaacagagctaaatatcccaaaaacgcataacaatgacgcatttgttattgccggcggtacagaacaagcgagattgcttcatcttgaagttatacagaaacgaaagaataaccgctcgctacagaaaaacaggaaaggctttgctccggcaatacgcaggcaaaggtattcaatacagccgaaagatctggtaaggatcaaaagcaaatggctaattaccaacggttgtcactgtaaaggaacaagaatattagttaataaaagatcaattaacattaaacaagtggaaagcgttttcaacgtaggaacattaggagggtggcaattcctccccttgttaaaaagttataactag

SEQ ID NO: 537 - DNA, 243 bp, unidentified
  misc_feature 1..243: note = Ga0307988_1006404 JGI
  source 1..243: mol_type = other DNA
gtcagttaccccatagctaaagctagggggcttatccgcaaggatatctaattagctgattaggaggtagaaatacagaagttaaaaaaggtgaaatacatacacaccaacaattacctccctagattgttgcaactgtgaactgtaattaaacaaagttcaaagacttagtgttgcagttttaaaaactttttttaacagctccgaagggaattaaccacgaaagtgaggtgacttgtgaaa

SEQ ID NO: 538 - DNA, 762 bp, unidentified
  misc_feature 1..762: note = Bioreactor metagenome
  source 1..762: mol_type = other DNA
atggtatttgtattagatgcaaataaaaagtcattatcgccttgccatgaagcagttgcaagaaaattgcttaagcaaggtaaggctgcaatatttagaagatacccatttacaataatccttaaaaaagtagtagaagacactaaaaacaagcaagaatatagattaaaaattgattatggtagtaagcatacaggattagctatactacaaaataataatgtaatatggctagggcaaatagaccatagaacagatattaaaaagaagcttgatgaaagacgtatgtttagacgtagtagaagaaacagaaaaataagatatagaaaaccaagatttttaaatagaaaaagaaaagaaggatggatgtcaccaagtttagaaagtaggattaataatataaaaacatgggttaataggttacaaaaattaattccattaactcacatatcttatgaaaatgttaaatttgatactcaattaatgcaaaatcctgaaataagtggtattgagtatcaacaaggtacacttcaagggtatgaaattagagaatatttacttgaaaagtttggtagaaaatgttgttattgtggaaaagaaaacattccattagaaatagaacatataataccaaaatcaaggggtggaacaaacagaattgataatctctgtttagcttgtcatgagtgtaaccagaagaaaggtaatatgacagcagaagaatttggttatccagaggtacaaagacaagttaaagaaaca

SEQ ID NO: 539 - DNA, 241 bp, unidentified
  misc_feature 1..241: note = Bioreactor metagenome
  source 1..241: mol_type = other DNA
gtcaactacccaacgactaaagtcgtggacttgatagccctatgttgaccaggttaaggtttgaaacagaacctacgttatctatgtcatgacaccctaggatgccctcctagttctaggctctgtcgtacaacattaaacaggtgtagtgggttaagccagtgtgttgtacatgtaagcatagataacattgccgagggagatgttacctgcgtaagcagagaaaggagaaaatcctatg

SEQ ID NO: 540 - DNA, 1329 bp, unidentified
  misc_feature 1..1329: note = Ga0070738_10015183 JGI
  source 1..1329: mol_type = other DNA
ttgagcaacgtctttgttcttgatacccacaagcagccgctggccccggttcatcctgggcaggcccgcctgctcttaaaacaggggaaggccgcggtcttcaagccttacccattcaccctgattttgaagcgagccatccccaccgaagaggtccacgcccccccgctgcggatcaaaatcgatcccggcagcaaaactaccggccttgcgctcgtggatgaccacagcggcgtggtcgtctttgttgccgagctgtcccaccgggggcagcagatcaaaaaaagcctcgacacccgaagaggagcccggcggggacgccgccaccgcaccactcgctaccgtgctccccgctggcgcaatcgcaggcgagagccgggctggttgcccccctcgctcgtgagccgcatccgcaatgtggtcacctgggtcgagcgtttgtgccgcctggctcccatccgagcgatcagcctggagctggtccggttcgacctgcacgccatggagaacccggccatcagcggtctggagtaccagcaaggcactctggcaggctacgagatccgcgaatacttgctggagaagtggcagcggacctgtgcctattgtgggaaagagggcgttccgttccaggtggaacatatcgtgccccgtgcaaaggggggcagcaaccgcgtgagcaacttggtgctcgcgtgcgaaccctgcaacacgaagaaaggcacgtgtgatatcaccgagttcctcaagaagaagcccgaggtgttgaaacgcatccagggacaggcgaaggcccccctcaaggatgcagcggccgtcaatgctacccggttcgcgcttctggagcaggtcaagcaactcggattgccggtggagtgtggcagcggggggcgcacgaagttcaaccggacccaacggggcttgcccaaaacgcactggggagatgcggcctgtgtgggagccagtacgccagagcggttgcaggtcagaggggtccgccccttgttgatcgaggcgtgtggccatgggtgtcgacgggtgcgcaatgtcactgccattggcttgccccgctcagcgcccaaaggcccaaaacacgtgcagggcttccagaccggcgatatcgcccgcgccattgtcaccaccggtgccaagcaggggatctatgagggtcgggtgctggtccgggccagcagatcatttgatctgctgacgaagcatggacggattgctgggctcaatgcgcgcttttttcgccatctgcaccgctcggatggctatcgctacacccaaggagacgtctatgcaacccctgcccaatccacccgataa

SEQ ID NO: 541 - DNA, 278 bp, unidentified
  misc_feature 1..278: note = Ga0070738_10015183 JGI
  source 1..278: mol_type = other DNA
gtcatggaccccggtttgaaaaccggggcttggagcaatccgagcgattgaagcaagccccgccctattccgaccgcaacatgagcagacttggcccgaaagggctccgttgggggcgaatacaccaataggtaccggtgggtgcgcggccagcccaccgctctacggccaggggttaaacagatcgagggtacggtcagtgcctctggcaaacaaaccgcttccaacattgtcgaggccaccattacccttgaaagaggaggctcagtttgagcaac

SEQ ID NO: 542 - DNA, 1293 bp, unidentified
  misc_feature 1..1293: note = Human gut metagenome
  source 1..1293: mol_type = other DNA
atgccaaaggtctatgttctcaaccggcacgggcgtccgctgatgccatgctccccagcaaaagcccgtcatcttctggatgcgggcaaggcaaaagtgagacgcagaacaccgtttaccattcaactgctctacggcagtaccggctatgcgcaggaggtcatcctcggtgtggacgccggcagcaaaaccatcggactttcggcttccaccgaaacggaggaactgttctccgcagaggtcaagccgcgcaacgatgtggtcgagctgatgtccgtacgcaggcagttccgccgtgcgcggcgcaatcgcaccacccggtatcgtaagccacgcttcgacaaccgcgtgcggagcaagcataaaggctggctcgcaccttccgtggaagtaaaaatccaagatcatatcaccgccatccggcgcgtctgtggtatcctgcccgtcagcaaagtggtcgtagagaccgccgagttcgacttgcagctcctcaaggccgttgcggaagggaagcctgttccgcagggcgaggactaccagcatggggagatgtatggtcactacaacgtgcgccagtatgttttgtggcgcgatggctatacctgccaatgctgcggagcgcacgcgacccagaagaaagaggtgcggctccatgtgcatcatttggaaagccggaaggtaggcggcgacgccccggacaaccaagttaccctttgcgagagctgtcacaagaagctccacaggggattgattgaggcgaagaacttcaagaagcgcaagcgtcgtcccacacgggatgccacattcatgggcatcatgcgggcaacgttgctgcaaaggcttcgttccgagttgcctatccccgtcattgaaaccagaggctacatcacaaaagcaaccagagaaaagctgctggttctgcctaaaagccacaccaatgatgctctggcaatcacgcaggggaagcatggcttcaatgtgggctacctcccaggaatcgtacaaagcgataagacttacacgattcgccccgtgcgacaccataaccggcaactgcacaaagcgactatcctcacgggaggcatccgcaaagccaaccaagcggaaaagtacgtctgtggcttccgtctatacgacaaggtgctctacaacggtatcgagtgttttgtttggggcaggcggaccagcggctcttttctacttcgagcgttagacggaacaaaggtcaaagatggtgctggacacagaatcctcactttgctcgaacgaagcagcaattatctcattgcttaa

SEQ ID NO: 543 - DNA, 307 bp, unidentified
  misc_feature 1..307: note = Human gut metagenome
  source 1..307: mol_type = other DNA
gtcaagaacccaccacttaaactctgacgagttttgaagtgggggcttgtggtgtaaaccgcaagccagattgactaccctaagtgtttcgagcactacgttactcaagaatgtaagaataggcaccggcgggcgtgaatccgaacctgccgcactgcggtgtgtgattaaaagctctgagggtaaggagcggtgttgcacacgaaaaccttgagataacattgggtacggatacctgacagccgaaaggctgagcggcttatttttagccgcacccaaagaaaggaggcatcaacgtatgccaaag

SEQ ID NO: 544 - DNA, 1161 bp, unidentified
  misc_feature 1..1161: note = Ga0071116_1002195 JGI
  source 1..1161: mol_type = other DNA
atgccatgttcacccgctaaagggaaaaaattcttaagagaaggcaaagcaaaagtagtaaggagaactccctttacaattcaacttactattgcaacaggagagacaaaacaggatgttactctgggaatagatagcgggtatcttcatattggattatcagcaatcacagagaaaaaagaattattttcaggttctgttatattaaggaaagatatagttaaattgaattcagaaagaaggagttatagaagatgtagaagaaacagaaaaacctggtacagaccggtaaggtttctaaacagaaagaaagaagaagggtggttagctccttcattacaacacaaagagaatagccataaaagaattatagaaaaacttgaaaacatattacctgttaatgatatagtcatagaagtagcaaattttgatatacagaaaattaagaaccctgaaatagaaggggtagaatatcaaaatggagaacagaaaggtttctggaatgaacgagagtatgtcttatatagagacggccatacctgccagcattgcaggggaaaatctaaagataagatacttgaaactcatcatttagaaagcagacaaacaggaggtaatagacctgataatttaataactctctgtaaaacctgtcacagtaaggtatcagccgggaaaattactctcacagttaaaccctctaaaggttacagagaggcaggatttatgacgaccataagatggaaattactctcctctctaaaagaaagagaaaggaaactttcatatacttatggttatattacaaaaaagaagagaatagaactggcacttccaaaatcacatattaatgatgcttttgttatagcaggaggaaaagaacagagtagaagtaagtcttattctataatacaacacaggcgacataacaggtcattacaaacaaacaggtcaggttttaaaccttctattagaaagaaaaaatatccttaccagcctggagacacagtaagactgacaggtaaaatctggactattaaaggtgtttttaattatggaaactgggttagattaaaaaatagaaccggaacgattagaaatgtggcaactaagaaaatagaactgattaaatatggtggaggattttcttttgaatattaa

SEQ ID NO: 545 - DNA, 322 bp, unidentified
  misc_feature 1..322: note = Ga0071116_1002195 JGI
  source 1..322: mol_type = other DNA
gtcaatgaccccgcccacaaggggacagggcttgcggtgcaacccgtaagttatcacattgcttagaggcttaaggaataatgttctttatgcagcagttattcaggagagatacatacacacctgcggatatctctcacgtccagtcagctctgtggttttaagttaaacagtcctgtggggtagggacagtgcttaaagcttaaaaaccctgaataacacctcgatgggatccaaccggttttaaaaggttccggaatagaacttgagagtatctattggcaaaatcttttagtaaggagtaatcaagttgtatagcttt

SEQ ID NO: 546 - DNA, 1326 bp, unidentified
  misc_feature 1..1326: note = Human gut metagenome
  source 1..1326: mol_type = other DNA
atgtcagtttctgtttttgttctggacaggaagcaccggcctctgatgccgtgccgacccgctcgggcgcgaaggctcctgaaatcgggccgagcccgcgtcgtcaagcgcttcccgttcacgatccgcttggtggatcggctgatcgagaactctgacgttcagcccgtcctcgtcaagttcgatccgggctcacgcgagaccggcatcgccgttgttcgagccgacgggaagaggcgccaccatgcgctgttcttcattgacctcgttcatcgcggatcggtcatccgggaatgcctgagcgctcgttgtgcctttggccgtcggcggcgcagcaatctgcgctatcgagccccacggtttctcaatcgcaccaagccgcagggttggccggcaccgtcgcttcgacaccgcgtggatgccgtagccgcatgggcggccaagctcatccgtctcgtccccgcaacgggattgatggaagagctcgtcaagttcgacgcgcagaagctgcagaatccggaaatttcgggcgccgagtatcagcaagggacgctcttcgagtatgaggtgcgtgaatacctactggaaaaattcggcaggaaatgcgtctactgctcagccgagaacgtgccgctcaacatcgagcacgttgtgccgaaggcacgaggcggatccaaccgcctctcgaacctcgcgctcgcctgcgtggcctgcaaccaaaagaagggggcgcagcccgttgaagttttcctcaaagaccgccctgaggtgcttgagcgcctcaagcagcaatgcaggcgttctctctcggacgcggcggcggtcaacgcaacccgctggtcgcttctcaatgcgctcaagacgttcgggctccctgtgcagacgggttccggcgcattgacgaaattcaatcgaagttccttgggcattgccaaagaacattggctcgatgcgctctgcgcgggtcgaatcaacgcagcgcactatcccaagagcatgggcgtccttgaattccgatgcaccggtcgggggagctatcaacgtacgaggctcaccaagcacgggttcccgcgcggctttctgatgcgccaaaaacgcgttcacggcttcgccacgggcgacatggtcaaggccatcgtcccatcagggaagaaggccggcgtctatcggggccgcgtggccgttcgtgcgtcgggcagcttcaacattcagacgcccggaggcgtcattcaaggcattagttggcgtcactgtcaactgctttcctacaacgacggatacgggtatgcgtggctgcgccgcgcacctcattcctcccccgtctga

SEQ ID NO: 547 - DNA, 288 bp, unidentified
  misc_feature 1..288: note = Human gut metagenome
  source 1..288: mol_type = other DNA
gtcaaccacccctccttaaaaggagaggcttgagccatcaagccggttgaccagcctcagtgatccgaaaggagaactacgttgtcgtcaggtgacaagacccgccccggggggcttcctcagctccgagctccggaaacggcagaagcagacaagctttgggtatgcacgaaacggtctgccgttgcaatgccggacggcaacattggcgaggggaattcaactttgttgatgtcacgggggcaaccccgattcgaaccgtaaggtttcaacaccatgtcagtttct

SEQ ID NO: 548 - DNA, 903 bp, unidentified
  misc_feature 1..903: note = Ga0116164_10013910 JGI
  source 1..903: mol_type = other DNA
atggtatttgtgttgaataaagacaaagagccggttatgccgtgttctgaaaaaaaggcaaggaagttgttagaaaagaaaaaagctgtgatacatcgtctgtacccgatggttattcgtttgaaagaacaaaaagactacgaagtgaggggattgaggttgaaacttgaccccggagcaaagagaactggcttcgcggtgttgcatgaaaaatcagagcatgaagcggatgctatacttttaggtgagattatacataaagtttacgctcccgcaaaaggtaaaaaagatggtaaaccgcatatatatcatggtggcgcagctgcgttgtataaaagaagaatgttcaggataggcaggcgaagcagaaaaacaagatacagaccggcgagatggttaaacagaaaagcatcaagaaagaaagggttaccgccctcttttgaatcaagaataaaccagactgttcatgcggtagagaagttgatgaaatggttgccgattgcggctatatcagttgaacacgtcaagtttgatatgcagaaaatgagagatgcggatattgagggtgttggttaccaacaaggtacacttgcagggtatgaaatcagagagtatttactcgaaaagtttgggagaaaatgcgcttattgcggtgcggaaaacatcccgcttgaaattgagcatattgtgccgaagagtagaggtggcacaaacaggattgataatcttgctatcgcttgccgtaagtgtaatgaagataaaggaaacaagctgccggacgagtggttagctgagttaaaaacaagcagtagaaaatcagacaagctgcgcgcaaaaaactttgagaaggcgaaaagagatgttaaaaagactttgaaagacgcggcatttgtgaactcaact

SEQ ID NO: 549 - DNA, 313 bp, unidentified
  misc_feature 1..313: note = Ga0116164_10013910 JGI
  source 1..313: mol_type = other DNA
actgttgaaaagaaaagaagtaatggttcagactcgcgcgtgcgcgttacctttagtatttcaatactaaactgaaccagactaagttctacgagaactacgttatttgggttacgataccttcaggtgcttctccagccggaagctctatcatcgtacattaaacagagttaagggtaaagcgaaatctcagtgtgtgcgaagcaatcaagcctttataacattgtcgaggagagaggatttaatcccgttacaagccgcgtgagcggaaaccctacggggttattttaaataccaaaggaggaaaaaaatg

SEQ ID NO: 550 - DNA, 813 bp, unidentified
  misc_feature 1..813: note = Ga0074478_1419092 JGI
  source 1..813: mol_type = other DNA
atgttagtgttagttttaaacaataatggcaaaaatctaatgccatgcagtccacgaaaagcaagacttttattaaaattaggtaaagcaaaagttaaattcagaaaaccttttactatccagcttatttatggttcagcaggatataaacaaccaatttatttaggaatagataaaggttttaaatttacaggaattagctatattataaaagacaaaataattttatcagctcaaataaaccatcggattgatgtatctgataaaatgattacaagaagtcaaaatagaaaacagagacgtagtaggctttgctatagaaaaccaagatttaataacagagcatcaagtaaaagaaaaaatagattatcgccatcagtaaaaacaaatatagaagaaatcttaaggataattaatagaatcaaacttcctacaactcatattgctatagaagatgtgcaggttgatattgcaagattaaataatcctgacttaacaggaaaagattatcaaaaatcaaacagattgaatgaaaatcttagaattgcatgtctaatgagagataattatcaatgtaatgtctgtaaaaagaaaaatttaagattagaagtccaccacattattccaagaaaagaagagggaaaagactcaataaccaatttaatagcattatgttcatcttgtcattcaaaagttcacgacaataagattaaattagatattgatggtgtaagcggttttaaagataagatttcacagcaggcaatgcaaggcaaatcttatttatatgcagaattaagtaaaattggataa

SEQ ID NO: 551 - DNA, 251 bp, unidentified
  misc_feature 1..251: note = Ga0074478_1419092 JGI
  source 1..251: mol_type = other DNA
ctcaatctgatagttgctaagtctataaaatatatttattttttatagatatgtaactaacagagggcttagaaataagcaaaagttgtttaagctatcttacctttagatgttattccagtctgaagctctaaggttcataattaagggtaagcgaaagccgaaagtgttatgaacgtaaaaaacttttacaacagcctcaaggaatatctaactcttatttataggagaaacactttatgttagtgtta

SEQ ID NO: 552 - DNA, 411 bp, unidentified
  misc_feature 1..411: note = Ga0400266_0006374 JGI
  source 1..411: mol_type = other DNA
atggtgcgtgcgtatccgtttacgatccggctgaaaggccgtgccgatggcatcacacagccggtccgtatcaagatcgatcccggcagcacgaccaccgggatcgcagtggttcgagaaaacggccagaagcaacacgttctggccttgatggaattagcccatcgcggccgcacgaaattcaatcggcagagactgggcattccaaagactcacgcgctggacgcggcttgcgtcggagaagtcgagatcgtagagggttgggacgctccaaccctagcgatcaaagctaccatccagggaatatcccatcgccactgtgttttaacccagcgagcagatagctacggctatcacatccaacccaaccaacgaaaggaggagggagacagggaaaacgagtcgcgctga

SEQ ID NO: 553 - DNA, 295 bp, unidentified
  misc_feature 1..295: note = Ga0400266_0006374 JGI
  source 1..295: mol_type = other DNA
gtcaactaccccgccctaaaggacggagcttgtagagaacaccctacaagccaggttgaccagggaaagcggacacccacccgctacgtttgccacaggtcgttaagacccactgcggtgtgcttcctcagcaccggacactggaaaactggaatcacgctggcaaaaggcaaagcgccgaaggtttcagttgccgcgcaagcgggagccggtggtagacattcccgaggggagagaggcttcggcctccgtcacaaggcccgtaagggcattcattgaaaggaaagtaatgtcg

SEQ ID NO: 554 - DNA, 1383 bp, Moorena sp.
  source 1..1383: mol_type = other DNA
atgcagaagttatcagtaaagttaaagaacgcaccaggggatgctccacaagttccctgctctgtaagtgatggtttaaacagagaggaaactctcagtgatcgtcgcaaagtactgtctgataacagctccgaagtggatcaactctctggcaagagagaacaggacttgagagtccctgttataaacatgcgtggagaagcattaatgcctactacccctgggatggcacgaagaatgttggtttctggcaaggcaaaggttgttaagagagcaccattcgttatccaaatgacaaaagctactggcgaaaacaaacagtctgttacttgcgggattgatatgggttatgggaagattggttattcttgtgttacagataagtctgaattgtttgccggtgaggtagaggtggacaacagaacagctaaaaggatggaaaagagaagaaagtataggagaaatcgtagaagtaggatgtggcatcgtgaacctcgttttaacaatcgtaagaaagacaaaggatggttgccaccatcaacccaaagaagggttgatacacacattaggttagttgagaaactgtcgcagtggttgccgataacgaaggtgagagtagaagttgccaaatttgatattcagaagattaagaaccccaacattgaaggagtagaatatcaacagggaagtatgtatggttaccaaaacaccaaagaatacattctattcagagaaaaaggtaaatgtcaactgtgctctaatggttggaagaaaacagataggtgggaactccaccacattatttcgagaaatgaggggggaacagacaagaccgacaacttagcactattacataaaaaatgccacgaaaagttacataaaaaaggattaaaactaaaaccgaacagacaatataaagcagagacgtttatgtcaatagcgaggtggaaaatagttgatggattaagggaaaaattttacaccgaacacacttatggttataaaacaaaagttaagagaaacaggttaaatttggaaaaatctcacagaaacgatgcctttgttatagcaggcggaaatgggcaagtaagatgtaaagaattacatatcgttcaaaagcacaggaataatagatctttgggatatcagagaaaggggttcgcaccatcatcaagaaaacaaagatacaagatacagcccaaagatttagtgaagattaatggagaatggaaagaagcaaaagggatacattgtaaaggagaacgtgttatggtagaaggaaaatcggttaatggtaagaatatagaggaaatatacaattttggaagtttccaattcctctccacatctaaagaggggagtttacttggaggtaacagatga

SEQ ID NO: 555 - DNA, 251 bp, Moorena sp.
  source 1..251: mol_type = other DNA
gtcaatcaccccatgactaaagtcaggggcttgagccgtgaggcttgagggcaattggttgattaggaggcaataaatgcagaagttatcagtaaagttaaagaacgcaccaggggatgctccacaagttccctgctctgtaagtgatggtttaaacagagaggaaactctcagtgatcgtcgcaaagtactgtctgataacagctccgaagtggatcaactctctggcaagagagaacaggacttgagag

SEQ ID NO: 556 - DNA, 849 bp, unidentified
  misc_feature 1..849: note = Ga0265294_10038476 JGI
  source 1..849: mol_type = other DNA
atggtttatgtaattaataaagatgggagtcctttaatgccttgtaaaccagcaatagcaagattattgttaaaagatggtaaagcaaaatgcataagaagaactccatttacaattaaattactatatcatgctacagactatacacaagatttaactttaggaattgatactggtagtagtaaaataggaagtgcggtagcaaatgacgaaaatgaagtgtattatatatcagaagtagaaattagaaatgatatatctgacaaaatggacaaaagagctaaatataggagaactagaaggaataggaaaactagatatagggaacctagatttaataataggaaaaacagcattaaaaaagatagattttctcctacaatgacaagtaaaattaattcacacttaaaagaaattgattttgcaaaatcaataattcccattacaaatataataatagaaacagcaacatttgacccacatgctttaaaaaatccagcagtattaagtaataaatggctttatcaaaaaggaactaattatggatttgcgaatactaaagcttatgtattaagtagagataaatatatttgccagtattgcaaagggaaaagtaaagacagcagattagaggtacatcacatagtttttagaaaaaatggtggctcagatgatgcagaaaatttaattacactttgtaaaacttgtcatgatagtttgcacaaaggagaaattaaactaaagaagaatggtaaaattaaaggacaattaaaacacgcaacacagatgaatagtataagacaacaattattaagacagctaccaaatgtaaaagaaacctttggattt

SEQ ID NO: 557 - DNA, 292 bp, unidentified
  misc_feature 1..292: note = Ga0265294_10038476 JGI
  source 1..292: mol_type = other DNA
gtgaactacccccgactaaagtcggaggcttctaaagtctaagttcaccagacttagtatagagaaatttatactacaatagaatagttatgatacctttggttgacgcatcagaccattgctctatcgtatatcattaagtagagttggagggtaaggctcggtgtgatatacatgtaagctattttattattgtcgagatgaggacggattctatatatggtaatagtatatagatacgcataacctgcttttaagcagagtgtttatccgaaaggatttgattttatgg

SEQ ID NO: 558 - DNA, 1278 bp, unidentified
  misc_feature 1..1278: note = Wastewater metagenome
  source 1..1278: mol_type = other DNA
atggctataacttacgttttaaaccaagatggacaaccacttatgccaaccactaggtgtggcaaagtaagacgactattaaactcaggtcaagcgcgtgttgtacgcaaaagacctttcactattcaactaaattatgagcccaaaactaatgttgttaaagacttaacattgggtgttgatgcaggctcaaaaactattggtctttcagtcacttcagaaaatagagaatactatgcttccgaagtcaaactgagagatgatgtttctaaactattagagtctagaagtaactctagatatacacgtagaaaccgtaaaatccgctatcgcaaaccacggtttaacaacagaactaaatccaagccaaaaggttggattgcaccgagcattaaacacaaagttcagacacatgtagatgctgtaaaagacatcatgagctttttaccaataaaacaggtaattgttgagaccgctcagtttgatactcaaaaaatggtaaatcctgagatttcaggagtagagtatcaacaaggtgaactcatgggttatcacatccgagagtacttgttggagaaattcaagagacaatgtgtctattgtaaaaagaagaatattccacttgagattgaacatataattccaaaatcacgaggtggttcaaatagagtaaacaatttaactattgcttgtcgcgaatgtaatcagcgtaaagacaacatgacagccgccgaatttggctttcccaatgttcaaaaacaagcgtctaagggtcttaagcatgcggcacatatgaaccttattcgtaagtcctttttgacgcagttacaagagcttggaattgatgtaaaagaaacctttggatatatcaccaagaaaacacggatagacgccggattagagaaaacacatgcgattgatgctagatgtataacaggcaatgtcaatgtacaaccaattgaagacctatggctcaagaaaaaagtgagacgccataaccgcagcatccacaagatgacgctatataaaggtggagtcaaacgagcaaaacaggcaccatatgaaacgcaaggttatagactttttgaccttgtgtctgttgacggggccttatggtatgttcatgctcgtcgcgttaaagggggtttcactctaaaacgcatgtctgatggaaacagcctgaataaagccccatcaaaaataacctttgttgcgcatcaaccatcttatatacaagaaaaggtgccaaatactggagtaataacattgatgaaataa

SEQ ID NO: 559 - DNA, 309 bp, unidentified
  misc_feature 1..309: note = Wastewater metagenome
  source 1..309: mol_type = other DNA
tccatcatcaataatcaccacctaaggtagagctttgctattatcataggtggggtttagtgaaacaactaaaccctgattgattagccttagtcttacatagactacgttagacttgaaataggtaccttggggtgttatacctagctccaggctctacggttaagcattaaacaattttgagtggtagaaatagtgtgcttagcgttaaaccaagtcataacattggcgaaggtattttatgggcttcgtgtcccagcttaccgcataaaacacgaaaatcacagaaaggcacatctagatggctat

SEQ ID NO: 560 - DNA, 1344 bp, unidentified
  misc_feature 1..1344: note = Ga0206225_1000096 JGI
  source 1..1344: mol_type = other DNA
atgagtgtgtttgttttagacaaaaacaaaaagcccctcatgccgtgccatccggcacgcgcaagggatttgcttgcaaaaggaaaagccgccgtatttcggcgtgctccttttacgattattttaatcaaacgagcaaatgggatttgccaagatcttatccttaaatttgatcctggcagtaaaacgacgggagtggctctcgtcgcaaattttgagtgtagcgattgtgtcatttgggcggctcatttaaaacaccggggagccgctataaaaaaaactctggatcaaagaagggcgcttcgcaggggaagaagatcgcgccatacacgctatcgagcttctcgttttgaaaatcgaacgcggccgtccggatggctgccgccatctatccaatcgagggtagatcaagtagctcgcctggggttgcgactctctctcatagcccccgtaacatctgttgctgttgaaacggttcgtttcgatatgcaaaaacttaagaatccggaaatttcaggagcagcctatcaacaaggcactctttttggctatgaggtgcgagaatatctcctcgaaaaatggggaagaaaatgcgcctattgcgaaaaaacggatatccgattggagattgaccacatcgttcccaaaagttccggaggaacaaacgcagtcggaaatctcactatttgctgcagaaattgtaacgaaaaaaaagggaataaggcacttcaagatttcttaaaacagcctgtaaaggttgctcagattctttctagcagcaaaaggactcttaaagacgccgcagccgtaaatgcctcaaggcttgcaataggagaagctctgtccgttcttggcaaaccgatttcttactggagcggagggcaaacgaagcacaatagacagaaacaaggatttcctaaggaacattggctggatgccgcatgcgtaggcgattttgtctcgctgacaattccgcaagaaatttccgtactggaaatgactgcaaagggaagaggctctcgccaaaaatgcttagtcgatcgctttgggtttccaagaagtgctcccaaagcgcaaaaacgagtctttggctttcaaacaggtgatctcgtttctgcaaccgtcccttctggaaaaaagcaaggacattaccgaggatgtgttgctgtaagagcgacaggtaattttaatattcaaactccatgtggagtgattcaaggaattcacgccaaacactgcgtccttacgcagcgtatggatggctattcatacatacatttaaaagaggagcggcacttcctccccggcctaaaggccggagtttccgtgccgtcaagaggatga

SEQ ID NO: 561 - DNA, 278 bp, unidentified
  misc_feature 1..278: note = Ga0206225_1000096 JGI
  source 1..278: mol_type = other DNA
gtcaaccacccctccctaaagggaggagcttgaaaagaaattaacaagctcgaagttgaccagccttaactttagagaaatctaaagctacgttaggagcgaatatataggtaccgtgggatgcttctccagtcccacgctctacggtaagtggttaaacaggcgtacgggttaaaccagtgctgcttacacacaaaccgctccataacattggcgaggagaccattacccgggaaaccggagcgcgggtaaccgcaaaaggtattttttaaatgagt

SEQ ID NO: 562 - DNA, 1281 bp, unidentified
  misc_feature 1..1281: note = Ga0335049_0000303 JGI
  source 1..1281: mol_type = other DNA
atgtcaaaagtgtttgttttagataccaacaaaaaacctctagatcctgttcatcctggacaagctagaaggctattgaatcaaggaaaagcagcaatctttcgtcgctatccttttactatcattctgaaaatggaggttaatagtgatgtaaatccactccggttaaaaatcgaccctggtgcaaaaacaactggattagttgtagttaacgaccaaacaggagaagtaatttgggctgctgaattaacccataggggttttgctattagagaatctttaagcagtcgtcgtcaattaagacgaagccgaagaaaccgcaaaactcggtatcgccaacctcgttttcataatagaaagcgaggacagaaatggttgccacctagcttaatgtcacgaatttacaatatcttgacttgggtgaaaaagctgaaggagattgttcctattatggctatctctcaagagttagtaaggtttgatacccaagctattcagaaccctgaaataagtggaactgaatatcaacaaggggagttagcgggctacgaggttagagagtatcttttagaaaagtttaatcgacaatgtatctattgtggtgttaaagatactagattagagattgaacatttaacccctcgttcaaagggcggtagcaatcgagtttctaatttaggaattgcctgttcaaaatgcaatcagaaaaaagggaacaaagatgttatcgagttccttaaagggaaacaagatttagctaaaaagatattagcaagagcaaaaaaaacgtcttctgatgctgctgctgttaatgtgacaagatgggaattgtttaatcaattaaagcacttgggtttacctgtagaggtaggaagtggtggtttaactaagtttaatcgttgtcgtcagaatcttgataagactcattggcttgatgcagcttgtgtaggaaagtcaacacccaaattaattatcaaaggaattaagcctttattgataattgctacaggtcatggttcgagacaatcttgtagaacggacaaatacggttttccttctagatatgtgcctagaaacaaatttgttaaaggttttcaaacaggagatattgtcaaagcctttgtgacatcaggcaagaaaattggagtatatacagggcgtgtagctgtacgttctagtggtagttttaatatctcaacagctaaaggtctaattcagggaattagtcataaatattgtactcatattcacaaaaaagatggctattcgtatgcaacatag

SEQ ID NO: 563 - DNA, 251 bp, unidentified
  misc_feature 1..251: note = Ga0335049_0000303 JGI
  source 1..251: mol_type = other DNA
gtcaacaacccaccgctaaagcgggggcttgaaaaagctctagttgaccagactaaggtagcaatacctacgttagtggcaagcgttaaagttcttaccttcagatgcgtagctagtctgaagctctaaaactcaaaggttaaacaggtctaaagggttaagccagtgcttttgggatagtaccgaccactaacattgtcgaagctcacatcaccctagaaataggagactccccaagagttatgtcaaaa

SEQ ID NO: 564 - DNA, 1275 bp, Moorena sp.
  source 1..1275: mol_type = other DNA
atgcaaaattatgttttcgttattgaccaaaacaaacaaccactcaatccagtttctccagcacgagcaagagagttactcacaaaacaaaaagctgctgtatatcgggtttacccgtttgtaatcattctgaaacacgtggttgataacccccagagcaagccattaactatcaagctcgaccccggtagtcgattcacgggtattgcaattttggatcaagacaaggttgtttgggcggcagaactggaacatagaggctggcaaattaagaatgctttagaatcaagacgctctttacgtcgcagccgtcgtaatcgcaaaactcggtatcgccaaccacgtttcaataaccgcaagcgcaaagagggatggcttgctccatcgttgatgcatcgtgtcctgacgattgagacatgggtaaaacggctttgcttgtattctcctatcactcaaatagcgatggagttgattaagttcgatactcaaaaaatgcaaaacccagaaattgatggtgttgagtatcaacaaggggaactcgctggttatgaggtgcgagaatacttgcttgaaaagtggggcaggaagtgcgcttactgtgatcatgctggtgtacccctccaagttgagcatattcaccctagagcaaaaggaggtagcaacagagtcagtaatctaactttgtcatgcgaacgatgtaacaccaaaaaaggaactaagtctataggcgagtttctcaaaaagaatggttctaggttagaaaaaattcaacgacaagccaagcaaccattaaaagatgcagccgcagtcaatgcaactcgttgggaattatttcgcaccttaaaaaacatcctacccaccacaacgggaacgggtggacaaacgaaatataaccgaacaaggcttgaactacccaagcaacattggattgatgcagcttgtgttggagaagttaataatttaaatctgttaacccaacagccactgaagattaaatgtactggttggggaactcgtcaaatgtgcggcactgataagtatgggtttccgacccgtcacagagaacgcaaacaaattcactttggtttcaaaactggcgacattgcaaaagctgttgtcacttttgggaagaaggttggtacatatattggtcgcgtgttatgccgcaagactggcagctttgacattgcaaccattagtggtcgtgttgcaggtattagccacagattttgtatatcaattcacaaaaaggacggctattcgtatggattttag

SEQ ID NO: 565 - DNA, 242 bp, Moorena sp.
  source 1..242: mol_type = other DNA
tcgttaaatgccaaccccatgcctaaaggcaaggggcttgtcggttgactcacctgaccagactactcgtttagggcaagagttaaagacctacttcaggatgcttgctagtcctgaaccctagaaccgaacgattaaacaggcttacagagaataaaccagtgtcgcgcgtgatagtaccgaccctaaacattgtcgaagcaaactttacccgcaaggagtatgcagtaatgcaaaattat

SEQ ID NO: 566 - DNA, 1458 bp, unidentified
  misc_feature 1..1458: note = Ga0120161_1001269 JGI
  source 1..1458: mol_type = other DNA
gtgccggacggtttccggtgttttcaggaaaggtgcattttgtcggtgttcgttctggatcagaaactgcgccctttgatgccgtgcagggaaaagcgggcgcgcaagctgctcgctgctggccgcgcgcgcattcatcggctgtatccgttctgtattcggatcgttgaccgcgcgcttgaagattccgtgttgcagcctctggtcattaagattgatccaggcagtaaagtcactggcttggcagtttgtcggatatctgaagcagttgacgatgatggtgtcgtcgctcccgtcatgcatatccagttcttgatggaactgttgcatcgcggacagacaatcaaacaatccctacatgcacgcagcagcatgcgtcggcggcggcgtggcaacctgcgttatcgtcaaccgcgctttgataatcggacacgtcaaacagggtggttgccgccctcgctgctccatcgcgtgctgacgatagaaacgtgggtcaatcgcatcagaaacatggcaccgatcacacagatcgcgcaagagttagtgcggttcgatatgcaaaagatgcaaaaccctgaaattgccggtatcgaataccagcaaggcacgctcgcaggctacgagctgcgcgaatacctgcttgaaaagtggaaccgtgagtgttcttattgcggtgcaaaggaccttcctttgcagatggaacatatcgttgctaaagcgaatggcggtagcaaccgtgcctcgaatttgtgcctgggctgtgaatcttgcaaccagaagaagggcgcaaaggatatccgcgccttcctcaaaaatgacccgattcgattggcgcaaattttgaaacatgcaaagatgtccctacgcgatgcggctgcagttaacgccacccggaacgctctactgaaagtattgaaggcaactgacttgccggttgaaaccggcactggtggccgcacgaaatggaatcgcagtcggcttggcatcgtcaaaacccatgctcttgacgcagcttgtgtgggtgttgttgccgatgtagttagcatcaatgcgcctgcattacaaattacgtgcatgggccgcggaacccacagcagaactcttttagaccagtatggtttcccgcgcactacgctgccccgaacaaaaactttctttggcttcaagactggcgatatgatcactgctgaagtcaccaaaggcaaaagaattggctcccataaaggccgcgtcgcggtacggtcctctggatacttcaacatccagtctggtatcaaaggcatgaaagcagttcaaggcattcctcataaggattgccgtatcgcgcaacgcgccgatggatataactatttgtggaagtcggtttctgaccaaccaaaggcaaaggcatcgactgctgtgcagtcggctccttgcctcaccgccctgaaggacggtgtatctcggagcatattctga

SEQ ID NO: 567 - DNA, 397 bp, unidentified
  misc_feature 1..397: note = Ga0120161_1001269 JGI
  source 1..397: mol_type = other DNA
gtcaactaccccgccctaaaaagacggagcttgaaaggcgaaagcctcgatagttcaggttgaccagggttagtgataatcggcgcaagctgatgttcactccgttgtaagtaggtacaaaaccaacgccgggacgcttcaccaatcccggatagaagtgcgaaagcatttcggttgaagttgcgatcgcagacaagcgacagggcaaggcacgaaacggatcgcaaccgggtagcaaagcaccgctgcttaaaaccggcttacaacattcccgaggtgagcggtattgtcaatctatcggcggtacccgtcactaggcgcgtaagcgcattgcgccgtgaggcgtcttgccgtgccggacggtttccggtgttttcaggaaaggtgcattttgtcg

SEQ ID NO: 568 - DNA, 1275 bp, unidentified
  misc_feature 1..1275: note = Cyanothece sp. PCC 7822
  source 1..1275: mol_type = other DNA
atgtcaaattttgtatttgttctagatgcgaagaaaaaccctcttagtccctgtcatccatcagtagctagaaaacttctcaagcagggcaaagctgcggttttaaggcgttatccttttactataattttgaaaaaagaatgccaaaaacccacagaaactatcaaactaaagctagaccctggaagcaagacgactgggattgcattagttcaacaagacaagcttatttggggagcagaattaattcacagaggacaacagattaaagataatttgttaactcgaagacaaattcgtcgtagccgtagaaaccgaaaaacccgatatcggcaagcgcgatttctaaatcgtactcgacttaaaggttggcttcctcccagtctccgacatcgtgtagaaacgaccatgacctgggtaaaacgtatttgcaaatttgttcatgttactaatatttcggtagaacttgttaaatttgatactcaagctttagataaccccgaaatatcaggtaaagaataccaacaaggagaactttttggatatgagattcgagaatatttacttgaaaaatgggggagacgatgcgtttactgtggtattaaagatgtaccgttagaagttgaacatattctagcaaaatcaaaaggaggatcagacagatgttcaaatttaactatttcttgtagaatttgtaatcaattgaaagggaatcaagatattaaagatttcttatctaaccaacctagtttactagaaaagattctaaaacaatctaagcaatcccttaagaatgtcgctgctgttaacacaactcgttgggcattatttaacaagctgaaagaaacaggattatcaattgaaacaggaacaggaggtagaactaaatataacagatgtagattaaatctagaaaaaagacattttatagatgcgggatgtgtcggaaatcttgaaagcttaaaactattaacaaggcaaccattgttaattaaagcgacaggacacggaaatagacagatgtgcggaatcaataaatacggttttcctattcgacatcggtctagaaacaaattttacaaaggatttcaaactggagctcaagtaaaagcagtagttacaaaaggaaaaaaagttggtgtttatttaggtcgagttttatgtcgagcttcgggccgcttcgacatagcatcccatcaaggcagaacaacaggaattacctataaattttgcacagctattcaaaaaaaagatggatataactatgagttttaa

SEQ ID NO: 569 - DNA, 266 bp, unidentified
  misc_feature 1..266: note = Cyanothece sp. PCC 7822
  source 1..266: mol_type = other DNA
gtcagcaccccgcattgaaattgcggggctaggctacgcctcgctgcgcgtccatgcccccagtttcagttagttgaccagcctaagtcttaaatgactacgtttttcaggtcataatacctacaaatacgttgctagtttgtagctctattgttaacaattaaacagttttacgaggggtaagacagtgttgttaacccaacaagccttaaaaacattggcgaagcgaactttacccgaaaggagagacagaaatgtcaaatttt

SEQ ID NO: 570 - DNA, 789 bp, unidentified
  misc_feature 1..789: note = Ga0193910_10667 JGI
  source 1..789: mol_type = other DNA
atgaaagtctatgtcattaacaaagacggtcgtcaattaatgccttgccgtcccgcaaaggcaagaaagctactgcgtgatgaaaaggccaagtcagtgaaacgactaccgtttacgattcaactgaaatgggactgcgaagagaatattcagaaaataaccgttggcattgataaaggtagccatacgacgggttattgtgccatagccaatggtgaaatcttaatgtcaggctatatcaaccatagaacagatgttaaaaagaagatgcaaggacgtgctgctaatcgcagacaaagaagatcaaggttgtggtatagaaaggcacggtttgataatcgcgaagccgcaaagcgtgcttttaggttgcccgtctcaatcaaaaccaatgtagaagaggttataagaacgataaacaaattacctttaccgattaaagtggttattatagaagatgtgcaaattgatattgcgaaactgaatgatgccaaactaaatggtaaatattatcaacaatcaaaccgactgcatgaaaatctcagactggtttcgaggtttaagttttttgaagaaaaacttaaacctcgaaagttgattcgagatcatttcacctgccagtattgcaaggcaaagcagacaccacttgaagcacaccacatccattatcgaaaaaatggcggttccgagacgattaaaaatctgataacggtttgttcgaattgtcatgacgggattcatgatggaacaatcacactcaaaaagaaaggggtggatggctttaaagatcag

SEQ ID NO: 571 - DNA, 241 bp, unidentified
  misc_feature 1..241: note = Ga0193910_10667 JGI
  source 1..241: mol_type = other DNA
attataatagttacctaaccaatggtatttaatggtattgtatggaactaacaggcggctaataattagcagaagttagataggttataacacctttaaatgttcaatccagtttgaagccctgttgtttatctttaagggtagtggaaacacgaaagtgagataagcgcaaaaagcctttttaacaacgccaaggattacttcactcttaaccgagggcctaaagccactatttatgaaa

SEQ ID NO: 572 - DNA, 968 bp, unidentified
  misc_feature 1..968: note = Bacillus sp. AFS014408
  source 1..968: mol_type = other DNA
atgcgtgtatttgtcaagaatgtaagaggagaaccgctcatgccttgcagtaatcgcaaggcacggcttcttctcaaacaaggaaaagcaaaaattgtgaagtacacaccatttacgattcaactcctatatgccaccggtgaaacggtgcaacccgttacaattggcgttgatagcggagcaaagcatatcggtattgcgattactactgcagataaagtgctagcaaaaggaaccacccagctgcgtcaagacgtcaaagaaaatcttatactaagagctacattacgcagaggtagaagacaacgaaaaacaagatatcgagaagtacgttttctcaaccgaaaaaagaaagaaggatggttaccgccatcgattcaaagcagagtggataaccaaattcattggattgaaacatttcgctcgttattaccatctccaaaagtgattgttgaagtaggggaatttgatgcacaaaagctaaaaaaccccaatatacaaggaacagaatatcaacaaggagatacttttggcttttggaatacgagatactacgtatttgcgagagacaactacacctgtcaaatttgtaagaaaaaaggtggtattttgcatacgcatcatatcattgaacgatgcaatggcggttcgaatatggcagataatcttgtaaccgtgcatgatgaatgtcatcaaaaacttcatcaagggaacatcaaacacagtttcaagaaagtcaaacaatataaagaaactgcttttatgaatatattgcggctgcaaatcatgaatcgtttagattgtgacattacgtatggtagctacaccacaccaaagagaaaagaacttggattagccaaaacacatgcaaatgatgccattgcgattaccaatcccatacaactacaagaatacgatcaaagcggtgaattttgcatcaagcaatttagaaagaaaaaacgctccct

SEQ ID NO: 573 - DNA, 265 bp, unidentified
  misc_feature 1..265: note = Bacillus sp. AFS014408
  source 1..265: mol_type = other DNA
gtcaactacccaccgcttaaacgctaacacgttttgaagtgggggcttgtaaaaagctctggttgtctagcctcagtctttcgtggactccgttcgtaggttgcatacccaagaatgattccctagttcttggctctatggtggctctgtaacagttctgattgggaaggaacggtcaaccacatgccttcttgcatgagaagttgcctacacctacaaacattggcgaagggaaacaaactcttaggagggacaaaacatgcgt

SEQ ID NO: 574 - DNA, 1227 bp, unidentified
  misc_feature 1..1227: note = Ga0315282_10014819 JGI
  source 1..1227: mol_type = other DNA
atgcaaaaggtgactagactaagtccttcgaggcctacgtgtatcgggctacaagaacggcaagatgcctccctagtcttgccctcttcggaagaaccactaaattccacgctcccacaaagggaactaagcctgatgcacattgtcgaagggaaacacgacttggaaaagaccgtaatcggtagagttccagtagtgtcagcagatggaacacctttgatgccctgtaaaccatccaaagcaagaaaactacttgaaaacggaaaagcaacaaaacaatggaacaaactaagcatattctacctgcaactacacttcaaccctaagaaaccgtcaactcaaccattagcattgggcgttgactgtggaagcaagtctgaaggcttttctgtcgtcggcacaaaagacactgtgctaaacatcatgtccaaagcaacaacatgggtcaaaaaagcagttgagcaaagaagacaaatgcgaaagacaagacgcaacagaaaaaccagacgacgtgaatgcaggttcaacaatcggttagcccaccaaaaatatattcccccttcaacaagagcaaggtgggacacgaaattgcgtgtaattcgccagttggagaaaattttgccaattcaaacagtagtcgttgaagacgtcaaagccgtaacccgaaagaacggaaaacgatggaacaacagtttttcgccaatagaagttggcaaacaatacttctatgcccagataaacaaactcgtcgtaaaatcaggtgtagaaacgaaaatgctgcgagagcaatctatgttgaagaaacttgaggataagagcaaacctgtttttgaaacccactgcgttgatgcttgggtgcttgcggcttcagagacgggtgccaagcagcctacaacaagaagcctttattatcttgttccgctgcgttggcacagacgacaattgcacaggttgcagccagagaaaggcggaagaagaaaaccttacggcggaacatgctcgcttggactaaaacgcggaaccttagttaaacatcgaaaacacggtttctgttacgtcggcggaaacctaaacggtaaactcagcctgcacagcgtcaaaacgggtgaacgcctgaccaaatgtgcaaaaaaagaagagtgcaaaatcttgactaaaatttcgtttcgaactcaaacccaatttccccctcctacaagcaggagggtacccttggaggctttttga

SEQ ID NO: 575 - DNA, 338 bp, unidentified
  misc_feature 1..338: note = Ga0315282_10014819 JGI
  source 1..338: mol_type = other DNA
gtgtattccaccggaaactcgaagggcaagagaaatcatgacgagccccattgttgccattgaccaaaacgctagcgtgaaggaagcaacacaaataatggtccaccgaaaaataaagaaactaatcgtggtggaccaaggaaaactagttggcataatcacacacaccgacatcattagcaaaatgccaaacatgatgtccacgctggaagcactgttacgaccgcaaaagacgtattgagctccactgcaaagccttgaaagcatttaagtggctacgcaataacatattaggagcaactgtgaacttgtcaactaccactcaacaagttgagtgg

SEQ ID NO: 576 - DNA, 1392 bp, Chlamydia sp.
  source 1..1392: mol_type = other DNA
atgcagaagttagtcggaagagatacatacacacctacggatactccactagtccgtagcaactgtgatctgtcattaaacagagaggaaactctcagtgtgtcagatttaaaaactccttctaacaaccccgaagtggataactctagcatacaggaggccatagcggcatatgtgtatgtgatttcaaagaatggaaaagctttgatgccttgctctaaggccaaagctagaaaattattaaaggaggaaaaggctctgattgtttgccacaaaccatttactattaaactggttttcaaatgcgaaaatcaagttcaaaaaatcactttaggtattgatccaagatatgaaaatattggtttatcagctatttcagaaaaaggagaattattctcagctgaggcaaaattaagaaacaatatttctaacttattagcaaagaaaaaaagctatcgtagaaatagaagaaacaaactctggtataggaaaccaagatttttaaatagaaaaaaaactaaaaatttacctcccagtttagagcataagctagattcacatcttaggatggtaaaaaaggttctctcttttattcctatttcaaaaatcaatatagaagtagctaattttgacattcaaaagattaaaaatcctcaaatagaaagctttcaatatcaaagaggagatttgtatggatatcaaaatttaaaagcatatcttgtagagcgcgagatggcaaaatgccagctttgctctaaaaaatcaactaaaggcaattcttttaggattcatcacattattccaagaaatgagggaggaacgaacaagactaataacctatcgttgctacatgaaaaatgccatgataagttacactccaaaaatctacttcatattttaaaaaagaataggcagtttaaacctgagacttttatgtcttcaattcgttggaaactagtttctgaattgaaaaaactttgcagcgatactgtcctatcttttggatatataacaaaaattaaaagaaattctctcaagctcgaaaaagaccatcatacggatgcatttgtgattgcgaatggaagctcagaaaaaagagctcaaccttctttgtttttgcaaaaaagaaaaaataatcgctctctacaattaaatagaaagggcttaaaattatcgattagacgacaaagatataagattcagccaaaagatgaagtgcaagtgaaaaacaaaaaatatgcagttataggcatttttaacaaaggtagttggttaagagttagagacaaagctaaaacatttaattttcagatttcgagagttgaaaaacatttttataataacggctggcaattcattcattccctaaaagaaagggttttcttgccataa

SEQ ID NO: 577 - DNA, 258 bp, Chlamydia sp.
  source 1..258: mol_type = other DNA
gtcaatcacctctccctaaaggaagtggcttgaaccgtgaggatcaggggtaactggttgattagggggcaaaaaggaaactttatgcagaagttagtcggaagagatacatacacacctacggatactccactagtccgtagcaactgtgatctgtcattaaacagagaggaaactctcagtgtgtcagatttaaaaactccttctaacaaccccgaagtggataactctagcatacaggaggccatagcggcatat

SEQ ID NO: 578 - DNA, 1647 bp, unidentified
  misc_feature 1..1647: note = Ga0223845_11964739 JGI
  source 1..1647: mol_type = other DNA
atggaatacaaagaatatgtatatgtaattgataaaaatgatatgccgtgcaatccgatcactcatggaaaagccagatatttattaaacaataatatggctgttataaaaaaccatgatccatttgttatcaaacgaactgatgattatttaaggggttttgaggttgataatcattatgtcttaaaaattgacatgggatataagcatattggattttcaataacttctgaatatgatgaggtaatttgtgggcaagttgaattgttggaaggaatgtctaaaagattagcggaaagggcaagatatagaagagggcgcagaaatagactcaggcataggcgtaataagaacatagatattaaaacaattaagaatccaaattacaaaaatggcaatgaagacggctggttcgcaccgtcaataagacataaaatggatactcataccagacttgttgataaattgagggcgtggattcctattgaccgtattgaattagaagtttcaaactttgatattcagcagatgaaagcagatctgaaagattatgagatgcatggtactgattatcaaaatggtgaaatgaaaggatatgataatgtaaaattatatattaaagagcgtgacaaatacacatgccagtgttgtaagaaaaaaacaacatctggggaagtacaccatattattccaagaagttggggtggaagtaatcgcccaggaaatcttatatacctatgtgtagaatgtcactccaaatgtcataggaataataatgataatgacttatttagggatatccaagaaaagagagtcgatggtgattttaaagaagcgactttcatgaatgctgttcgctgggcaatttacgatgctttaggagagcatttcgatgtagatgcatattttggatacgaaacaaatagaaatcgcaatgcagctaatttgccaaaatttcatcacaacgatgcagtgtgtattaattcatttaataatacttctctttcaaaatcattatatatcattaaacaatcaagatgtaataataggtcgatgaaagatttttttgatgcaaaatatattgatagtagaactggcaaagtagcaagcgggaacgatttaaaaaaaatacacaaagagggtaggcttaagagatctactagaaaagaagatataaataatttaagggtttttagacaagaaaaagtcaagtctggaaatgaacgcaattcttgccatagttattgtttaaagcctggcgatttaattaggatcattaaagataataagataatcgaagtaaatactatgcaaaaaaggaataatggttttataattgtatgcgataatccagatgaggatgcaactagcgaacagttaacattctctataaaatcagacgaatacgaaaaattaaaaactacagggaagtgtaatcgcatagagattgttagaacaaggcgtggtttaatttggtacaggtatgatcgtgttgaatttgaagaaaaacatgtggatcagtatcatattaaagaagtagatgcagcagaaaaagcagctagatcaaaagaaatcaaagcaagaaaagaacagaaaaagaaagaaaaagatgcattgagagaatccaatgaaaccgctctttcgtaa

SEQ ID NO: 579 - DNA, 316 bp, unidentified
  misc_feature 1..316: note = Ga0223845_11964739 JGI
  source 1..316: mol_type = other DNA
ctaaaacctcaattccaaaacaattttagaacattataaaattatgtggcaaaccaaaaatagattaagagaagttcttatttgaacaatatctacgttattatgagataatatattattgtgtaactctagcaataaacatatcgcaaaagtttaaacatccaaagccatacaatattaatggaagtgactgagcagtaatgaattgaatttattacaagactcgtaataacattatcgaagagtatgaccgctatttagcgagatttatttattaaatattaaaaaggaaataaatatggaatacaaagaatat

SEQ ID NO: 580 - DNA, 1074 bp, unidentified
  misc_feature 1..1074: note = Ga0376681_0131425 JGI
  source 1..1074: mol_type = other DNA
atgtttgtaccagtcatagatcaggaccagcatccactgatgccaacgaccccagcacgtgcacagcgttggatcaagagtggcaaagccacggctttctggaaaggtgggatcttctgtgtacggctcaacgttgatccatcggcccacgtcctgcaacccatcgccataggaattgatcctggaagcaagcgtgagggctatagtgtcatttcagcctcgcatacctacctgaatatccaagccgaagccagggatggcgtcaaggatgcagaaaaggactcgaccaggatgcgtcggacgcgccggaatcgcaaaacgccctgccgccagccacgccagaatcgcaagcagagcaagcagaagcttcccccttcgaccagagctagatggcagtggaaacttcggttggctcgcttcttgaaccagatttttccggtgagtgcctttgtggtggaagatgttgctgccgtgacgaagaaaggcaaacgacgctggaacagcagctttgctcccctggaagtcggcaagcactggttctatgaagaacttaggaaacttgcacctgtagcaatcaaaccggggtatgaaaccaaagtcttgcgtgagcagttaggcttcaaaaagaccggcaagaaattggccgaagtgtgggaagcccattgcgttgatgcctggatactggcttatagcgccattggcggcaagacgacccctgataatcagcgactggtctgcatggtgccgctcaactggcatcaccggcaactccatcgcttcaaaccggagaaagggggcaagcgaaagccctacggtggtacactctcgcaaggcatcaagcggggaacgctggtcacccatccaaggtggggaaaggcgacagttgggggcactatggacggcaagctcagtttgcacgatcctcatacgaacaagcgactgacgcaaacggcgaaagtcatcgattgcctgcccatcaagttgttacgctggaggacgcggctcgtgcctcctgcgctgatccccgcgtcccctgccccaaaaagggaagacttgcttcctccccggcttgaa

SEQ ID NO: 581 - DNA, 240 bp, unidentified
  misc_feature 1..240: note = Ga0376681_0131425 JGI
  source 1..240: mol_type = other DNA
gtcaagcacccccgcatcgaatgcgggggcttgtgaagcgaaccgacttgccatcggggaaccaacgagggcaactgcgagactagcttgtccaagctccggcaccggggcgattgaaggaagctgaatcacctgggcatggcagcctatagaacgagcgagacgcctccctaatcccgctcctcttcagtggtcagcagcgaagggaacatattcacccgcaaggggcttatcgcacat

SEQ ID NO: 582 - DNA, 1515 bp, unidentified
  misc_feature 1..1515: note = Ga0315902_10061306 JGI
  source 1..1515: mol_type = other DNA
atgcctacgcacaaacataagtccaagacctaccagcagatgcttcctcagtctgctgctctagaatcgttgccgatttccacgaaagtggataaggcaacgaagacggctggtgctgtgcattgtcgaggggagagcccttgcctaaaccgcaaggggcgttaccacctggcaacaggtgagactgagtcggtaacggctcccagcatcttcgtgctggccaaatcgaagacacccctcatgccctgccatccagcacgggctagagaactaataggaaacggcaaagccgtgatctatcgccaccaacccttcgtcattcggcttaccgctagaaccgaaggcaatgtgcaaccgatccagctcaagcttgatcccggcgcgaaaacgacgggcatcagcgtagtggtaaccgctaccgcgtccagcaaattggacaaagtagttcgacacattgagctgaatcaccgcaaagaaaacgtgaagaagcggatggcgcaacgcaaaacgtttcgccgccgtcgccgcaccgcaaacctgcgttgccgcaaagctcggtttctcaatcgcggtaaaattgggaagatcgcaccatcgatcaaatcaaccctcgaccaaactcggggatggatcaatcggctacgccgctgggcacccatcacttcgatcgtgattgaaaccgctcgattcgatgctcagaaaattcagaaccctgaaatttctggcgtcgaataccaacaaggaacgttggctggcttcgaagtcaaagaatacctcctcgataagtggtgcagaaaatgcgcttactgtggggataaaaacaccccactcgaaatcgagcatatcgtcccgaaatccaaaggtggatcagatcgagtcagcaacctcacccttgcctgcactccgtgcaatttggcaaaaggaaatatggatgttgccgatttacttgcgggcaaacccgcccggctcaaagccattctggctaccgccaaaaagccgttggcgtcatgtgccaccatgaacatccttaaacctaggttgatgcaaatggctcacgaaactggcttgcccgtgacaactgccacaggcagcatgaccaaattcaaccgcaaacaatttggtattcccaaaactcatgcgcttgatgccgcattctgcgggccaatggaaaaaagtttgaaagggtggaaccaatccatcctacaaatcaccgcgacaggacgtggttcgtatcaacgcactcgcaccgacaaattcggatttccaaggctacgcctgccacgaaccaaatctgtccgcggctttcaaaccggcgacctcgtcttaactcccaaaggaaatggtcgcatcgctacccgctcctcgggatactttgcgctcgcaacggttgatggcagcaaagccaccatcaaccactcaaactgccgcctgctccaaagagccgacggctaccaataccaacaaacaaacaaaatcatctcgcagcaagctgcggggtttctaccctaccgttaa

SEQ ID NO: 583 - DNA, 224 bp, unidentified
  misc_feature 1..224: note = Ga0315902_10061306 JGI
  source 1..224: mol_type = other DNA
gtaaaatacccctaggcaagcctaggggcgtttttccagactaagacatagcaatatgcctacgcacaaacataagtccaagacctaccagcagatgcttcctcagtctgctgctctagaatcgttgccgatttccacgaaagtggataaggcaacgaagacggctggtgctgtgcattgtcgaggggagagcccttgcctaaaccgcaaggggcgttaccacc

SEQ ID NO: 584 - DNA, 1356 bp, unidentified
  misc_feature 1..1356: note = GENOME_ACESSION: mgm4527699.3 MG-RAST
  source 1..1356: mol_type = other DNA
atgcagaagttatcagaagagttaaagaacacaccaaaggatacttcccaagtcctttgctctgtaaaccatcaattaaacaaagaggaaactcttagtgttgatagtatagtactgtctgataacaatcccgatgggaatcaacccgagtcaaatcggaaacagaacacgagtgtatctgtttatgtcttaaaccaaagagttgaaccgttaatgccttgctcaccaagaaagacaaaagttttgttgaaacaaagaaaagcaaaagtagttaaaagaagtccgtttacaattcaattaactattgctacaggagaaacaaaacaagaagtaattttaggagtagatacaggttattcaaatgtaggggtatcagctattacagaaaagaaagaattattatcagcaacattcaagttaagaacgaatatttcagacttattaaaagaacgctctatgcacaggagaggtagaagaaataggctttggtatagagaaccgagatggaaaaatagagccaacgcaagaaaagaaggaagattaatgccttcaattctacataaagttaatactcatatttctattattgagaagattaaaaagttattacctatttcaaaagtagtattagaaacaggattatttgatatgcaaaaaatggagaatgacaagattaaaaattatcagtaccaaaaaggcgagatgtttgggtttgaaaatgtaaagtcttatgttctttcaagagacaatcataagtgctattttaaatgcaaggattcttctaaaattgaagtacaccatattaaattcagaagtcagggcggtacagataatccgaataatttgattactttatgtgaaaaatgtcataagaaagttcatctatgtgaattggagttaaacattaaaaagcataaagaattaaaatctaccacagcaatgaatgttataaggaaaagattgttagaattttatacagaagcagaagaaacatttggttatgagacaaaagttaaaagaagagaaattgatttagaaaaatctcattctaatgatgcttttgtaatcgcaaatggaactaatcaaattagaagtaaagagtttgaaataattcagaaaagaagaaacaataggtgtcttcagttaaaccgtaaaggatacaaaccttctataaagaaagaaaggtcaaaaatacaacccttcgatttgttttgggttaaaggaaaacaatacgtatgtaaggggatgttcaactatggtaaatatatttgttatggtagtactaaattaaaagagtattttaaaatagagctattagagaagcattataatcaaggtggtttagtatggaattaa

SEQ ID NO: 585 - DNA, 270 bp, unidentified
  misc_feature 1..270: note = GENOME_ACESSION: mgm4527699.3 MG-RAST
  source 1..270: mol_type = other DNA
gtcaactaccacgccttaaaggacgtggcttgtaaggtaacttacaacgtaagagttgattagggagcttaaaattttaaaagaggttttatgcagaagttatcagaagagttaaagaacacaccaaaggatacttcccaagtcctttgctctgtaaaccatcaattaaacaaagaggaaactcttagtgttgatagtatagtactgtctgataacaatcccgatgggaatcaacccgagtcaaatcggaaacagaacacgagtgtatct

SEQ ID NO: 586 - DNA, 849 bp, unidentified
  misc_feature 1..849: note = Ga0307377_10069547 JGI
  source 1..849: mol_type = other DNA
atgttagtatatgttaaaaactgtaaaggtgaacctcttatgccttgctctcctacaaaggctaagagactgttgaaaagtggtgaagctaaagtagttagtcgaatgccttttactattaaactattgtttggtagtagttcttacaaacaagaagtagtagctagtatggatactggttctaagtttattggatgtgcagctaaaagtaacggtaggattttgtaccagtcagaggtacagataagacaagacgtttctatgaaaatgaaacaaagactcatgtatagaagaacaagaagaagcagaaaacttagatatcgtaaacctagatggcaaaatagatcttcttcaagaagaaaaggaagattaccacctagcatcagaagtaaaattgattctcacctaagagagaaaaagtttattgaatctattttacctgtaactagatggatagtagaaactgctaagtttgatattcatgagataactaatcctgatgttaaaggaattggatatcaagaaggtagtcaaaagagtttttacaatgtaaaagcttatgttagacatagagacagttatatttgtcaacattgtaaaggaaaatcaaaagataaagtcttaatagttcatcatattacttctagacttataggcactgattctccagataatttaataactttatgtgttacttgtcatgacgattttcatgctggtaagattaagttaaatataaaaggaaaacgatctaaaactaaacatgctactgagataggaatagttaagtcacaattgaaaaagcaatggttaggttttgaggagacttttggttatgaaacaaaatat

SEQ ID NO: 587 - DNA, 300 bp, unidentified
  misc_feature 1..300: note = Ga0307377_10069547 JGI
  source 1..300: mol_type = other DNA
gtcaactaccctcccctaaagttttctttaaggagaacctatttattaggttaagttgaccagaccactaacaggagaataaaagttgttagtaaacgatacaaaagaaattagtcaccttgggatgccgtcccagttccaagctctgaggttacgaactaaacagttcttagggtacagaacagtgtttgtaacgataaaccttttgatatcaggtcgagggaaagttgaactctataattgctccaaaattatagatacacactactctgttttcagtcaggggtatactttatgtta

SEQ ID NO: 588 - DNA, 1317 bp, unidentified
  misc_feature 1..1317: note = Ga0223826_10002115 JGI
  source 1..1317: mol_type = other DNA
atgacaatttatgtcttagacatcacaggaaaaccgttaatgccgacacacaagcccggtaaagtcagacatatgctgaacgacggcagagcaatcatcgtcaactattatccgtttacgattaagttaacgtatgtaacaacaaactacgttcaaccagtaactctcggtgtagatgctggaagcgttcacgtcggtgtgagcgcttcgacagagaagaaagaactgtattccgctgagattgatttgaggagcaagcaaatgccgaaacttatagaaaaacgggcagcagcaagaggaatgcgacgttatcacttgcgctacagaaaaccaagattcaataatcgagtctcttcgaaaaaagaaggatggttggcgccatcattgaatcatcgtgtcaattctcatatcagaatcgtagagaatgtaatgaagattcttccaatcagcaaaatcatcgttgaagttggattgtttgatactcagaagatttccaatccggaaatctcaggagaagagtatcagaaaggacagatgtctggttctgacaatacgaaagcgtttgtcagattcagagacaagaacacttgtcagcagtgtggttcgaaagaacacattgaagttcatcatatccagcatcgagaagatgatggtccagacaggccagataacttaatttgtttatgtcacaaatgtcattatgaacatcacaacaatggtttggttctaaagaagttcaaaaatataaacaagaagaatgccgtttcattgcgtgatgcggcagcgatgaatcttatcaaagacaaggtattctctaaacttaaggaacgtcattcagatattgttatttggagaacgtatggttatgttacgaaacataacagaagaaaatataacattgataaatctcatgcgaatgatgcgtttgtgatttcgaagaatttcaacgctgaacctttggattatatgttcaggggatttcaaattagaaggcataacagaaagatacacaaagacactattcttaaaggtaacaaattgaaaaagaaccaatctgcacatttggtgttcggttttacacgatttgatagagtaagatatgatgggaaagaatgtttcatatacgcaagacgaacttctggatatttcgacttgagagatatagatggtagcaaaatacacgctactgctcctgtaaggaaaatcaaactaatcaaacatgagaatagtataataattaagaaaatcaaaaaggatagtgctgattcttctgctgacgctaaaggcgtcgcagtttcctcagcagatttaatatga

SEQ ID NO: 589 - DNA, 318 bp, unidentified
  misc_feature 1..318: note = Ga0223826_10002115 JGI
  source 1..318: mol_type = other DNA
gtcaccaaccggcgacactaaaaatgtcgcggcttggctcttaaatgagcggagtcgatggtgattagcctaagtgaaagagtttcaaactcttgaactacgttactgacgaaaacataggtaccaagggatgttagtcttagtcccttgctctacgtctgaatgttaaacagtcctgtccggtaggggcagtgcattcagaatacaaaaccgtcggataacattggcgcagggctgcattacagcgtcgctttagcgacgtctgcgttatcccttaattgggaataaaaattaatttcattaaaaacgactatgaca

SEQ ID NO: 590 - DNA, 1398 bp, unidentified
  misc_feature 1..1398: note = Fermentation metagenome
  source 1..1398: mol_type = other DNA
ttgacaaggaggacacatagcaatacatgtattgctaatttatttaataggagaaattctatgaaatgcatttatgtaattaatcaagacggtaagccactgatgcctactaaaagattaggcagggtgagtcgttggttaaaaagcggccaggcgcattggtataaaaaccgtcgtgataccattcaatttaatcgtaaaactactaattatgtccaagaagttattcaaggatgtgatcttggtgatcacttaggaatgtccgttatcactaacaatcaagaagtttatgccagtgaaagttactgtaatggtaagcaaacgcatcgactaatgcaaaaacgaaaagaactgcgtcgaacaagacgtaatcgtttacgtcatcgcaagccacgttttgataatcgcaaaaagaaaggatacgctccttcgattcaaagaaagctagattttcaaattaaagaaattaaacgcttagatgagtttttaccaatcactaaacgtgtttttgaaggctcgaccttcgatattaacaagatcactcatcatgctcagctgcaaaaaggttataaaactacgtttgattttttgtatgatcgggatcatggctgtgacgcgctagacggtaagcattatcctaagaaaaatatggttatccaccatttagtacagcgacataacggcggtacaaacaatcctgataaccttgttttattagcacgtaaaaatcatacgcaggtaaatcataaaaacggggttttagacaaattagctaaacagcgtcagaaaaaatataagaatgcggatactcgtggagcatatttcatgaatgtgctaggtaaggaattacctaagtattttgattttgtcccaacatatggctatatcactgctaaaaagcgtaagaagtacggtattgctaaaactcatcacgatgatgcctttgtaattgctggtggaactaatcaaacaaaacgttttgatacatgcttttatcgtgaaaaacagcgtctcaataatcgttctttagaaaaattttacgatgcgcaatatcgtgatttacgtactggtgaaaaagaaaaaggtgctgttttatcatcaggtagaacacgtcgttctttaaaagatccacgcaacaatcaacgtgttttccgtgctaacaaacttaaaaagggcagaagaacgattcgtaaacagcattatcaattgcgtcctaaagatttagttagttacaatgataaaatttatcgagtaaagggcatgcagaacaatggcacgcgtgttttattaattacttctgctaaagataaatcagtagccattaaaaacgtaaaatatctgtttcatattaacggtgtttatcaaacggaaaggagaactacggcattcatctcctga

SEQ ID NO: 591 - DNA, 319 bp, unidentified
  misc_feature 1..319: note = Fermentation metagenome
  source 1..319: mol_type = other DNA
gtcaaccactcctgactaaagtcaggagcttgtaattattacaagctcagttgattagtctaagcattaaattgctacgttactggcaaatgagttattaatcatgctacaacgagtcaaaacgttgcttagttgataactttaataggtaccttgaaacgctactccaatttcaagctctacggatacggtttaaacagagctgaagagtaaggctcagtgatcgtattagaaaaactgtcggataacattgacaaggaggacacatagcaatacatgtattgctaatttatttaataggagaaattctatgaaatgc

SEQ ID NO: 592 - DNA, 1485 bp, unidentified
  misc_feature 1..1485: note = Ga0117909_1085896 JGI
  source 1..1485: mol_type = other DNA
atgttagtccacattatttccaaggatggtaaggctttgatgccttgccatcctgctaaggcaagaaaattactcaaagaaggtaaggctaaacctgtcaaaggaaagactggatattttactattcaattgctctatggtagcagtggctataaacaagaagttgtggttggtatagatactggcgcaaaacgagtgccaatcgctgctgttggtaacggcaaagtgtattatgcaaaagagaagatactaaggacagatgtaaagaagcagttgtctgataggtcaagatacagacgcacaaggcgaagtcgtaagacacgttatcgtaaacccagattcttaaatcgggtaaagacaaaatgctccaggtgtggtgttaataacgtgcccaagcgttggaagagtgtcaagcgcaaaacaggtaagagcaaaaagaaggtatgtaatggtagggcgcaactttgtcggcagtgtctgggtaaaaaggggctacacgagaaaccgcatgtacttgccccatcagtattaaatcgtgctttgagtattctcaatgacattcacaagttatcttctacactccctatatccagggtagttattgagatagcatcatttgatacgcagaagatgacaaacgctttcatagacggcgtcgaatatcagcatgggacgctctttggctacgaagtcaagcaatatctcttgacagttcacaagcataagtgcgcttattgcggtggattgtctggcgataacatcttacaggttgagcatatatttccacaatctaaaggcggcaccgataaggtcaataatctaactatctcttgtggggtgtgtaacgaagctaaaggaagtatgacgttggaccagtgggagggagtgttgcgtgcttctccaagcgatataaacgagaagcgattgaagaacatacctggtattaatcgacagagcaagctaaagaagggattccagtacagcgcacttacacaaagctacaagaattatttgctaagtgaactacataaagatttcatagtggaagttacctttggcgcaaaaacaaagtataatcgaactcagttgggcttgtctaaatcgcaaatcaatgatgctctcgttatagcatcagaaggtaagccagtgaagatgccagggtggtacatccttgaaaaacaagtcaagaagcgttactcatatcactacatttctcccccaaagaagggacagccaattgttaagtgtaagagagacttagagatgttcggtttccggctatgggacaaggtagagtgtaatcatccaaagaacgggaatgtagtcggatatgttcaagggcgtagaagtagcggtagctttgccatcgcttctcttgatggggaattacttataggaggtatatcctacaagaagcttaccttgctaaagaaggcggggagtaattacgttagagaaaggagacggcaattcctccccgcctga

SEQ ID NO: 593 - DNA, 326 bp, unidentified
  misc_feature 1..326: note = Ga0117909_1085896 JGI
  source 1..326: mol_type = other DNA
gtcaataacccctcctgattcaaagaatcagaaggggcttgtagtggttatccctgcaagccctatattgacagcctaagttacttaggtagctacgttattctggttatcagaccccggggtgctccaccagctccgactatcattttgttgatcgcatggctctctgatggcgtctgatgcttcggtatcagacattgtaaacagtcctaagaggctctgggacagtcaaccataggacgacttagcattctaagcaagctggaataacattggcggggtggaatctaaccctatcttatataggagtgtgagacttcatgtta

SEQ ID NO: 594 - DNA, 1332 bp, unidentified
  misc_feature 1..1332: note = Ga0175859_1302585 JGI
  source 1..1332: mol_type = other DNA
atgaaagtttacgttatcaacaaacatggtcgtcccttaatgcccacaaccccaagaaacgcaagattgctgttaaaggaggggaaagcaaaaatttatggtcgtgacccttttactatccaattaatttacggttctagtggttacactcagccgggaaggctaggaattgatgctggttatgagcatattgggtatagtgtggttaacgaaaaagaagaattgattggtggggaaattgatatgttaaaaggcatgtcagcccgattaacggaacggtcaaaataccgtcgtcaaagaagaaataggaaacgtcaccgcgcaccaagatttgataatcgcaggcgtaaagaaggatggttggctcctagtattcagcacaagcttgatacccaccacaaaataatccaaaagattgtagatattgtgccagtcaagaaaaagataatagaggttgccagttttgatattcaaaaaatcaaagacactggtattgacggcattggatatcaacaaggcgaacagtacggttttgacaatgttcgtgaatatatacttcaccgtgacaagcacgaatgtcaaaatcccagatgtaagaacaagtcaactgagcctatcttacaggtgcatcatataggtttttggaaggaggacaggacggatagaccagcaaatctaattactctttgcgataagtgccatacaccaaagaatcacaagaagaatggttttttgtttggttgggaaccaaaacttaaatcctttaagggtgaaaccttcatgaccacagtcaggtggcgcttaagcaatgaaggggaatatgaatcaacttacggttacattaccaaaggagtaagaagagattttcagatagagaaatcacaccacaacgatgcctttgtgattgctggcggtactacccaaaaaaggattgagccattaattctagaacagattagacgaaataagcgttctctagaacagttttatgacgcgaaatatattgatactagagatggttcattaaaaacaggctcagatttgtcatctggtcgtataacccgtaataaaaacaagagtggtgaaaacttaagacgatttcgaggtcagaaaataaccgccggacaacgacgaattaagaagtctcgatatcgttaccaaccgcgagatttggtgaagtttgagaacaagccttatgaggtgattggaatgcaaaacttaggtactggtgttaagttaaaagactatccaggagtcaaaaacaaggttgtacaagtaaagtttgtccagccactaagaaggagatcgggtatctgtactaggcttggatag

SEQ ID NO: 595 - DNA, 302 bp, unidentified
  misc_feature 1..302: note = Ga0175859_1302585 JGI
  source 1..302: mol_type = other DNA
ctgtgacgactccacacaccgacgccctttggggtacggtgtgggcttctaagaaattagaggttcgtcattagcctcagtgactcctgatcgcaagagtcgctccgttttccagaatatataggcactccgaggatgcagggggtagcgccctgattcctagtcgcggatactgcggtcactgattaaacattcctactggcagagggttcgtgttggtgacaaaaaacctggacaaacattggcaaaggaaaccacgtcgaaagacgattctctcttaattagggatatcaataatgaaa

SEQ ID NO: 596 - DNA, 1140 bp, unidentified
  misc_feature 1..1140: note = Ga0394874_0000250 JGI
  source 1..1140: mol_type = other DNA
atgtctaattttgtcttagtcatagatgcccaaaaacagccccttaacccggttcatcccggtcaggcgcgccggttgttgaaagcaggaattgctgctgtatttcgcagatttccctttgtcatcattctcaaacaatcctgttcggttttgagcgcgctcaagactttagagttaaaaatcgctccgggatctacaaccactggattagccttgctgcaagacaaaaaagttgtatttgctgcacagttgacgcaccgtggacaagcgattagagctaaattagaaacgcggcgcaaccaacgcatgtcgcggagaagtcgccatactcgctaccgacagccgcgatttctaaaccgcacccgtcgtcaaggttggttagctcccagcttgcagcaccgcgtcgaaacaacgattacttgggtgaacaaacttatccgatttgcacccattggctcaattgttcaagagcttgtcaaattcgagctgcaaaaattagaaaaccctgagatttcagggattgaatatcagcaaggcgaattgcagggctacgaagtccgcgaatatatgctggcaaaatgggagcgaaaatgcgctgaatgcggtattgaaaatgtgccgttacaggttgaacacatccatcccaaatcaaaaggaggctctaatcgaatctcgaatctttgcctggcttgcgaaaagtgcaatatcaaaaaaggaactcaaagtattgagcaatttcttgccaaaaaaccggatgtactgaaacgagttttgtctcaagctaaatgtccccttaaggatgcagcggcggttaattcaacacgatggactttgttcaatcgattaaaagaaacgctgttaattacctctactggacgcggtacgcgccgcaggtgtcggatagacaagtttgggttcccttgttctaaaccccgccagaattacgatattggctggcagaccggcgatatcgcgatgactgtcaaagatggggtaaagtatgttggtaaggttgtcgtgcaatccgaaaaacggttggaagtaagaactggaaaattaagaatcggcggcacgcttgataaattcgtaaaattgcactcgcaagacgggtatcaatatgccaagattgactccacttaa

SEQ ID NO: 597 - DNA, 250 bp, unidentified
  misc_feature 1..250: note = Ga0394874_0000250 JGI
  source 1..250: mol_type = other DNA
agcaccaatttggagtaaatcgcagcaatctggtttatttcggctactccagaccgctgaattttgattcagcagccgttatcttcaagcgttaaagttcgcaccttgggattcgctagtcctgagcttctgcaagtccactgttaaacatcctcgattgggtaaaaaaaatgcagtggacaaagtaccgggagataacagggtcgaagcaaacattaccccgtaagggaggacttagatgtctaatttt

SEQ ID NO: 598 - DNA, 804 bp, unidentified
  misc_feature 1..804: note = Ga0007854_10018219 JGI
  source 1..804: mol_type = other DNA
atgcaaagagtttttgtattagataaaagtagacggcctttgatgccctgcacggcatctagagcaagaaagcttctttctcaaggaaaagctacaatgctcaaactccatccttttacgattcttattcaagatagagaaggaggcgaggtgcaaaatattgaagtaaaaatcgatcctggaagtaaaatttcaggaatggtacttattggacactttaaaaaaaggatgacagtcatatgggcagccaatcttgaacacagaggagctactattagatcctcgctagaatctagaagagctattagacgaagtcgaagacatagaaaaacccgttatcgagcagctcgatttaataatcgaaaacgtaaagaagtatggatagcaccttcattacaagctagagtggataacatttgtcattggatcaaaagactggaaaagttagctcctatttcttccattgcattagaaacggtacggtttgatatgcaaaaaatccaaaatcctgagattacaggagagctttaccaacaaggtgagcttatgggttacgagatccgagagtaccttcttgagaaatggggtcgcaaatgtgcctattgtagcggagaacatacaaggttagaaatcgatcatattgttcccaaaagcaaaggtggaactaacagagtctctaatctcaccattgtttgtagaacctgtaatgtaaaaaaagcaaatcatcctctcgaagaatttctccataaaaaatcagctctttgcgctaagattttatccaaagcagaaaagcctttggacaac

SEQ ID NO: 599 - DNA, 311 bp, unidentified
  misc_feature 1..311: note = Ga0007854_10018219 JGI
  source 1..311: mol_type = other DNA
gtcaactaccaccccctaaaggaggtggcttgaagaggtgactcttaaagcttggttgaccagactaagcatccatgtggatgctacgattacaataggtcgttaagacctaccttgggatgctactccagtcccaagctctagaagggtaagatcacgatgggtaaaggtaaagacccgaaggttttacttgccgaaagggagccggttgtaatcattgccctggaggacgttatccacaaagcgcttttgcgtaagtggagattgcacttacgtgctaaattttttttattttggaagatatgcaaaga

SEQ ID NO: 600 - DNA, 1356 bp, unidentified
  misc_feature 1..1356: note = Ga0209720_1000657 JGI
  source 1..1356: mol_type = other DNA
atgatacatcgttggattaaacaaggaaaagctaagtttaggaaacgtaacttagttcaagtatttaaacaattcgatccagcaaaaactataccagctaaatttgtagttggtatcgatcccggatacaaaaatattggttacgcagtttataagatttataataataaaattacagagctagtttcaggtgaagtagtcaccagaactagtgagattaaagagctattagatatcagacgaatgtttcgtagactcagacgctattatcgaagaaagaatgtcttaagaaaattcggtaaagttaagtttagagctccgcgatggaagaatcgtaagaagaaaccattcgctcctactcataatcatttgattcagagtcatttgaatcttctaactaggttatttaaattagttaactttacagaaattcatctagaatactctagctttgacactcagaaattacagaatcctaatattaagaactggcaatatcagaaaggtcctcagtttggatttgaaaatgttaaagcatatgtgagagctagagataattatcagtgccagaattgtggttctggagataacttaagagtacatcatatagtagagcgaagtaaaggtggcagtgacaggtctgacaatttaatcacagtttgtgagagctgtcacaatctgattcatcaaaatggattatcttctccagcgatttcaactgatattaaaatgagagatagcggagttctgaattcatgtctgaagaagctatatgaagttctagctgacagtataactactgttaaaacattcggttacatcactagtactcttcgaaagatctaccagttagagaaaagtcacgaaactgatgctaaattaatagctttatctgatgaaaatggattagctgtagatttagaaaactgcgattattctagtagtgatctaaactataatttttatcagttcagaaggcatcagcgtagctgggttaagagatatgtagacagaaaatatatagaaacagatttttatgcaacagttgcttggaatagaagacgtcgttctgctcaagatgaggagaagccaagtcttcaagaacttaaagctgaatatcctgacgctcgcttaatagctaaacccggaaaagtcgtctatagaaagagtcatcaattaactaaattcagacccggtgatatctttagatacggaaacaagattgatgtagcgaaaggatggtcgtctactatgaatagagtaggtggtctagacatcggatacgttccgataagtaaaactactaaaatctgtaacaattcaggattagttatactacccgctaaagcgggataa

SEQ ID NO: 601 - DNA, 301 bp, unidentified
  misc_feature 1..301: note = Ga0209720_1000657 JGI
  source 1..301: mol_type = other DNA
gtcaactaccacccgctaaagcaggtggcttgtaagagtcatctgcttagtggttggggttgaacaggcacgtggaagttaaagcttctgcaggatctgattaagcgttcaccctggggtgccactcccagctccaggctctgaaggtaatagctaaagttttagctagaagtcctagttgctagcaagtaggtaacgaaagctagtattacgcttaaccaagccgagggagactcacacttgatacccgatctatgggtatcgcttttaaaggtagaggtaactaaaattgaaacagata

SEQ ID NO: 602 - DNA, 1356 bp, unidentified
  misc_feature 1..1356: note = Ga0177923_1152199 JGI
  source 1..1356: mol_type = other DNA
atgacagtatttgttatcagtaaaaacggtgaacgcctgatgcctacttcccggtttgggaaagttcggcacatgatcaaggatggcagagccgtcatttattgccacaatccatttaccatccagctgacctatgacacaaccggctacacgcagcccattgaaatttgcgaggataccgggtatcagcacataggaatcagcgtaaaaagcgagactgcagaatatgtttcggcgcaatacgatctccttgagcacgaaaaggaaaaccatgatgactgccgaaaatacagaagggctcgaagaaaccggaagcggtaccgcgccccaaggtttaataaccgccgagcgtccaagaaagaaggctggctggctccatctctgagaaataaagcaaatcggcatatcgatctaatccagaaatatgtcaaggttgctcccatcacttccatcacggttgagcttgggcaattcgatacgcaggtcctgaaagcagtgacagaaggaaagccggttccagaaggtcttgattaccaacatgggcctcagtatggcattgatactttgcgggaagcagtctttcaaagagataatcacacctgcattttttgcggaagaggattaaaaaacggagccatcctgcatgttcatcatgtctatttctggcgtgggcagcatggtaattctcttgacgaactggctacctgctgtgaaaagtgccatactcccaaaaaccataaggagggtggcaagctctggggttacaacaagaagcttcccagatacaacggtgcggcattcatgaatatcgtccgttggtatatctacaaccaggtcaaggaccttaatcctggcattgatattcacgttacttatggcgctgctacaaaacgcagccggatggatttaggacttgaaaaggcccatgtcaacgatgcctattcaatggggctatttcatcatacaaaaaggacagccaaggagtttttcgtaaaacgccgccgtaataatcgctgcctggaaaaattctatgatgcaaaatacatagatgccagagacgggaaaatcaagtccggctcccagcttggatgcgaaaggataaacaggagagagcctagaatatctgataaaaaccttcgcatttttcgtggaggaaaaaagtcaaagggtcaccgatccattagacgacagcgatatggaatacgtcccggagatatcatgctttgtagcaacaagaaaattcctgctactggggtccattgtaatgggacaagagttttagtcggtggaaaatcttacaaattggaccagatggaagttatccgacatatcggcggttgggaaaaaactgactaa

SEQ ID NO: 603 - DNA, 358 bp, unidentified
  misc_feature 1..358: note = Ga0177923_1152199 JGI
  source 1..358: mol_type = other DNA
gtcaacaacccgccactaaatcaaagatttagtgggggcttgagaaacagtcccattcgactgtccctttcaagcttagttgattagcctcagttggtcggtatggcttgccagcgaaccaactacgttatcttggaatccttcattttgggaaataggcaccagtgtttggtactccacaagcccactgctctgcggtatgatctaaacatctctaacggtaggagaagtgcgtaatacaaaaacccaagataacattggcgatgtggaccacggtactgcgctgtcatcttcgcatgacagttgcgaaggccgcattattcccctcacggggagtcaggagtaaatcacaatgaca

SEQ ID NO: 604 - DNA, 885 bp, unidentified
  misc_feature 1..885: note = Ga0256405_10019152 JGI
  source 1..885: mol_type = other DNA
atggtttacgtattaaatcaaaacggacgacctttaatgcctacaaaaaaccatgccaaagtgcgtgttcttctaaaacagggcaaagcaaaggtgataaacaagtgtccgtttacaattcaactgttgtatagtagcacgaactatgcacaaaaggtaactttaggtgtagatagcggaagtaagcatattggtctttcagcaaccacaaaggataaagtattatttgagtctgatgtagagcttagaaacgatattatggatttgctttcttctcgtagagaattaaggcgttcccgtagaaatcgtaagcttcgttaccgtaaaccaagatttaataatcgcagacgtggtaaggggtggttagcaccttctgtaaagcaaaaggtagattctcacttaacaatggtatcaaaagtatgcaaaatacttccaatatcaaatatagtagtagaggtcgcttctttcgatatacaaaagattaaagatcctacaataagcggtgctgattatcaacatggcgaacaattagacttttggaatgtcagggaatatgtgttattccgtgacgggcatacttgtcagtgctgtaagggtaagtctaaagacaaaatccttaatgtacatcatatagaaagccgtaagacaggcggtaatgcacctaacaacctgatcacactatgtgaaacctgtcatactggatatcataagggaactgtaaaactgcctaagacaatacatagaggaatgtcttttaaggatgctacgtttatgggtatcatgcgttgggctttgtatgggaaacttaagtctatatatccagacgtaaaacttacttacggatatattacaaacccattgcggcgggaaagcccacggttttaa

SEQ ID NO: 605 - DNA, 294 bp, unidentified
  misc_feature 1..294: note = Ga0256405_10019152 JGI
  source 1..294: mol_type = other DNA
ttcaactacccaccgcctaaaggcagtgggattgtgcagtagcagtgctacgaagcaatcctaagttgaatagcctaagttctttgagaactacgttaccttggaatatataggtacttcgggacgtaatacctaattccgaacactacggactatgattaaacagttctgtgaggtaggaacagtgttgtagtcatacaaaacccagggataacattggcgaaggtatgcaaaccccttttcggagggagtaattaaaacctttatggtttttggaaaggagaatgcgtaatg

SEQ ID NO: 606 - DNA, 1275 bp, unidentified
  misc_feature 1..1275: note = Mouse gut metagenome
  source 1..1275: mol_type = other DNA
atggaactaaaagacataacattcttttttgtagtagatagtaaaggtaaacccttagctcctactacaaataatagaggatttgaactattaagaaaaagaaaagctactcttattagtaaataccctctagtaattaaattaaataaagaaatagaaaatcctaaatgtaatattgaaattggtatagatgatggctcaggtcatgtaggcttatctattactcaaaaatgtaaaactaaaaataaagtagtctttaaagccaaaatagaacaacgtggagatgttaagactttaatgactaaaagacgtgaacatcgtcgctatagaagataccataaacgttataggaaaccgaggtttaataatagggcttcttctaaaaagaaaggaagaatacccccatctattaaacaaaaaaaagatgctattcttagagttattagacaactttctaaatggattaatattaatcttacaacacctattcatttagaagatgtggctattgatataagagctcttacagatgcctttaaaccttatagatgggaatatcaacaatctaatagattagatgaaaatttaagaaaagcggctattttaagagataaaaatacatgtcaaatgtgtcaatgtaaagaaggcacaaaagaagtccatcacataagggcaaggcgtttacatggagcagatactataagtaatttaattactttatgtcctaagtgccatgaatctataaaagataaagaacctctttatgaaaacttcttttatgagaaaattaaatctattggtaacattcgctttgactatgccacacatgttatgcaaggaaaaacttatcttagagaagaactttctaaaataggtgttctacaacttactaatggaggagatacagcaaataaaagaatagagtggaatatagaaaagtctcacgcaaatgatgctatctgtataataggcttaaaacctgataccactgatatttttgaatggactataaagcctattagaaaaagaaacaactttaataaaaaaacagattttgtagaaggttctaatggcattattaaacataaagatttagtttcttatacctataaagatggtaatacttatgtaggttatgtaactgctttatatcctagtgataagaaaacaaaatcagattatttaaattttcagagtaaagaaaaacattgtaagaaagtaaatgcaaagaagacaaagctcttatggagcttcagtcatctttattggctatag

SEQ ID NO: 607 - DNA, 369 bp, unidentified
  misc_feature 1..369: note = Mouse gut metagenome
  source 1..369: mol_type = other DNA
tataaagatgtattatataatacatcttgtattgtataatttatatttattagtatttttaaaagatctcaagcctaagtgatagcaccataacgaaagttatgcaataaaagaaattttattttaaagtgctgatatgaactacgttgataagtaagctaaaaatatacctttaggtacacctttagcctaaagctctataactgccaaccaagaaacaaagttcttacattactttgataacagggaaacagatatgctcttattgacattggcaaaaaggacaatactcattaaatagtagtttctaactactaggaaaggagaggcgaaagccaaaaacttatggaactaaaagacataacattc

SEQ ID NO: 608 - DNA, 912 bp, unidentified
  misc_feature 1..912: note = Ga0114843_102905 JGI
  source 1..912: mol_type = other DNA
atggtatttgtattagataggtctaaaaagcctttagacatgatttcacatgctaaggctagaatattgcttaaaaacagattagcagtagtccataaagtatatccttttactattagactaaaggacaatagttgtgtaagtaataatagaacttacactgttaaacttgatccaggttcaagaactactggagttgccactgaaatagatcacatcataccaagaagtaatggcggaactaacagttcatacaatctaactccagcttgcagaccatgcaatgaaaagaaatcaaacttatcactaaaagaatttgggaagcttatgaacaaagactattctcagctagaacctaagaaactgcctaaagatgcagcaatagttcaatctgctagaaactatatgattaaagagataactaaactggtttctaatacaacttcgtatgacgcttggttaactaaatataatagagatagactagacttatctaagcaacattactatgatgctttatcagtaggaaatatagagaactttagatttcttacagataaggtattacaaatatcagctaaaggtagaggttctaggcaaatgtgccttatggataagtttggctttccaagaaccaaaccaaaaggtagtaagttagttaaaggcttccagactggagatatggttaaagccacagttccaaaaggtttaaaaaaaggagaatatcttggtaaggttgcagttagatctagtggatattttaatattcagactaaaactcaagttatccaagatataggatataagtattgccgtcttattcaaagaagcgatgggtactcatacaattataaggagtgcgacttcctctcggctattcataaccgagtctccatcgcagattttagatga

SEQ ID NO: 609 - DNA, 270 bp, unidentified
  misc_feature 1..270: note = Ga0114843_102905 JGI
  source 1..270: mol_type = other DNA
atcaattactcagtagttaactactgagcttgattgaccagactaagttgctaagaaattagcttactacgatagataagttatcacacccgcatgatgcttctccagtttgcggctctgtgtaggctctgtaagaatgcttaaaggcaggtcaacctaggaacggctctagcaagcttatctatcattgtcgaggagagactcacttccaaaagaagtgggcgataccgtagcaatacgagattattaaaagaaaggaatttactgatg

SEQ ID NO: 610 - DNA, 1362 bp, unidentified
  misc_feature 1..1362: note = uncultured Erysipelotrichaceae bacterium isolate RUG13468
  source 1..1362: mol_type = other DNA
atgtctgtggcagtactatccagcaccggcagaaagctgatgccgacttcgaactacagagcacggaagctcttaaaaagcaaacgtgctgtcattgaatgctatcgtccgatttttacaatccggttaaccgaccgggaggagggaaacacacagccgattgagtatgcctgcgatacgggataccagcatgtcggcgtatcaatcaagtccgaaaaacatgagttcgtccatgcgcagtatgacatgctgagcgatgagacagagcggcacaatgactgccgcaagtgccgcagaaccaggcgaaacagactgcggtaccgtaaaccgagattcgacaaccgttcgaagaagaacaaggagatggcgccttccctgcggcaccgcaaggagaaccagatccgcttgttcgaatcgttctgcaaagtcatgccgatcacatcggcggcattcgagatggggaagttcgacactcagcttctgcaggcaattgcagacaagaagcctctcccgaaagggaaggactaccagcggggatcgaagtacctgtatcagaccgaacgggaagccgttttcggcagagatcactatacctgccaggtatgcggtaaatccgtcaaagacggcgtgattctgcatacgcaccatatcgggttctggaaaggataccgctccaaccgaatcagcaatcttctgacagtatgtgagcactgccatacggcaaagaatcaccagcccggaggaaagctctggggactggagccgaaaagcacaaatctggctccggcgacgtatatgagtaccgtgcgctgggcaatgtatcgcgatctggtgctgacgcatccggagctcgatatttatttccagtatggtgcaaagactgctgtaaccagaaagtcgctgcatcttgaaaagacacatgcaaacgatgcttactgcattgggtctctgcatccgaagcatcgaacagcagagcttgtctatcagaaaaagcgccgcaataaccggattcttgcaaagttctacgatgcaaagtacatcgacatccgggatggcgaaaagaagtccggttccgcactctcatgcgggagaaccaaccgcagggaaagcaggcgctctgataagaatcagcgcatctatcgcgggaagaagtgttcttcagggcgcacttcggttcggaagaagcgttattcatatcagcctggggatgcgattctgtttcggtctcagcgtttcactgtcaatggtgctcattgcaatggaacccgcgtaattctaaataccggaaaatcagtcaagatggcagatttgacctgcattaaaatggaaggaggatggtgcttcctccccgcccaagcctga

SEQ ID NO: 611 - DNA, 370 bp, unidentified
  misc_feature 1..370: note = uncultured Erysipelotrichaceae bacterium isolate RUG13468
  source 1..370: mol_type = other DNA
gtcaacaaccccgcctaagtcctaacggactatagacggggcttggagaggctattacagctcttcaagcccggttgataagcctcagtctgcgtaagagccttcggactctgaagtggcggactccgttgccgtgagctacgtacgaatgctccactagttcgtacctcttgggtgcagatgctaaaaatcccctagggtaagggacgtgcatctgtagtattcaacccacggataacattggcgaagtggaccaccgcggctgcggttcttcggaaccgtaagtgcgagatgctgcatgtcttcaggaatgcagaaagcgtaagcgcccttaacggggcaggcagaaaggaggcatcagaagatgtct

SEQ ID NO: 612 - DNA, 276 bp, unidentified
  misc_feature 1..276: note = Ga0105046_10007489 JGI
  source 1..276: mol_type = other DNA
atgcaacgagtattagtgctagacaagaacaaaaacccgctgatgccctgtcactcggcgcgtgcgcggcaattgctcacacaagggaaggcggcggtctttcgtcaatacccctttaccatcagcccaaatcatgcgccgcttcaaattagggcgaccgggcatcaatctcgccaaatgtgccgtgtcgataagtacggctttccacgaaccagccccaaacaagggcgcattcactatggtttccaaacgggagatatggtcaaggcgctggtc

SEQ ID NO: 613 - DNA, 255 bp, unidentified
  misc_feature 1..255: note = Ga0105046_10007489 JGI
  source 1..255: mol_type = other DNA
gtcaacgaccacctccataaagggggtgacttgcgataagcaagcccatgttgaccagcctcagtctcattcgtgagacaccgttatccgggtcatgataccgacgggtgactgaaccagcccgtcgctctatcgctcaccgttaaacatgccgagggtctaggcaagtgcggtgggcatgacaagcccgaataccattggcgaggttcactttactgccgcaaggcgagcataatgaggtaactcatgcaacga

SEQ ID NO: 614 - DNA, 1293 bp, unidentified
  misc_feature 1..1293: note = Human gut metagenome
  source 1..1293: mol_type = other DNA
atgcaagtagtatatgtattaaacaaagatggattaccacttatgccaacgcataaactgggtaaagtaagacatcttttaaaagatggtaaagcaaaaattgttaagcgtaatccatttactattcaactaaattatgagtgtggtaattacattcaaccaattacattaggagttgacgctggttctaaacacataggactaagcgcctcaacagaaaaagaagaactatattcttctgatgtagaacttcgtaaagatattgttgatttattatcaacacgtagacaaaacagaagaacaagacgcaatcatctaagataccgtccagcaagatttgataatcgtaaaaaagaagatagttggctagcaccatctattagacaaaagattgattctcatttaaaggtaattgaagatgtacataagattctgcctatcacaaacattattgtagaagttgcatcgtttgatactcaacttttaaaagctgaggctgaaggcaaaaccattagtggtactgattaccaaaaaggcgaaatgttaggttataacactcgtgagtatgtattatttagagataatcacacttgccaacattgtcatggtaaatccaaagataaggtattagaggttcatcatcttgaaagtcgtaaaacaggtagtaatgcaccaaataacttaatcactttatgtaaaacatgtcacgaagcatatcataaaggaaaaatagaattaaaacaaaaacgaggtgctaaatataatgacgctgcctttataggtattatgagatgggctttctacaacaaacttaaagaaatctatccaaacgtttctttaacttatggatatataaccaaatataatcgcattaatttaggtttagaaaaagaacattataacgatgcttattgtattgctggaaattttaacgctaaaccacttaatacctttatctaccaaaagaaagttagatgtcataatcgccaaatacataagtctaaccttttaaaaggcggtgttaaaaagcgtaaccaagcaccttacttagttaaaggatttagattatttgacaaagttaaatatcaaaatactgaatgttttatctttggaagaagatcgtctggctacttcgatattagaaaattagatggaactaaaatacatagttttattaattataaaaaattggaattgcttaatgcaagggaaaattttattaaagaagaaaggagcaggcaattcctctcacgccctcttaaagagggtgaagtttccttgcctacttgttga

SEQ ID NO: 615 - DNA, 300 bp, unidentified
  misc_feature 1..300: note = Human gut metagenome
  source 1..300: mol_type = other DNA
gaagcgaggaagctgaatagtcaactacccacggttaaatccgtagacttgtaataagcctagttgattagactaaggagaaaactttaagttaatatcctacgttatataagaatatatagttacctacaaatgtatagccaagtttgtagctctaaggtatgtgattaaacagttttgatgggtaaaaacagtgttgcgtatttaaaaaccttatataacattgtcgatggctacattacaaatcgtaagatttgaattatctattaagttagatagaaaggaaagtttatgcaagta

SEQ ID NO: 616 - DNA, 1353 bp, unidentified
  misc_feature 1..1353: note = Ga0209647_1002274 JGI
  source 1..1353: mol_type = other DNA
atgtcgtgtgtgtttgtggtggacaccgagcaccgcccactggacccggtgcatccgggcgccgcccgccggctgctctcacgagggcgggcggcggtgtggcggcgctccccgttcacgctgatcctgaagcgggccgtgccggacgcgcagccgcacccactgcggctcaagctcgatccgggcagccgcaccaccggcctggcgctcgtcaccgcatcgccagcggcaccgcctgctgacgaggtatcaatcgggcgggtggtgtgggcgggggagctgacccaccgggggcaggccgtccatgagaaactggtaacgcgccgtgccattcggtgcggccgccgccagcgccacatgcgctaccgcccggcgcgcttcgccaatcgtcgccggccggaggggtggctgccgccgtcgctggagagccgcctggccaacaccgagacctgggtgcggcgcctctgccgcctcgccaacgtcgtcgccatctcgcaggagttggtcaagtttgacacccaggcgttgcagaatccggagatcagcggggcggaataccagcaggggacgctggcggggtatgagctgcgggaatatctgctggagaagtgggggcggcgctgcgcctattgccacgcgacaggcgccccgctccaggtggagcacatcgtacccaaaacgcgccctggcggctctgaccgtgccagcaacctcacgctggcctgcgcgccgtgcaaccagcgcaagggcacgcggaccgccgaggagttcgggcacccagaggtgcaggcgcaggcccagcggcccctgcgcgatgccgccgccgtcaacgcgagccgctgggcgttgtttcagcggctgcgggcaaccggcttgccggtggaaacaggtaccggcgggcgcaccaagtggaaccggacgcaacgaaacctgcccaagacgcactggctggacgccgcctgtgtaggggcgtccacgccgcaacacctgctggtggcaggcatacgcccattgacgatcaccgccacgggccggcatgcgcgccagatgcgccgcatggaccgctttggcttcccgcgcaccggccccaaggccaccagcacggtaggggggctgcgcacgggcgatctggtgcgggcggtggtgccggcgccgagcgtgaaggctggcacgtacgtagggcggctggcggtgcgtgccagcggcatgtgcaacatctcgacggcccggcagggtgtggtgcagggcatccatgtgcggcactgccgcccgctgcatcgcagcgatggctacggctacggctacggctacggcgatggggcatcccatcacactgaaacagaggcgcgttga

SEQ ID NO: 617 - DNA, 282 bp, unidentified
  misc_feature 1..282: note = Ga0209647_1002274 JGI
  source 1..282: mol_type = other DNA
gtcagggaccccacggctgaagccgggggcgtgtgctgagcacgcccaccctgaccagcctcagctctgaaaggagctccgataccggcgaatgcataggcaccggcgggtggcacctcagcccgccgcgctgcggggcacggttaaacaggtccacggggtgacgaccagtgccgtgtccgaagaaaggaaaccgccggatatccttggcgaggggaccattacccgcgcaagcggaggcccacaagggcagcaagatcggagtcgcgttgtatgtcgtgt

SEQ ID NO: 618 - DNA, 420 bp, unidentified
  misc_feature 1..420: note = Ga0401364_0036777 JGI
  source 1..420: mol_type = other DNA
atgcaacgtgtactcgtactagataaaaacagagagccgctgatgccctgccacccggcgcgggcgcgggtgtttcgtcgctacccgttcaccatcatcatcacagatcgggaaggcggcgacgtgcaacctgttgccttcaacgttgacccaggcagccgcacgtcgggcctggcgctgttcaacgggttcaaatcatccggcatgccgctggaaacgggaacaggcgcacgcacgaaatacaatcgccgtcgccagaactacccgaaagcccattggattgacgcggcctgcgtgggcgaaagtggcgcatgtgtgtacatcgcatccgatcacgcgccactgctcatcaaagctaatgggcgtcaatcgcgcttgatgtgccgtccagataagtacggctttccgcgcacgaaggcc

SEQ ID NO: 619 - DNA, 261 bp, unidentified
  misc_feature 1..261: note = Ga0401364_0036777 JGI
  source 1..261: mol_type = other DNA
gtaagcatccccacgcctgaaggcgggggcttttaacagcccaaatgcttaccagcctcagcccttcgggggctacgttacgggcgaatacataggcactccggggtgacgccaccagccccggactctgcggtgagtggttaaacaggacggttgggggacaacggcccgtgctgctcacatcaaaccgcccgataacattggcgaggtggacgttacccgcgtaagcggagattagaggggtaactctcaatgcaacgt

SEQ ID NO: 620 - DNA, 1389 bp, Moorena sp.
  source 1..1389: mol_type = other DNA
ttgtggcgagtaccacgttgtggggcagacacgacaagcctgttgaacattgtcgaggcaaacatgacccgagtaatcggagagaccatgtccacctgtgtgttcgtcctgacgactgatcatgtcccacaaacccccgtgcatcccgctgtggcgcggaagatgttgacggctagggccgcggcagtgttcaagcgcttccctttcaccatcatcttgaagacggcagaggccgcccaccttcccgtgcacacgcatcgcctgaagattgaccctggcagcaagaccacgggactggcgttgctcgatggccccaaggtcgtctgggcggcagagatcacgcataggggccaacggatcacagatgcgctgctccgtcgacgcgccctacggcgtagtcgccgccaacgccagacacgctaccgccaagcgcgcttcctcaatcgcacccggccagcgggctggctgcctccatcgctgcacagtcgtgtggcgaacatgatgacctgggtgcaacgtctgcaacgactgtgccccatcgtggcgctgagtcaagagctggtgcgttttgatgcgcagctcctgcagcaccccgcaatcagcggcatcgagtaccagcacggcacgttggcgggctatgaggtgcgtgagtatctgttggagaagtggggccgtgcttgcgcctactgtggcgcgaccgacgtaccgcttgaagtcgagcatatcgtgccgaaagtgcgtgggggctcacatcgcgtcagcaacctcaccctggcctgcgtgtcctgtaatcagcagaaaggcagccagacggcgggagagtttgggtttgcgaagatacaggcgcaggccagggtgccgctcaaagatgccgccgtcgtcaacgccacacgctgggcgctgtatagtgcgttgaaaaccactgagctgccagtcgaaacaggcacaggggggcgcacgaagtacaaccggactcgccgaggcattcccaagtctcactggagcgatgctgcctgcgtgggcgccagcacgccagaggcattgcatgttgccggtgtacaacccttgggtattcgggcgatggggcacgggaccaggcagatgtgtcgcgtaggtgcccagggcttcccgaaggcgcaccgcacgcgccagaagcagtactttggtatgcagattggcgatatcgtcaaggccagtgtcccccagggcaagtatgccggcacatggaccagccgcgtcgttgtcaagaacagtggttggtttgacctggttatccatggcaaaaaggccagcgtgcatcacaagcattgcacacgcctctggtcgtcggatggctatacgtacaccctgcctgctggtgcaggcaccgccgtttcctccccccactga

SEQ ID NO: 621 - DNA, 249 bp, Moorena sp.
  source 1..249: mol_type = other DNA
gagtgagtcgacgtactcccccgactgaagtcgggggactcttaggagtcggtgtcgagcagacatagtgccgcaatgcgctccgttcagcaggtcacgataccctggaatgcgtgccagttccaggctctatcgtctgtccttaaatagttgtggcgagtaccacgttgtggggcagacacgacaagcctgttgaacattgtcgaggcaaacatgacccgagtaatcggagagaccatgtccacctgt

SEQ ID NO: 622 - DNA, 507 bp, unidentified
  misc_feature 1..507: note = Ga0137390_10046836 JGI
  source 1..507: mol_type = other DNA
atggatgctcgtcgcgctcaccggaagagccgtcgagcacgacaatggtatcgtcctgcacgcttcgccaaccgagctgcaagctcgcgcagggggagaatcccgccttgcatcaaaaccaatgtcgaagaggtgatccgggttatcaagcggctgcctttgccgatcagccagatcatcatcgaagatgtccaggtggatatcgcgcggctgaataatcctgagctcaaagggagccaatatcaagacccgacacggctggatgagaacctgcgcctcgcctgtctgatgcgcgacggctatgcctgtcagcactgcgggaaacaccacgttcgcctgcaagcgcaccatctggtgtatcgagaacacggcggaaaagatacgctgaccaatctgctgacgctgtgtgaggcttgccaccagaaggtccatcaggacaagctcaccttacaggtgactggtgtgagtgggcatctcgaccagggagcctacttctgctctccctaa

SEQ ID NO: 623 - DNA, 237 bp, unidentified
  misc_feature 1..237: note = Ga0137390_10046836 JGI
  source 1..237: mol_type = other DNA
aatagctgctaaaaatctagcgttttgttacgccgggttcatggagctaccagcgggcttcttgggaagcagcagttgggatggtcatgacaccaccagatgtggttccagtcgggtgcaactgtcggtatccattaagggtagcggaaacgtgaaggtgtggatactgcaaaaagctctctcaacagccgcgaggagcatttcactctgaaaggagggcctagagccaccatgtat

SEQ ID NO: 624 - DNA, 1161 bp, unidentified
  misc_feature 1..1161: note = JGI11876J14442_10022172 JGI
  source 1..1161: mol_type = other DNA
atgaatcgtgttccagtaatcagtcaagaaggaaagcctctgatgcctaccaagccgtctagggctagacggtgggtcaaagaaggaaaagccgtggggaagtggtcagacctgggcgtctattatgtccaactaactacaccaccatcggctgaggaagcacaaccaatcgccgttggagtcgatccgggcaagtcttattccggtgtcggtatccagtccgctaaatgcaccctgctacaactgcatcttattcttccgtttgggcgggtcaagaaacggatggaaactcgcgccatgttacgacgggggcgacgagggcgacggattaaccgggatgtcccattcaagcagcgtaaccatcggcaatgcaggttcgataatcgcaaacaatgtaagcttcccccatccattaaagcctcacggcaactggagttaagggtagttacggagttggtaaacatcttcccggtggcagcgattggttatgagcaggttaaagccgacatagaccagactaagcgcaaacgcgccaagtcgggcaagggcttctccccggtgatggttggtcagaattgggcaatatcccagatgggaaaaatcgcccctgtctacgtccgacatggttggcaaaaggatgggaacggtacatcccaactccgaacccaactagggctagagaaggataaaacgaataagtccatagctaaaccggagacccacgcagttgatggagtggctttagcttgtgggtatttcatcaaatatgtcccgttcactggctctaactcccatggctacacccacaagggtggcgttaccgtgaccccttccccgttcaaaattatcacccgtcctggtgcggtgaagcgggggaaagagtatgggtttttccgtcgccaattgcactttgaagtaccggataaatctggagtcaggaagcgcaaaggcggaacaatcacaccatttggagcaaggattggtgatttggtcagagcagagaaagctgggaagtcttacatcggctacgttggtgggtttaccgataccaaaaagtctcagaaggtttctgtttgtgactatacctggaaacggattgggcagtttgctcctagcaaagtcgagttaatcaggagaaataacggtctatgcgtagcgtaa

SEQ ID NO: 625 - DNA, 212 bp, unidentified
  misc_feature 1..212: note = JGI11876J14442_10022172 JGI
  source 1..212: mol_type = other DNA
ttcatgaaccgcgccttacttcgtgaagacgcggattggcagagataacctgctccgaagtcatgaatagggcatgagttggtaggggataatcacttccgaacgcttctctagttcggactccatgtaggtctaggaatctctaggcactgggtcattccaggacacacccctaccaatgccttaagagacgaaaacattacacgagtgga

SEQ ID NO: 626 - DNA, 1353 bp, unidentified
  misc_feature 1..1353: note = Ga0209616_1000698 JGI
  source 1..1353: mol_type = other DNA
atggtatttgttttagacaaacataagaaaccgctaatgccgtgttcggagaagcgcgcgcgacaactattgcaacgcaaacgtgcagtagttcacaaaatgcagccattcacgattcggttaaaagaccgcatagtagagaaaagtcaattgcaaccacttagattaaaactagattcaggcagtaaaattaccggctttgcggtgctccgggaatacggcacagagaaatctgtggcaattctgatgggagaactgcatcacaagcctggaataaagaccggtttagataacagaagagctcttcggcgcagccgtcgaaaccgcaagacccggtaccggaagccaagatttatcaatcgcacccgtcgacaaggttggctaccgccatcgttgcgggcaagagttaatcaaaccctaagtgttgtaaccaagttaagaaacgtgctaccgataatcacaattagcactgaacatgtcaaatttgacactcagctcatacaaagcccaaatatatccagtatcgaatatcagcagggcgaattgttcggctacgaagtcaaagagtacctgctggaaaaatggagacataggtgcgcctactgtcacgaaacaaatgtacctttacatgtagaacatgttataccacgaaatcctaaacgtggttgtaaaggcacaaaccgcatatccaatctggccttggcatgtaagccatgtaatgatgcaaaaaacaacctacagcctgtagaatggttaggacaattaatgtgcactaaaaaagctatcgaccaaaagcgggcaaaaaacttgcctgaagtactaaaacagctaaaaacccccttgaaagacgctgccataatgaacataacccgatgggagctattaaattgccttaaaaaacttggcctatccgtagagagcggcaccggcgcaaggacaaaaaagcagcgtattgagcataaacttccaaaaacccactattatgacgcttgttgtgttggccctagtactccgcaaaacctcgtaactttacaaaaatatgtactaatttggaaagcgataggcagaggcacaagacagatgtgtaacacggacaaatacggctttccaaaaggccacagacaaaacaaaaagaatcatttcggttttcagacaaacgatatggtcaaagcggatattcctcgcggtaaataccagggtaatcacgccgggcgcgttgcagttagaactagtggatattttgatattaaaaatattactggcaaccgtatttgtcaaggcatcaaccacaaatattttcaattatcgcaaagagctgatggttggcagtacgaaaaaataaaaataacatag

SEQ ID NO: 627 - DNA, 270 bp, unidentified
  misc_feature 1..270: note = Ga0209616_1000698 JGI
  source 1..270: mol_type = other DNA
gtcatagaccccacgcctaaaggcggaggcttgaaaaagcccaactatgaccagcctaagcccgccggttgaggcggactacgttgggaaggtgcatacccaagaatgcttctccagttcttggcactatggaacggacgttaaaaacgagcaggggcacagcaagtggtgcgttcgttgtagtcaacccttcccaacattggcaaggagagacgggataaccgcgttactagccccttacggggctccgaaaggagtagttagtttatg

SEQ ID NO: 628 - DNA, 381 bp, Moorena sp.
  source 1..381: mol_type = other DNA
atgtccaactcaactaattatgtattcgtgcttgacgcgagtaaaaaaccattaacaccatgcaaacctggcatggcaatgctgacgaatcaacccctaatggtaacagcaatgggacatggttgcaggcagatggtacagatggacaaatatggttttccccgcaagggttatcaggctaaaaaacctgtaccaggttggaaaactggagatatgatcaatgtcgtcaaaggcaaaaacattggattaaagggagtcaggattaaaactgtcagaagtaaaggtaattttgacatccgacatggggataaaatcttgtctgtatctcgaaatcatatccaacccattcacagacgagatggatacaattactcgttttga

SEQ ID NO: 629 - DNA, 260 bp, Moorena sp.
  source 1..260: mol_type = other DNA
tcgaagactaaccacaaatctaatcaaagcgctcaaatcgcttaaatggttagtccagcctacttagcaataagtaaacgttattttggtcacaatacgtcagaatgcgtggccagttctgacctctattgtttggcattaaacaggtaaagagatttgaaaaaccagtgtgtcgaacttaacaagccaaaataaccaggcgaggccaactttacactttttgtaggagggacgcaaaaatgtccaactcaactaattat

SEQ ID NO: 630 - DNA, 255 bp, Moorena sp.
  source 1..255: mol_type = other DNA
atgtccaactcaactaattatgtattcgtgcttgacgcgagtaaaaaaccattaacaccatgcaaacctggcatggcaatgctgacgaatcaacccctaatggtaacagcaatgggacatggttgcaggcagatggtacagatggacaaatatggttttccccgcaagggttatcaggctaaaaaacctgtaccaggttggaaaactggagatatgatcaatgtcgtcaaaggcaaaaacattggattaaagtga

SEQ ID NO: 631 - DNA, 260 bp, Moorena sp.
  source 1..260: mol_type = other DNA
tcgaagactaaccacaaatctaatcaaagcgctcaaatcgcttaaatggttagtccagcctacttagcaataagtaaacgttattttggtcacaatacgtcgggatgcgtggccagttccgacctctattgtttggcattaaacaggtaaagagatttgaaaaaccagtgtgtcgaacttaacaagccaaaataaccaggcgaggccaactttacactttttgtaggagggacgcaaaaatgtccaactcaactaattat

SEQ ID NO: 632 - DNA, 1185 bp, unidentified
  misc_feature 1..1185: note = Ga0256832_1033259 JGI
  source 1..1185: mol_type = other DNA
atggaagtttttgtaattaataagcatggcgaaacattgatgccatgtagctcaagaaaagcaagattattgcttgaaagtggcaaggctaaggttattcgccgtagtccatttactatccaactaattcatggttcaacaggttataagcaggatttaaccttaggtgttgatacgggtcattcagaggttggattatcagttgtatcaaagaccaaggaggtattttcagcagtagcgaagatgcgtaatgatatttcatcgaagatggatacaagacgcatgtatagaaggcagaaaagaaacaagcttagataccgtaaaccaagatttttgaaccgctctgccagtacaaaaaaaggacgtttagccccatctgtacaatggaaagtggacgctcatatcaatttaattaatcaacttaaatcattactaccgataaccaaggtggttttagaaacgggtacatttgatatggctaagataaagaacccaaacataacaaatgagcaatatcaaaaaggcgttcaatatggttttgagaatgttaaggcttatgttttaagtcgggatggctatcaatgccagagtaaaaagaaaggatgtagcgacagattacaagttcatcatattaaatatcgctctaatggtggttcaaatgcacctaacaacttgattactttatgtgaaaaacatcataaagcattacacgctggcaagtttgagctagatattaaatctcataaaagcttaaaatcagcaacgactatgaatattatccgcagtcgattattacgctattttccagaagcgattgagacatttggctacatcaccaaagcaaaccgctatcagcataatattgaaaaaacgcatactaatgatgcgtttgttattgctggtgggtcaaagcagaagagagcagaagaaagaaccatccactttaagcgtaaaaataaccgttcattacaaaagaaccgaaacggctacgcccctgctattcggaggcaacgatatccgattcaaccaaaagacttggtcacatttgagggtagacaatatcaggcggttgggatgcaaaacaaaggggcttacctgaaaatgacagatggattgagaaccatcgttaagtccgtgaaaaaaattgaaatagtgtttcatcaaaaaggtgtgatttacgtatga

SEQ ID NO: 633 - DNA, 286 bp, unidentified
  misc_feature 1..286: note = Ga0256832_1033259 JGI
  source 1..286: mol_type = other DNA
gtcaactacccctcagctaaagacagaggggcttgagtcgtgagatttaagataggtcttcggattgaataggtgattaggctaagttcctcgagaactacgttgttttagttatgacacccttggatgcctcccaagtctgaggctctgtctccaagtattaaaagacctcaacgggtcggtgtgcttggattgacaagcttttacaacattgccgatgggaatcaacctcgcaagaggaatcgttcaattttaacgattaaattttaaaggttttaaaatggaa

SEQ ID NO: 634 - DNA, 1278 bp, unidentified
  misc_feature 1..1278: note = Ga0105041_100006 JGI
  source 1..1278: mol_type = other DNA
atggcagtttttgtactaaatacggataaatcccccttagctccttgttcagagagaagggccagaaagttactagaacagggaaaggctgccatatggctacatagacctttcacgttgatcctaaagtctgtggctagttcacctgcagctgcccattgtcctgcaattgagctacgtatcgacccaggtagcaagttcacaggattcgctctagtcaacttggtcacaggtgcagctgtgcactgcgcagaacttcaacaccgaggttacaccataagttgcgacctgactcgaagatcgcaacttcgccggagccggcggtccaggaaaacacgctaccgaccggctagatttaataatcgaactaaacccgaggggtggctcgcaccatccctcgaacaccgtgtcttgacaacgttgtcctgggtaaaaaagtatttgagactatgcccaatacaaagtatcgccgtagaatcggtaaaatttgatacacagaagttgcaaaatccagaaatatccggagtggaataccagcgaggcgaactgtttgaatacgaagttcgtgagtatgtattcaacaaattcaatcacacctgcgtatactgtaaacgctctgctgtaccgctgaccattgaacacgtgaccccaagatctttagggggatctaatcgagtcagcaacttagcggctgcctgtagaacgtgtaatcagaaaagaggtaataggcccctggaacaatttacggacgccgaaacaatcagcagaatcaaaaatctgacccggtttccactgaaagatgcggcggccgtaaactcaactcgcaatgctctagttaagcagctatcgtctataggcaaacccgtgtcgtgctggaccgggggaagaacaaaatacaatcggactcaagctgaactgacaaagacccattgctacgatgccgcgtgtgttggggacaggcctgccaaaaaagtaccaaaagtttggttaacgatcaagtctatgggcaggggtaatcgccagatggtggctaacgacaaatttggcttccctaagaagcaagctcctcgacgaagatctaagagcgtccatggcatgtgtacaggggacatcgcaaaaacccctgttggtacagggcgcataaccggtgctagaacaaaaggaagcttttccctgaaagtaaagggaaaattggtatctatgacaccccgtaaactaaaagtggtacaaagaggcaacgggtacgagttcggtcaatcctgcgcagaagctgaatga

SEQ ID NO: 635 - DNA, 382 bp, unidentified
  misc_feature 1..382: note = Ga0105041_100006 JGI
  source 1..382: mol_type = other DNA
accaagccataatcccttcctctttctctaccctttgcaacaacctagcccgtggcaggggtacacacggactcctacagccataatcccttcctctttctctaccctttgcaactcgtcccaaaaaactctttgactttacgcgatattacagtacactctgcgagaggttaattgtgacccgactcagtttgaggtaactcaagctacgtactcgaaaaaccaaagactcacctaagggtgccctaccagcctttagctctgtgattcggaatcaatgaccgcttgcaaaggggcaggcgtaatgatccggaatcggtaaaatcgagatacattgtctaggtagacattacaaggccgttattggcattttattatggca

SEQ ID NO: 636 - DNA, 597 bp, unidentified
  misc_feature 1..597: note = Ga0370539_00069 JGI
  source 1..597: mol_type = other DNA
atgtctaactttgtctttgtagtggataccaatcgccaaccgctctcactctgtacagccgggatggcaaggtcattattaaaagcgggaaaagcagcggtatttcgccgctatccctttacgattattttgaacaaggcagtggtcactgagcacttcgacaagctcagtgttccaccttgccgaagtgtggtcactgacccttcccttcgacacgctcagggcaatgcgactgcccttcggcaagctcaggaaccacgctcaggccgaagtgtcgattcgcttgaagtgctgacctcaaaaccgttgctgattgcggcaaaagggcatggaacccgccagatgtgcggcactgataagtatgggtttcccactcggcatcgctcacggatgcagattcataaaggctttcagactggagaccttgttgcagcaacagttacaacaggtaagaaaatcggcttctatgtggggcgggttctttgccgcgcttctggcaattttgatattgccacttcatcgggaagagtggctggtattagccacaaatattgccaagcaattcacaaaaaggatggttactcctatggattctga

SEQ ID NO: 637 - DNA, 236 bp, unidentified
  misc_feature 1..236: note = Ga0370539_00069 JGI
  source 1..236: mol_type = other DNA
gtagactgcccgattctagcgggatacaagccacaacatgaccagcctaagaccttcgaggtctacgttttcacgcgtcatgatacctacaaatgcgtcgctagtttgtagctctatcgttggttgttaaacatctgtagtgggttaaggaagtgcagccaacacaacaaaccttgaaaaccttggcgaagcgaacgttacgagcaattagaggagacgcaacaatgtctaacttt

SEQ ID NO: 638 - DNA, 999 bp, Moorena sp.
  source 1..999: mol_type = other DNA
ttggtagctgaagaaaatcaaggcttgcaattaaaaattgaccctggttctaaacaaacaggctttgcaatggtcacccaaagtgaagaagttatctttgcaatggttttaatccatcgtggtcagcaaatcaagaatgctttggaacgacggcgaactcttcgtcgaggtcgtcgtcatcgaaaaactcgctaccgtaagtgcagatttttcaatcgcaaacgaaacaaaggatggctgccaccaagtttgaggcatcgggttttgatatcatgtccgttggggcgcgtttgtgtaaaagttagcgtggatatctacaggaaatttaagtttttttcttgctcaattgccttcctgtttgttgcctgttgcttgttgcctgttgccttcctgtttgttgcctgttgcctaccttttctatacaataccgatgctaccggacatgatatgactgtagaaacttgggttaatagactttgtaaactaagtccgataagtagtttgactatggaattggtcaagtttgacacccagaaaatacagaacccagaaatttcaggagttgaatatcaaaaaggggaactatttggtgatcatgtccgggagtatctattagagaaatggggtcgattatctgctgattgtggggcaatagatacgcccttagaagttgaacatatagttccacgctcaaaaggtggtagtaatcgggtgtctaatttagccatagcttgtcatcaatacaaccaaaataagagtgctatggatattcgggaatttctcgaaaataaaccgtctatactagctcatgttctaaaggttgccaaaacgccattaaaagatgctgctgcagtcaacacaacccgcactcaaatctttgaaactttaaaagcaaaaggtttgcgtgtgattaccggtagtggtgctggtactaaatataaccgttgtcgcttgaatttgccaaaagaacattggtatagatgctgctggcgttggtga

SEQ ID NO: 639 - DNA, 261 bp, Moorena sp.
  source 1..261: mol_type = other DNA
tttaggactaaccacaaatctaatcaaaacgcaaattttgtgtttaaatcgttagtccagcccacttttttcaagtaaacattattttggtgacaatacgtcgggatgctaggccagttccaacctctattgttcggcattaaacagccaaagagatttgaaaagctagtgtgccgaacgtaaaaagtttaaataaccgggcgaggccaactttacatctgaagaaattggtagctgaagaaaatcaaggcttgcaattaa

SEQ ID NO: 640 - DNA, 1383 bp, Acidithiobacillus ferrivorans
  source 1..1383: mol_type = other DNA
atgctgaataaagtgtttgttttggacacgcatcgaacaccgctcatgccctgccatccggcccgtgcgcgggagttgttacgcaagggcaaggcgtcggtcttccgtcgctttccattcacgatcatcctgcgggaacgggttggcggagacaggcagaatatcaccgccaaatcggatcccgacagcaagacgaccggcctggcgttggtagcggcgttcaagcgaggactcaccgtcatatgggcggctgaactggcgcaccgcggtcagactatccgtgccgccctggagaaacgcagtaatcagcggcattcccgcaggaaccggaaaacacggtaccgcgccacgcgtttcgatcatcgcactcggtcggcgagatggttgccaccatccattgagcaccgcgtcttaacggtcatcacctggttcaaacgcctcatgcgctgggcgcccattactgattccagcatggggcgggtgcgcttcgacatgcaggctatggagaactcggagatatccggcgccgagtaccagcaggggactttgttcggttacgaagtgcgggagtacctgctggagaagtggatgctgacctgtgcctattgcgatgcccagaatgtaccgctcgaaatagaccatgttcacccgcgcagtatgggcggcagtgaccgggtgagtaacctggcgatagcctgtcacgattgcaaccaggcaaaggacaatgctcgactatcggcatttttgcagacggacaaaggcagacagacaagacagcaggtttctgctgcagtatatgctggcaacgaccccaaaaagcgcgcggagcgggaacgtcacgagtcgaactggctggagcgggtgctgaagcaggtcaaggcaccattgcgggatgccgcagcggtcaatgtcacccgcaacatcctgttcgagcgtttgctggaactggggttgccggtggagacggggtccggcgggcgcaccaagtttaaccggagtcagcagcattatccgaaagcgcactggatagacgcggcttgcgtgggtgaatccggagcttcagtttgcttgaatcttgaattaaaacccctacagatcaccgccaccggtcatggtcgcagacagatgcaaaacatgacgaagaaagggttcccgagaggaaaggcaaagtcccggcagaagacgtattttggctttcagacgggagacatggtgcgggctattgtgccaaaagggaggttcgctgggaaacatgttggccgggtggcgtgcaagaaatcaggaaacttcaaactcaaggtcggcgggaaagagttggatggtgtttcatggcgtcactgcactccggttcatagaggtgacggctatgcctacacacattga

SEQ ID NO: 641 - DNA, 263 bp, Acidithiobacillus ferrivorans
  source 1..263: mol_type = other DNA
agcgtcatgaacaccatggataaatccaggggcttgtaggagccctgattcatgaccagcccgagaaagctgaaaggcgatctacgttcaaggtgtcatggcactccgggatgcttgccagttccggactctgccgttgccaatcatgctgtcgtacctgggggtatggcgaaggcgggcaacatgacaagcaccatggacatgggcgaggcacacgttaacggcgcaagccgatatttacaggagtaatccttatgctgaat

SEQ ID NO: 642 - DNA, 1254 bp, unidentified
  misc_feature 1..1254: note = Ga0209318_1005124 JGI
  source 1..1254: mol_type = other DNA
atgacaaataataaaataaaagaatatagttttgtattggataaaaataataaaaaattatctcctacacttgttaataatgcttggtatcttataagaaaacaaagagcaatattaatttctaagtatccaatggttattaaaattaaaaaagaaattaaaaatgatgaaaataataatgataaatcagagtttgtttgtggtatagatgatggttctattcacgttggaattgctataattcaaaaatgtaaaaataaaaataaggttgtatttaaaggtattattgaacaaaggcaggatgtaaagaaattaatggaattaagaaaaggatatagacaataccgtagaaaacataaaagatatagacctgctagattcaataatcgttcatcttctaaaagaaaaggtagattagtaccaactattaaacaaaagaaacaagcaatattaagagtagttaatcaactaaataaatggatagatatacataaaataatattagaagatgttaaaattgatattagagcattgcaagaaggtcataaattatataaatggcaatatcaaaaaagtaatagattagatgagaatttgagaattgctactttaatgagagataattatacctgtcaagaatgtggtaagaaagattgtagattagaagcacatcatataattgctagaagattaaaaggttctgattcaataggtaatttaattactctttgtgatatttgtcatgataaaactgaaggtaatgaagaattatttattgaaaaatatcaaaataaaataaaaggtaaaaatattagattcgattatgttcaacacgttatgcaagggaaaaattatttaaaacaggaattaagtaaaatagcagaattagaattgactataggaagtgaaactgcaaataaaagaattgattggaatattaataaatctcatagtaatgatgctattgtgatttgtggatttaaacctgatacatgtaatataaaagaatggattattaaacctatgagaagacaaagtaaagcaaaaacagataatgtattaggtataaaacatagagatttagtttcttatacatttaaaaatggagaaacacatattggatatgttacagctttatatccagaattgaatgcattaaattttcaatcaaaaacaaaacattgtaaaaaagtaaatgtgaagaaatgttatttactttggaaatacaacaaaatttattggttgtgtgcataa

SEQ ID NO: 643 - DNA, 305 bp, unidentified
  misc_feature 1..305: note = Ga0209318_1005124 JGI
  source 1..305: mol_type = other DNA
tagacaaatgtatatagtagtggacatatatatatctattatatacagactattgagtgtgtttcaagcctaagtgagtaccactaacgaaagttatttgtacgatgaactacgattatataaatgctaaaaacacacctttagatgtaatcttcagtctattgctctgtgagtacaaaggatgaccgacttctaatgtcctgaagtcaaacaccgaaatacatgtgcattatattgtctttggcaagaagaaaaattctccgaaaggatggttagtcagaaatgacaaataataaaataaaaga

SEQ ID NO: 644 - DNA, 1437 bp, unidentified
  misc_feature 1..1437: note = GENOME_ACESSION: mgm4743560.3 MG-RAST
  source 1..1437: mol_type = other DNA
atgcagaaaaacaaaacagtactggtaatcgggaagaacggccgtggccttatgccatgcacaccaagaaaggccagaattctccttaaaaagaagaaggccaaagtagtaagaagaacgccgttcacgatccgattgctgtacaagacaggctgtgcgatacagccaacaacgctgggcgtagatactggttcccagcacatcggcattgccattgtttcagacgacattgtctttagcaaaagcgagtacgaactccgctccacaatggaaaaacggaagctgatggaaacaagaaaacagtatcgccgtggcaggcggtatcgcaagacacgataccgccacccaaagttcctgttccataccaaacggacatatgtggaaaagccaatcaagcggaacagtcatctgacacactggaagaaggaaactgtttcctgtatgtcaagccgtcagacaggctggcttccgccgtccgtgcagagcaagtgtgatcatcacattcggattatcaaccgctatatcgaagccctgccgccaagcacaagagtcgtaattgagattggccggtttgacatggcgcacatgctgaatccagatatccatggtgaggagtaccagcacggtctgctgtatgagtttgagaacaagaaggcttatctactcaagctgtacgactacaagtgcccgatttgcagtaagaaatttggctcaaagaggtctgacggtacaactgtcaaagcatgtatgcaccatgtcctgtaccgctcaaaaggcagtacggacaatgccagtgttctgattcctgtatgtgatcattgccacacggcagaagctcatcaggaaggcggaacactggacaaattgcagaaggctgctgccaagcagaacaacggtatcagaggcctgcgtgatgcaactatgatgaacgttgttgccaagcgtcttaggatagcgtttcctgatgcctgctacacctatggcaacatcacgcatgccgacagagaaatgatgcgtttagagaagagccatgctaacgatgcggtagcaattgccaagcatcttgatataagggtattcggcgactacacaatcaatgattgcgattatacgactctgtataaacaggttcgcaagaagaagcggtcactgcatgaggctaatccccgcaaaggcagaaagcagccaaatcgtgaggcaaaacgcaatgcaaagaatacaaaacagcggtttggcatctgtctgtttgacaatgttcgctatgctggaaaatcaggcgtagtaacaggcttcaactcttctggatgcagagcaacgttgccggacggcacatatcttggtgcgactgcagcacagaaatcaccatcattgcggccatcgcaagttgtagttctgcatcataacaacaactggcttgaaaggaggctagtcatatga

SEQ ID NO: 645 - DNA, 254 bp, unidentified
  misc_feature 1..254: note = GENOME_ACESSION: mgm4743560.3 MG-RAST
  source 1..254: mol_type = other DNA
acaagtaaccgagcaagtcaggacttccagtcctgacttgcgaagttgcaagtagagcacgcgtaagagcgtgcagatgactagcctcagcagagaacacaacggctctgctatgtccgcaatgtgatgatgcaaaactacgatgccctaatagcgcagcatccaggcaacgtataccgcacaaacgagaatgtgcatgcgacctgatttccaagcattgcgaacattggcaaagggcaactgtaagtaactgg

SEQ ID NO: 646 - DNA, 888 bp, unidentified
  misc_feature 1..888: note = GENOME_ACESSION: IMG_2199352033_$F_2199352033JGI
  source 1..888: mol_type = other DNA
atggctactgagggcagagtattcgtgctagacacaaaccgcaaaccacttgcgcctaccatgcccgcaagggctaggcgcttgctcaatgcaggcaaggctgccgtgtttaggcgcgtgccattcacaatcatcttgaagcgcgcggttgagcttgatccacagcccgcgattgaattcaaggtcgatcctggtagtcgcacatcggggcttgccctcattgggaatttccccaagcaagggcgggttgtcctgtgggcggccaatctgcatcaccgcgggcaggctatcaaggacaggctcaaaccccgccgctcacttcgccgtagccgtcgtgctcgcaagacgcggtatcgtgcaccgcgatttgataaccgaacgcggccgaaaggttggttaccgccgtctttacaatcgcgcgtgcttaacgtcgcttcgtggtttgagaagctacttgatagggcgcagattactgagtgccacatcgaaaccgtgcggtttgacacacaagcattgcagtatcctgagatatccggagttgaatatcagcaaggcgagctcgcgggtcacgaggttcgcgagtacctgctagaaaaatggcagcgcaagtgcgcctattgcgggaaggagaatgtgccattggagatcgaacatattaacccgcgttccaatggcggatcaaaccgagtgagcaatttaacgcttgcttgccatgcgtgtaatgagaagaagagcaatcgcgatgtgcgagagtttctggagaaaaagcccgatgcgcttaagcgcatcttgacgcacgctaaagcaccacttaaggatgccgctgcagtaaatgcaacgcgctacgccatagggaatgcaatgcgcgctattgggctaccaacttcg

SEQ ID NO: 647 - DNA, 275 bp, unidentified
  misc_feature 1..275: note = GENOME_ACESSION: IMG_2199352033_$F_2199352033 JGI
  source 1..275: mol_type = other DNA
ctcgcacatccatgtgttcgttcgctaatcattttcgtcaatgtgctccggcatattgactgctcaaccagactcaggcggatggccgcctacgttatgcagagagctcaagaacacactccggggtgcttaaccagctccggaccctgtaaccgaatcgttaaacagtgcggaccgtgggcaacggacagtgcggtttgggtgcgctgatgcataacattgtcgaggttaccattacttagttgttgcgagagctttatggctactgagggcag

SEQ ID NO: 648 - DNA, 1281 bp, unidentified
  misc_feature 1..1281: note = Ga0272428_1021842 JGI
  source 1..1281: mol_type = other DNA
atgagcaacgtgtttgttttagataccatgcatagaccacttgacctgatacacccaggactagcacgtaagttattgaccagtggcaaggcggcggtgttttgtcgctatccgttcacgatcatactcaaaaaagaagtggaggaaccaacaatacacccgttacgcatcaagcttgacccaggcagtaagacaacaggcatagcgatagtcaacgatgcatcgggcgaggtcgtatgggccgcagaactggcgcatcgagggcaagcaataaaagacgcattagagagtagacgtgccatacgccgttcacgtcggcagcgtcacacacgctatcgcaagccacgctttgacaatcgacgccgcaaagagggttggcttccaccgtcgctagagagtcgtatccataccatcctgacatgggtcaaccgcttatcgaggtattgcccaatagccgcaatctcacaagagttagtcaagtttgatatgcaacttatgcacaaccccgaaataagcggcgtagaatatcagcaaggggaattacaaggctacgaactgcgagaatacctgcttgaaaagtgggggcgagtgtgtgcctattgcggcgtgaaggatgtgtcattgcaaattgagcatatccaggcaagagccaacggcggttccaaccgtgtgagcaacctcacacttgcgtgtgaaccatgtaatgtcaagaaaggaacacaagacatacgggacttcttgaagggcaagcccgatacgttggaacgggcacttgctcatgcgaaagcccccttaaaggacgcggcggcggtgaacgcgacacgatgggcattgtacgaacgcttgaagcaaaagggcttacccgttgagacaggaacgggaggacgcaccaagttcaaccgcatgacgcaaggcttagacaagcagcattgggtagacgccgcctgtgtcggggcgtcaactcctgtcctcttgattgatcgggtacgtcccttgctcatcaaggcaacagggcatggcaaccgtcagatgtgcttgatggatagatacggcttccctcgcactggccccaaatccgcgaaagtggtacacggttttcaaacgggagatatggtcaaagccgttgtaccaacgggcaagaaagtggggacgtacatcgggcgcgtcgcagtacgggcaacgggcagcttcaatgtgacgacgaaaacacatgggacggtacagggcattggctataaagcttgtgtaatactacataaaaccgatggctatagttactaa

SEQ ID NO: 649 - DNA, 242 bp, unidentified
  misc_feature 1..242: note = Ga0272428_1021842 JGI
  source 1..242: mol_type = other DNA
gtcaagaaccccacgcagagaatgcgggggcttgtgaaagcaagcctgtcttgaccagtctcagggaaacctacgccagggaagaatgtataggtacgtcaggatgcagaccagtcttgaccactacggttgggaattaaacagtctgtcggggtgataggcagtgttgccaacaagaaaccttcccatagcattgacgaggtactcattacctccgaaaggagaggctcatcatgagcaac

SEQ ID NO: 650 - DNA, 1494 bp, unidentified
  misc_feature 1..1494: note = Ga0310134_003633 JGI
  source 1..1494: mol_type = other DNA
atggtatacgttatatcaaaaaacgggaaacctctcatgccgacaaaacggcatggcctggtgaggatactgctaaaagagaaaaaagcgcgtgtagtgcagcgcaagccgttcactatacagctgttgtacgacagcacgacatacacacaagacataacagcggggtttgacacaggccgagcgtaccagtcaatcacagccgtcaatgcccggacaggcgaggttttgtactcgtctgtgctggaaacgcggaacaaggaagtacccaagcttatgaaatcgcgcaaaatgtatcgggcgataaggcggcacaacaggcggatgaaaaaagtaagacgcgctgtaaggaataaaacatacttcagagcgccgaagaaagtagtctggcccggcgcaaaagagccgataaccgccaagtatatcaaacccaaagaagcgcggttcaataacaggaagaggccggaaggctggctaacgccgacagcagtgcatcttttgcggacccacctcaactattttaagaaggtcaggaagatactgccgattaagacgctggtgctggaatacggaaaatttgacattcagaagctagagaaccctgatatcaaaggtgccgaataccaacgcggcaaattgtacggctacaataatctgcgggaatatgttatagcggtacagcagggcaaatgcctgttatgtgaaaagaagccgatagaacacctgcaccacgtaatgccggggtcaaaagaaggcagcgacacatacaaaaacatagccgggctgtgcagcaagtgccacgcaaaggtgcacacaagcccaaaagcaaaagaaaagctggccgagaaagctgccggcactgcaaaagaatacgccgacacgagtatactcaacataatcatgccatatctgtacagcgagctaaaatcgatgctgggcacggaaaacatagcattatgctacggctacgaaaccgaggcagccaggaaatctttcgggctggctaaaagccacagcaacgacagctatgcaatggcgcttatggcaatcggacaggcgtccaggatagagaagatagagccgtaccggtacaaacaatacaggcgtcacaacagggcgttttgcgatgcccagcgcgacaggctgtacaagaaggacgggaagatagcggcgaggaacagacgccgcaggacggaacaggaaggcatctctctggcggaataccgcagcgagcttataactgcgcttggcaagaagattgcgacgagagagatatcaaagctcaaggtgtatagagcagtcaagaaaaagagcacgtcaatcaaagatgtgctatttccaccaggatgcgcagtcaactacaaaggacaaagagcagttgtcaaaagttttttcaacaaaggcagctcgctgatattggaaggcatttctgggtatgtgccggccaaggactgtcagcttattactaagaaagcggggatagtatgtctgtga

SEQ ID NO: 651 - DNA, 212 bp, unidentified
  misc_feature 1..212: note = Ga0310134_003633 JGI
  source 1..212: mol_type = other DNA
gtcaactacccccgtctaaagacggaggcatgaggtttcgtaaccaagtgttgtacctgcgggtacagtagttgaacaggcggcgatgcggctgggcactccaggatgccactcccagtcccggacactgccgacgagccgcatcaagccgggggagaccaaccggctaacgatagccgagcaattacctaaaaagaggtgcaaaggaaatg

SEQ ID NO: 652 - DNA, 1239 bp, unidentified
  misc_feature 1..1239: note = Ga0247610_10094209 JGI
  source 1..1239: mol_type = other DNA
atgatatatgtattgaataaagagggtaaacctcttatgccgacttctcggcatggcaaggtaagacgtttattgcgtgataaagccgcagtaatagtcaattacaacccttttactattcaattaactacggagacaagaaatgaagtagatgaagtttcattaggtgttgataccggttatagatatattggtttatcagccacaactaaagataaagtcttatttgagtgcaaagcagaattaagaattgatttagttgacaatttaactgctagaagagaattaagacgtaccagacgcaatagaaagttaagatacagaaaacctagattcttaaatcgtaaacgtgaaaaaggatggttgcctccgtctattaaaaacagattggaatgccataaaacacttattgcaaaagtacacaagtttttgcctgtaggcaaaactattgtagaagttgcaaatttcgatattcagaaaatcaagaatcctgatataaaaggtgctgagtatcagcagggtgatcaattaggtttttggaatgtacgtgcctttgttttatatagagataattatacttgtcaatgctgttttggtgaatccggtaatgataaattacaagctcatcatttaaaacaaagaaaagatggaggaagtaatgctcctgacaacttaattactttatgtgacccatgtcataatgatattcatgctaaaaggaaaacattaaatgttgaccctaaagggaaatcttataacgcagaaacccttatgaatacattgcgtaaatatctgtttagagaccttaaagaaatatatcaaaatgtaagttttacttatggttatataacaaaatcagtaagaattgaaaataaattagaaaaagaccataatgtagatgctagatgtatttcaggaaatcctttagcaaaacctaatggtatttacttatttaaaaaggtaagatgtcataatagacaacttcataaatgtaaaacattaacaggtggaataagaaaacttaatcaatcaccttatatagtacatgggttcagactgtttgataaagttaagataaataatcagataggatttatatatggcagaagacaaacaggatattttgctattaaaaatatagatgggaaaactatttcaaaaagtatttcatataaaaagttaaatctcgttgaaaaacgaaaagggtggattgttgattttaaacaatctgaattgtaa

SEQ ID NO: 653 - DNA, 335 bp, unidentified
  misc_feature 1..335: note = Ga0247610_10094209 JGI
  source 1..335: mol_type = other DNA
attgacatagagtacaagtgaaacgcatacaagtgagcaaagtaactgtatataaataaactttacaatttgtttatatcttttacatagtctaagtgatttcactgaaaagtgaatgaactacgttatgagagaatgactgtaaaaagtcaaatagttaccttcggatgttcatctagtctgaagctctaaggtgtatgattaaacagtcggtattgctgacagtgttgtacacaacaaacctctcaataacattgacgaaggtgcttatcagttttgcagtatctggctttgtgaaagcataaactgcaacctattttaaggaattttaaatg

SEQ ID NO: 654 - DNA, 1323 bp, unidentified
  misc_feature 1..1323: note = Ga0265292_1000080 JGI
  source 1..1323: mol_type = other DNA
atgaaaaccacaaacagagttttcgttgttgacacaaatcataaaccattgacattatgccgacccgttagggcaaggcaattgttatgggacaagaaagcggcagtactgcgccgatatccattcacaattattttgaaagaatcaaaactaaatgctgttgttaatcccgtaaaggttaaggttgatcccggtgcaaatactactggaattgcgttagtagacataaaaaagaatattgttatattcgcatcggaacttgaacaccgtgggtttggaattaaatcttcaatagattcccgccgctcacagcggcggtctcgtcgcaatcacaatctcagatatcgcgaggcaagatttgatcaccggaccagaacagacaaatggttgccgccgtcattacggcatcgtgtagaaacaacaatgacctggattaatagatttatgcgatttgcacctattgaatcgcttgctatagagcacgcgaaatttgatattcagaaaatgcagaaccccgaaatatcggtggtagggtatcaacaaggcgaactatttggctatgaagtcagagagtatctacttgaaaagtgggggcggaagtgtgcatattgcgggaaagagaatattccgcttgaagtagaacatatagtttctaaaagcaaaggcggaacagacagagtgtctaatctaaccatttcctgccgagaatgtaacgagtcgaagggcaatcatcctgtagcagaatttttagcagataagtccgatgtccttaaacgcatcttagcccaagccaaatctccgttaaaaagtgcggcaataacccaagccacccgtaatgttttaacattagcgatgtgcgataccaatcttatagtagaaaccggaactggcgcacaaacgaagatgaaccgggtaaagttgggatataaaaaagcccattggattgatgctgcgtgtgtcggcagttccggcgtggcagttaatctgaatgtcggtatgattccgatgtccattaaatccaaaggacatggcaatcggcagatgtgcggaacggataaattcggctttccaataagacatcgctcaggacaaaagaagtattttggttttgagactggcgatatagttaaagcggatgtcctcgccggcaaaaaaaacggaagatatattggacgagtgctgtgccgtaaaagtggctcatttgatatttcaacggctatcggtcgaattgaaggaattccttggaggtgttgcaaagtagtccatgccaatgacggctatagttatagacaaggggagggagcaattcctcctcatgtctaa

SEQ ID NO: 655 - DNA, 331 bp, unidentified
  misc_feature 1..331: note = Ga0265292_1000080 JGI
  source 1..331: mol_type = other DNA
gtaatgaaccccacgacttcagtcgagggcttgtagaagctccaattcattaccagcccaagtcccggattttcggggctacgtttaattggagatggtacctacgaatgcgtgccagttcgtagcaataccgctgtttttcatgctgccgtagatgaggatacggcgaaggaggctggcgtaacaatccttttagacattggcgaggcaaacattactcccgcaagggatggaacggctgggattaacccagcaacaaactgtggttggcggggagcaatactctccgccgacttcagataaacgagtcggagtcgtaaactatcgggag

SEQ ID NO: 656 - DNA, 1281 bp, unidentified
  misc_feature 1..1281: note = Ga0257070_1000485 JGI
  source 1..1281: mol_type = other DNA
atggtttatgttctaaatcaaaacggacagcctataatgccgacatcgaaccatgcaaaggttcgtattctcttaaaaacaggtaaggcaaaagtaatccacaggtgtccgtttaccatacagttacagtatagtagcacgaactatacacaggaagtcagtcttggaattgatgcaggaagcaagcatatcggagtatccgctacaacagaaagtagagttttatatgaagccgatgttgagcttagaaacgatatagtggatttactgtccacacgtagacagaatcgcagagcaagaagaagccgtaagacccgttaccgtaaaccccggttcaacaatagagtttccgctaaaaaagaaggatggttagcaccctctgtaaaactgaaagtaaatactcacttaactgtcatagcgaaagtacataagatacttcccatatcgaaaatcgttgtggaaacggcatctttcgatattcagaagattaaaaaccctgcgataagcggtacagaatatcagcagggcgaacaattaaacttctggaatgtcagggaatatgtgcttttcagagatggtcacacctgtcagtgctgcaaaggcaaatcaaaagacaaaatccttaacgtgcatcatatagagtcgagacatacaggtggagacgcacccaataatctgattactctatgctcagtctgtcataagggacaccacaacggtactgtgcagttaccaaaaaccatcagacgtggaatgtctttcaaggatgcaacgtttatgggtatcatgcggtggtcttgctataacaaactgaaagcgatctacccaaatgtaaatctcacatacgggtatattacaaagaatactcgaattgagaatggtttaccaaaagagcattatatagatgcccgttgtataagtggtcattcgttagcggtaagcggtggcgaagttttctatcagaagaaagtacgttgtcacaatcgtcagatacacaaaagcaccataaacaaaggtggcaagcgcaaacttaatcaatgtccatatcaagtacaaggatacaggctttttgacaaagttctgtataagggacaggaatgcttcatattcggtaggcgtagggatggaagattcgccgtcaggttgctagacggaaccaaacttaatgaacagatcacatacagaaaactgagatttttagaatctgcaaaacatttcatcacagaaaggaggacgccgctcctcatcggggcaagccccgacgttcccgcggctgtttaa

SEQ ID NO: 657 - DNA, 278 bp, unidentified
  misc_feature 1..278: note = Ga0257070_1000485 JGI
  source 1..278: mol_type = other DNA
actaatacccacgggcaagcccgtggggttgtgcaaacaacccggagtgagtagcctaagtgaagtcttttgactgaactacgttaagagagaatatatagtcacctacgagcataatgcctaacttgtagctctgaggtcagtaattaaacaatcctgcggtatagggatagtgttgctgatataaaacctctcattaacattggcgaaggcgtgcaaccgctcttcagagcgagtaattaaatccttatgggatttggaaaggagcgaaccttatg

SEQ ID NO: 658 - DNA, 1449 bp, unidentified
  misc_feature 1..1449: note = uncultured Erysipelotrichaceae bacterium
  source 1..1449: mol_type = other DNA
atgtggaccccgtccataaggacgagaacccgtaacccgtttggggataaggacgtgcgtaagcacacaactttacagtacaggaggaaggcatctgccatgaaaacagtatttgttattgcgaatgacggcacacggctgatgccgaccaatattaaacgtgcaaggcgtttgatgaaacgcagagaagccgtcatttgcagacatgatccattcactattaagctcaccagagattctgaacataatgttcaggatatcgagtttaaacaggatacaggcgataagcatattggcatatccgtctgctccgaaaaacatgaatatatcagtgctcagtatgatcctctgaaagatgaaacaaagaagcacaacgatcagcgcaagtaccgtcgaacccgcagaaaccgcaggcgctatcgcaagccgaggtttgacaaccgcaagaaagacaggggatggtttgcgcccagtattgagcacaagaaggaactgcatgtcagactcttcgagaaatacaatgatgtctgtccaatcaaaaaagcggtatttgaagtcggaagctatgatatccatgcaatgcaggaatatgaacagaacggtgcagttctgacaggcactgattatcagaaaggaccaagatacggcatgaccacacttcgtgaagcagtgctgtatcaccagaattatatctgtcctctctgcagaaagagtcttatcggtgcaagaactgctattcatcacagaggattccgaacaggcgacagatcaaacagactgaataatctgatggcagttcacgcatgggaacacacatcagccaatcacaaacccggcggattattatgggacatcaagcctgatcacaggccattcaaaggtgcggcgttcatgaacatcgtaagaaaagcaattgcggatgaaatcgagaaacggcatccgaatgttgccgtgatacgaacttatggcgcagagacaaagctccgcaggcaggatctgcacatccgcaaatcacatgcgaatgatgcctatgcaatgggcgagtatcatcctaaacacagatcgcagacaatgcactttcagaagcatcgcagaaacaaccggatactgagcaaattttatgattcgaagtacatcgatgttcgggacggcaggaagaaatcaggtgccgagcttagctgcggacgaacaaacagatgcgtgccccgcaacaatccggagaacaacagagtattcagagggcagaagctcgctaaaggcagagtatcagtaagaagacggagatatccaattaacagcgaggatgctgttattgtcaacagaaaaaagctgattgccagcggcactgcacattacggtgaatacgtgcacttcggcaaaggtcataaagatgtaaaaacatcacaagtgaggatccgctgccatgcaggcggatgggtacagatataa

SEQ ID NO: 659 - DNA, 345 bp, unidentified
  misc_feature 1..345: note = uncultured Erysipelotrichaceae bacterium
  source 1..345: mol_type = other DNA
gtcaataaccccgcctaagttctaatgaactataggtgaggcttgcggaaaacgcaggcctgattgattagcctgagtgcttcgagcactgcgttatacaggaatgtataggcacttcagaatgctccacaagttctgaacactgcgagcccgagtaaacatctctgagggcaggagaagtcggaggcagtctgatatcttcggatatcagaaaaaccctgtataactttggcgatgtggaccccgtccataaggacgagaacccgtaacccgtttggggataaggacgtgcgtaagcacacaactttacagtacaggaggaaggcatctgccatgaaaacagta

SEQ ID NO: 660 - DNA, 1431 bp, unidentified
  misc_feature 1..1431: note = Ga0223845_11721960 JGI
  source 1..1431: mol_type = other DNA
atgcctaccctccgcaggcaccacgtggaaaagctcttaaggcgcgggaaggcaagggtcgtggaatacgtccccttcgtcatacagctcatgtatgactccccgtgcgtgacacagcccctctacggcgggacagaccccggaaggaccaacatcggcaacgccgtcatggacggcaggggcacagtggtctacaaggaccacgtgacgacaaggaacaaggagatttcaaagctcatggctgccaggaggcagtacaggatggcctcccgcaggggagagcgcctggccaggaagcgcctcgcgaagaggctcggcactacgatgaaagctgtactggaacgggtactgcccggctgtgacgggcctgtcaaggtgaaggacatcatcaacactgaggcacggttcaacaaccgcagccgcccgaagggctgggtaacgccttctgtaaaacagctcatccgcacccatgtgaatatggtccggcggatcaggaagtacctgccggtggaacattggacactggaacttaacaggtttgccttcatgcagctggatgacggttccgtttatggcaccgacttccagaacgggaagctcaggggctaccgtgacgtaaaggactatatctggcacctgcaggaagggaagtgcctgtgctgcaaaaaggcaggcatagagcattaccaccacatcctgccaaggcacaagaacgggagcgaccgctggtacaacctggcagggctgtgcacatcatgccacgacaaggtccaccggggggagatatccataaaagcggaagggacccgccggcgctataccgggacatccgtcctgaaccaggccatcccggggatcctgaaggaattggaggaaatgttcccctctgtggacacatgcaccggcagggaaacagccgccgtaagggagctgctctctgtggagaagacccacacggacgatgctgtctgcatcgccgcgtacggggcaccagtatctggcgtgacagacaatgcgcatacctttaaggtaaggcagttccggcgccatgaccgagcccgtgtcaacagccagcgtgagcgcacctacaaggtacagacgggcttcaataaaaagggggaaccggagtacaccattatcgcgaagaaccggaagccccgctatgaacagaaggggcctgccctgagccagctggggctgtccaggcagcagatatcggtactgcacgtcgaaaagagcaaacggcactgtaatacaccgggccgcatgatgcctggagctgtattcatttataagggtgaacggtacgtgatgaccggccagctgacaaaaggaaaatatttccatgcagcaggctgcgggaaaaagagtttcccgacagcaaaatgcagcatcgtcagccacaatagaggattggtctacatagcgtaa

SEQ ID NO: 661 - DNA, 253 bp, unidentified
  misc_feature 1..253: note = Ga0223845_11721960 JGI
  source 1..253: mol_type = other DNA
gtcaatgacccacgactaaagtcacgggcttgcagataaaagaaagaagcactgctttcatctttttctgtcatccgtggctatcatgcatcattgagcagaggcgtgacgcgccgctcaccccggggtgctttctagccccgggcgatggcaacaggcgcgccaagcataaggaaacatttttggcagtgcggagccttacaagctgtgaaacactgccctttatcacaggaaggaggtaccagtggggtac

SEQ ID NO: 662 - DNA, 1011 bp, unidentified
  misc_feature 1..1011: note = Ga0118727_1075366 JGI
  source 1..1011: mol_type = other DNA
atgttagtgcatgttttaaataagcatggtaaacctttgatgccatgcgaacctcggaaagcaagaatccttctcacagaaggaaaagcaaagcctgtcaaaggcaagactggctattttacaattcaattattatacggaagcagcggttacaaacaagatattgttatcggaatagatacaggcgctaaaagagtgccagtagctgctgttggtaatggtaaagtgtattacgcaaaggaaaaaattcttaggacggacgttaagaaacaattgtctgacagagtaagttacagacgtacaaggagaagtaggaaaacgagataccgtaaacctcggtttctgaacagaacaaagaccaaatgtgccagatgtggcatcaataacgtgccaaagcgttggaaagaagtaaaacgcaaaaatggcaagagcagaaagagggtgtgcgatggcagagcgcaactttgtcgtcaatgtcaaggcaagaaaggcacacacaagaggccgcatattcttgcgccatctgttaaaaatcgtgccgaaagcatccttaacgacattcacaggttatctcagtcacttcctatctccaagatagtcgttgagatagcatcttttgatacgcagaaaatggctgatgccatgataaaaggtgttgagtatcagcatggaacgttgttcggctatgaagtcaagcagtacctcctaacagtacacaagcataagtgcgcatgctgcggtggattatcagaagacaatgtattgcaggtggagcacatatacccacagaccaagggcggaaccgataaggttagcaatctgaccatctcctgccgagtatgtaatgaggccaaaggaagtttgacattaggtcaatgggagagaatgttgcgtgctttcccaagtgagattaatgagaagcgattgaaaaacatacctgctattaggaagcagagcaaactcaagaagggattccagtacagcgcgttgactcaaagttataagaattac

SEQ ID NO: 663 - DNA, 291 bp, unidentified
  misc_feature 1..291: note = Ga0118727_1075366 JGI
  source 1..291: mol_type = other DNA
gtcaagaacccctcctgattgttccaatcagaaggagcttgcataggcaactcttgcaacccctatattgacagcctaagtttctttttagatactacgttatccagttatcacacccttgggtgtttcaccagcccatagaagtagtttggctctgtgggggctctgtaaccagtcgtgagaggtagcgacagtcaaccccaggacgacctgacattttaggcaagctggataacattggcgaggtggtgcgtacaaatctaactccgaaaggagctgcactttatgtta

SEQ ID NO: 664 - DNA, 1245 bp, unidentified
  misc_feature 1..1245: note = Ga0326512_10006706 JGI
  source 1..1245: mol_type = other DNA
atggtttatgtattacataaaaatggaaatcctttaatgcctactaaaaatcattctaaagtaagatgtttattaacaaataaacaagctaaagttgtaaatacagaaccttttacaattcagcttttatatgatacttctgaatatgttcaggacgttaatttaggagtagatagtggttgtaaacacattggcatttctgctactactgaaaaagatgttttatttgaagctgttgtagaagaatacgataaaacttctgaaatgttacaacaaagagctatgcttagatgtactcgtagaagtcgtaaaacaaggtacagaaaaccacgttttatgaatagaactaagtctaaaaaagaaggatggatagccccttctataaaacatactgttcaaacacatttaacaataattaataaagtacataaaatattacctattaaaaatattattgtagaaatagcaaattttgatattcataaacttaaaaatcctaatattaacggtaaagaatatcaggaaggagaaatgaaagattattataatgtaaaacaatatgttttagatagggacaatcatatttgtcaatgttgtaaaggtaaatccaaatgtaagaagttaaatgtacatcatataaagtttagaagtaacggcggtggaaattcacctttaaatcttataactttatgtgaagactgtcatagtgatttacacgataataaaataacattaccagaaaaagtaattaaaaatgtaacatttaaatttcctacacatatgaatataatgaaaaatactttaattaaagaattaaaacaattatattcaaatgtagatattacatacggctatataacaaaatattatagagaatcatataatcttccgaaagaacattatatagatgctagatgtatttcaggaaattatacggcagaatcattaggatattattatatatttaaaaaacttcgttgtcataatagacagattcataaatgtataataaaatctaataatgtaagacctttagcaaaattatcttatgctatttatggatttagaatgtttgataaagttttatatgataataaagaatattttgtttatagcagaagaaataatggctgtttcagtataagtcctttatatgacctaaaaacatatattcagaaaacatataaaaaacttaaacttatagaaccgtgtaaacatttagtgtgtcaaaaagtagttatttaa

SEQ ID NO: 665 - DNA, 290 bp, unidentified
  misc_feature 1..290: note = Ga0326512_10006706 JGI
  source 1..290: mol_type = other DNA
ataaaaatttattaaagttaataatcctaaaattaaaaactttaggttagtaattagtctaagttctgaaataagaactacgttatttgagaatatattatagttacccatgggtgtaataccaagcctgtggctctaaggtaaatagttaaacaattcttatttgtggggaatagtgctatttatttttaaaacctcaaagtaacattgacgatggtattttaccacttttatagtgagcttatttaagtgtttaaacactttttaaagaaaggaaaaggttttaaatg

SEQ ID NO: 666 - DNA, 1371 bp, unidentified
  misc_feature 1..1371: note = Ga0209777_10000441 JGI
  source 1..1371: mol_type = other DNA
atgcagaagtttaaagaagagtttcagaacgtacctacgaatgcttcactagtttgtagctctacaaatttgatgttaaacagagaggacactctcagtgcatcaaatcgcctcgaaagaagcacactgactttaaacaatcccgaagtgaatcgagttcaacaaacaggacgctcattaaaagtatttgtgtttgtacttaatatgcaaggcattcctttaatgccttgttcttatgctaaatcaaaacgattaattaaaaaaggagctgctaaagtaattaaaagatttccttttactatccaactcaattttgagtgtgaaaatcacactcaaaacataaatttaggaatagattctggttatgaaaacatcggtttttctgcttctactgaaaaacaagaattaatttcaggcactttaattttagatggaaaaactaaagaaagattagaagaaaaaggaatataccgaagaggaagaagatataaattatggtacagaaaatctagatttaataatagaaaaaataaaaaaatacaattacctccaagtatagaaagaaaataccaaactcatttaaatttaattaaaaaattaaaacaaattcttcctatttctgaaatttacatagaattaggaatttttaatgttcaaaaattagaaaatccacacattaggggagcacaatatacgcaaggaaatctctataaatatcaaaatatgcgaaattatttatttgctaaacaaaatggaaaatgtcttttttgtaaaaaagatttgaaaggattttcttctcatattcaccacattaaatcaagaaataataacggaaataatagagcagaaaatttaactttatctcataaaaaatgtcatgtaaaaatacataaaaaatctttagataaaaatctaaaatcaaattctaaagattataaacaatctacttttatgaatataattagtaagagatttcaaaaaaatcttccagatataatagggatatttggatatgttacttctatgaaaagaaatgaattaggattagaaaaaactcattttaatgatgctttcgtaatagctagaggaaataatcaaattagatgtaagtctattgaaattaaacaaatacatagaaataacagagttttacaattaaatagaaaaggatttaagccttctattaaaaaaaataaatctaaagtaaatcctggagatttattttggattggaaaaaaagaatatacttgtaaaggaatgtttaactatagtagatatattctttttggaaaaatgaataaaaaagaatattttaaattttcagaaataacaaaaatttttcattttggaagttttgcatggaatatttaa

SEQ ID NO: 667 - DNA, 271 bp, unidentified
  misc_feature 1..271: note = Ga0209777_10000441 JGI
  source 1..271: mol_type = other DNA
gtcaattgtctatccataatagattaaaatcgtgagattttacgtaagaattgattagggagcttaaaagaaatttttatgcagaagtttaaagaagagtttcagaacgtacctacgaatgcttcactagtttgtagctctacaaatttgatgttaaacagagaggacactctcagtgcatcaaatcgcctcgaaagaagcacactgactttaaacaatcccgaagtgaatcgagttcaacaaacaggacgctcattaaaagtatttgtgt

SEQ ID NO: 668 - DNA, 1242 bp, unidentified
  misc_feature 1..1242: note = Ga0268280_1002972 JGI
  source 1..1242: mol_type = other DNA
ttgaaagtatttgtagttgataaaaacctaaaaccctgtgacccagttaattctgcggttgcacgtatcttgcttagagagaagaaagcgactgtctataagcattatccatttgtaattaaattgaaagtagcttcagacatagagccacaaggcttacagttgaagattgacccaggttcaaaggtaactggtctagcaatcgtgaaccaggaaacaggagaaataatatttggtgcggaattggaacaccgtggatggataattaaaagagacttggatagtaggcgaaagtcaagacaatttagaaggtatcgtacagttaggtatagacctgctagatatcttaatagaaaaacccctagtgggtggatagctccgtctctaatgagtagagtatacaacattttaacttgggtaaaaagactgttaatttatactaatatatcaagtctggcagtggaaaaaagcacatttgacattcaaagaatgaatgatcccaatatctttaagagagaataccagaggggagaattatttggatttgacgctagacattacttattgcaaaaatataattatacttgtgtttattgtggaagtcggggtggctctttcgaattagaccatgttattccaaggtcaaaaggtggaacaaacaagataagtaatctggttttagcttgtaaagaatgtaatagaaaaaagggaaaatcttttctagatgagtttttagcaacaaaacccggattatgccagaagataaaaaatacaatttctcgtcctttacaacacgcagcagctgtaaatattactaataatcggctggtaaaagaattactacaatttaatttaccattggacgtggggtttggtagccagactagttttaatcggaattctcaaaaaatgaagaaagaacactggatagatgctgcgtgtgttggaacacttaatcacgatcttcattataatgataactttttggtgtttaatataaaagcatatggtcgtggtaagcgaaaaatgtgtcagaccaataaatacggaataccgacaaagtatagagaaagagcaaaaattagatttggttttcaaactggagatattgtaaaagcgttagttcctagaggtaaaaataaagggtttttaaagggaagggtaactgttagaaagaggcccacatttcatattgattgtgcagattctataaatcctaaatatatgactctacttcaaaaa

SEQ ID NO: 669 - DNA, 293 bp, unidentified
  misc_feature 1..293: note = Ga0268280_1002972 JGI
  source 1..293: mol_type = other DNA
ccccttgaaaactgataccatgatttgtaatttttttgataccaacttttgtaatcttgctttaactttgtgtattcagaaaggttacccggctaagtgatgatagcaatatctgaactacgttatttcggtcacgacaccatgggatgcttcaccagtcccatgcaactgtcgcctgcggttaaacagggtaattccagtgctgcaagcttaacaagccaagatatacattgccaaggtgacgtgtggaaacacacaccacccctttaatgggagagtatttaattgaaagt

SEQ ID NO: 670 - DNA, 1335 bp, unidentified
  misc_feature 1..1335: note = LHMISPF_alex1_c100 JGI
  source 1..1335: mol_type = other DNA
atgtctaaaacccccaatcaagtattcgtacttgacaacagcaagaaacctctaaccccgtgcctaccagtgatagctagaaaactattaaatgcaggtaaagctaaggtttttagactgtacccatttacgattatcctgaaaaaaacagttgatgaacaaccggaaccaatagaaattcgcatagatccaggtagtaaaactacaggcctagctttggtgagcttaacccaagtaatttggggggctgaacttacccatcgggggcacgcgatcaaatcccggttggaaacccgcagcgccatccggcgcagccgtcgtcatcgtaaaactcgttatcgtcagccacgatttctaaatcgcacccgcccgaaaggttggctacctccctgtttggaacatcgagtgttaaccacaattacatgggttaatcgcctttgtaagttagcaccaattaagtcaatagcttttgagttggtaaactttgatactcaaaaaatgcaaaacccagaggtttctggtgttgaatatcaacagggggaactgcaaggttatgaggtgagagaatacttacttgaaaagtggaatcgcaaatgtgcttactgtggcgctgaaaaattaccattgcaagttgagcatattaacccacgcgcttcttgtggtagcaaccgcgtttctaacctatgcttggcctgtaaaaaatgcaacaccaaaaaggggactcaagacatcaaagactttctgaaaggtaagcctgagattctgaaaagaataatgagtcaagctaaagcaccgttaaaggatgcggcggcggtcaatgggactaaatctgctttgcttcaagctttaaaggctacgaaactagagcctatttatgtgggacggggttctctaactaagttcaatcggactaaattaggtttaccaaaggctcattggatagatgcggcttgctgtggagatgtgactcagggattaactttggcaatcaatcaacctttgttaattaaagctatgggttggggtagtcgccaagttgtacagactgataaatatggtttgactcgcaagggttatcagcctaagcaaaaggtcaaaggttggaataccggagatatgatctcagtgattggtggcaaacatgagggggtgaaatgcaagggaattaaaactacaaggtttaagggtaactttgatattcgagtaaacgatactactgtgattagcgtttcgagaaatcaaattaagccggtttacagaaatgacggatacaactactcatttgtaggaaattgtcgcgaaatgtccgagaaaagagtgagagcaataggatag

SEQ ID NO: 671 - DNA, 276 bp, unidentified
  misc_feature 1..276: note = LHMISPF_alex1_c100 JGI
  source 1..276: mol_type = other DNA
agttacggtttcgcttaggttctatagacttactcaaatcctagacatttccgaataaaccccgaaattgctaagtaagtccaggctttcgttattggcaagcgttcaagttcataccttgaggtgcgtgccagccccaagctctataactcggcagttaaacaggcaaggattttgtaaagccagtgctgctgagaaagtaccgaccaataacaatgccgaggccacctttactaactaggaatagacgcaaccatgtctaaaacccccaatcaa

SEQ ID NO: 672 - DNA, 1362 bp, unidentified
  misc_feature 1..1362: note = Ga0307249_10042978 JGI
  source 1..1362: mol_type = other DNA
atggcaacatttgttatcgcaaaagacggcacccggctgatgcccaccaccaacatcaagaaggtgcgaaccttgttgaagaagaaacgtgccgtcgtctactgttatgacccatttacgatccagttgacctatgaaggaaccaaacatgtgcagcctatggaactgacacaggacgccggctaccagcatatcggcgtatccgtgaagtcagagaaacacgagtatgtttccgagcagtacgacctgctcccagatgaaccggagcggcataacgaccggcgtaaataccgccgttcccggcgaagccggaaacggtaccgcaaaccccgtttcgacaaccgagccattcccaaaggatggctcccgccatccctggagcataaggagcagctgcatgtacagatcttcgataagtacaacgcggtagctcctatctcacaggtagtggtagaggtagcccagttcgatacgcagctgctggaagcaatagaagccggtaagcccttgccggaaggcaaggactaccagcgaggtgaacagtacggatacgacaccctgcgggaagcggtattcagccgggataagtacacctgcctctgctgtggaaggaatgcgttcaaagacggtgccatcctccggatgcaccatataggattccaaaccggcgacaggagcaaccgcatggggaacctggcatctgtgtgtaccaaatgccacaccgccagaaaccataagcccggcgggaagctgtacggctggaagccgaagctgacaggcttcaagggcgccgccttcatgaacgcggtgaaatttcagatttgtgaggcacttcggatgaaacacccggatgtagcagttaccttcggcgcccgtacgaagcgagcgcgcctttaccggcaactagccaagtctcataccaacgatgcctactgcatcggcagttatagacccagacacagatcgagaccgacggtatacgccaagcgccgcaggaacaaccgctgcctggagaaattttacgatgccaagtatgtggacacccgcgatgaaaccgtcaaaagcggcgctcagctgtcttgcggacgaacgaaccgttcgacaccaaggagcaatccgctcaatgagcggatctaccgcggtgaaaagaagtccaaaggacgcaggagtattcgccggaggcggtactcactgcgaccctatgacatcgttcaagtcaacgggcgcagatgtaccgttaagggcgtgcaaaacaaaggcgcctatgtggccctcagtgatggtactgtggtcagcatcgcaaaggtcaaggccatccgccacattggcggatggtccaaggaaaccacaaaaccggcgtag

SEQ ID NO: 673 - DNA, 377 bp, unidentified
  misc_feature 1..377: note = Ga0307249_10042978 JGI
  source 1..377: mol_type = other DNA
gtcaataacccccacttaacctagttggttagaagtggaggcttgtgggaacgcggaagcgttcctgtgagcctgattgattagccagggtctaacgacccctagagtgaccctgccaagtctgcggatactggcaggtgagaactacgttacacacaaatgtataggcaccggaggatgctccacaagtcctccgcactgcggtgtgtctttaaacatctctgagggtaggagaagtgaggcacacatcgaaactgtgtgtaacattggcgatgtggaccaccgcccaaaagggtgaggatcccggacgcttgccgtccgggaaggcgtaggcctttgcaacactgaacgaaaggagcatcagcttcatggcaaca

SEQ ID NO: 674 - DNA, 1365 bp, unidentified
  misc_feature 1..1365: note = Ga0163144_10177891 JGI
  source 1..1365: mol_type = other DNA
atgctatacgcattactccgtgttgttgcggaggagcgcatgatgactaagtcgtcgtctgttgtgttcgttatcaacaaaaatagtaggccgcttatgccttgtcgctctatgagggcgcgagtccttctgcgagatggtctagctaaagtggtatcgcgagttccgttcaccattaaacttctaacccagcaatcggagtacaaacaggatgtaacggctggcatggacactggagcaaaacacattggcgtcgctgctatttcaagcggtagcgtcgtataccaggccgaagtaaaacttcgcggggacgaaattaagggcaagatggaccagcgtagaatgtatcgccgcacccgtcgtggccgcaagacacgctacaggaagccaagatttcttaaccgcggtaactccacaaagactggtcgcataccgccaagcgtgcgtcacaagttacaggcccatgaccgcgaaagactattcgtcgaatccatcctgcctgtcacaaaatgggtcgtagaaaccgccgcgtttgatatcgctaaactatctttatcagataatgtagcgacgcttaaaggcgccgattaccagaatggacgccagaaaggtttctacaacgctaaggcattcgtcctccaacgcgacgcctacaagtgccagtacggcaaaggtaagtgctcaaaaattcttcacgtccaccacattatctttcgttcgaatggcgggaccgataagccagaaaatctcataactctctgcaaaattcatcacgacgcccttcatgcagaaaaattaggtacatttctttcgctcgaaaaatctcttgcgcgaaaagcctctacaaaagtaaagggagccacccaaattagcatgattgcggcccacattcgtcgcaactggtggaatataactgagacattcggctacgagactaaattaaaacgagaagcccttggtcttccgaaaactcattacaacgacgccgtcgcaatctgccttaacgaaaaagaaaccgtcgagatttcaaacatcaagtattcaaagcgcctcgtatcaaaaggcgattaccagcagacatcaggttccagaagcgaaaaaactatccctacaggcaaattatttggcctcaggaaattcgacctaatatcgacacccaagggaacagggtttgttaagggaaagcgcagttcaggatttttcgccatatcgctactcgatggcgagtccatcaccgattccgtaagcgttacgaaaaatactgtccgattatccgcaagggccttagtcctgatttccagaactatccttgccaaattccttcccgccgtaaacgacggaatatcctttggaggttcaagatga

SEQ ID NO: 675 - DNA, 318 bp, unidentified
  misc_feature 1..318: note = Ga0163144_10177891 JGI
  source 1..318: mol_type = other DNA
gtcaatcaccccaccctaaacggtggggcttctagggtgacctaggagggtaactggttgaccagaggactaacaaaggagacgaaagaaagtgttagtagacgttaaagcggagaaaaacatacacacccagggatgccatcccagtcgccggctctgtggttctgtcgttaaaagagaggaaactctcggtgcgctgaactttaaaacccgctttaacccctcgagggaaggtcggattcgtgtggctactcctacgccatgctatacgcattactccgtgttgttgcggaggagcgcatgatgactaagtcgtcg

SEQ ID NO: 676 - DNA, 1392 bp, unidentified
  misc_feature 1..1392: note = Ga0265595_1002166 JGI
  source 1..1392: mol_type = other DNA
atgcagaagttatcaaagagagatacatacacacctacgaatgcttctcaagtttgtaagctctgtgatctgacattaaacattcctatgggtaaggaaagtgtggaagatttaaaaacctttgataacaactccgaagagaatctacagcattcacatagagctggtttgaacccaaaagtatcaaacattgtctatgtacttcaccaaaatggtagtcctttaatgccaactaaaccacaaaaagcaaggaggttattacaatgtaaaaaagcaaaagtagtaacaaaatttccatttacaattcaaatgttgataccaacaggagaagtaaaacaagagattacattaggtgttgattctggttatgagaatgtaggaatatcagcagttacagcaaagaaagaattattatcttataactttaaattaagaacaaatatgtcaaagttaatttctgacaaatcaatgtatcgtagaggtagaagaaataagttgtggtatagagagaaaaaatttcttaacaaaggtataccaaaaggttggttagcaccaagtatacttcacaaatataatagtcatttaaaaattatagagagaatacataagtttctactaataaccaagataatatttgagatagcaatttttgatatacaaaaaattaagcatcctattattaaaggtaaagaatatcaggaaggtgaacaaaaaggttttgaaaatgtaaagatgtatgtaagaagtagagatagttatcaatgtagaaattgtaagaagaagaatgttaaattacaagttcatcatataataagtagaaaaacaggtggtgatagtcctgataatttagtaactttatgtaaaaaatgtcatagtgattatcatagtgattatcatagtggtaaaattgaattagatattaaaaagagaaaaggctttaaagcagagacttttatgtcaacaataagaaaaagaattatagaagatttaaaaagcaaatatgatgatgtagaagagacttttggttatttgacaaaatgtaatagattagagttaaaattagaaaagagtcatataaatgatgcattttgtatagcaaatggtagtaatcaagaaagaagttttgttcaaaatataattcaaaagagaaagaataacagaaaattacaaatacaaaggaaaagatataaaccttctataagaaggcaaagatatagtattcaaccatatgatttattaaaaatcaatggtaaagaatatgtaagtaaaggtatacattgcaaaggtgaatcagtaataataataaaaaatggtaaaaagaagagtatttctgttaagaaagtagagaaagtatttcattttggaacattaatttatgtaaaggaggtatga

SEQ ID NO: 677 - DNA, 259 bp, unidentified
  misc_feature 1..259: note = Ga0265595_1002166 JGI
  source 1..259: mol_type = other DNA
gtcagtaacccacgactgaaggtcgtgggcttgcagaagcccttgctgactaggaggcatacttagtatgcagaagttatcaaagagagatacatacacacctacgaatgcttctcaagtttgtaagctctgtgatctgacattaaacattcctatgggtaaggaaagtgtggaagatttaaaaacctttgataacaactccgaagagaatctacagcattcacatagagctggtttgaacccaaaagtatcaaacatt

SEQ ID NO: 678 - DNA, 1410 bp, unidentified
  misc_feature 1..1410: note = Ga0111033_1162652 JGI
  source 1..1410: mol_type = other DNA
atgcaaacagtatctaagttatcagcagagttaaagaacgcaccaagggatgcttctctagtcccttgctctgcaagttctgcattaaacagagaggaaactctcagtgtgcaggacaaagtactggctgataaccttggcgaagagaacctactcgggaacaggagaaaacactctgtattagtgtttgtactgaacaaggagggcaaggctttaatgccctgccctcctggaaaagcaagacatttattgaagaagaaggcaagggtggttacctgcaagccgttcactatccaattactttatggcagttcaggatataagcagccgattacacttggaatagatgcaggctatagtaacataggattcagcgcggtttcacaggagtcagaattgattgccggggaagttaaattaagaaagaatatgtccaagaaactgacagaaagacgaatgtatcgcagagagagacgaaacaagttgtggcacagaaagccaagattctcaaacagggtttcatccaagaaagaaggctggttagcaccatccatacagcacagattagattctcatattaggttgatagaaaaagtccagagactattaccaatttccaaaacaataatagaagtggcttcttttgatacccaaaaaatgcagaacccggaaatatcaggaatcgaatatcagcagggagaactgcaaggctatgagatcaaagaatatctactggagaggtggggaaggaaatgtgcttattgtggtaagacaaatgttcctttggaaatagagcatatcactcctgagtcgcgaggaggaaccaaccgggtctcaaacttgacgatctcttgtgaaaaatgcaaccggaagaaaggtaacaagacagcagaagaatttggatatccagagatacaaaaacaggcaaaagaaacactgaaagcagttgcgttcatgaacagcgtcaggtggaaattagtagactccttagactgtgactggacttatggatactccacgaagcataacagggcgcaaataggtttagaaaaatctcatgttaatgatgcctttgtaatagccggaggaagtaatcaaaaacgaatttgggattgcagtgtgaatcaactcagacgaaacaaccgctgtttgcagatgaatagaaatggattcaagccgtccataagaaaacatagatatgctttccagccttattctctggtaaattacgctggtgctatttatgaagtcaagggagtatttaacagaggcacctacatcagattaaaagcagaaaaagacatcaatgcgagaacagaaaaagtaacattatatcaacacatgaacggaatggcaatccatcccccaccaatcagagattggagggggtcttcttgccagaaaagataa

SEQ ID NO: 679 - DNA, 278 bp, unidentified
  misc_feature 1..278: note = Ga0111033_1162652 JGI
  source 1..278: mol_type = other DNA
gtcaatcacccccaccaaattctgacgaatttggaaggggcttgtagggcgacctgcaagggcaactggttgattagccaaagagaggtttgcgatgcaaacagtatctaagttatcagcagagttaaagaacgcaccaagggatgcttctctagtcccttgctctgcaagttctgcattaaacagagaggaaactctcagtgtgcaggacaaagtactggctgataaccttggcgaagagaacctactcgggaacaggagaaaacactctgtattag

SEQ ID NO: 680 - DNA, 813 bp, unidentified
  misc_feature 1..813: note = Ga0373927_0000008 JGI
  source 1..813: mol_type = other DNA
atgctggtgtttgtcgtatcacaagaaggaatgcctttaatgccgacgatgccccggcgaacacggatctggctcaaggcgaaacaggcccgtgtcgggcgtcgagagccgttcaccatccaactgcgctgcgagacgaaagcctctgcccaacctgcgcctgtaggcgtggacgcaggatcacacacggtcgggattgctgccatcgcaaacggcgcggtcgtgtttcagacggaggtacagttgcacgataccattccagagaagatgacacacaggtgcaggtcccgccgctcccgttgtgctcgcaaaacacgctatcgagctgcgagatgggccaatcgacgtcgcctggaggaccaaatgccgccctctccgcgttccagggcaacgtccatggtgcaagcggcccggtatattatctcactgctcctcatcggtcaggtgaaccatgatgccgtggctattgcctgtgagatgggcaaggtgatcaagcccctttcgatcattcagcagacccgatgcctgccgcgaggtctgtatcagcgcttcaacggactgtgtagcgagcagaagtgttggacgccaaagaaggtcaaaggcttcaagcgctacgagctggtccaggccagaggggtgatgggttccatgggagaaaggcgagagaaaggatcttttgttctcaacgatgttgccagtgggaagagagcgttagaggtgacgtcacgcacgcttactcagggcaggatatcgctacggtatctcgccctggagaatacgagaaaggagagcggcgcttcctcccccgattga

SEQ ID NO: 681 - DNA, 813 bp, unidentified; identical to SEQ ID NO: 680
  misc_feature 1..813: note = Ga0373927_0000008 JGI
  source 1..813: mol_type = other DNA

SEQ ID NO: 682 - DNA, 819 bp, unidentified
  misc_feature 1..819: note = Ga0070730_10006957 JGI
  source 1..819: mol_type = other DNA
atgggccgtaaggccatccttttctgtgaggtcgtgatggtattcgttctggatcagagcaaacagccgctgatgccctgtagcccgaagcgggcccggctgctgttggcgcggggtcgcgcgcgcgtccaccggctggtgcccttcaccatccgcctggtcgaccgccgcgtggccgcgagcaacctgcagccggtggtgttggggatcgaccccggcagcaagacgaccggcctggccctgacgcgggaggagccgacgcccgcgggtccgctgcggcacgtcttgcacctgggcgaactagagcaccgcggcgggctggtgcgcgagcgcttgcgcaagcgcgcggcggcccgccgccgccggcgcggggccaacctgcgctatcgcccgccacggttccacaatcgccgccgtagcgcgggctggctgccgccatcgctgcaaagtcgggtggacagtgtggcgcattgggcgcgctgttaccgccggctggccccgctccgccgggtggcggtcgaggcggtgcgcttcgacacccaactgctggagcacccggatattggtggtgtcgagtaccaacggggcgagctggcgggctgtgagttgtgggagtatctgctgctgaagtgggggcaccagtgcgcctactgcgggcgggacgacgtccctttgcagaaggagcacatcacccccaaagcgcgcgggggcagcaaccgagcgagcaacctctgcccggcgtgcgccccgtgcaatatcgccaaagggccgcgtcccgcagcggagtacggccacccaaaggtgcaggcgcaggccaag

SEQ ID NO: 683 - DNA, 309 bp, unidentified
  misc_feature 1..309: note = Ga0070730_10006957 JGI
  source 1..309: mol_type = other DNA
gtcaagtaccccacccgtaaacggggggcttgtgaggagcaagcccggacttgaccagccttagcagtggagccgaaggacaaggcgttgacactgctacgttgtgggtagagcaaaagtacacaccgggggatgcttctccagtcccccgctctgtcagcggccaggtgcagataacgtccgggggggcgcggaacggcctggcgcagatggctgacctacaacattggcgaggagagccgcttcgagccgtccgtcggagcgcgtcacatgggccgtaaggccatccttttctgtgaggtcgtgatg

SEQ ID NO: 684 - DNA, 1335 bp, unidentified
  misc_feature 1..1335: note = Ga0118720_1022568 JGI
  source 1..1335: mol_type = other DNA
atgttagtctttgttaaaaacagaaacggtaaaccactaatgccttgtagtcccactaaagcacgaaaacttttaaaagcgggacaggcaaaagtggaccagcggaccccttttgtaattaagctgaaattcggttctagtggttacactcagaaaaccacggctggaatggacaccggtagtaaagtgattggaaatgctgccacatcccatcaaaaaactctataccaatctgaaactatacttagaggagatgagattaaaagtaaaatggaacaacgccgaatgtataggcgtagccgtagaggacgaaaaaccagataccgaaaaccacgatttctaaatagaagggcaagtactagagaagggcgactagctccaagcctgctacacaaagttaaagcacatttaaaagaacgaaaattcattgaatcaattctacctatctctcattggaaagttgaactcagccagtttgatattcatgctatctcaaatcctgatgtttctaaaagatattggtggacttaccagaatggtccacagaaaaacttttacaataccaaatcttacattttgagtcgtgatgaacacacttgtcaatcatgtaaatcaaagaaaaagaatttaaaacttcatgtacatcatattgaattccgttccaatggaggaacagatgcccccactaaccttataacactatgtaaaaattgtcatgacaaagtacacaaccacaataacgctcaacaagaatctctaaaaatgtcaaaaaaaatcaaaaacaaaactaaacatgctactgaaaccaacattatagcctcacatcttcaaaactctgactggagttttgaagaaacttttgggtttgagactaaatttaaaagagagaaattgagactacctaaagagcattactttgatgcggtagctatctgcttggctgatgatgaaatgattaaatttgaaccgcaaactttcattaaaagacttattgctaaaggagattatcaacaaacaaaaggaatcaggtctgaaaagaaaatgcgtacagaaaaaatactaggtttcaaaaagtttgacaaagttgagtggatgggacataaagctttcattaaaggcagaatgtcatccggatacgccattttaatggacataaaaggggataagataaatttaaaacccatccctaagctaaaaaatggacttgtacgcatacaagcgaggaaatcatcgattatagatcaaaaaatcatagaaaatacctcattctctaccacatcatccttgtcaccaagtacagaaaacaacttctcgtttatacaggagaacatgtga

SEQ ID NO: 685 - DNA, 311 bp, unidentified
  misc_feature 1..311: note = Ga0118720_1022568 JGI
  source 1..311: mol_type = other DNA
gtgaagaacccagcgactaaagatcgctgggcttcctacattaatcatggaagccctacttcaccagaaggctaacagaaaggagagaaaatgttagcagctgttagaacagagaaacacatacagacccctgggtgccacctcagccttgggctctctgattatgcattaaacagctgtgagggtaacagcagtgtgtatagtttaaaaacctgttctaactcttcgagaggatgtcggattctgaatgtgatccttactcattcagatacgcattactctgttttctgtcagagggagactttatgtta

SEQ ID NO: 686 - DNA, 804 bp, unidentified
  misc_feature 1..804: note = Ga0395674_000262 JGI
  source 1..804: mol_type = other DNA
atgccctgcactccagcaagggcaaggatgctactgcgtgggcggaaggccgcggtcctcaggcgctatcccttcacgattatcctgaaggcccgcacagatggggatttacagccgatagagctcaaagccgaccctggcagcaaggtcaccggatttactgtggcttgcgaagattgcaaccagagcaagaacaaccttaccgccgcagaattcgggcatccgaacattcagaagcaggcattacgacctctcaaagacgcttctgctgtcaatgccactcactatgtcatcggggctgcactcaagtctttgggattgccggtatcgttctggaccggtggcaggactaagttcagccccactcaacaggactatccgaaagcccactggattgacgcggcctgtgtcggtgagtccgggaatcaggtcaagcttgatctgcggatgcaggtatcgcaggttaaggctacagggcacggatcacggcagatgtgtcggatggacaggtttggattcccccggacttctactaagacagctcgtgtagtcaaagggttcaggactggagatattgtcagagcagttctcccttacgggaagaagacaggtacttatgacggcaaggtagccgtcagggcatccgggagtttcaatgtatcgactgctaccggtatagtcctggggattagctacaaatactgttctgtggttcatagggcagatggatattcatatctaacaaatacaggcgctcctctcggcaatgaattaccgagtatccgcgcccaggagttgtcatga

SEQ ID NO: 687 - DNA, 270 bp, unidentified
  misc_feature 1..270: note = Ga0395674_000262 JGI
  source 1..270: mol_type = other DNA
gtcaaccactcgggattgaaatcccgagcatgttaagtatccgaaagggtacgcgcatgctctagttgaccaggctcagtgtattaacactacgttaccggcgaatacataggcaccttgggatgctggccagtcccagactctgcggcagacagttaaacaggtgtgagggttaagcccgtgctgcctgcatataaaccgtcggataacattgccgaggtaaacattacccgcgtaagcggagattaacggagtagtccaattcaacgt

SEQ ID NO: 688 - DNA, 753 bp, unidentified
  misc_feature 1..753: note = Ga0315273_10011693 JGI
  source 1..753: mol_type = other DNA
ttgagagttcctatcaatatttatgtattaaataaaagaggtgaaccccttatgccttgttcaccaagaaaagcaagaattttgcttaaagagggtaaagcaaaagtaacaaagaactatccacttattattcaattgacacaagcaactggtgagcaaatacaagaatgttctcttggtattgactctggtgctaaaaatgtaggtttttcagtaattactgataaaaaagagatagtttctggagagttgattcttgatcagaaaacttctgaaagattaacagaaaaaaggatgtaccgtcgtggtcgaagaaataaattatggtatagaaaaccacgatttaataatcgaaagaaatcagaaggatggttgcctccatcagttcaaagaaaatttaacactcatattactctgattaataagttgaaaaagcttcttcctatcaaacaaacaatcatagaggtgggtaattttgatattcaaaaaataaacaatccagatatttcgagtgtacaatatcaacaaggatcaatgtttgaatatcagaatgtaagaagtttcttaatggctagagaacatggtgaatgtcagttatgtaaaaagaaattttcaaaaggtaacggtcctcacgtccaccatattataccaaaaaataatggaggaacggattcagaaaaaaatctatctttacttcatgaaaagtgtcataaaaagttgcatagacaaagtttatataatttgttaaaacag

SEQ ID NO: 689 - DNA, 247 bp, unidentified
  misc_feature 1..247: note = Ga0315273_10011693 JGI
  source 1..247: mol_type = other DNA
gtcaactacccacggataaatccgtgggcttgaatcgtgaggttcaacgcaagagttgattagagagcagtttaaagcaaggttaaagaacacacctacaggtactccactagcctgtagctctgtaaattttatattaaacagagaagaaattctcagtgtataaagtaaagtaccgactttaaacaatctcgaagtggatctacttcaacataaaggaggatagggcttgagagttcctatcaat

SEQ ID NO: 690 - DNA, 819 bp, unidentified
  misc_feature 1..819: note = Ga0113881_100828 JGI
  source 1..819: mol_type = other DNA
atgccctgttcaccggcaaaagcgcgccttctgcttaaagagaagaaagctattgtgaagaggcgaacgcctttcactattcagctgacgattgcaacgggtgaaaccaaacagccggggagtctgggcgttgatgccgggtacgaacatgtcggcctttccgcatcaacggaaaaggctgaactttatgcatccgaagtcgaactgcggcaggacatcaccgatctgctctctgctcgtcgcgcgttacggcagtcacgccgcaaccgcaaaacgcgctaccgtgctccgaggttcgacaaccgcatccgcaccaagcgcaaaggctggcttgctctgtcgcttgaaaaccgaatcaacgcgcacttgtcgcgcatagaagcggttcttcgactgctgccggtcacgaagatcagcgtggaaacggcttccttcgacatgcagctgctgaagaatcccgacattgcagggaaagagtacccagagggcgagcagctcggcttctggaacgtccgcgagtatgttcttttcagagacaggcacgtttgtcagcattgttacggcagatcgaaggatccggtgctcaatgttcatcacttggaaagcagacgtaccggtggagattcgcccggcaacctgattacgctttgtgagacgtgccataaggcacttcaccgcggcgatatcacgttgaaggccaagcgagggaaatcgttccgtgcggaagccttcatgggaattatgcgctgggaagtacacaaccgtctaagagctttgcatccggggattgaggtgagcaacacctatggataccggacc

SEQ ID NO: 691 - DNA, 247 bp, unidentified
  misc_feature 1..247: note = Ga0113881_100828 JGI
  source 1..247: mol_type = other DNA
gtcaactacctcggcctaaaggccgcggcttgaaaaagcctctagttgactagcctcaggccgtcatttggcggactatgttggtcgggattttataggcaccgcgggatgcagatcctagtcccgcgctctgcggctgatggttaaaagctctgagaggtaggagcggtgctgtcagcttgaaacccctttcaacattggcgaaggatcacaaccggtcgaaagaccgaggagataaaacttgaga

SEQ ID NO: 692 - DNA, 1275 bp, Moorena sp.
  source 1..1275: mol_type = other DNA
atggtttatgtaatttcaaaagatggcaaccctttgatgtcttgttgcaatgtaattgcaagactgcttcttaagcaaggtaaagcacaagtcaagaagcgcgagccatttacaatcaaattaaattatgaaacaacgaactatcttcaaaatctaactcttggagtcgatacaggaagtagaaccattggaactgcggttagcaacgacaatggagatattttatatatgtctgaagtggtagttaggaatgatattacagaaaaaatgacacagagagctaaatatcgcagaaatagacgaaatcgtaagacccgttacagaaaagcaagatggttaaatcgagctaattcgattaaaaatgatagatttagcccaacaatgagaagtaaactttatagtcatgtaaaagagatagagtgcattaaatctatcctccctattacgcaaatggtttttgaaactgggcagtttgatacacatcttatgaaaaatccaagtcttgctaaccctagaataaggcgttggggttatcaaaaaggtcccaattatggatacgaaaatacaaaagccatggttcttaatcgcgataattatacatgtcaatgttgtaaaggaaaacataaggacagtaaattagaaattcatcatattgtatttcgtagcaaaggtggttcagacgaggcaagcaatcttattacactatgccacacttgtcacaaagacttacatagtggaaaaattaatcctaaattgaaaggtagaattaaaggtaaccttaaatttgccacacaaatgaacacaatacgtaaacaactttttcgattatacccaaatgcaattgaaacttttggatatataacaaaagcaaatcggttacaacttggtgtaaataaagaacattattacgatgcttgtactattgcaactcaagggaacagattcacaataaagagtaatctttataaaaagaaatgtatttcagatggtgattttcaacaaacaaaaggtatatgttcaaaacaaccgattgttacaaataagattcatggatttagaaaatttgataaggttcgctatttgggcaagaattattttattaaaggtagaatgtctactggatacgcagttcttatggatataaatggcaaaaaagcagacttttcaaatatgccaaaaggatttaagactccaaaaatggctaattttaaaagaatagaggctaggacgacatggatgactacaaccgtggtgctcacttcaaatatagcatga

SEQ ID NO: 693 - DNA, 295 bp, Moorena sp.
  source 1..295: mol_type = other DNA
gtgaactaccatagaccataaaggtctatagcttctgttaaatggttcaccagactcagctgatagaaacatcagctacgatatttaggtcatgataccctcggttgacgcaacagaccgtcgctctatcgtacatatttaagttgggtcagagtaagaacagccctgtgatatgtatgtaaaaagcctttatatcattgtcgagttgaggacggaacagctatatggtaacagtataggaaagtacgcatcacctaccattaggtagagtatttataaggagacttatttatgg

SEQ ID NO: 694 - DNA, 1176 bp, unidentified
  misc_feature 1..1176: note = metagenome
  source 1..1176: mol_type = other DNA
atgatagaaaataaaaaagaatttgcgtttgttttagatggtaacggtaagcaattagaccctaccgttatacaaaacgcatggagattaattagaaaacaaaaagctgtattagtttctaaatttcctatggttattaaattacacaaatgtataaataaggttaatgatgatgaaatacatatgggaatagatgatggttctaagtttgttggtatagctttagttcaaaaatgcaaaactaaaaataaattgttgtttttgggtacaattcaacaacgtaaggatgttcataaattaatggttgaacgaaaagaatatagaatgtatcgacgaaaattcaaacattatcgtgaacaaagatttaataatagagcatcatctaagcgtagtggcagattaccaccaactattaaacaaaagaaacaatctatactgagagtaattgatagattattaaaatatatcaaaatcaatgtatatcatttggaaaatacaaaatttgatataagagttttaatagatggatataaaccgaaaaattatacaaaaagcaatcgtttggatgaaaatttaagagtcgcaactatattaagagataaatgttgtgtggagtgtggaataaaaaatgttagatttgaagtgcatcacataacaccaaaatcaaaaggtggaaatgatacaataaaaaatctagtaacactatgcccacaatgtcatcaaaaaacatttggaaaagaatctgaatttgcagataaatattataaaattacaaatggtaagaaagtatttatagaagatgcaatgcacgtaatgcaaggaaaaaaatacttacaagacgaaatatctaaacgtggtattcttgtattgacaaatggcgcgaatacagcaaatacaagaattgaatggaatatagaaaaatcacatgatttagatgcttattgttgctgtgagttaaaatgcaacaaaacaaatttaataacatatatcattaaacctatgcggaaaaagagtagaaaaaagaaaacgaattctgtactagggtttaaacacagagattttgttgaatatacttatcgcaacggtgaaacttatcaaggatatataacagcattaaattggaaaaggaatgcgataagttttcgttctttatacaaggtatttacctggaaataa

SEQ ID NO: 695 - DNA, 306 bp, unidentified
  misc_feature 1..306: note = metagenome
  source 1..306: mol_type = other DNA
caataaaaactatatataagtgaatagaaatttatatgtcgttgtttaattttggtttccagcctaagtgactgcatttatatgaaaatataaatgcagatatgaactacgtcagtagaacatggtaaaaacacaccaatagatgtattccatcagtctgttgctctgtgagtgctaactaagaaactatactactgttctgtatagataacagggaaacacacgttcattctattgactttggcaagaaggaattttccattgtttataatgaggtttatcagagatgatagaaaataaaaaaga

SEQ ID NO: 696 - DNA, 1977 bp, unidentified
  misc_feature 1..1977: note = Ga0209343_10010378 JGI
  source 1..1977: mol_type = other DNA
atgcaaggacaaaaacttggtatagatttaggcggtaagcatgtcggtcttgctgttgtaagaacaccgataaacgaggtggcacattactgcactattgaactcagagaagacattaaggataagatggatgagaggaggtctcttcggagggcgaggagaaacaggctctggcatagggaagcgaggtttgacaataggcaattaagggtgaaatgcaaatatattgataaagatacaggcgaaatctgcggagctaatactccaaagaaatccaatgtaaaacatcttctacttgagaatatactcgtcaatcttaaaatagctgatgaatctaaagaggaaatcagaagaagagggctggacagagacacaaacaaaagtgaattacagacaatccttgagaaattttcaataaataccttcctgaaaaaacagattaaagacatcattcttgaaaagggggaagggagggctgtcttttgcagagagcatatcccctttcattatgaacaggttgcaacagaggctgagagtttctggctgtcaaattcaataagggctaaacaggaccagatactctcccgccttaaaagaatagcaaaggattttaagatagatgaggtggttattgaaagggcgaactttgatttgcaaaagctccagagacctgatgagatagaagcacctgaagattacatgaagggtcctaacttcgggcacagaaacaggtttgaggcattgaagcaggaatatggcaaccgatgctgtttctgcggaaagaagggtggagatgaagtaaagctgaagatagggcatctctatccgaaggctaaagatgagataaacaggtgggaaaaccttataactatatgtgaaaaatgtaatgcgaagcagggtaaaaggacaccagaggaggcagggatggaatttgtaattgtaaaggagaaggtttttaatcctgcagcaggaagggtaatacccataaaaagagaactcaagccgaagcccataaatgaatcaaaggttaataaatatatgacccatactgatattggcataaggaggctcaaaagagaaatccagaatatttttggaagcatacctataagagaaacatacggctatatcacatcgtattttagaaataaatgggagcttgaaaaagaacattataatgatgctgtagtcatagcctctgacaaagaagatttgaatataaaacctgtatttaaagatgcagtccctcagacaattaaatcatctatcaagggcgggaaactctttgatacaaatcccctccagtttagtgatggaaagttttaccagaacataacccttataggcagaaaggcagggatgcgttcatcaaaacataaaaggggtcagaggaatatcaggaactatggctcaatttatatggatgagattgaacttataacctcagaatggaagaaaaaggttctctgcgaattaagagataaacttggttatgtaaaaggagataagaataagtcttttaagcctgaggaactgatgaatgcaaatctgcctttcaggactgtaactattgacaaaaggggtgtaggagaatcttcaacccgcttaatcaataacaatgtattccgtgcctcagctgaagtaaatacgcatataatggtctattcaaataatgacggtagaatgaaggcatttgcagtaaaaaatcctaagatatttaaagatgccggactccctcatgattttcaaaaaaagatattcattgtaaaaaagggggatattgttacatggaaaaaaagtgaagatggaattgccgtaacaggcagggtgaccaaatgtttgacaaaaaatggggtaattgatataaaggacatgaataataaaatacactcagggaaaaaccctgtgtatattgaaaagatagtatctcctgaaaggggtgctatttttgagagaaaatctctttctgctctttga

SEQ ID NO: 697 - DNA, 262 bp, unidentified
  misc_feature 1..262: note = Ga0209343_10010378 JGI
  source 1..262: mol_type = other DNA
ctcgccataagaaggatactgtctgaaaggaggtttgagcctgaacactcttccaccttcctgatcaattgcgattaatagagggattttatggcttttaattgataattcctgaagggaattgcataaatctttaacctgtgacggagactctatatttcttgaaaataggattacccccccgaccccataatcagttattattccttttaactcatctgacatagtagtcccatgaaatcccaccataaacatctgcccg

SEQ ID NO: 698 - DNA, 1368 bp, unidentified
  misc_feature 1..1368: note = Ga0209737_10031347 JGI
  source 1..1368: mol_type = other DNA
atggtatatgtaataagcaaggaagggcagccgttgatgccgacggaacgtcacggcaaggtgaaacacctgttgcgccagggcagggcgaaagtggtacggtctgccccgttcacaatccagttgcagtacgagactggaagccacacgcaggaggttacccttggcatagacagcgggtatacgtatataggtataagcgcaatgagcgacaataaggaattgctgtcgtgcgaggttgagttgcttgacggaatgaaagagcggatatatgacagggcaatgtacaggagaaaccgcaggcagaggctaagacacagggcaccaaggttcgacaaccgtggcagggcgcaagggtggtttccacctagcgtcaggcacaaatccgacagccacattaggctggcatatatgctgaaaggactgctccctataacgtaccccattgcagaggtggcgaacttcgacatacagaggataaataacccagacatacaagggaaagaataccaacagggtgagcagatggggtggcagaacgttagggaatacatattccacagggacggacacaaatgccagaagccagagtgcaaaagcaagggagagaaagtgttgtgcgagcaccacataatcccccgggcgcagggcggcaccgatgccccagacaacctcgtgaccctttgcaaccaatgccacacttccgaaaaccacaagggtttcctcaaagactggaaaccaaaggtgaacggtttcaaggcggagacctttatgaccaccgtcaggcatactatatgcgagcagctcaaagggatattccccaatgtcggaatcacgtatgggtatatcacgaaacacaggaggatagggcaaaaactggctaagacacacgcgaacgatgggtatataatagcgggaggtaaagggcaaccacgtgcggaaacgctgtcaattaggcagataaggcggaacaacagaagcctcgaacggttctacgacgctaaatacattgatacaagaacgggaaagcccgaatatgcgagtgtgttgaacaacggcaggactacccggaacatgaacctgaacggggagaacctgaaaaaataccgtggggaaaaagtcggcaagggtcgaaggagcattcgcagaaaccactatttctatcagcccaacgaccttgtaaagtatgaaggcaagatttatgaggtcaagggtgtcgtcaacaggggcaactatgtcgctctcaaaggcattaaaaaacagccaaaggtggaacagttgaaaccatacagattcagaaaggggtttgtgattgaaaacagaaagggcaagaggaatcaagggggcgcaattcaccccaccgcctaa

SEQ ID NO: 699 - DNA, 304 bp, unidentified
  misc_feature 1..304: note = Ga0209737_10031347 JGI
  source 1..304: mol_type = other DNA
gtcaaccacccaccgcctaacgcctaacggcgtttgaggcgggggcttgtatgggactacgcaacctacaggccagttgaatagcccaagccttgaaacaaaggctacgttaccaagaatgacataggcacccacggatgcttcccaagtccgtggcactgcggacggtgattaaacatccccgagggtaggggaagtgttgccgccaaaaaccttggataacatcggcgatgggaaccaaccggggcaggtcaaactgcaacggcattatgaccccaacgggttcaaaaggagaaagagcatg

SEQ ID NO: 700 - DNA, 1173 bp, unidentified
  misc_feature 1..1173: note = Ga0075011_10000624 JGI
  source 1..1173: mol_type = other DNA
atgtttcactcctctgaaccaaacaaacaaccactagtaccggttgtttccgtactcggctatcctctcatgccgtgtagacctgttagagctcgtaagcttgtagagcaaggtagagctaaaaagtgctggaaaaagggcttcttctatatacagatgcttgttcttaccgaagaacagactcaacctgtagttgtaggtatagaccctggatctaagagagaagcgtttactgttaagtcagaacacgctactctgttaaatctacaatcacatgcctgtgacggcaatagtataaagaaagctctagaatttagaaaggttatgcgtagggctcgtagatctagaactactccttgtagacctcctagattcaacaaccgctctagaaaaggctgggtaccaccatctactctagcgagatggcagttaaagctcaacatacttaatcatctgtgctttctctatcccataaaaactgtggttatagaggacgtaaaggctatgaccagaaaaggtaagaaacaatggaacagcaacttttcacctgtgcaagcaggtaagaactggctatacagccgtatacaacagaagggtcttgaactgattaaggttgatggatacaaaacctttgagctacgtgaagctgccaatctaggtaagactaaaaataagcttgctgaaacatttagtgcccactgcgtagactcatgggtgcttgctaactactatataggcgggcatgtacaaccagataacaccactctacttactcttaagcaggtaaaagttatacgtagacaactacattttgcctgtagatatagtaacggaaaaagacagcgttacggtggaagtatgtccttagggataaagaagggtactgtagtatttcatcctaaatatggacgctgtcttataagcggaaactataacggacgaataagtttactatcaccatactcacttgagagagttactatacacgctaaagtctcagatctgaaaatagtggcatactcaccgtgggttataaatggtaactataatcttcctatatcgtctaaacgtaacgatagagctactagaaagaacatagctagaactaggtttcttcaacaatctatgcgtagttgttgctcacaaaagaatttaatttcacttcttccctaa

SEQ ID NO: 701 - DNA, 231 bp, unidentified
  misc_feature 1..231: note = Ga0075011_10000624 JGI
  source 1..231: mol_type = other DNA
atcaactatccagctcacaaggctgggtctgctaaatgctgccaacagctcatagcggaatagctagtcgaaaggctagtaatagttgattagccattaccaaaactgaacgacctgtggatggaaccacacagtacctacggatgctcccctagtctgtagctctacggttgtcagtggctaaggggtccttactcgtctcctcctgaacttaccgttaaaaggacacac

SEQ ID NO: 702 - DNA, 693 bp, unidentified
  misc_feature 1..693: note = Ga0116227_10001884 JGI
  source 1..693: mol_type = other DNA
atgcaaacggttttggtagtagatacaaatagacggcctttgatgcgttgctctccgattagcgcaaggaagcttttacaagaagggcagtccgcagttttacagctgcagccttttacaatcgtcttgaaaaaaagagaaggagggtccgatagggtgtccaatttgacaatcggttgcagagaatgccatagcaaaaagtctaaccggtcccttcggggatttttacaaggcaaaccttctttacagtctcaaattcgggggaaggctaaaaagcctcttgccgatgcgtctgccgtcaataggacggggaaagagattgtatatcgtctcgccacatttgatctgcccatatcttgctccccgggaggaagggcaaagtttaacaggactcttcaaggatatcccgaaggtgaaagaagagtccgcggttttgcaacggcagatttggtaaaagcggttgtcctacaaggtaaaaaaaagggaacatactccggaagagtcgccatccgatcatcgggaagtttttgcatcgatacccctaagggaaaagtagcccgtatcagctatagattttgtaaacatctgcaatacgcagacggttatcaatattcacaacaaccacaacaaccaagggagcgacgcttcctaccgcgactcaagtcgcaggtttccgcgtcgtcagttctatga

SEQ ID NO: 703 - DNA, 252 bp, unidentified
  misc_feature 1..252: note = Ga0116227_10001884 JGI
  source 1..252: mol_type = other DNA
gtcaactcccccttactctaaagagagaggcttgtaagaaaactaagcctaagttgaccggactaagttcttgtaagtaacaagagctacgttagagaagagtagataggcaccttggaatgcggctccggttccaagctctgcggtttacggtcaaaaacttctcatcccgttgccgacgagaacatcccccgggaaaagggagattgcaggtaactgctaactagtaaaaaaagagaaacgatgcaaacg

SEQ ID NO: 704 - DNA, 393 bp, Moorena sp.
  source 1..393: mol_type = other DNA
atgccttgcaaaccgcagaaagcacgaaagccgctcacggcaggcaaggcaaaagtggtaaaccacgaaccgtttaccatccaactgctgtttggttctagcgggtacaggcagtctgttacgctgggcatcgacgctggctctgtccatatcggtgcctcggcatctacgaagaagcaagaactctatgcttctgccaaaggagaacgttggtatattcgagggcttcgttctaaaagcagcttcgttctaaaaaaacttgatgggacgaagcttgagattatgccaagcaagattagcttcggctggcacaataagtcgtatttagtagaaaggaggagcgcggctcctctcgcggttaaaaccgcaagtacccgccgcgcaaattgttaa

SEQ ID NO: 705 - DNA, 302 bp, unidentified
  misc_feature 1..302: note = GENOME_ACESSION: mgm4547164.3 MG-RAST
  source 1..302: mol_type = other DNA
gtcaactacccgcacctaaaggcgtaggcttgcgaaagcccaaacctttagatgcaggcatagcctaagttgactagcctaggtctcggtctcatttgctgggactccgttgtttttgttatcacacctgtgggcgtatatcctaacccgtggctctgtgctggctctgtaaaagccctgtgaggtaggggcggtcaaccagatgtaggccgattacggcaagcaattacaacattggcgaagggtagatttactctgatttgaggcttcggccttggaaaggaggtagacgtatcttgttc

SEQ ID NO: 706 - DNA, 1314 bp, Moorena sp.
  source 1..1314: mol_type = other DNA
atggtatacgttttatccaaagacggcgcacccctgatgccgaccgaaaggcacggaaaggtgaggcggatgctaaaggacggcagggcgaaggtagtcaaagccaggccgttcaccattcaattaacgtatgaaacaacaagctacacccaacccataaccctgggcatagacgccgggtatcaagaagtcggcctgtcagcggtaacttccgaaaaggagcttttgtccgccgaatgcaccctgtttaaagggcaggtggaacgcaacaaagaaaggctcatgtaccgcaggcagagaagaaaccggctgcgttaccgtgcgccacgttttgacaaccggaggaaaccagaaggctggctggcgccgagcattcagcacaagctggacagtcacctgcgcctgatagcctgggtaaaaaagatacttcctatcaccgatgtggttatcaaggtagccagttttgacatccaggcgattaaaaatcccggtattcaaggcatagagtaccagaaaggagagcagtacggcttctggaaccttcgcgaatacattctgcaccgggacagtcaccagtgtcaaaacccggagtgccgtaacaaatccaaaaccccggtgcttcaaactcaccacataggattttggaaaagcgatattacagacaggcccgggaacatgatcaccctctgcgacaaatgccaccggccagagaaccacaagaaaggcaagttcctgtggggatgggagccgaaggtaaagtcgttcagggcggaaacatttataacaacagtgcggtggagaatggtcaatacgcttggctgccggcatacctacggccacataaccaaaccccgcaggatagagctaagactggagaaaagctactccaacgacgccttcgtaatagccgggggtagcagccaaacccgggcaaaaatgctcagcatcgagcagatccggcgcaacaaccggtctttgcagaagttctacgatgccaggtacatcgacattcgcaacggaaatgcagttggcggccaagaactaaactgcggccgacgtacccgtaacaggaatattaacgggcccaatcagcgggtataccggggcgagaaggtgtttaaaggcagggtgagcatcagaaagcagaggtactcgtaccagcccaaagatattgttgaatatggcggctggcggtacacagttaaaggcgtgcagaactgcggcgtctacatcaaattggcagaattgagcaagccagtgaggacggagttggtcaaacctgtgcggtacagcaagggtttgtgtgtgatgtaa

SEQ ID NO: 707 - DNA, 314 bp, Moorena sp.
  source 1..314: mol_type = other DNA
gtcaacaacccccacttaacggctgcgccgttagaagtgggggcttggggtagcgtgaggcgatagtcttacgtctccaggcccggttgattagctttagtggttggtatccggaaggaacgaaccgctacgttacggtggaatgggaaaccaaataggcactccggggtactccacacgctccggacactgcggccggtggttaaacatcgctgagggtaggcgaagtgctgccggcgacaaacccgtcgtaacattggcgaagtggacccacagccgaaaggctggcttatttccgaaaggagatcgcgatg

SEQ ID NO: 708 - DNA, 1380 bp, unidentified
  misc_feature 1..1380: note = Ga0256404_1034523 JGI
  source 1..1380: mol_type = other DNA
atgctgacatatgtactggctgcagacggctcaccactgatgccgacctacaacatcaaaaaggtgagacggatgctaaaagacggcagggctgttatagcaggacacaatccggggtttaccataaggcttaattataatctgccggaacaggacgcccctcatactcaggagactgagttttgcgaggacacgggcgaccatcacatcggcgtgtctgtaaagtctgtaaagcatgaatacttccacggtcagttcgacctgctgacagacgaaaaacagcgtcatgacgactgccgggcgtaccgcaggacaaggcgtaaccgtaagcgctacagaaagccacgttttgataaccgccgcaggaaagacggctggtttgctccatcggttgagaacaaggtacagcgtcacgcagatatctttgcaatgttcgcaaaggtcctgcctataaagtctgctactcttgaaacggcgaggtttgacactcagctattagaagcccagcagacaggaaataaacttccacaaggcaaagattatcagcatgggccgaggtttaagcttatcaacctaagagaagcggtctttacgagagatggctatacctgtcagatatgtggcaagtctgtatctgacggagcaatactccgtgtgcaccatgcactgtactggaaaggcgaccatactgacaggttatctggtctgataacggtatgcgataagtgccacacgcctgagaaccatcagaaaggcggcaggttatggggcataacaccagaagtaaagtccatggcaggcgcagccttcatgaatgctgtacggtggcacataacagagatcttcaggtcagggttccccgatgtggagacccataccactaatggtgcggctaccaaagcttcaagaaggatgcagcgtatggcaaagacacacgctaataacgcttactgtatgggtgagttcagaccacggcacaaagcaagggagatgcattacaaaaagcaccgccgtaacaaccgtgtgctgagcaagttctacgatgctaaatatattgatgtcaggaccggcaaaaaggcttccggcaaggaattaggcagtaatcgtaccaataggtcggttccaagggataatcctaataacctgagaaagttccacggcatgaagctgataaaagggcatgtatctgtccggaaaaagcattatgacatacacgctggtgatgtagtgctctgcaaaggcgtgaagcgtctggtgcacgcaatacacagagggaacaacgtagagtttgaagctgacggcataagcccgaagtcagcttcgccggacaaggtaaagatcatacgaatgataggaggatggcacgcctcttctgaataa

SEQ ID NO: 709 - DNA, 373 bp, unidentified
  misc_feature 1..373: note = Ga0256404_1034523 JGI
  source 1..373: mol_type = other DNA
gtcaataacccgcggttaaaaccgcaggcttggtctgaaacacaggactgagcctggttgataagcaatagcgaccccgtcaagtcgtttttacgatactggcagggcataagctacgttacccggcaaatataccataggcactttcggatgctccacaagtccgtaacactgcgggcgtgcattaaacatctctgagggtaaggagaagtgtgtacgtctcgttcttagaacgtaaaacaccgggataacatttgcgatgtggacacgtccttttaaaggacagaatcctgtgatggtctttatcacaggaagccgtaaggcattagtaacttattagcatagcagaaaggaggcatcagttatgctgaca

SEQ ID NO: 710 - DNA, 774 bp, unidentified
  misc_feature 1..774: note = Viral metagenome
  source 1..774: mol_type = other DNA
atggtatatgtaatttcaaaaagtggaaaaccgcttatgccgtgtgagaatgtaattgcacgattacttcttaaaaatggtaaagcaaaagttaagaggaaatgtccattcacaattcaattaacatatgattcaacagaatatgtgcaagatgtgacattaggacaagatactggatcaaaacatataggtacagcatgtgttggaaacaacaaagttctatatcaatctcaagtagaactcagagacgacattaaatcaaagatggatggtcgtaggcaagctcgtagattcagacgaagtagaaaaactcgctatcgcaaagcacgatttttaaatcgtaagaattctactaaacttgataggttgcctccatcaattaaaagcaaggttagttcacattttaaagaattagaattttgtcacaagattttaccaatttcaagagaagttttagaagtagcacagttcgatactcaattactccaaaatccaatattagcaagtgaaaaggttagacattggggatatcaaagaggtaggctttatggctttgaaaatgctaaagcgtatgttttaatgagagataactacacatgtcaatgttgcaaaactaaaaaaggtacattgcacattcatcatattgtatatcgttctaaaggcggaagtaatgacacagataatttaattaccttgtgtgaaaattgtctatcttgtcttgatacacattttttgaaaaatactgtgtcgctttgtttaaatgagtttccttga

SEQ ID NO: 711 - DNA, 323 bp, unidentified
  misc_feature 1..323: note = Viral metagenome
  source 1..323: mol_type = other DNA
gtaaatatgtgctcggataaagactgaccgccttttagtgtggcacagcacttaaattatttacaagacttaggtttgagaaatcttacctacgttagattggagaaacacatacacaccctcggttgatgctcaagaccgtcgctctgtgactactaattaagttaggtgtgcttaaaaaaatagccttgtgttagtagtttcaaaacccagtttaacattgtcgatgagaagaccaattctaattttggtaacagaaattagataggcactaccaagatagaaatatcttgagtttatactctaacaaggagttaaaaatg

SEQ ID NO: 712 - DNA, 1398 bp, unidentified
  misc_feature 1..1398: note = GENOME_ACESSION: mgm4547164.3 MG-RAST
  source 1..1398: mol_type = other DNA
ttggcgaaggtattcaacggtatagtgtgtaccgtcttatcgagtaaaacacactattcagagaaaggagtgctgcttatgcaggcatatgtatttgtaattaataaagatggacagccgctcatgcctacacagcggtacggtaaaatccgcaggctgctgcgagacggacaagcaaaagttgttaaacgctgtccatttacgatccaactgctgtatgaaacaacagatgttgttcaaccggtagatttaggtattgacacagggtataagcatattggtgtttctgcctgtactgaaaagaaagaattgtatgctgccgatatgcaggtgcgtacggacatttccaagaaccttgaacagcggagagttcttcgccgcgcaaggagaaaccgcaaaacacggtatcgcaagccgagattcaacaaccgtgtccgcagtaaacataaagggtggcttgccccatcagtagaagcaactatcggtttgcatatcagagttattcatgatgtctgtaagattcttccgatcacatcaatcacgcttgaaaccgccgcatttgacacgcagaaaatgcagaacgctgaaatcagcggcgtcgagtatcagcagggaacactgatgggctataccatccgcggctaccttgcggagaaattcaatcaccgctgtgcctattgtggcaagacggaaaatagtgagacgaagttcgaagttgagcatgtcgtaccaaaagcacgtggtggttcctcaagaatcagcaatcttgtgtgggcctgccacggctgcaacgaagacaaaggcacacgtaccgccgctgaatatggacatccggaagtgcaggcacttgctgcaaagggcggatcaatgcgttcagcagctgcaatgtctgtgatgaagtggtatctctacaaccgtgtaaaaactgaatacgatgatgcagtgcgtatgacatatggtgcggatactgcgacaaagcggtataagttcaatctgcagaaagatcaccatatcgacgcccgctgcatttctggccatccaaatgcaattccttcgcaggaagtatattacatgcggaaaatcaggtgtcacaaccgtcagctgcataggctgaagatcaacaagggcggtactcgcaggaacaatcaggtgccatacgaagtatggggcatccggttgtttgacaaagttatatatcaaaacagggaatgctttgtgtttggcagaaggaattccggcagcatggatatcagattgctgaatggtgcaaaagttaatgccggagtatcgtataaaaaattgtctgtcatttgcaaagcgggaaatattattttagaaaggaaggtgattaccgacattccctgcctatggatgtctcaaatggtttcctgtcggtga

SEQ ID NO: 713 - DNA, 312 bp, unidentified
  misc_feature 1..312: note = GENOME_ACESSION: mgm4547164.3 MG-RAST
  source 1..312: mol_type = other DNA
gtcagtaatccacggatatacccgactgtatgtctgaagtaaatccgggtgcttgtaggaaactataagtccatgctgactagcctaagtgttgaaacaagcactacgttgctttggtcatgacaccctgggacgtcgtacctaatctcctgcactgtcgttatgcattaaaagccctgttgggtaggggcggtgtgcataacataacaagccattgcaacattggcgaaggtattcaacggtatagtgtgtaccgtcttatcgagtaaaacacactattcagagaaaggagtgctgcttatgcaggcatat

SEQ ID NO: 714 - DNA, 756 bp, unidentified
  misc_feature 1..756: note = Ga0190303_1007606 JGI
  source 1..756: mol_type = other DNA
atggattcacaaggtaatattggacatccaacacgaaattgtagaatggttcgaagattattgaagaaaggtaaagcaaaagtaatagctggtggtataaagaaaggtcagccactattaatacaattgcttgacaaagtatttgataaatctaaaacaactgatgcagaatttcgcattggtattgatccaggatataaacatatcggttatagtttatttaaaatatataaaaatcatattgagttactattatctggcgaagtagaaaccagaacatctgaagttactgagaatttaagtaatcggaagatgtatcgaaatctcagacgtcaatatagacgaaagaatgttaaacgtaagtttggaagagctaagtttagacatcctagatggaagaacagagctaaacatgcttttcaacctactcatagacatttgattaatagtcacattaatatattaaaatggctgttcaaaagagtaccaaaagatcaatgtgaagtgcatttagaatatagtaaatttgatgttcaaaagattattaatccaaatatttatggatggcagtatcaacatggtcctcaatataattttgaaaatgtaaaatcatatattcgtgatagagataattatacttgtcagatatgtaagaagcatgttggaaatatacaaaatgaagtacatcatattataccaagatctaaaggtggatcagacagaccggataatttgattcttttatgtcaaaattgt

SEQ ID NO: 715 - DNA, 324 bp, unidentified
  misc_feature 1..324: note = Ga0190303_1007606 JGI
  source 1..324: mol_type = other DNA
ccaactgttgattaatataatttggagattttgaaaaaatgaaaaattttttttgatgtagattacctaatttcttaaaattagggctacaacaggcctgattaaatgttcaccctggaatgccactcccagtcccaggctctggaggtatcagtaattatattacttagtccttattgttgactagtaggtaacgaagatcaatattacatttaatcaagccgagggagaccaatctaattaattaagctgagctttttaattagcttttattttaagttaatttttaagtaaaaaaattggagacaaattttaaacatgatt

SEQ ID NO: 716 - DNA, 1260 bp, unidentified
  misc_feature 1..1260: note = EMG_10019972 JGI
  source 1..1260: mol_type = other DNA
atgccgacactacgtaacggtcgtgtccgttaccttctgaaagaaggaaaagctaaaatctttaagtatcatccctttactatccagcttacttacgatactcctgataagacccagcctattgaaataggtatggacgcaggttatcagtatatcggagtatcggtcaagactaagcagaaagaactgttctctgcagaattcgagcttctgcctgatgagaaacagcgacatgacgattgcagaaagtaccgtagaacaagacgcaaccgtcttagataccgcaaaccacgttggaacaacagagtccattcaaagcctgaaggctggcttgcgccgagcatcaataacaaagctgagcggcatatagatatcattagacgaatcattagtgtcgctcctgtcaaatctataaccatagaagtcggagaattcgacccggctctgctcaaagccatgtacgaaggcaaagaaccgcctcagggaaaagaatatcagcagggcccactatactttgcagacagcttgagaaaagcagtatttcagcgtgataattatacctgtaatatatgcagaaagtctgcattaaaggacaagaacgtaatactgaaaactcatcacgcactgttctggaaaggcaggcatggcaacagcctgaatgagatgataacagtatgcagcaaatgtcatacgtcagctaaccatcagcctacaggaaaactgtacgggttagaacctagattacctaggcttgagggtgcaacatatatgaatattgtccgctggtatattatcaacacattgaaagcagcattacctgataccaacatagatttctgttatggtgcgttaacttcacgcaagcgtaaagatttaggtatagaaaaaactcatgccaatgacgcatattgtataggcagttttcagcctgaacagcgacctgtttctacaacatactataagaagaaacgtaggaatagccgtattcttgaaaagttctatgatgcgaaatactatgatattcgcgacggaagtatcaggaagggttcagaactaggctgtaacagaaccaaccgcagagaactgcgtaattctgaaaataacctgagaagatttcacggtgctaaaaaatctaaaggcaggcgtgtaatccgtagaactagatacccatttcagccgtttgaccaggttttgtttaatagcaaaaaatacattgtcaaaggagcgcagaatttaggcatatatattgctttaattgga

SEQ ID NO: 717 - DNA, 287 bp, unidentified
  misc_feature 1..287: note = EMG_10019972 JGI
  source 1..287: mol_type = other DNA
gtcaactacccactgcctacgcgagcaagctcgcttagaggcgggggcttgtaaaagcctagttgattagcctaagtcttaaataaggctacgttataccagaatacattgtaggcaccagcggatgcttcacaagtccgctgctctgcgggtatatgttaaacatctctgaagggtaggagaagtgcatatatctttaaacctgatataacattggcgatgtgaaccacagggtttatccctgcattatcgtcccttacgggagaaaggagaccgttatgactacg

SEQ ID NO: 718 - DNA, 1356 bp, unidentified
  misc_feature 1..1356: note = GENOME_ACESSION: mgm4784118.3 MG-RAST
  source 1..1356: mol_type = other DNA
atggacacgacaagccctcaaaacattggcgaggaaaccattaccccgacagggaggacattcatgtctaattttgtttttgttgtcgatactaaccttcaaccgcttaacccaataccgtcgggacaagcaagaagactgttagcacaacagaaagcagctatttatcggcgttacccatttacgctcgtactcaaaagggcagtaagagttccccaaacgcaaccgcatcaattaaaaatcgatccgggttccaaagttagcggattagcaattgttcgagatcgcaaagtaatttggggtgccgaattaacccatcgcgggcaacaaattaaaaatgacttagagtcacgtagcaaccttcgtcgcaatcgtcgcaaccgcaaaactcgttaccgcaaaccgcgttttcttaaccgcaatcgaaagcctggatggttgccaccaagcttagaatccagagtgaaaaacatcgtgacttgggtcagccgcatccgccgatatgtcccaattacaggcatatcccaagagttagttaaatttgatacccaagccatccaaaaccctgaaatatccggtgttgagtaccaacaaggagaacttgcgggttatgaagtcagggaatacttgctcgccaagtgggggagaaaatgcgcttattgtggcgttgaaaacgtaccttttgaggtagaacacatctacccaaaatcaaaaggggggagcgatcgcgtttccaatcttaccctggcttgtcgccagtgcaaccaagccaaaggcgatcgatatcttcgggagttcttgtcaggtaaacccgacattctgtcccgtattttgcagcaggcaaaacaacccttgaaagatgcggctgctgtgaattcaacccgcccttcattgttccaacaactcaagcaaacaggattgccaatagaagtttcaacaggaggtagaaccaagtacaaccgcactcgtttaggactacctaaaactcattggctggatgcagcttgtgtgggaaatcaagaagtgctgcaagttgtgacgaagcagccgttgttaattgcagctaaaggatgggggagccgtcaaatgtgtacgaccaataaatacggatttcctgtcaagcacaaaacgcgatgcaaaacgttttttgggtttgggactggcgacatggtaagtgcaattctcccatctggaaagtttgcaggcactcacgccggcaggttgacggttaggcaaagcggggttttttccatgacaacgccacttggcaaaattagtccggtgcgtcataaatactgcaagttaatccaccgcaacgatgggtatatgtatgcgttgtccgccgttgttcattaa

SEQ ID NO: 719 - DNA, 243 bp, unidentified
  misc_feature 1..243: note = GENOME_ACESSION: mgm4784118.3 MG-RAST
  source 1..243: mol_type = other DNA
gctattcaccaaacagcgaacaaaagtggacaactacttcatatgctggagagatagccagcctcagttacaaactacgttttgggggtcatgacacctacgggtgcttttccagcttgtagctctgtcgtcaatcgttaaacatccctatttggttaaggaagtacgatggacacgacaagccctcaaaacattggcgaggaaaccattaccccgacagggaggacattcatgtctaatttt

SEQ ID NO: 720 - DNA, 648 bp, Moorena sp.
  source 1..648: mol_type = other DNA
atgtcatacgtctttgtcatcgataccgataagcagccgctttcccctgtccatccggggcgagcacgcctgctgctcaaagggggaaaggccgccgtctataggaggtatccgttcaccctgattctcaagcacaaggttgacaaacccgtgcccgcaccgttacgtctcaagcaggatattcgagacttccttgctgatcagcccgaccgactctgccatgtgctaacccaaacgaaagtacctctcaaagatgccaccgtggtcaacgtgacccgctccgaactcctgcggcgcttgcaggccattgggctatccctagaaacaggttcaggtggacgcaccaaatacaaccgcatcatgcgtggcctgccaaaaacccactggacagatgcagcctgtgtagtggtagggattgggggtccagggggcgaagccaccctggcggggtttggggtgtccccaaattctcccattccccaaagggttttgggcttctgcactaggcacggcaaaatcactgatgttccacaccgcttttgtcagcccatccatcgtagcgatggctatacctatcatcacggagtgaggatttccccacccccaactagcccgaaaggagcgcctgtaagtacctccacttgctag

SEQ ID NO: 721 - DNA, 307 bp, Moorena sp.
  source 1..307: mol_type = other DNA
gtcaagtccccccatcctgacgtgtcagggtggaggctcggaagctagacttccaagccggaaacttgagcagacagaggtttgaaaaacaaccaacgttatcagtaagcgttaaagaacctacctgcgggtgcttcaccagcccgtagccctagaaccgttcagttaaacaggtgtagagggagaaactagtgctgagcggaaagtaccggctgataactgtgtcgaggtgagcatcacctgggaaaccagaggccccacggggcataaaacaaatagaaggaacacgacatccgccatgtcatac

SEQ ID NO: 722 - DNA, 1371 bp, unidentified
  misc_feature 1..1371: note = Ga0183746_00132 JGI
  source 1..1371: mol_type = other DNA
atggcggttttcgtactggacaaaaagaagcaaccgctgatgccgtgcagtgaaaagcgcgctcggttgctgctggcgcgtggtcgtgccgtggtgcataagcgctacccgttcacgattcggctcaagaatcgcgtcggtggcgaggcgcaaccgcttcgcctgggcatcgaccctggcagcaaaacgaccgggctggcgctgatgcacgaaccggacagtcagcagcggcatgtgctgtgcctgtttgaactgatccatcgcggctttcagatcaaaaaggcattacagcaacgcgccgcctttcggcgtcgccgccgcagtgccaacctgcgctaccgcgccccgcgcttcaataatcgcatcaaacctaagggctggctggcaccgtcgctgcagcatcgggtggatacggtgatggcgtgggtcaatcggctatccaagtcggcacccatcaccggcatcagccaggagttagtgcgctttgacacgcagaagttggaaagccccgagatcagcggcgtggagtaccagcaaggcaccctgctgggctacgaggtgcgcgaatacctactggaaaaatgggggcgtgagtgtgcctactgtggcaccgccgatacgccgctggagatcgagcatatggtgccgcgttcacgcggcggctcgaatcgcgtcagcaatttgaccctaagctgccatccctgtaatgccgagaaagatagccagacactgaccgattttttcgccaccaacaaaggcctgaaaaagcgcctcaaggctaacggcttatcagctgacgcacagctggaacgtgtacagcgccagctcaagcaaccgatgcgcgatgccagtgcggtcaatgcgacccgctgggcgctgttctccgcgctcaaaaccacggatttaccggtcgccgtgagcagcggtggccgcaccaaatacaaccggcagcgcctcaacatccccaagacgcatgccctggacgccgcgtgtgtcggagcttttggtaagctgtatgactggacagagccgacactgacgatcaaggcgatggggcgcggcagctaccagcgcacgcgcttaacgaaacacgggtttccgcgtggctatctgatgcggcagaagcaggtgcacggctttcaaaccggcgacatggtgcgtgcgatagtacccaccggtaagaaggccggtacccatacggggcgtgtcgcgatacgcaaaaccggcagtttcaacatccaagccgaacacggtgcagtgcaaggcatttcccataaatactgcaccctcatccaacggagcgatggctacggctattacgtcacactcttcagcaacctaacaggagaagcgggacgggcggtggcgtaa

SEQ ID NO: 723 - DNA, 294 bp, unidentified
  misc_feature 1..294: note = Ga0183746_00132 JGI
  source 1..294: mol_type = other DNA
gtcaactacccccgcctgaaggcgggagcttgtgaaagcaagcctagttgaccagggtaagcgggcggtacagccgctacgttgataacaggtcgccaagactcacccacggatgcttcctcagtccgtggctctgaaaggtcaagatcatgctggcgcagggtaaaacgccgaaggtcttgaccgctgccacaaggcaggagccggttatcgacattcccgaggggagacggggcgtaagccctgcgacacaaggcccgtaagggcgctatttaaggagaagatcgcatggcg

SEQ ID NO: 724 - DNA, 2622 bp, unidentified
  misc_feature 1..2622: note = Rock porewater metagenome
  source 1..2622: mol_type = other DNA
atgcgctggctgctaacattggcgagagggaccttactccgagaggaggtagactctatgttagtctacgttatcaacaagcacggaaaaccgttaatgccctgcaaaccacagaaggcaaggaggctgctgcaagagggcagagcgaaggtcatgaggcgcacgccctttacggtccagttgctttacgggtcgagcggttacagacaacccgtcagcctcggagttgatacgggagccaagtacgtgggggttgccgctgttcggacagacgagaaaggaagagcaaagaatactttgctgcaaggcgagtgtcagctgcgagcagatattcgcggcaagatggaccgacgcaggtcctatcgcagaacaagacgtggccggaagacgaggtatcgaaagccaagatttgataacaggcgtcgaccggaaggatggttggcacccagcattcagtccagggttgacggcacgctaaaggtgaccgatttgctccgccagctgcttccggttacttcagtagaagtggagaccgcgcagtttgacacggcagcaatggcaagaggagtcctgcgactgaggccctggcagtaccaacggggcgagcagtaccagtttgaaaacgtcaaatcgtacgttcgacatcgagacggatatcgatgtcgccagtgcaaggccaaaggtcgtccgttggaggttcaccacatacgaaaaagagctgatggcggaacagatcgccccgctaacctgataacgctgtgtgaaggttgccacgatcgggtccataagggcgggatcaagctgacggcggttcctggaagaaccaatctccggtatgccgcccacacccaagcaggcaagacggcccttgtggcagccctacgggaacgactcccgacttccgagacgacaggcgccgtgaccaaagtcgatcgacttgagatgggactatcgaaaacccatgcgggcgatgcgctggccatagcggctacaggggtacccgtcgaacctgtggacacccagttttttatgcgctgtatcccaaagggaaactaccggctgttcaaaggtgctcgcagccatatccgtaatcagagcgcccgcgaactgtttggcttccggcgtctggacaaagtatgcttgcccggtggtcaagaagggttcgtcaaaggtaaacggacctctggttacttcaatgtgagcacacttgacggcactgtgatcagcgcgtcgatctcgtacaagagattgcgtctattggagaaacaaacatcgctgctcgtcgaaaggaggcaggccgtttctatgaaggacaccaggcttgtgctgacggctactgttgttactgtagggtccgagatcgttgaggggatcattctcaacagtaatgcccggtatttatcacttcaactgcaggcagccaatatcagggtgctaaagcacgtttccgttgacgatgacccaagtgcgctaacggaggcgctcaaggaagccattaaagaaactgacgtggttgtagtcaccggggggctaggcccaactgaagatgacataacgagggaagcggccgccagcgccctgggagttggcctgactcaagatagggaaatggttgagcagatcgagaggtacttcagggaccgacacctgacaatgagcgagaataacttgaggcaggcaatgtctcttgagggcggcgaggcgctgactaacgatagagggacagcacctggtcagttcgtcttactggatggatctcagaaggcccttgtgctcctgccggggccaccttcagaaatggctgctatgtatgagaaacaggcgcagccgcgattggagagatttgccatggccagcggcagggcggttcagtgggtctcaaagcagattcatttctttggcctgggtgagtcggagctagcaaggcgactagaggggatactgcctgcagggcagagggacgagggacttaagattgctacaatggccagtggaggcacggtaactctgcgcctgggcgccgccagcggccgcctaaagctgctaagaacagccgggcaagctgtccacagggcactgggcgaatacgtctacggggaggataccgatacccttccaggggctgttgggcgtgggctgattgagcgcggtttaaagatggccatcgctgaatcctgcaccggtgggctcctgggctatcaacttacaaccgtggcaggtagttcagactactttataggtggtattcaggcctacagcaacggcgttaagaaggatgtgctaggggtaacaaagagcattttcctggaggatggggccgttagccctcagtgcgctgaggccatggctctaggggtgatcaacacgttgaaggccgatattggtgcctcgattaccgggattgccgggccaggtggagggagccccgagaaaccagtgggaactgtctggtttgctgtggctggtccagatggtactgtggtagatggacagcggttccagggagatcgggatacaattcgacgtcgagccgcgactcactgcctgggtctggtgtggaaatccctatgcaggaatcactcaaacccttcccgaatggaacacagcatgagagaggtgtaa

SEQ ID NO: 725 - DNA, 272 bp, unidentified
  misc_feature 1..272: note = Rock porewater metagenome
  source 1..272: mol_type = other DNA
gtcaactaccccggactgaagtccgaggcttgtaaaagcctctagttgaccagcctaagccttgaaacagaggctacgttagcagtagagcttagacgccttacccggaatacccggataggcgacctaccctggggtgccccctcagctccaggctctagaactccttggttaaatagtcctgagagggtagggacagtgccttggagatgcgctggctgctaacattggcgagagggaccttactccgagaggaggtagactctatgtta

SEQ ID NO: 726 - DNA, 480 bp, Moorena sp.
  source 1..480: mol_type = other DNA
atgcaacgagttccagttatctcaccacaagggcttccactgatgccaaccaaaccttcaagagccagacgttggctccgtgaagataaagccaagatttatgccgatgtcaggcgtaatattcgtggtggctgttgggagggaaaagcaactattacttcggctcccttcaaggtgatagccaagccgaatatttatcggcgtcagctacattttgagaatcccgatagtaagaaacctaaccccacgcaataccggaagcgaaaaggtggaacaattacaccctttggttttagatctggagattttgttagtgctgaaaaagcaggacttatatacagaggttgggtgggtggtcacacccaaacagcgaagtcgaaaaacgtttctgtttacgacagtaactggaaaagaatagggcagttttcccctaaaaaagtcaagttactcaagcgttcatgcaagttatgcgtaagctga

SEQ ID NO: 727 - DNA, 224 bp, Moorena sp.
  source 1..224: mol_type = other DNA
gtcaactactcacggctacttccttgagccgtgagcttgaaagagccagatttcaacaatagttgtctaccgcgagagtcacgccatgtcacacacggcacaatgttctcctagttgtgcctgctgtaagttccctggcaccgagcgctttaagagaggacatgtttggcgtgatggcggtaaggagcaagtaactttctcgtaggattatctccatgcaacga

SEQ ID NO: 728 - DNA, 942 bp, unidentified
  misc_feature 1..942: note = Ga0374055_0154238 JGI
  source 1..942: mol_type = other DNA
atgtcggttccagtattagatacaaataagaagccattaatgccttgctcggagaagcgagcaagaaaattaatggagaaaggtcaagctaaaccttgctggcaaaaaggtatattctgtattaagcttatgcaagagccatctactagaaactatcagaaggtcgctcttggtattgatcctggaagtaaacgagaaggctataccgtctctacagaaaaagccgttgttcttaacgtgacaacagatacaaaagattggattaagaaacacgttgaagtaaggagaagtattcgtatggcaaggaggcaaagaaagacaccttatcgtaaacgcagatctaatagattaaggaacagagtttttcttccaccatctaccagagcaagatggaatactaagctacagatgatcaagtttattatatctattctgccaataacaatagttaatgtagaagatattaaagctgctactaagaaaggaaaaacgaagtggaacagatcattctcacctattgaagtgggtaaaacttggttctataatcaggtagaaaaacttggagttaagttaatgattatacaaggatctgataccaagatagaaagagacgcaagaggatttagtaaatctaaaaagaagttggactttatttgggagacacataatgtagactctcatatattgtgtgagcttgctttaggtaagcaagttaagccatattttggcatatggaagatagaatttctcctatattatagaagacaattgcagaaacagaatataagtaaagaaggaaagagaatagagtatggttctacagtaagtatgggaatgtcgagaggctctatagtcttgtataggaataaaatgtattatcttggaggatcatctaaaggaagagtaagtatacattctataattacaggagagagagactga

SEQ ID NO: 729 - DNA, 243 bp, unidentified
  misc_feature 1..243: note = Ga0374055_0154238 JGI
  source 1..243: mol_type = other DNA
gtcaataacctacgacattactcgtaggcttgtgcggagaaacttaaccagtttttctcgatcaagactaaaatgttgtactagacagtatatatagttgatcagctctcgttatggtaagagggtaaagtacatagagaatgtttcgctagttctctttccctacggtcagctatgtcgaagcgagttgaacaaggatgcgtaagcatcatttttagaaaagagaaaaaaaaatgtcggttc

SEQ ID NO: 730 - DNA, 1566 bp, unidentified
  misc_feature 1..1566: note = Ga0310147_000821 JGI
  source 1..1566: mol_type = other DNA
atgggctgtatcaagccgggggagacctaccaacctgtatggttgagtatttaccttgagaaaggtggaaagatggtatacgttatatcaaaagacggaaaaccgctcatgccgacaaaacggcatgacagggtaaggatattgctgaaacagaagaaagcatgtgtagtccagagcaaaccgtttactatacagcttttatatgacagcacaacatacacgcaggatgtggcatctgcatatgacacggggcgcacacatcagtccatcacggctattgacagcagcacaaccgatgttttgtactcatctgtgaatcactgccgcaacaaagacgtgcccaagctgatgaaagaacgcaagatgtaccgtatgataaggcgtcataacaggcgccggaagaaaataaggcgtgctattgcgaatcatacttatttccgagcaccaagaaaagtggtacagcctggaactaaggagcctataacagcaaagtatgtcaagccgaagcaagcgcggttcagcaacaggaaaaggccgaaaggttggcttacgccgacagcccgccagttattgcagactcacatcaactatttcaataaagttgcgaagatactgcctatcaggaaggtggtgctcgagtatggcaagtttgatatgcaaaagcttgagaatcccgatatagcaggaaagcagtatcaacaaggtacgctgtacagctacaacaacatgcgtgagtatattatagcaaaacaggaaggtaaatgcctgttatgcggcaagcgcaagatagagcatttgcaccatatagtcccgcgctcaaaaggcggcagcgatacctacaaaaacatagcggggctatgcggcaaatgccatgaaaaagtgcacaaagatcctaaggccggaacgaagctggcggagaaagcagccggcacggctaaggagtatgctgatccgagcatactcaataccattatgccgtatctctatgaatatcttaagtcaaagctcggcgaagagaacgtagagatacgttacgggtacgaaaccgagacaatgaggcggcaactgggcttgagtaagacgcattataatgacagctatgcgctggcgcttatgggagtcgggcatataagccgtatagagaagataaaaccgtatgagtataagcagtacaggcgtcataaccgtagttttacagatgcacaaagggacagactatacaaacaagacagcaagatagtggcgaggaacaggcacaagaaaaccgagcaggaagagccgtcgcttgaagaataccggcaggagataaaaggaactgcaggaaaaaaggaagcgtcacgtgccatatctgggctgaaagtatacagggcagccaagcggatgagaacgcccgccaaagacgtaccgataacaagcggaagcagcgtattgtacaaaggccaacgctttattgtcaaaggcattttacacaaagggcaatcgttgttgttggaaggacatgacggttatgtgtctgccggcagttgcagactgatgacgaggaatacaggcatagtatgcttgtga

SEQ ID NO: 731 - DNA, 208 bp, unidentified
  misc_feature 1..208: note = Ga0310147_000821 JGI
  source 1..208: mol_type = other DNA
gtcaactactcctcaataaattgaggagcatacagccgcgtggatgctatgttgcatcttaggatgcggtagttgaacaggctggctgatacggctgcgcactccgggatgccactctcagttccggacgctgatgggctgtatcaagccgggggagacctaccaacctgtatggttgagtatttaccttgagaaaggtggaaagatg

SEQ ID NO: 732 - DNA, 1347 bp, unidentified
  misc_feature 1..1347: note = metagenome
  source 1..1347: mol_type = other DNA
atgtcaaccggccttcgggccgagcaagcggagcctgcgggtatccgcgaaggatgtactttgaaagtatttgttttgaacatgcgaggtcagcccttgatgccgtgctcgcctgcaaaggcgaggcatctgctcaaggcaggcaaggccgtggcgaggcgtcgaacgccgttcacgattcaacttcgaatcgctacaggtgaaacgaagcagagcgtgacgttgggcgttgacgccggcacaaagcatgtcggcctttccgctacgacggaaaaggaagaggtctttgcgtccgaagtcgaacttcgacaagacatcacggagcttctggctgctcggctctcgcagcgtcgtgagcgccgctatcgcaagacgcgctaccgtgcgccgcgctttttgaaccgtgtacgctcgaaacacaagggatggcttgccccttccgttgaaaaccgcattcaggcgcacatctcgcgcattgaagcggtttgccgagtgttgccgatcagcaagatcttgattgaaaccgcatccttcgacattcagaaaatcaaaaatcccgaagtcgagggtacggactatcagcagggcgaccagcttggattctggaacgtgcgcgagtatgttcttttccgtgacggtcatgtctgccagcactgtcgaggtcgatccaaggatccgatcctcaacgtgcatcatcttgagagccgcaagacaggcggcgatgcgcccaacaacctgatcacgctctgcgagacatgccacaaggcatatcacgcaggaaggatcaagttgaaggttggtcgcggcacgtcgttcagggcagaagccttcatgggcatcatgcgttggacgctacttgaccgcattcgcaaggcacatcctgaactgcctgtcgaaaacacctacggctatctgacgaagcacaagcgcattatccttggcttgcccaagacgcattgcgccgacgccttctgtattgccggaaacctgaatgcgctgcgacgaggagaaatcctaaaccagcgccagacgcgcaagcacaaccgtcagattcacaagtgtacggtgctctcgaagacgcttacggacggcacgaagatcggataccgaaagctcaatcaaacaccgcatctggtcaagaacttcaggctcttcgacaaggtgagatgtcttgggcaaaccggcttcatcttcggtcgaagatcgtccggctacttcgatgtccggaggctggacggcgtaaagctttcttccggcatcagctacaggaagctcacgcttctcgaaaagagaagcacctatttaaccgaacttagaaacgaggacggcgcttcctcccctgtctga

SEQ ID NO: 733 - DNA, 276 bp, unidentified
  misc_feature 1..276: note = metagenome
  source 1..276: mol_type = other DNA
gtcaataacccctgcctgaaggcagaggcttgaaggagcctttattgactagcctcagcgcccctctttcgagaggtgctacgttggttgggaatgtataggcaccgtggaatgtacatcctagttccacgcactgcggcctgtgattaaaagctccgagaggtaagagcggtgttgcaggcaccaaaccccgtccaacattggcgaaggatgtcaaccggccttcgggccgagcaagcggagcctgcgggtatccgcgaaggatgtactttgaaa

SEQ ID NO: 734 - DNA, 1053 bp, unidentified
  misc_feature 1..1053: note = Ga0310695_10005296 JGI
  source 1..1053: mol_type = other DNA
atggttccagttttagataagaacttaattccattgatgccgtgtaaagaacgtagagcacgtaccatgatgaaaaaaggtagagctaaaccgtattggagagatggtatcttttgtattatactacaaaacgaaccatctgctagaaactacagcgatgtagttgttggaatcgatcctggttctaaacgtgaaggaattacagttgcaacggaacaacgagtagttctcaatattacgtctgaagcgattactcatgttaaagacaacgtagaaactagacgtacattaagaagatcgcgtcgtcaaagaaaaacaccatatcgtaaatgtcgtgaaaatcgaaaaaataataacaaagacgataaattgccatcatcaacaaaatctcgttgggatgctaaattacgtatacttaaaaaacttaaacaaatacttcctattaccgatgtttcagtagaagatgttgctgcaaaaacgataaaacgtgcgtctaaatggaataatatgttttctcctttagaaactggtaaatcgtatttttacaaagctatcgaaggtctaggtttaatcgtattcaagtggaagggttacgagacgcacgaatggcgtttacaagctggatataagaaaacgtctgaaaaacttaaaaatgcgtgggaagcgcataatgtagatagtcattgtttatgtgaaatggttttaggttattgtataaaaccagtaaagatattgtgtctactatcgtttttacaagtcaatagacgtaatctatttaaacaaactattcttaaacatggagctagaatacggtatggtggtacaatgtcgttaggatttaagaagaatacgttagtaagatatcctaagtatggtttaagtttagttggtggtaatacgaaaggtaagctatcgttacataatatacacaacggtagtcgtctttgtcaaaacgcaaaattaagtgacttaacgattgttagttacaatttaaaatgggttttacaactgatagttcctaaagttgtaaaagcaggctcttcccatgactaa

SEQ ID NO: 735 - DNA, 279 bp, unidentified
  misc_feature 1..279: note = Ga0310695_10005296 JGI
  source 1..279: mol_type = other DNA
gtcaataacccacgactaaagtcgtgggcttgtgaagaaaactgaaggtggcgcttcaaataactcacaagggtaagaagagactagattcgctgagtggaacaacacacgtttgaaggcaattatacgcagatggaaagccaaccagtgacagaaagacgtattacggatacctccctagtctgtattcaacgtcgcgtataatatcgaagggaattcaatactagaggtgcagttactgctgcacactccgaaaggagaaagatgtttatggttcca

SEQ ID NO: 736 - DNA, 1272 bp, unidentified
  misc_feature 1..1272: note = Human gut metagenome
  source 1..1272: mol_type = other DNA
atggtatatgtaatatcaatagataatgaacccttaatgcctaccaaaaggcatggtaaagttagaaggctcttaagggataaaaaagcaaaagtggttagaagagaaccttttacaataaagctactctatagaccagaaaccaatgtggtacaagattgtacccttggtatagatacaggctctaaatatattggagctgccgtagtatcaaacggcgaaatattatacgcatcagaagttaaaacaaaagacgatgttaaaaagaaaatggataggcgtagaaactatagatccaacagaagatatagaaaaataaggtatagaaagcctagatttctaaatagaggtaattccacaaaagaaggtagatataacctaacgcttgtaagtaaatttaattctcatgttagagaaattgaatttatcaaaagcatactaccaataaacaagctagtatttgaagtaggtcaattcgatactcacttgatgaaaaacccaagtttaaataatcccaagataagacattggggttatcaaaaaggaacaaattacggttttgcaaatagtagagaacatgccttaaatagggataaatatacttgtcaatgttgtggagttaaaaatacaaggttagaagttcatcatataatatatcgatctaatggtggtactgatgacttggataatttaataaccctttgtgaagaatgtcataaaaaagtacacgctggaataataactataaacaagaaacctaaaaagttacctaatttcagtgatgcaactataatgtcaatacttagaagtatgttattaaaaagatatccagaggcaatagaaacatatggctatgtaactaaagaaaataggataggcttgggtcttccaaaagaacactttgtagatgcctgtgttattgctactggaggctatgactttgacttgccaaaagagatctttgttaaaagacatgtctctaaaggagattatcagctaacaaaaggttctcgtagtgaaaagaagattcctcaaaccaaaatactgggctttagaaaatgggataaggttaaatatctaggaggaatatactttattaagggtaggcgctctaggggcacttgtgtgctagaagatatatatggcaataaggttgatttttctcatatgccaagaggtttcaaggatcctaaactttctaattgcaaaagaattagtgcaaggaaaacaactttatgtcaaagaatagaatacattccaaaggcaagttaa

SEQ ID NO: 737 - DNA, 341 bp, unidentified
  misc_feature 1..341: note = Human gut metagenome
  source 1..341: mol_type = other DNA
gtaaactacaacgcccttaaaggaatgttgctttaggttatctaaacaacaaaccttgggatataaggtttaccagactcagtaagtagaaatgtttactacgatatattgatgcacacctttggttgtcgccccagaccattgctctgtggttagcatttaaacagttgcgatatattaaagttgtaagcaacagtgatgctaacgctaaactcaatatatcattgtcgaggggaaggtttaaactatctatggtaaaagtaggtagaaaaacaatacagttcgttatgtactgaattaagttttaaaacataataaagttaagaaaggagtgccttatg

SEQ ID NO: 738 - DNA, 1275 bp, unidentified
  misc_feature 1..1275: note = Ga0111054_100026 JGI
  source 1..1275: mol_type = other DNA
ttgaaatatagaagagaacttaaggtaattaaaatggtatatgtacaatcaatccggggcaagaaattaatgccttgctcagaaacgaaagctcgacatcttcttaaagaaaaacgagcaaagattattaattatgaaccatttacgattaagctgttgtttaaatgtgaaaacaaaacacagccgataacgcttggcgtagacacgggttcaaaggttgtaggtctttcagctacaacttctaaaaaagagctgttttctggagaatttgaacttagaaataacattgttaaacttatttctactagagctaaacttagaagaagtagaagaagcagaaaaacaagataccgtcctgctagatttttaaacagaagaaaaacaaaaaagaaaggatggttacctccatctattaaaaataaattaaacgctcatgtaaaaaccatagacagtgttattaatttacttccagtgactaaaataattttagaaactgcaaaatttaatattgctaaaataaataatccagaaataaaagattatacttctggccctcaaaaaggatttgccaatgtaagagcttatatccttgcaagagataattatcaatgtcaatcatgtaaaaagaaaaatgttaaacttcaagttcatcatatcgagtctcgaaaaactggaggaaatgctccaaacaatttaataacattatgtgaagaatgtcatttaaaatatcattccggagatttaaagttaaactttaaaagaggaaaatcttttagagatgcaacctttatgtcaattttaagaaaaagacttccaactcaattaagggaaaagtattcatctatccaaattgaagagactttcggttatataacaaaggcgaatagagaaaaagcaggtctcccgaaagaacatagatatgatgcttgggctatttcaaataatcctaatgcacagcttggttctgagtggtggaaaatgaagcaagtccgaaagcataacaggaaaatacataaagctactcctaaaaagggaggaaaacgtgatttagaacaaagtccatataaaactcatggatatagattatatgacaaaataaaatttaacaatgaaattttctttatcattgctagaagattaaatggctgttttacgttaaaaaatattaaaacaggaactttgcttgataaaatgcaaaagtttatctcattttattcagttagaaataatagtgttttattagaaagaaggaacaatcaatatgaatgctcgtaa

SEQ ID NO: 739 - DNA, 306 bp, unidentified
  misc_feature 1..306: note = Ga0111054_100026 JGI
  source 1..306: mol_type = other DNA
attatttaaatcatggctaatgcatcattttattattaaaatgattagcctaagtcttaattgactacgttatctaagaataatataggtactcttggagtgttactcctagctccagattctacgatatatggttaaatagttctgatgaatatgaacagtgctgtatgtgcgaccgtccaatattttattagatagtctaaaaccttagaataacattggcgaaggggtcataaccttcttgaaatatagaagagaacttaaggtaattaaaatggtatatgtacaatcaatccggggcaagaa

SEQ ID NO: 740 - DNA, 1581 bp, unidentified
  misc_feature 1..1581: note = Ga0272423_1005921 JGI
  source 1..1581: mol_type = other DNA
atgtctacgttgcaggcaagacagaagacccaccaagggatgcttcctcagtcccttgctctggaatccgtgtcagcagacaccgttggggtaacgacgaaacggggcacggacgcgggcaagaccgcacctggcacgcaacatggtcgaggggagaatctgcaccgcattcgccagcgcgcagatcgtcaccgggtaacccccggaagtgggagtaatcccgcaccatcagtgagaacggttcagccgagcgtgttcgtgctggacaagtgcaagcagccactcatgccgaccagccccgcgcgggcgaaacagttgctgcgggccggtcgagcacgagtggtccgactccacccgttcaccattcggttggtggaccgcacccgtgagcactcagcagtggaaggggtgcaaatcaagatcgaccccggtagccggtgcactggcgtctcggtggtccgggtaccaccctcggaggcggtccacggattgttcggtatcgagatccagcatcggggcagacagatcagtaagaatctcacctcccgtgccgcgttacggcgtggacggcggtccagaaacctgcgacaccgggcgccacggttctccaaccggatgacaccgcagggctggttggctccctcgctgcaacaccgggtggactcgacaagctcagtggtgtcccggttgcgcaccatcgcgcccgtcacttcggtggcgatggaactagtccggttcgacctacagaaattggtcaacccggagatcaccggcaccgaatatcagcagggcaccctcgccgggttcgaggttcgcgaatacctgctcgccaagtggcaccggagctgtgcctactgcgaggtcagcggggttggtccccgttcggtgccgatgaacatcgatcacattcgtccgcgcgtcaaaggcggctcgaatcgagtgtctaatcttgccttggcctgcgtcccgtgcaaccaggccaaaggttcccgggatgtggccgagtttgtcaccgaccccgcgcgcctggcccggatcgctgctcaagcccagcggccattggtggatgcggcggcggtcaacgcaacccgttgggtgctgtacgaggcgatcaaagcaacgggcctgccagtccacaccggcacaggcggccgcaccaagtggaaccgagtgtctaacgggctaccgaagtcccacaccctcgacgcactgtgtgtcggtggtatcactggtgttgctgcggtgccgaacgctgtgctggtagccacatccaccgggcgcggcacctacgcccgcacccgtagcgacaagtacggattcccccggctgcggctgactcgacagaagcggcacttcgggttcgccaccggagatcatgtccgcgcggtcgtgtccaccgggaccaacaccggtacctatgtcggacgcgtagccgtgcgcgccagcggcagattcaacatcaccactacccggccagatggaaagtccgtcaccgtccaaggcatccatcaccgacacttccgcctgctcaaccgagccgacggctggagttacacgagaaaggaggaggagcgcatctaa

SEQ ID NO: 741 - DNA, 316 bp, unidentified
  misc_feature 1..316: note = Ga0272423_1005921 JGI
  source 1..316: mol_type = other DNA
atcaaccaccctgccctgaaggggcggggcttgtaacggagctatccgttcccgaatgagcccagccgctagggctggttgaccagaccaagacatcaagattggaggcgaaacagatgtctacgttgcaggcaagacagaagacccaccaagggatgcttcctcagtcccttgctctggaatccgtgtcagcagacaccgttggggtaacgacgaaacggggcacggacgcgggcaagaccgcacctggcacgcaacatggtcgaggggagaatctgcaccgcattcgccagcgcgcagatcgtcaccgggtaac

SEQ ID NO: 742 - DNA, 993 bp, unidentified
  misc_feature 1..993: note = Ga0116158_10014977 JGI
  source 1..993: mol_type = other DNA
atggttccagttttagacaaaaataaaaatccgttgatgccttgctcagaaaagagagcaagaaaactattggaatgtaaaagagcaaaacctttttggtataaaggcttctttacaatcattctgcaagaagattcttctggaaacactatgcaggatatttgtgtaggacttgacccgggaagtaaaatgaacggaatgactgtaaaatcagaatcacacactcttttaaatcttcaggttaaggcaagatgcgacgtaaaggaaaaagtagaaaaaagagcaattatacgtagagctagacggcgtagaaattgtccttatcgtaaatgtaggattaaaagaaaaggtcgagagatgccgccatctacaaaaactagatggcagcagcatttaaacatggtcaaactttgttccaatctgtatccgattactcatgtttctgtagaagatgtcaaagctattacaaaaaaacatgcacggaaatggaatgtgaattttagcccgattgaagttggtaaatcatggttttattcagaactagaaaagagttataaactttatactttcggcggatacgaaacatatggggaacgtaatgctttaggtttaaaaaaatcaaaaaataaactagaaaaagtgttttctgcacattgcgtagattcttgggtattggctaataaagtaattggtgggcacgtcaaacctgaatatacaaaggttattggtgttactccgttaatttattataaacgacaactacacgtttttttaccagtaaaaggatttaggaaaaaatacggaggaacatctacttttggaatcaaaaaaggaacgttagtaaatagtaagcgtcacggactttctattattggaggatccgctcgaggagggattagtttgcactctttaagtgataataaaagatttactcaaaccgctaaaaaagaagaacttactgtcttaacaactttaaaatttatattaaaataa

SEQ ID NO: 743 - DNA, 246 bp, unidentified
  misc_feature 1..246: note = Ga0116158_10014977 JGI
  source 1..246: mol_type = other DNA
atcaactatcccattactgggaattttaggaaaactcttaccaagactaactagaatttaaacaggagaatagcttgcccaagataataaccttcgaaagttattgtcgtttgaaggaaactaagatgataggttgtggtagaccaaaacacatagaggatgcttcccaagtcttctttcaatgtttcatcgagtagcgaagggaaattaaaacaagatgcgtaagcataattttttatggttcca

SEQ ID NO: 744 - DNA, 1362 bp, unidentified
  misc_feature 1..1362: note = Ga0207997_1002358 JGI
  source 1..1362: mol_type = other DNA
atggtaaaacaacaacagaagttattcaagagagatacatgcatacctagagatacttctctagtctctggctctatgattagtaatgtaaacaaagaggaaactcttagtcatactaattcaaaaaccttagataacaatctcgaagagaaccaacaccaacaaacaggtgggtttaagaccaaagtgtttgtaatagcaaagagtggaaaagttttgatgccaactactccaagaaaagcaaggcatcttttgaaacaacagaaagcaaaagtagtaacgacaaaaccatttgcaatcaaacttaattgggattgtgaagaaatagtgcaagaagtcaatttaggaattgatactggagtaaaaacaattggttattcagtaacatcaaaaactaaagaattgatttctggagaatttgtgttaagaacaaatattagtaaaaaaattagcgatagagcaatgtatcgaagaaataaaagaaataaactttggtacagagaagcaagattcttgaatagaactaaatcaaaacctaaaggttggttagcaccatcagttcagcataaaattgattcgcatatcagattgattaataaaataaaatctttgattccaataactaaagtaattattgaatcaagtcaatttgatgctcaaaagttacagaatccagatattgaaggaagtgaatatcaaaatggtcaaatgaaagatttcgagaatgtaaagatgtttgttagacaaagagataaatacacttgtcaaatctgtaagaaaaaagatgataaaatgttagatgttcatcatatcaaacaacgaaaagatggtggaagcgatagaccagataatctgataacattacatcaatcatgtcataagaaatttcattctggtaaaatcaaacatgtatttgtcaaaccaaaatcattcaaagaaacttcaatgatgaatagtttatggtcaagattgaaatatttagtagattgtactgaaacatttggttatattaccaaaataaatagaaaagaattaggacttgaaaaaacacattataatgatgcgtttgtaatttctggtggaactaatcaagaaagatgtcaatcaaatgtttcaaaacaaattagaagaaataatcgacaattacaacaaaatagaaaaggacaaaaattggcaatcagaaaagaacgatataaaatacaatctggagatattattttatatcaaaataaaaaattaatttgtaatggaatgtttaatttaggtaaatatgtaagttttgtaaaaaatatatttaatataaaatatgcaaaaataaatgatattaaggtattatattatggtaaaggaatcaaaatataa

SEQ ID NO: 745 - DNA, 264 bp, unidentified
  misc_feature 1..264: note = Ga0207997_1002358 JGI
  source 1..264: mol_type = other DNA
gtcaatcacctcgccctaaaggacgaggcttgagaagtgattttcaagagtaattggttgattagagagttgaaaaatggtaaaacaacaacagaagttattcaagagagatacatgcatacctagagatacttctctagtctctggctctatgattagtaatgtaaacaaagaggaaactcttagtcatactaattcaaaaaccttagataacaatctcgaagagaaccaacaccaacaaacaggtgggtttaagaccaaagt

SEQ ID NO: 746 - DNA, 540 bp, unidentified
  misc_feature 1..540: note = Ga0101770_1107140 JGI
  source 1..540: mol_type = other DNA
gtgcaagattgtatattaggaattgacgcaggaagtaaacatataggaatggcagttataactgaacaaggtaatgtgctttatcgtgccgaagcagaattaagacaagacataaaagagaatattgaaacaaggagacgacttcgacgtgcaagacgtaatagaaaaacaaggtatagaaaaccacgttttttaaacagaaaaagaaaggaaggctggttaccgccaagtatacaatcaagaattaatgctcatattagattggttaatgatattgtaaaaattttacctataagcagaataagagtagaaatagggcaatttgatacacaggcattagttaatccagatattaatggtatagaatatcaacagggagaaatgcatggatatgatagcgtaaaagaatatgtaaaaataagagataattttacttgtcattatgcaaaattaagaccagacataccttgtaatgatattcttgaagtagaccatattataccaagaagcaagggtggtagcaataatcaagcaatttag

SEQ ID NO: 747 - DNA, 240 bp, unidentified
  misc_feature 1..240: note = Ga0101770_1107140 JGI
  source 1..240: mol_type = other DNA
gtcaactaccccaacctatagaggttggggcttgtaaaagctcaagttgactagactaagtgccgaataagcactacgttattctccatgtagacaccgtagaatgatgccctagttctatgctctgtcgtggctctgtaaacagtcctgtgaggtagggacagtcaaccacgttgtgaagggagaataacattgtcgaagggcaaataactccgaaaggagggcttaagccaattgtta

SEQ ID NO: 748 - DNA, 930 bp, unidentified
  misc_feature 1..930: note = Ga0307373_10069487 JGI
  source 1..930: mol_type = other DNA
atgccggcagctgtcttcgcggcggagatcaagcacaagcccggcatccacgcaaagatgctgcgccgggcgggctaccggcgccgccgccggtcggccaacctgcgcgatcgcgcccgacgtttcgccaaccggcatcccgagccgtgcatcgtctgcggcggcaacgcccaacacgggcgcaagcattgccggcgatgcgccgaggccgggcgtgaaccggacgagttggggcggcgggttccgcgcctagcgccgaccctgcggagtcgtgtggacagcacccgctcctgggtcgcccggctgcgccactgggccccggtgacggcggcatcagtgcagttgggccgctacgacacccaggccctccaaggccccgagatccggggcgtcgagtaccagcacgggaccctgctcgggtacgaagtgcgggagtacctgctggagaagttcgggcatcgctgcgtttactgcggtggcctctcccgcgaccctgtgctcaacatcgaccatgtggtgccgcgcagccgcgggggcaccgaccgcgtctccaacctggcgcttgcgtgccgctcctgcaacgaggcgaaggacgatcgaccgcccgaggagtgggcggcgcgcctggcacgcctgcattccccgttggccgtcgcccggacggcgggatgcgcggccgtcgtggggcgcctgcaggcgccgttgcgcggcccggctgccgtcaacgccacccgctgggccgtccggcgcgtcctgggggagacggggctgcccctggaggcggggaccgctgctcgcaccaaggggaatcgcgcacgcctcgggctgccgcggagcccgtccgccgatgcggcgtgcgtgggcgcctcgacgccggctgcacggcgctgggccgggaaggcggtcctcgccatcgcggcccagcgccgg

SEQ ID NO: 749 - DNA, 298 bp, unidentified
  misc_feature 1..298: note = Ga0307373_10069487 JGI
  source 1..298: mol_type = other DNA
gcccgttgacccctggatgcttaccaggcccagcgccagaggttggcagccgttgagggcgctacgttgccgccaaggtccaagacccaccccgggatgcttcctcagtcccgggctctggaaccggccgcagcagacaagccccgtgggcaggggcacgagacgggcggccggatgcgccgggcggtgacatggccgaggggagcggatcgggagcgccagcccgatcccgtcacacaggccccgtaaggggcgccccgcaagaggacctgatcgcgaggaagggggcgcgcccgtg

SEQ ID NO: 750 - DNA, 417 bp, unidentified
  misc_feature 1..417: note = Human gut metagenome
  source 1..417: mol_type = other DNA
atggaagttaggcgaaactatagacgttaccatcgttatcacaaaagatatcggcaggcgagattcgacaatcgtaaatcttctaaaagaaaaggacgaattgctccaagtattttacagaaacggcaagctaccataagagttattaatcggcttaataaatggataaatataacaaattattggctggaagatgtttctattgatatccgggtattaacagatgggtataagtcttatagctggcaatatcaaaaatccaacagactggacgaaaatatccgtaaagcaacgattctaagagatggcggtaagtgtatggaatgcggaaaatctaattgtagattagaggttcaccatattaagccaagaagacgaaatggttctaatacgttagacaatctgattacattatag

SEQ ID NO: 751 - DNA, 289 bp, unidentified
  misc_feature 1..289: note = Human gut metagenome
  source 1..289: mol_type = other DNA
tatataaatgtaaataagagtggacatatgaaatctcttatctatagcttaacaataggtctcaagcctaagtgactgctactgtcgaaagacatgttgcagataggaactatgttaagtagtaaggtaaagacacacctttagatgtaatcttcagtctgaagctctgtgagtacaaaccaggaaacaatgctaatgtcctgcattgataacagggaaacacatatcctctacttgactttggcacgaagagcaattctccgaaaggaaggtgtcagaaatgacaagt

SEQ ID NO: 752 - DNA, 1398 bp, unidentified
  misc_feature 1..1398: note = Human gut metagenome
  source 1..1398: mol_type = other DNA
atgagcacttgcgtttgtgttctcagtaatagtgatgaacgcctgatgccaaccatccgtcttggcaaggtgcgccacctcctgaaagacggaaaagccaaaattgttaagcaccatccgtttaccatccagctgttatatgacagcgaaacgaatgttcaacccatcgaaatctgtgaggacgtcggctacaactacattggaatcagcgtgaaaagtgaatctcatgaatatgtgtctgctcagtatgatacattgcaagacgagaaagaacatcacgatgactgccgtatgcatcgccgtacacgcagaaacagattgcgctaccgtaagcggcgcttcgataaccgcaagcgcgacaaaggttggcttgcaccttctctagaacacaagaaacagctgaatatcagtcttatcgaacagtatgtatctgtaattccgattactcacgcaacggttgaggttgattcctttgacacgatgctgctgcaagctatccagaaaggcgaagcgaaaccggaaggcgtagactaccagaagggtccgcgttataacttagctacactacgtgaggcggtattctaccgtgatgattacacctgccaggtttgtgggcgtaaaattacggatggtgccatcctgcacatgcaccacatgttctactggaaaggcagacatggcaatagtctcagcgagcttataacagtatgcgagaagtgccatacaccagctaaccatcaaaaaggcggcaagctctacggatttggtgaagatataaagttcgccaatctttctggtgcggcattcatgaacaccgtgcgctggcaaatcgttaatgtactttacgctgcttttggaaagtcgttcgtcacattcacttatggtgcgatgaccaaagaaaagcggattgctcttcatcttgaaaagagtcataacaacgatgcgtatgcaatgggcagctttcatccagttaaccgctgcgcgtttgaacattatgaaaaggtgaaacgcaataaccgcattctcgaaaagttttatgactcgcagtacattgacactcgcactggtgaaaaggcaagtggaaaagctctctttaacggaaggattaaccgtaatcataaaaaggattctgaaaacctgcacaagtatcgcggaaagcggttatataaaggacatcgcgccttagtgcgcaagaaagtgaacctcaatcctggtgatttggtttcttttaacggcgaagtccttgttgttcatggcactcataccaataaaaagggtgctgtaaatgtagaattcaaagtacccgcaaaaaacggtcaaaaatccgcgagccttaaaaaactcaaaattgtaaaagcagcagattccatacatcccgcatgggaaaaagtatcttaa

SEQ ID NO: 753 - DNA, 326 bp, unidentified
  misc_feature 1..326: note = Human gut metagenome
  source 1..326: mol_type = other DNA
gtcaacaaccacgcctaaatcggtcagtcggttatagacgggacttgcggggaaacccgtaagtctggttggttagcctaagtctgctgctccggtagcaggaaactacgttgtgtactaataatataggcaccttactcatgctccacaagtgataagctctgcggacggctcgttaaacatctctgagggtaggagaagtgcgaacgtcatgtcgagaggctaaaacagtacaacaacattggcgatgtggaccacagggcgcaagtcctgacttatagttatattactattttacgaaaggagtatcttgcatgagcacttgc

SEQ ID NO: 754 - DNA, 1566 bp, unidentified
  misc_feature 1..1566: note = Human gut metagenome
  source 1..1566: mol_type = other DNA
atgtggctgtgcccaggttatggcaacacaacagggacatgttccctggcttacagcaaaggagatacaatgaattatgtttatgtactggatcagcggggaagcccgctgatgccgaccagacggtacggttgggtacgcaggacattaaagtccggcaaggcgaaagccgtacgtactttaccgtttaccattagactgatgtatgatccggatacaacaaagatacagagccttaccctggggattgatccgggaaggaccaacatcggcatggcaactgccgatgaaacaggcagatgtctgtattcttcccagtgcgaaaccagaaaccgggtgatccccagactcatggaaaaacgccggcagcaccgacaggcatccagaaggggagaacgccttgcgaggaaacggctggccagaaagcttggaaccactatgagggatatcctggaacggatgctccctggctgcgaaaaaccagttagggtgaaggacatcatcaatacagaatccaggttcaacaaccgacgccgtcgggaaagctggctgacaccgacggcaacccagcttcttaggactcatctgaacctggtggaaaaggtgtgccggatccttccaatcagcgggattgcactggaagcaaaccggtttgcatttatggagctggaagcaggcggccatctggaatccggagtggattaccagcgcggcccgctttacggatatcgcagtattcgcgaagccctggaagaacttcaggacggaagatgtcttctgtgtggcgaacgcgccattgaacatgaccatcatctggtccccagatcaaagggtggaagcgacactatagccaatatggctggtttgtgtgaacattgccatacattggtacataccgaccagactgctgcggagaagctggaaaccatcaaggcaggccagaacaaaacgtatggagtcttatccgtactgaaccagatcattccgtatctggtagaggctctgtctaagaaattcaatgggaacatccgtctggtatccggttgggagacaaagcagttccgggacgaaaactatatcgataaggaccatggcattgatgcctactgcattgcagtaatagggcaacatcccaagaaaattgatgtcccggaaacccattttcagatccggcagttccggaggcatgacagggcacgaattaaatcccagaccgaacggacttaccggctcgatggagagaaagtagccataaaccgccggaaacagttggaacagaaaacggattctctggaagactggtatcaaaaaatggcagcatattacggccgccaacaggcagaccggatgcgttccaagctgcaggtacaaaggagtaccaggcggtataacaacccaaaccggctgctgccgggaacagtttttgtatatcagggaaaggcatacatcatgaccggtcagctgacaggaggacagtatttcagggccgcaggatgtgacaggaaaaacttttctgccagaagtgcccaaatcgtgagatataatcagggactggtatatgtataa

SEQ ID NO: 755 - DNA, 211 bp, unidentified
  misc_feature 1..211: note = Human gut metagenome
  source 1..211: mol_type = other DNA
gtcaactacccatccgctaaagcgaatgggcttgtaaaagcccagggactttacaggtgagcagttgagcagaaccgtgacgcagcaggttcgccctatcactccgggatgacgccaagttccggacactgagatgtggctgtgcccaggttatggcaacacaacagggacatgttccctggcttacagcaaaggagatacaatgaattat

SEQ ID NO: 756 - DNA, 1383 bp, unidentified
  misc_feature 1..1383: note = Mouse gut metagenome
  source 1..1383: mol_type = other DNA
atgtcatatattgcttttgttatagcaaatgataacagtagacttatgcctacaagaaaccctaaaaaagtaagaaggctactaaaagaaaagaaagctattatctattcttatgaaccttttaccataaagcttttatataaaagcgaaaaatgcacacaagacatagagctatgtgtagatataggctataatcatcaaggaatgtctataaaatctagaaaacaagaatttgtttccgaagaaaggacatttttattagatgaaaaagataaacatcaagaacaattaaaaataaggcgtgctagaagaaacagacttcgttacaggaagcctcgttttgataatagagctattcctaaaggatggatagcaccatcacttagacataaaaaagaagcaggaattaatgtaatacttaaatattgtgaagttttacctattacaagtataactttagaagtaggtaactttgatactcatgctattaaaaaataccttgaaaatggagaaattttagaaggtattgactatcaacatggagatacttatggctatgattccctaagagaagctattttttctagagataattacacatgtgccatttgtaaaaaaggaataaaagataatgtaatacttagaatgcaccatataaattattataataaagataggtctaatagaccaggtaatcttttaacagtttgcactaattgtcacaattctaagaaccatggcatagatggcgctttatggggcttaaaacctaaaacagattctttaagagatgcagcttatatgaatattgttaaatattcatttaaagaagacttagaaaaaagtttaaagaaattaaatttagaaacacctattaatattacttatggagctgttactaaaagacaaaggttaaaattaaatatacctaaaactcatgcaaatgatgcttattgtatgggaagctttagacctaaatacaaaataaaaacaagatactttaaaaagataagacgaaataacagaaaattagagaaattctatgactctaaagttcttgatacaagaacaaatgaatatatgaaaggaaatgagctttcctgtaataggactaatagaagtgtacctagaaacaatcctttaaacgaaagaatttatagaggacccaaaaaatcaaaaggtaaaagagttataagaaaaactcactataaatataaatcaggagatatagttaatataaaaggaatgaaaggacattatctttgtaaaggtattaataatttaggtaaaacagctaaaatattagtagataacaaatacatatatccatctacctctaaattaagtattcataaatatagtaatggatggatagaaacataa

SEQ ID NO: 757 - DNA, 286 bp, unidentified
  misc_feature 1..286: note = Mouse gut metagenome
  source 1..286: mol_type = other DNA
taaagaaacgtagattcttatatatttataattatatctactacgttatattagaataacaaaattattttaattttgtaatgatagttaccaatagatacttcacaagtctattgctctaaggtatggtattaaaaacttctgaggtaaggaagcgtgtactatacataaaacctaatataacattggcgttgtgaaccacactcgaaagagtagatactttaaataagacttatcttatttaaagaaatccgtaaggaggtaaataaaaatgtcatatattgct

SEQ ID NO: 758 - DNA, 1368 bp, unidentified
  misc_feature 1..1368: note = Ga0256404_1004876 JGI
  source 1..1368: mol_type = other DNA
atgtctgttgcagttatcagtaagaccggcatccgtctgatgccgacaagtgaatatcgggcgcggcatctgcttaaatcaggtaaagctgtcattgaacagtaccgcccgatcttcacaatccgtttaacagaaagagaggacggcgatacacagccgatcgagtatgccagtgatactggctaccagcatgtcggcgtatccatcaaatcagagaaacatgagtttgtacatgctcagtatgacatgctgagcaatgagaaagaacggcatgacaagtgccgcaagtaccgcagagaaagaagaaacagactgcggtacagaaagccgcggttcagaaaccgcaagccgaagatgacaaaaggcgaagtactggcgccttctctgcagcatagagttgataaccagacaatgttgttcgactcgttctgcaaagtaatgccaatcaccagtgccacatttgagatgggcaagttcgacacccagttgttgcaggcaatggcagatggcagtctgctccccaagggaaaggactaccagcatggcagtaagtatctgtatcagacagcgcgtgcagctgtatttggcagagacaactacacgtgccagatttgcggccgttccatcaaagatggtgccattctgcatacccatcatattgggttctggaagtcataccgttccaaccgtgtcggcaatcttctcactgtctgcgagaagtgtcacacggcaaagaatcacaagcctggtggaaagctctggggcatagaaccaaaagtaagcaatcttgccgaggcaacgttcatgtccgcagtacgctggcggatgtattacgcactggtgctggcacatccagaggtcgatatccacattcagtatggtgccaaaacagcggcagttcgcaaagaacggcatattgccaagacacatgcgaatgatgcttactgcatcggtcagttccatccgaggcaccgctgcgaagaagtgttgtttgctaaaagaagacggaacaaccgtgttctgacaaagttctatgatgccaaatatatcgacatccgtgacggcaagaagaagtctggtgctcagttgtcatgtgacaggactaatcgtcgtgaaagcagacacacggaaaagaacgaacgtatctatcgtggacaaaaggtttccaaaggcaagacatctatgaggaaacagcactatttgtttcagccaagcgacattgtgctttggcaaaatgccaaatattcagttaagggcacacattgcaatggcacaagagtgttgttggaaacagggaaatcggtcaagttggctgatttgagaattattaaaagacaaggaggctatgtggctcctcccaccgcctaa

SEQ ID NO: 759 - DNA, 365 bp, unidentified
  misc_feature 1..365: note = Ga0256404_1004876 JGI
  source 1..365: mol_type = other DNA
gtcaactacccacggcctaaaggccggtgggcttgagtgggaaatcatttaagctcggttgattagcctaagtgccttgagcactacgttgccgctagctacgctgggatgctccacaagtcccagcctcttgggatctgttgttaaaaacctctaagggtaggaggcgtgcagcagatgtattcgaccagcggacaacattggcgatgtggactaccgttactgcgatccttgtgatcgtaagtgcgagatgccgcaggtctgtatgactgcggaaagtgtaaacattcttctccgtaaggagacctgaaggtcagcaatgctgaccggaacgcgaaattgaaaggaggcatcagcatatgtct

SEQ ID NO: 760 - DNA, 1299 bp, unidentified
  misc_feature 1..1299: note = Ga0164242_10000399 JGI
  source 1..1299: mol_type = other DNA
atgccgtgctcggagaaacgagcacagctcttgctggagcgcgggagagcccgtgtgcatcgcgtgaagccatttacgattcgattagtggatcgtttcgttgaagactcggagcttcagccggtggagctaaagctggatcccggctcaaggcataccgggatggcactcgtgcgcgatgatcatggggtcaagcattgcttgaatctctaccagctcgatcaccgcggacatctgatccatcgcaagctcctgcaacgagcagcattccgacggaatcgccgtaatcataaaacgcgatatcgccctgcgcggttccataaccgtacgcggctgaaaggctggcttccgcccagtctgcagcatcgcgtggatagtaccctgagttgggcgcgtaaatttcaacgctcactcccgctcacgaagctggtcgtcgaaagtaatcgcttcgatacccagctgatggacaatccggacattcaaggacgcgactaccaacgcggcagtctctgggactgtgagctgcgcgaatgcgtattcgcgaaatggggctatacctgcgtctactgcggggtgtcggcatttgatggcgatgggctcattatggaattggatcatttctggccaaagtcgaagggtggcagcgatagcccccgcaatcgcgtgccggcctgcgtccgatgtaatcggcgaaagagcaatactcttccggcgatatttctcattgatgaaccggagaagcgagcttggatagaggccggactcaagactccgctcaaggatgctgcggccatgaatgccacgcgctacaagctcgtggaagccattgagcgactgggcctaccggtcgaaacgagtacgggtggtcgtacgcgctggaatcgccaacgattcgatgtcccgaaaactcatgcgttggacgcgctctgcgcgggcaatgtcaacggagtcaaggactggaaggggaaaccgacacaggtgattacgtgcatgggtcgcggtaggtactctcgaactgccaacgataagcacggtttcccgcgcggataccttgcgaggcataagcgtcattttggcttcgctactggggacttggtgcgcatttcaaactctcttaagaaatccacaagtagagctggagcacgactcaactccatataccggatcactgtgtcggctaaaggagactttcgcctcttcatcagtggtctaaagtactgcgttcactattcaaggtgtagagtggtgcaacgtagtggcgggtatcatttttccaaaataatgaaaggtgttatgtga

SEQ ID NO: 761 - DNA, 292 bp, unidentified
  misc_feature 1..292: note = Ga0164242_10000399 JGI
  source 1..292: mol_type = other DNA
gtcgtatcccattcctcatgcaaaggagaacctagtggcaggtttccgaacctagtttcatcaggaaaccagactcagtgtgaccttggtcacactacgataccttagaatacataggcactccgggatgcctcctcagtcccggactctgcggcttactgttaaacagctgtatgggtttaaggcagtgcagtaagcgtataaaacctaaggatatccttgtcgagaggagctcggtccctgagaccggcgtcacaatgaggcccgtaagggcatcggagaaatcgtgagt

SEQ ID NO: 762 - DNA, 723 bp, unidentified
  misc_feature 1..723: note = Human oral metagenome
  source 1..723: mol_type = other DNA
atgttggtatatgtattaaaacaaaatggacaaccttttatgccaacggcacgctttggcaaggttcgtagattattaaaaacaaagaaagcaaaggttgttcgtagagagccgttcactatcaaactactttatgaaccagaaacagatgtggttcaagagtgttattgtggtgtggatacaggctcacgacatattggtgtagcagttgtcagtaatgacaaaatgttataccaatctcaaaccgaattaagaagtgacataaaacgaaaaatggatgctcgtagaatgcataggcgtaatcgcagaagtagaaaaacacgctatagaaagcctagatttctaaatcgcagtaattctacaaaaagtaataggctgccaccttcagtcaaacacaaggctcaggctcatattgacgaaattgagttctgtaaaaagatacttccagtttctgatctgattgtggaaataagtcagttcgatacagctttaatgaagaatccaagtctgatcagtgagaaggtaaaacattggggttatcaacaaggtttcaattatggttattcatccagacgagaagcagttcttcatcgagatcactacacttgccaatgttgtggcaaaaagaattgtagactagaagtgcatcacgttcaattcaaaagcaacggtggtacagatgatgaagagaatctcattacattgtgtgaagatttgtcataa

SEQ ID NO: 763 - DNA, 340 bp, unidentified
  misc_feature 1..340: note = Human oral metagenome
  source 1..340: mol_type = other DNA
gtgaagctatgctcagctaaagactgaccatcttctggttagtcattagttgttgcttcacaagtcttaggttagagaaatcttacctacgttgaattgaagaaccataaggttactcacctacggttgtcgccttagaccgttgctctgagtctatacattaagttggaaggatagcattgagttcttgtgtgtatagattaaaaattcaattcaacattgacgaaaggaagcccaattcttaacttggtaatagagctaagataggcactacagtctgataagtgctgtcttatagagtaaaacttatcatcaacgaaaggagcgaagcgtaatgttg

SEQ ID NO: 764 - DNA, 1269 bp, unidentified
  misc_feature 1..1269: note = Ga0318466_10005777 JGI
  source 1..1269: mol_type = other DNA
atggtatacgtgataagcaaagacggacatcctctcatgcctactgtaaggcatggcaaggttcgtcgtttactgaaagaaaacaaagcaattgtagtaaaaagatgtccgttcaccatcaaactaacttgcgacacgcctgacatcgttcaggaagtcacgctcggcgtagatgccggatcaaaacatatcggtctgtcagctacaaccgaaacgaaagaattgtacgcttcggaggtcgagcttcgcgatgacataagcaagctcctcgaagcaaggcgtgaataccgcagctcgagaagaaaccgcaagacaaggtatcgcaaagctcgtttcgaaaacagagtaaagtcaaagcacaaaggatggcttgcaccgtcagtcgaggcgaagatcggaacgcacgtccgcattatcgagaatgtatgcaacatacttccgatcaaagatatcactgttgaagtcgcatcgttcgacacgcagaaaatgcaggatcccgagataacaggcattgagtaccagcagggcacgctcatgggttatacgattcgcgaataccttgcggagaagttcgaccacaaatgctgctactgcggcaagcctcaaggtaacggtgcccgcttcgaagtcgaacactttactccaaaatcgagaggcggatcgaaccgcatcacgaacctcggctggtcatgccacgagtgcaacgaagcaaaaggtaatctcacctgtgaggaattcggtcatccggaagtacgcaaaaaagctgaagccggcatgaaacatgccgctcacatgagcatcatgcgctggacgctgtacgaacgcctcaaagccatctacggcgaacggcttcatctgacttacggatcgacgactttatatcttcgacatgaggcaggactcgaaaagagccacataaacgatgcgcgctgtatttcaggccattctgctgccgagcctgccgaagaatacttctaccggaagaaagtgcgccgccacaaccgtcagatacacaagctgactattcagaaaggcgggatccgaaagcgcaaccaggcaccttacgaagttaagggattcaggcttttcgacaaggtaaaagctaaaggcagcatgtggtacatccacggcagaagagtaaaaggctcattcgtactcaaaacacttgaaggtgaaaagcttgaaatcgcaccaagtaagataacgctaatagggcatcaaagtgcttatataacagaaaggagaacggcgctcctacccgccctttag

SEQ ID NO: 765 - DNA, 287 bp, unidentified
  misc_feature 1..287: note = Ga0318466_10005777 JGI
  source 1..287: mol_type = other DNA
gtcaaccacccaccgcttaggctaacgccttgaagcgggggcttgtgaaagcccggttgactagcctaagtcttagctgactacgttacgagagaatatataggtaccctggagtgtaatacctagctcctcgcaatacggtatgtgattaaacagttctgacgggtaggaacagtattgcatacgcaaaacctctcgataacattggcgaaggtatcactacagtccgtaagtactggcttaccgcataaaacttacaaaaattcagaaaggagtcgtgccttatg

SEQ ID NO: 766 - DNA, 1383 bp, unidentified
  misc_feature 1..1383: note = Ga0118733_100054452 JGI
  source 1..1383: mol_type = other DNA
atgccttgtagaccagctaaggccagacatttgctaaaggctggtaaagctaaggttcttaacagattaccttttaccattcagctattacaagctactggtgaaactaaacaggaactaattttaggtttagatcctggttctaaaacactaggaacagcggttaggttgattaaaactactaagatattttacgcttctaatgtaacttttagatctgatattaagaaaaaacttaaacaaagaagcagttacagacgaactcgaaggagtagaaaattaagatccagaagatgtaaattttatgggatgtgtaaaacttgtaaattgaaatttacttgtgggtttaggcttaacagaattaaatttaaaattaataaaggcaaatgtgaattagaaaagaaaaataagaaaaatggttttagttttggtagaaaaccagggtggttacctccttcggttcaatctaaagtagattctactattaaagaaattaattatattttaagcatattacctgtaaaccacgtaatctatgaatattcagcttttgatatccataagcttaaaaatcctgatgttaagggaattgaataccaaaaaggtgatatgtatggctatgaaaatactaaaagctatatattatcaagagataattacaaatgtcaaagttgtaaagggaaatcaaaggataaagttttacaggttcatcacataattcatagaaaacatggaggtacggataaaccagctaatttaattactttatgctctatttgccatgataaattgcataaagggaaattaaaacttaaaactaaaaagaaattaattaatactatagatgctactcaagtatctattattaacaaaagaattagaagttatttatttaaaataagaaaaaaatataatctaaaagtttatagaacctatggttatattaacaaagttaaaaggaaattacttaatttacctaaagatcactatttagatggaatattatgtacttatcctaagagggataaatattctaacagatcaaaacctaagattttaaatttctataaaaaagtatcagttcctaaaggcgattacaaacaaactaaaggcagtcatagccaaatatctatgcctacagggaaaattcatggttttaggaaatttgatactgttaggtatttgggtaaaaattatttcatcagaggtagaatgagtactggctatgctaatttaatgaatattgaacaaaaggtaattaagattaggccaatgcctaagtttgaaaaaattaaaaaaataaatgctgggaaaacaataattgtcgattcatcccctcccttcgtttcactcaggaaggggtcttctcgacaggaaagctaa

SEQ ID NO: 767 - DNA, 230 bp, unidentified
  misc_feature 1..230: note = Ga0118733_100054452 JGI
  source 1..230: mol_type = other DNA
gtgaacaacccccaccttcgcctaacggctcaggaggggcttcaccagattaagcttaaagaaatttaagctacatagtttagcccagcgaggtaaaggaataccgcctcagttcctatatacttcctaagctaaactgtattgtcgagaggaagtcttaaaaattagctggtaacaggctaatgagtagagcattaccctaatttattaggagagaacaaaacttgaga

SEQ ID NO: 768 - DNA, 1329 bp, Moorena sp.
  source 1..1329: mol_type = other DNA
atgtcaaaagtgttgctcctggatatgaccaaacagcccttagacccagtgcatccgggccgagcacgcctgttgctcaaagagggcaaggccgccgtgtatcgcaggtacccctttaccctcatcctgaagacgcaagtggactcccctgcggtgtctgccctgcggctcaaacttgatccaggggcgaagacgagcgggctggccctggtcgatgacgcgagcggggaagtggtgtgggcggcagaactcggccatcggggagccagcatcaagaagcgcatagatgcccggcgtggcgtgcggcgcaagagacgctcacgtttcacgcggtaccgcaagccgcgcttccacaaccgcaagagttccaggagaaaagggcggcttccgccctcgctggaaagccgggttgccaacatgctgacctgggtagggcgcctgaggcgtttgtgccccattgaggtgatcagcatggaactggttaagttcgatatgcaggccatgcaaaacccggagatcactggcgcccagtaccaacaaggggaacgcatgggctatgagacgcgggaatacctgctcgcaaagtgggggcggcgatgcgcctactgcggggctgaggatgttcccctggagattgagcacatcctctgccgcgcacgaggcggcacgcatcgcgtgagcaacctcaccctggcctgcgagccgtgtaacgtcaagaagggcacgcaactcatcgaggatttcctgaacaagaagccagacgtgttggcacgcatcctggcccaggcgaaaacgccgctcaaagctgctgccgccgtcaatgcgacccgctggcacctctttgaacggctgaaggcgaccggcttacccctggagaccagcagtggcggtttgaccaaatacaaccgggcgaagcggcatctgccgaaaacgcattggctcgatgcagcgtgtgtcggccagagcaccccacagcctctggaaacgagccaggtggttcctttgctgatcgaagccaccggtcatggcaaccggcaaatgtgcggcgtcgatgagcatggctttcccatccgccataggcagcggaagaaggtgcatttcggctaccagacgggtgacctggtgcgggcggtggttcccacgggggcgagggcggggacgcatgttgggcgcgtgctggcacgagccagcggctctttcgatttgaggaccaaagctggacgccaggccgggatcagttatcggtattgccgtcccatccatcgcaacgatggctatcgttaccagcaaggagggcggcatgcagtccccgccacccaatccacctga

SEQ ID NO: 769 - DNA, 290 bp, Moorena sp.; identical to SEQ ID NO: 121
  source 1..290: mol_type = other DNA

SEQ ID NO: 770 - DNA, 1278 bp, unidentified
  misc_feature 1..1278: note = Ga0272449_1005167 JGI
  source 1..1278: mol_type = other DNA
atggtgtacgttatttcaaaagatggtaaaccacttatgccaaccaaaagacatggcaaagtgaaaagactcttaaaacaaggtcttgctaaagttgttagaagagaaccatttacaatccagctgttatatgatactacaacctatacacaacctgtcacagttggtatagacattggttcaaaaacagctggtatttcagcaataacggaaaagcaagaactatttagtgctgaaattgaactcagacaagatattaagaagttattgctggaaagaagggagcatagaagattcagaagataccgcaagagaagatatagagaaccaagatttttaaacaggcgtagacatgagaattggcttgctccaagtgtacaatggaaagttgatgcacatgtcagacttgttaactttgtagccaaaatactaccagttacaaaagttgtacttgaagtagcaccatttgatacacacaaaatactgaaccctgaagtaggaggcagcaaataccaggaaggaccacaaaagggtttttgggaggttagagaatattgcttgtggcgtgcaggatataaatctgaactgtcaggcaaaaaaggtgtgttggaagtacatcatattgttcccagaagtcagggtggaacggataatccctctaatctgatagtgttaactgctgaggaacacaaagcaatacatgaggggaaaattaagattccacgcagtagacttgaaaaagttaaaattctaaaagacgcaagttgtgtatccacaataggatggcatatagtgaacaaattaaaagaacaatatgatgttcatataacatacggtagtattacaaaagcaaaaagaatagaaatgggattggagaagacgcatagaaacgatgcgtttataattgcaggtggtagtagagatattaacagagcatctgagtggtattttggtaagtttttcagaagacagaaccgctccttgtacaaagcaaacccaattaagggtggtaaaagaccagtaaatactgtcaaggaagtacatggttttagaagatttgacaaagttgagtaccaaggtagaacgggaattattttaggattaaggagtagtggatattttgcaataggttctctgactggggagaagatatgtgatagtgtaaagcacagcaaactaagacttttagaaaaagcaaagacattaatgttcaaaaggagggaagagcgcattcctctccatcttggaaaagatggagtctcctgcgctcaattatga

SEQ ID NO: 771 - DNA, 256 bp, unidentified
  misc_feature 1..256: note = Ga0272449_1005167 JGI
  source 1..256: mol_type = other DNA
gtcaactaccacccacctgtagaggtggtggcttgtgaaagccatagttgactaccctcagccatggggaaggttaacttcccatcgggctaagttagactggtcatgacaccctgggatgctgctcaagtcccaggctctgtcgtctgccattaaacagtcctgagtggtaggggcagtgtgacagacatgagaagccagtctaacattggggatgagcacctaactcctaaccaaaggaggcttaccgcatatg

SEQ ID NO: 772 - DNA, 1038 bp, unidentified
  misc_feature 1..1038: note = Human oral metagenome
  source 1..1038: mol_type = other DNA
atgttagtatatgtgttagataaaaacggacaaccacttatgcctacacataatggtgctaaagttcgagttttattaaaacaaaatagagcaaaagtagtttcaaagtgtccgtttacaataaaattattatatgaaagtacaacatttacacaaccgcttactttaggagttgatacaggttctaagtatgtaggtagtgcagttatcaatgatgtaacagcagaagttgtttacgaaagtcaattagagttaagagatgacatcaagtctaaaatggatagacgtagagcgtttagaagaagtagaagaaacaaattacgttatcgttcgaagaggtttaataaccgtaaatcttctaaatatagagactgttacacaccaactcttatatccaagttacaaggtcatacaagagagataaaatttattaactctatacttccaattagtgatattattttagaagtgggagagtttgacacacatctattacaagacccaacgttagcatatcgtaagtggggttatgcacagggagaattataccaacaagagaactttaaacaggcaacaaaagcaagagacgactacaagtgtcaatgctgtggtaagaagaactgtagattagaagtccatcaccttttacctagaagtagaggtggaagtgataagttagtgaacctaattactctatgttccaactgtcatcacttggcacacagttcagaagaacagttattagcatttcagaagagatttggtaaaaaggcaaaggatatgttgaagtatgctactcaaatgaatatattaagacacgtgttgcaacgagaatatcctgatgctaaattgacctatggttttattacgaaggaaatgtgtagagtgtttgggttagaaaaatctcatataatagatgcttgctgtatcgctagtagaggagttttgtttaaaaatagcgactcaaataagtataagaagaaatgtgttgcaaaaggtgattatgcctatcttagacacagagtacgtagaagatga

SEQ ID NO: 773 - DNA, 336 bp, unidentified
  misc_feature 1..336: note = Human oral metagenome
  source 1..336: mol_type = other DNA
gtagacttgtttgacaagtatgattggagatggtgatataccgagcactagtttttactagtaatcaccatacagactaagtattcagaaatgaatactacgttattaaggtcatgacacctccagatgccacctcagttgggagcaactgtcgctatgtattaagttggattgggtatgtaagagtcctgtgtacatagtgtaaaaagcctttataacattgtcgagaggaagtcggatttttgatatggtaacagtatcaaaatacgcattaccacctgtaaaaaggtgagttagttaattttatttttaaaagaaaggagtgtcattatgtta

SEQ ID NO: 774 - DNA, 1308 bp, Lactobacillus sp.
  source 1..1308: mol_type = other DNA
atgcaaaatcgggtttttgtcatcaataaacatggtgaagctttaatgccttgtaagccaagaactgctcgtaaattgttagcccaaggtaaggccaaacccattaagaaagaaccattcaccattcaatttttgtatggtgcaagtggttataagcaacctattaacttaggtgttgatagcgggcaacgtcacattggacttgcggttacaagtcaagataaagttttctttcaaagtgaagtcgaattgcgccaagacgttaagaaattgcttgataccagacggacttatcgcagaagtagacgaaatcgcaaaactcgctatcgtaaagcacgatttttaaatcgcatcaaaaatagaaaaaataattggttgccaccgtcggtacaaagcaaagttaatcacaacattaattggattaaacgcatgttagccgtattgccgaacccagaattacacatcgaagttggtaaatttgatatgcaaaagatgaaagatcccaccattaaaggtgaaggttatcaaaaaggtgatttgtacggctatcaaacggttaaacaatatgttttagctcgtgaccaatacaagtgtcaagtctgcaagaaaaaaggtggcaaactaaaaattcatcacattatttaccgttccttaggtggcactaatgtaccatcgaatttattaacagtctgtgcggattgtcatacagctaagaatcacgctgaaggcggcaaattatatgaattatgtaagaaggaaaagaaagtaactaagcctttgaaaggcgcaacctttatgaatattcttcgtaggagattatgggacgcctttcctaatgcccaatttaagtatggtgcgcaaaccactttacaacgggcaaacttaggcttagcgaaatcgcaccacaacgatgccattacgattagtggtatcaaacttattagcgaaaagccaacgagtgttgtgatgtttgcgcaatttcgtaagaaaaaacgttcactacacgaggcaacagctcgtaaaggacgcaaaaacaagaatatcaccagtaaacgaaatgccaaaaacactaaagaagcaaacggattttggcttaatgattatgtcagaattaagaatagtaaactcaaaggctacattagtggctttatgtccaaaggttctaatgtaaggttgcgagatagtctcaatcattatgttagcgtcacagataaaaattacacatctattaaaaatattattttaattcatcataacaacaattggaataagacagtaatcagcgagaaacaatatgttatgtgttag

SEQ ID NO: 775 - DNA, 312 bp, Lactobacillus sp.
  source 1..312: mol_type = other DNA
tttaagtctgctcactttgatgaggattctggagcaatccagaatttgttgtctagactaagcagtcagcttcggctgactgggaaactacgttattttagtcatcataccttaggatgatgccctagttctaagctctatggaggctctgtaaacaatcgtaaggttaatgcgatagtcaaccttgttaacaagctaaaataacattgtcgaagggtaaccacatgtaactgttagttctctgatagttgcgtgataaggtacatgctaccttataaaaaatgaaaggagaaaatcaaaatgcaaaatcgg

SEQ ID NO: 776 - DNA, 798 bp, unidentified
  misc_feature 1..798: note = Ga0335394_10066399 JGI
  source 1..798: mol_type = other DNA
atgcaacgagtattggtgctagacaagagcaaaaacccgctgatggcgtgtcattcggtgcgcgcacggcaattgctcaagcaagggaaggcggcggtctttcgtgaataccctttcaccatcatcttgaaagaacgggatggcggggatgttcaacctgtcagtatcaagatagacccgggcagtaaaaccactgggatatctatggtcgctgatttcaaagggggcaagcgcgtgatttgggctggagagttaacccatcgggggcaacaaatccgagataagttattgtcgcgccgtcaggtattgggcttgccattggaagtcgggacaggaggacgcacgaaatttaatcgggtaaaacagcactatccaaaagcgcattggattgacgcgatttgtgtaggagaaagtgggggacgagtcatcatcagtccaaatcatgcgccgcttcagattagggcgaccgggcatcaatcacgccaaatgtgccgcgttgataagtacggttttccacgaaccagcgccaaacaagggcgcgtccactttggcttccaaacgggggatatagtcaaagcaatcgttacaaaaggtgtaaaatacggcacatacattgggaaggtcagtgtgaggtctactggttttttcaatatcactacccccaccgcaacagtgcagggtatcagctatcgctactgcacaccgattcacaattccgacggctatctttaccagagaggagaggcgctttcctccgctaccacaagggtagcggtgtcctcgcgccaagattcatga

SEQ ID NO: 777 - DNA, 254 bp, unidentified
  misc_feature 1..254: note = Ga0335394_10066399 JGI
  source 1..254: mol_type = other DNA
gtcaacgaccactggcacgaggccggtggcttgcgataagcaagcccatgttgaccagcctcagtctccttcgtgagacaccgttatttgggtcacgataccgacgggtgactgaaccagcccgtcgctctatcgtctaccgttaaacagccgagggtctaggcaagcgcggtgggcatgacaagcccgaataccattggcgagggtcactttactgccgcaaggcgagaaaaatgaggtaactcatgcaacga

SEQ ID NO: 778 - DNA, 2175 bp, unidentified
  misc_feature 1..2175: note = Ga0115617_100462 JGI
  source 1..2175: mol_type = other DNA
atgccctgttcaccggcaaaagcgcggcttctgcttaaagagaagaaagctattgtgaagaggagaacgcctttcactattcagctgacgattgcaacgggtgagaccaaacagccggtgggtctgggcgttgatgccgggtacaaacatgtcggactgtccgcatcaacggacaaggctgaactttatgcatcccaagtcgaactgcgacaggacatcaccgatctgctctccgctcgtcgtgcgttacgacgggctcgcagaaaccgcaaaacgcgctaccgcgcgccaagattcaacaaccgcatccgcaccaagcgcaaaggctggcttgctccgtcggttgaaaaccgaatcaacgcgcacttgtcgcgcatagaagcggttcttcgactgcttccagtcacgaagatcaccgtggaaacggcgtccttcgacatgctgctgctgaagaatccagacattgcagggaaagagtaccaagagggcgaacaactcggcttctggaacgtccgcgagtgcgttctttttagagacgggcacgtttgtcagcattgttacggcagatcgaaagacccggtgctcaatgttcatcatctggaaagcagacgcacgggcggagattcgcccggcaacctgattacgctttgtgagacgtgccacgaagcgcttcatcgcggcgaaatcgcgctgaagacaaagcgcggacactcgttccgtgcggaagccttcatgggaatgatgcgctgggaggttttgaaccgcctaaaggcgtcgcattctgagttggaagtgaacaacacctacggctaccggactaagcacgcacggatcgtgaacggcatcgacaagtcgcattgtgcggatgctttttgcattgccggcaacctcggcgccgaaaggctatgcgaattcttcttccagaagcagacgcgtcggaacaatcggcagattcacaagctctccattctcaaaggcggcattcgaaagcgcaatcaggctccctttgagatcaaaggcttccgtctttttgacaaggttgcctgcaagggagaagaaagcttcattttcggccgtcgatcatccgggtactttgatgttcgaaagcttgatggaacccgcatttcagccggcatcagctacaagaagctgcgtctgctggaaaagagacgaacctatttaacagaaattcgaaaagaggaggcgcttcctcccccccccccccgccgggggggggcggcgcgccgcccgcgcgggagaatcaaacagagaacgcttaagaaggtattctccactgtcggtatcggtttgcactccggccgcaaagtccgtctgactctgcgtccggcacctcccgataccggtttggtgtttactcgaaccgatttgaagccgcccgttgcgattaaggctgagcctgaacgcgtcaacgacacgcgcatggcgacgacgttggataaagacggagcccgtattgcgacgatcgagcacttgatgagtgcgctgtccggtttggcgatcgacaactgctacatcgatgtcgatgcacctgagatcccgattatggacggctccggctctacgtttgtctttttgatcagagctgccggtatccaggaacaggatgctccgcgaaaattcgtccgtgtgaagaaaaacgtctccatccacgtcggcgacaagtgggcttcccttgaaccttatgacggctacaaactgtcttttgcaattgacttcggtcatccggcgattgacgaaacagctcagtttgttgaagttgacttcaacaaggaaaactatatcgaaagcgtttcccacgcccgtaccttcggctttgtgaacgacttagagatgctctggggcatgggcttggcacaaggcggaacattagacaacgcgattgtgctcgatgatttccacgtcttaaatccgggcggtctgcgctctcaggacgagtttgcaaaacacaagctcttggatgccatgggcgacttgtacgttttaggtcatccgctggtggcgcactaccgtgccttcaagtccggtcacgaaatcaacaacaaacttttgcggacgctgttagctgatcccgaaaactgggagtttgttgaataccaggatgaacacagtgctccgaaggcttttaccgaagcggtaaaagaaccttcgaactaa

SEQ ID NO: 779 - DNA, 247 bp, unidentified
  misc_feature 1..247: note = Ga0115617_100462 JGI
  source 1..247: mol_type = other DNA
gtcaactacctcggcctaaaggccggggcttgaaatagcctctagttgactagcctcaggccgtcatttggcggactacgttggttgagaatatataggcaccgcgggatgtagatactagtcccgcgctctgcggccgatggttaaaagctccgagaggtaggagcggtgctgtcggtacgaaaccccttccaacattggcgaaggatcacaaccggtcgaaagaccgaggagacaaaacttgaga

SEQ ID NO: 780 - DNA, 1281 bp, unidentified
  misc_feature 1..1281: note = Ga0209607_1003300 JGI
  source 1..1281: mol_type = other DNA
atggtatacgtaatttcaaaagatggacagccgcttatgcctacaactagacatggcaaggttcgtcgactattaaagtcaaaacaagcaaaagtaattaatcgctgtccatttacaataaaacttttatacgaaactacagatttcatgcaggaaattaatttgggagtagacactggttcgaagtatgttggttttgcagtttactcaaatgacaaaattttatatcaatcccagctagaactcagagatgatattaagtctaaaatggacgatagacgcggttatcgtagatttcgtaggcaaagaaaaacccgctatcgaaaacctagatttttaaaccgtaaacattcaactaagctaaatcgactaccaccttcaactaaatctaaagtaaatagccatatcaaagaaattaaatatataaaatcaattcttccagtgactaatttaattttagaggtagctcaatttgatactcacttgcttaaaaatcatatgctagcaaacgaaaaaatcaaacattggggctatcagaatggtaccttatatggttttgcaaatatgaaggcttatgttttaacaagagataagtacacttgtcagcactgtaaaactaaaaatggtactttgcatacgcaccatataatttatcgctcaaaaggaggttcagatgaagaaacaaacttgattaccctctgcgagtcttgtcacaaaaaattacataaaggcgagttagcaagtttcgagtctaaattagtaggtaaaagaaagcctaatttacgctacgcgactcaaatgtcgattgtgagaagtcaattgcttaaatattatgtcaacgcaattgaaacttatggctacataaccaaagaaaatcgacaaaatctaggtttgcttaaagaccattatatcgatgcttgcgttattgctagtcaaggaaataaatttaagcctaacagcgaaattttttataaaaaagttgttggtagaggcagccgtgtactagctaaatttagaaaaatatcaattcaactacgtagaggtaaaatctgtggttttagacaatatgacaaagttaagtatttaggtaaaatctattttatcaaaggacgaagatctgcaggtacttgtgctttgatggatatttttaataacccagtttattttaatcacatgcctaaaggctgtaaaataccaaagctcgctaattgcaaacgagtaagttctagaaaatctgttattattgaaaggaggataggtgcgattcctgtactaagctaa

SEQ ID NO: 781 - DNA, 325 bp, unidentified
  misc_feature 1..325: note = Ga0209607_1003300 JGI
  source 1..325: mol_type = other DNA
gtaaatatgtgctcggctaaagaccgaccacctttggactaagctgaatatttactagactaagcctagagaaatcttggctacgataattaggtcatgacacctttggttgctgccctagaccattgcaactgtcgcttaacgttaaattggaaaaatatagcactaaaatccggtgcgttaagtataaaaagcctttttatcattgtcgaagggaagtcttattctttggttggtaatagattaaagataagaactacagtttggtaagtactgatttatcatttaaaacttactaattcgcgaaaggagccatttcttatgg

SEQ ID NO: 782 - DNA, 2349 bp, unidentified
  misc_feature 1..2349: note = Soil metagenome
  source 1..2349: mol_type = other DNA
atggtgaaactgaaccaggaaagatcgtcataccgcagaaacagaaggaacaggaaaacatggtacagggagccaagattcgataaccgcaagaaggagaagggatggtttgcaccatcaatccggaataaacttgatacgcatatcaaggttttaaaccaagtcagtgggattctgccagtatcggaaacaatcattgaggtagcatccttcgatacacagaaaatgcagaatccggagatctatggaattgaataccagcagggtgaactgcaggggtatctcgtgaaggaataccttctggagaagttcgagagaaaatgtgtatattgccggaaaacaaacgttccgttggaaatagagcacattattcctaaatcccgccatggctcgaacagggtttctaaccttgctatttcttgtcataaatgcaaccaaaggaaaggagatatgactgcaaaggagttcggacaccccaatgtcatgaagaatgccagaaaaaatctgacacagacggcatttatgaacgctgtcaggtggaaactcaccaaactcactcagagccatcatacttttggatacatcaccaaacacgacaggatcaggctgggtcttccaaagagtcacacaaacgatgccttcgtcattgctggcggcactacgggccatgcaacacctgacaaattcggcagaatcattggtgaagcggtgaagaggtttcctgatgttgagattgaagtgcactgccacaacgatgccgggctttctgttgccaatgcaatcgccgggattgaggcaggagcccacagggttgacaccactgtgtacggcctcgaggagaggaacggaatatccgatcagctcaccattgcggaataccttaaggattacacagggaaacagcaggtggacgggaataaactgctctcagtctatgactatgtgcttgaactgatccatgagaagatgggcatggatttcttccagcacaactgtccccacaccggcaggaacgtccagacgcacaccgctggtacgcacgccgcattctctgatgtattccagggcggggacttctccgtgaacgtatacgcgggaaggagcatgatcaggaaaatactctccgccaacaatatggatgttggggaagacgaactcaggaagatcgtgctcagtataaagaatgaggcggtggagacaggcagggcactccacgttgatgacatcctgagaataggggtgaagtgcatggcaagagtgattgagctgggacacatcattgcaggcccttgtgcaggcctgatactgtctgatctggggcatgaggtcataaagatcgagaaaccgggatcaggggacatatccaggaggctgacgaagcagagtgccggtgcattccccttctacaaccggaacaagaagagcgtgtgcattgacatcaactccagggaaggtgcagaggcattccgaaggctcattggcacagcggatgttataattgacaacctgggtcccggggcggtggagagggcaggcttcccatttgagaagatttccgcaatcaatccccgtataatttacctgtcgctcaagggatacgggaaagggccttatgagaagaggaagtccctggactatcccattgaggtgcacagcggccttgcatacatgacaggcctcaagggaaagccaatgagggtagacgcatccatagttgatatgtcggcggctatgttcggcgttatcggcgttcttaacgcgctcattgaacgagaggcaacaggcaggggaaaataccttgatgtcgggatgtttgaaacctcggccgtctttatggggcagcacgtggcaaccgcacagcttaagaatgtcagcatggaaccccttaatgaaatgggcttcgcctggggaatctatgatttcttcaggacagaggatgacgttgaggtattcattgctgttacaaccgatccgcagtgtaaggcattctgcaggggcttttccatggaagtgtgcggcaatggcgactacgaaacaaacgcagcgagatttgacagtagggacacgctgattccttcaatcagggaaaagatttccgtaatggattcctccgatgttactggcattctggaggaactcaacataagctatgcactcctgaacgcaccccgggatcttctcaatgatccgcagatgaaagacaagatggtaaccgaaacatacaatggcagaaccataagggtgccacagacccctctcggttcgatacagagatcagatccgccggaacttggtgaacacacggaagaagtgattaactctctggaaaaagaatcgggacacagttga

SEQ ID NO: 783 - DNA, 296 bp, unidentified
  misc_feature 1..296: note = Soil metagenome
  source 1..296: mol_type = other DNA
gtcggtgacgttgtcatacacagaccgaagatcgacatgcacccctcaatgaagatcaagagacaccctgaggtgtccacagaagtcagaggatacatcaggacagaggggaagggaaagaagctgcagaaggtcagttgggacttctatgaccgctgcatcggtgagttgacagttctcaggaatgagtgtgagaggatcgcccaggatttcggcaacctatcaggcttggcatcgattccggttatctgcacatcggagtatccgccgtctcggagaagagggaactctactct

SEQ ID NO: 784 - DNA, 597 bp, unidentified
  misc_feature 1..597: note = Ga0116227_10003227 JGI
  source 1..597: mol_type = other DNA
atgccttgctctccgaccggggcaaggaagcttttacaagaagtgcagggcgcagttttacagctgcagccttttacaatcgtcttgaaaaaaagagaagggggggaagtacaagagataggggttaaaatagatccgggaagtaaagtatcgcgtatcgcacttgtcggaaatttttccggggaaagcgcggttgtgtggggagctaatcttgagcgtaaaggcacggcaatacgatcatcccttgccggcagaagcgttataagaagaaaccgaagaagcagaaagacacgcaccggaaaagaaggaagacttcccccctctttacaaagaagagtccacggttttgcaacgggagattcggtaaaagcggttgtcctaaaaggtaaacaaagggcaacacactccggaagagtctccatcccattatccggaagtttttccatcgatacccctaggggaaaagtagacggtatcagctgtagattttgtaaaaatctgcaacacgcagacggttatcaatattcacaacaaccaagggagcgacgcttcctcccgcgactgaagtcgcaggtttccgcgtcgtcagttgtatga

SEQ ID NO: 785 - DNA, 288 bp, unidentified
  misc_feature 1..288: note = Ga0116227_10003227 JGI
  source 1..288: mol_type = other DNA
gtcaactcctcctctctaaagagagaggcttgtaagacaactaagcgtaagttgaccgggctaagttcttgtaagtaacaagagctacgttagagaagagtagataagcaccttggaatgctgctccggttccaagctctgcgtttacggttaaacggatataagggttaagtcagtgccgtaaacatacaaaaccttctcataccattgccgaggagaacattacccgggaaaagggggattgcaggtaactgctaactagtaaaaaaagagaaacgattgcaaagg

SEQ ID NO: 786 - DNA, 1443 bp, unidentified
  misc_feature 1..1443: note = Ga0393264_0001341 JGI
  source 1..1443: mol_type = other DNA
atgcaacaaagctctcttctatttcaagagagacctgcattaagattggacataggtggcgtattcgtgctaaaccacgattacacacctatgctacctgtctctcaaaaatgcagtgagtttctcttaaaaaatggccacgcggccacctaccgtcattaccccgctgtaatcattctaaagaagcaacaagctgacaatcgttcgcctgagcgttatacggtggaactgaaaattgacccaggggcgagacacagcggtctcgcgttagttgcccatgataaagtaacgaatcaatacacagccttatggggtgccaacctcacccacaaaggcaatatcgtctctgcaagactagaatcccgtctcagtattagaagaggccgacgcaatagacagacgcgctataggccgtcccgtcaagcgaatcgtgctaatgcaagaaccgaaggtcggctaatgccttccagtcggtcaattctaggtaacatcattacctgggcaaggagactgcaaagatacacacccattcacagtattgcttacgaatgggtaaagtttgatacccagaaaatggataacccagagataagcggggtggagtatcaacgtggtgagttagagggatacgagttaagagagtatctacttgagaagtataagcggaagtgtgtatattgcgaagtggataacaagcctctgcaaattgaacacgtcataccgcggtcaaagggcggctctgatagagcctctaatttggcgatagcgtgcgaaaaatgcaatcagaaaaaaggaaacaagcccattgaggagtttctatcacacgacccagagcgtctcaaaaaggttaagggtcaactgaaaaaaggactccaaccagccgccgctgtgcaaacgataaggaacgcaacccataagctgttatgcgaatctaccggcttaccagtgtcgctatggtcaggtggccggacgaaaatgaatagagtgaaacaaggctatctcaaagaccactggatagatgccatctgcgtaggtgagactggggagcgtgtgacgatgccacctgacatgcaaccgttgcttatccgggcgatggggagaggcaaccgacattttcaagagactgacagctacggtttccctagagtaaagaaggttgcaattgatggtaaggaggtaatggttagatgcaatgccaaagaaaaaaggaagcgggtgggttcaaacggcgtgcaaaccggcgacatggttttgtttagacacaaaactgggttagagtttaaatcgcgggttatcagtattgacccaaaaagtaagtcaggcggcgtaacagccaggcatcctaccactggcaagaaaataagtgcccgtgccgccgcctgcaagattttacagaagacggacgggtatggttataataccaaggaaactgaagaggcgtaa

SEQ ID NO: 787 - DNA, 290 bp, unidentified
  misc_feature 1..290: note = Ga0393264_0001341 JGI
  source 1..290: mol_type = other DNA
gtcgtgaaccctccatttcatgcggttcttgagttttgtggttcaggttcaggactcttataaacacagcgaaaccagtctcagccagaaaaaacgctggctacgttattcgtgaaaatatagtaaccgtcggatgcttctccagtcctacgctcttagagatacttttaaacagctacgtgttataaatttggtagtggcagtgaagtatctataaaaaaccacgattaacattgacgaggagaccattgctgctatgcaaatagcaaacgaaaaataacatgcaacaa

SEQ ID NO: 788 - DNA, 504 bp, unidentified
  misc_feature 1..504: note = Ga0127503_10276577 JGI
  source 1..504: mol_type = other DNA
atgggcaagcaagggagtggtgcagcggacgcatcagagccggccagtgcttcggctgctgcggaccgagagcgagcatcaaacaggttgacggggtgtgcccgcctgctcatgaagcagggcaaggcggcggtctaccggcgctacccgttcacgctgatcctcaaggggcagccggaacgattggcgcgtcttctggctcatctcaaagcgccgctaagagatgcggcagcggtcaacacgacgcgctgggccatgtatgaacggctcaccgccctgggctcgccggtggagggtggaagtggagggttgacgaaatacaaccgggtgaggcggggaacctatgtcggcaaagtggccgtgcgcagccgtggcatcttcaacatcaccacggcacaaagtgtcgttaccgacattcatcatcgctggtgtcggctcgtggcaagagccgacggccatacctatcagcaaagaaaggaggcggcgtttcctccctccgaatga

SEQ ID NO: 789 - DNA, 275 bp, unidentified
  misc_feature 1..275: note = Ga0127503_10276577 JGI
  source 1..275: mol_type = other DNA
gcctgggcacacacgatcctgcttgatccgtgtgcccgggcttttgtctcaggtgtaatcaccgcttgcaagaaatgagagcaaacgctatccagtgcaagcaagtactccatgaccgctttctgatcgctctgagagaataatctctcaaactatccggactttggtgaagactgctgatctgctcagtgctcatgagttgatactgtaggatatcaatgggcaagcaagggagtggtgcagcggacgcatcagagccggccagtgcttcggct

SEQ ID NO: 790 - DNA, 1461 bp, unidentified
  misc_feature 1..1461: note = Ga0075519_1000010 JGI
  source 1..1461: mol_type = other DNA
atgcagaagttagaagaaagaaatacatacacacctacggacattccgcacattcgtagcaactgtggtttgccattaaacagagaggaaactctcagtgtgtcagacttaaaaacattttctaacaactccgatgcggctctaattgcgacaggacacgcaaagcagaacacgagtgtatctgctgtatttgttctaaacatgagaggccaaccactcatgcctacaacaccaagaaaagcaaaacagttattaaaggaggataaagcgaaagtaatcaggagaacaccattcacgattcaactaaaatatgcaacaggagaaacaaaacaaccaataattcttggagtggatagcggattcttgaatgtgggattatctgccacaacagacaggaaagaagtatattccgcagagataaaacttcgctcagatatggtaaaactcaattcagaaagaaagcagtatcgcagagcaagacgcagcagaaaaacatggtacagacctccaagattccttaaccgaaaaaagccagatggatggcttgctccctcaatccaacataaacttgaaagccatatcaagttaattgacagcataaaaagattgcttccaattactaaaatcgttattgaagtagctgcatttgatatccagaaaatcaagaatcctgaaatatctggaactggatatcagaatggtgtgcagaaagatagctggaatgtcagggaatatgtgtttcatcgggacgatcatacctgtcaggcatgtaaagggaaatcaaaatacccgatacttgaaacacatcatatcatttcaagacaaattggcggggatgctcctgataatctcttgaccctgtgccagtcctgtcataagaaagtctcaaaaggcaaactcaaactggatataagattacccacaggtttcaaaccagaaacttttatgtcgataataagatggaaaatggtcaatatgttaagggatgcaggaaatattgtatatcacacttatggatatatcacaaaatttgatagaattgcattaggtcttgataaatctcataataccgatgcttttgtaatcgcaggtggaactatgcaagaaagaagttcagtaagccatttaatcaaacaagtcaggaaatgcaatcgtaaattattcaaaggcgaaagaagccatatcaagaacacagctgcccgattcattcacggattccaaagattcgataaagttctatggaataatattgaatgtttcgtattcggaagaagaaaaacaggttatttcgagttgagaaaacttgatggtacaaaaatccatgcttcagcaaaggcaaaagaacttactttagtacaaagttctaatacatttttaatagcgaatttgaggcggggtacgctcccccacactctgaagagtgtggtttccgctacccctgcaccccatggagttttatga

SEQ ID NO: 791 - DNA, 227 bp, unidentified
  misc_feature 1..227: note = Ga0075519_1000010 JGI
  source 1..227: mol_type = other DNA
gtcaatcacccacacctgaaaggtgtgggcatgttccgtgaggaggatgggcaacaggttgacaaggaggcataaattatgcagaagttagaagaaagaaatacatacacacctacggacattccgcacattcgtagcaactgtggtttgccattaaacagagaggaaactctcagtgtgtcagacttaaaaacattttctaacaactccgatgcggctctaattgc

SEQ ID NO: 792 - DNA, 1554 bp, unidentified
  misc_feature 1..1554: note = Ga0063356_100000074 JGI
  source 1..1554: mol_type = other DNA
gtgcctcctcagccccgggctcttcgagcgcgtcgtgcagacaagcctgggaacgcacgaaacgacggcgcgcatacggctgctgcccaacattcccgagaggagcgtacagccccgccagggctgataccgtcacctgagcaatcagtgagcggggtaacccgcctaacacaaagcaccatgcagaccaaacaaacccaatcccgcgtcttcgtcctcgacaggcatcagaagcctctgatgccctgtcatccggcacgggcccgcgaactgctcgacaaaggcagggcccgcgtccaccgtctcaacccctacaccatccgcctggttgatcgaaccctggagaactcatccctccagccggtccgcctcaagttcgatcccggcgccaccaccagcggcgtcgccatcgtccgggaggacgaggaggcccagcacgtcctccacctcgccgagatcgagcatcgcggcaaggctgtccgcaaacacatgatccagcggggcaactaccgcggtcgccggcgttcggcaaacctgcgctaccgccagccccggttcgacaaccgcacccgtctcgccggctggctgccgccctcactgaactcccgctgcgacaacctgatctcctggacaaaccactaccgccggctggttcctgtcactgccatcacggtcgaaagcgttcgcttcgatatgcagttgcttgagaacccgaacatctcgggcatcgagtaccagcagggcacgctggccggctacgaggttcgtgaatacctgctggagaaatggggccgccgctgcgcctattgcgacaaggaacacctgcctctccagatcgaacacatccaggctcgggcaaagaacggctccaaccgcatctccaacctgtgcctcgcctgcgaaaagtgcaaccggcgcaaaggctcgaaggacgtccgggacttcctgaaacgcgatcccgaacggctcaagcgcatcctcgctaccgcgaagaagccgctcgccgccgcagcagccgtcaacgccacccgcaacagcctggtccgccaactccgattaaccggactaccggtcgagacatccagcggcggccgcaccaagtggaaccggtcccgcctcggcgtaccgaagacccacgccctcgatgccgcttgcaccgggaccgtcgacaccctgctgaactggcagatgcaaacgctcgccatcaaggccaccggccgcggctcctaccagcgaacccgcgtcaacaaacacggcttcccccgtggctatctgcctcgaactaaaaccgttcacggcgtccgcaccggcgacctgatccgagctactgtcccaaccggcaaaaaagccggctcctacaccggtcgcgccgccgtccgttcctcaggcaacttcaacatccaaatgccccacaccaccgtcgaaggcatcgcccaccgcttctgcaaggtgcttgcacgcagtgacggctatacctactcccctcaatccctggacttgacgcccgtgctcctcccggccgttaacggccgggtttccgcacggagtttttga

SEQ ID NO: 793 - DNA, 240 bp, unidentified
  misc_feature 1..240: note = Ga0063356_100000074 JGI
  source 1..240: mol_type = other DNA
gtcaataacccggccttaaaaggccaggcttgaagtccgaaaggagttcaagcctacgttgaccagggaaagtcacagagaagggcatcgttgatgtgactacgttgagcagtaagccaaagacggaccccggggtgcctcctcagccccgggctcttcgagcgcgtcgtgcagacaagcctgggaacgcacgaaacgacggcgcgcatacggctgctgcccaacattcccgagaggagc

SEQ ID NO: 794 - DNA, 1371 bp, unidentified
  misc_feature 1..1371: note = Soda lake metagenome
  source 1..1371: mol_type = other DNA
atgtcggttttcgtactcgacaagcagaaacggcccttgatgccgtgcagcgagaagcgcgcacggctgctgcttcagcgaggccgagcggtggtgcataagcgctatccattcacgatccgtctcaaggatcgggtgggtggcgaaacgcaacctctgcgcctgagcctcgatcccggcagcaagaccacggggctggcgctgctacgcgaaacgggcgacgaccagcgccatgtgctgtgcctgttcgagctggtgcatcgtggctttcagattcgcaaggcgctggagcaacgcctggcgtttcgccgtcgtcggcgctcgaccaaccttcgctatcgggcgccgcgcttcgataaccgtactcgccgggacggctggctaccgcccagcctgcaacaccgtgtcgacacggtgatggcgtgggtggataggctctgccgcctggccccgatcagcgccatcagccaggagctggtgcgcttcgacctgcagaagctggaaaaaccggagatcagcggcgtcgagtatcagcagggcaccctgctcggctacgaagtgcgcgaatacctgctggaaaaatggggccgggagtgtgcctactgcggcaccaccgacacgccgctggaaatcgagcatgtggtgccacgctcaagcggcggctcgaatcgcatcaccaatctgacgctggcctgccacgtctgcaaccaggccaaaggcaacggcacactggatgccttcttcgccaccgacaaggggctgaagaagcggctcaaggccaatggcctgtcagcggatacccggctggatcgcgtgcagcgtgaactcaagcggccgctgcgtgatgccacggccgtcaatgcgacccgctgggcgctgtatcaagcgctcaaggccactggcctgccggtcaacaccggaagcggcggactcaccaattacaaccgccagcgcctgtgcctccccaagacccatgccctggatgccgcgtgtgtcggtccattcgaccggcttcatggagagaaccgccccacgctgaccatcaaggccatggggcgcggcagctatcagcgcactcggctcaaccaatatggcttcccgcgtggctacctgatgcggcagaagcaggtaaagggcttccagaccggcgacatggtgcgagccatcgtgcccaccggaaagaaggccggcacgcatacgggccgcgtcgccatccgcaagaccggcagcttcaacatccagacccccgaaggggccgtgcagggtatctcctaccgtcactgcatcctgattcaacgcggtgatggttacggctatcaccagacaccatccacccacgcaaaaggaggagcgggacaggctgtggcatag

SEQ ID NO: 795 - DNA, 307 bp, unidentified
  misc_feature 1..307: note = Soda lake metagenome
  source 1..307: mol_type = other DNA
gtcaactacccccgcctgaaggcgggagcttgtaaaagcaagctgggttgaccagggaaagcggtaatcaatccactacgttagtcacaggtcgttaagacccaccgccgaatgcttcctcagttcggcgctctggaaggtcaggatcatgctgcggtacgccgcccgggcgaaaggtaaagcgccgaaggttctgatcgctgcggcaacgcaggagccggtggctgacattcccgaggggagatgggccgaaaggcccacgacacaggacccgtaaggggagtgattaggagaaaatcgcatgtcg

SEQ ID NO: 796 - DNA, 1140 bp, Lactobacillus delbrueckii
  misc_feature 774..1123: note = MISC_FEATURE - Any "n" represents any nucleotide
  source 1..1140: mol_type = other DNA
atgaagcacgaaaatgccaatcgggtgtttctgcttaacaaggacggcaagccgctaatgccatgttgtccaagaaaggccaggctgcttctgaaaagcggcaaggcttttgtggtcaagaaatatccgttcaccattcagctgaaatacggctcatacggctataagcagaaggttagccttggcgtagacactgggcagagacacattggctttgccattgtcagtcaaaacaaggtgctgcatcaaagcgaggtagagcttcgccaagacgtacacaaaaatctgtacacccgcaagatctaccgcagaagcaaaagaaaccgcaagactcgctatcgccaagcccgctttttaaacagagtgcatggcaagcgagacggcttatggcttccgccatcagtaaaaagcaaggtaagccataacattgcttggatcaagcgctatctggctgtattgccaaatcccgatctccatatcgaagtaggcaagtttgacatggccaagatggtcaatccagacatttcgggcaagcagtatcaagaaggcagtctaaaggactggaagaactatgagtactacgtgctggcacgtgacgagtacacctgtcagctttgccataagcatggcgaaggcgtaaagcttgtcgttcaccacatcgtctaccgctcacaaggcgggacagaccgagtggacaatctgataacgctttgcacgaattgtcatactacgaagaaccaccagccaggcggcaagctctacaagtggatgaannnnnnnnnnnnnnnnnnnnnnnnnnnnnnnnnnnnnnnnnnnnnnnnnnnnnnnnnnnnnnnnnnnnnnnnnnnnnnnnnnnnnnnnnnnnnnnnnnnnnnnnnnnnnnnnnnnnnnnnnnnnnnnnnnnnnnnnnnnnnnnnnnnnnnnnnnnnnnnnnnnnnnnnnnnnnnnnnnnnnnnnnnnnnnnnnnnnnnnnnnnnnnnnnnnnnnnnnnnnnnnnnnnnnnnnnnnnnnnnnnnnnnnnnnnnnnnnnnnnnnnnnnnnnnnnnnnnnnnnnnnnnnnnnnnnnnnnnnnnnnnnnnnnnnnnnnnnnnnnnnnnnnnnnnnnnnnnnnnnnnnnnnnnnntgactacgttcgtgtga

SEQ ID NO: 797 - DNA, 337 bp, Lactobacillus delbrueckii
  source 1..337: mol_type = other DNA
ttcgggtctcttatctttagcagggaagctggagaaatccagctttcattgtctagactaagctatccaatcggcttcagctgactggatagagggactacgttatccatgtcatcacacccaaggatgatgcccaagtctttggctctgtggcagctctgtaaacagtcatgaggttaacgtgacagtcaactgcgttggcaagcatggataacattgtcgatgggcaacaacgcaaatccggattgggtctcctgattcggacaagtggcaggaatcactgtttcctgcattacggaaaaggagaaaaagcatgaagcacgaaaatgccaatcgg

SEQ ID NO: 798 - DNA, 273 bp, unidentified
  misc_feature 1..273: note = Ga0197810_1087JGI
  source 1..273: mol_type = other DNA
atgcaacgagtgtttgtggtagacaaaaatcgagagccactgatgccctgccaccgggcacggaagctgctcaacatcgtgcgggcggttgtaaccagcggcaagaagattagcgcatataccgcgcgggtggcggtgcgaagctcaggcagcttcaacatcaccacgcgcaaaaaaacggtacagggtatcagctaccgctgctgcaccccgctgcacaaatccgatggttatagctacgagaaaggagaagcggcttccttcaccttttga

SEQ ID NO: 799 - DNA, 252 bp, unidentified
  misc_feature 1..252: note = Ga0197810_1087 JGI
  source 1..252: mol_type = other DNA
gtcaacgaccacccgatttatcgggtggcttgtaaaagcccatgtcgaccagcctcagccctatggggctgcgttacgggcgaatgcataggcactccggggtgacgccaccagccccggtccctgcggtcagtggttaaatcgtctgagggtctgagccagtgctgctgacaccaaaccgcccgataacattggcgaggtggacttcaccgccatctggcgagaatagaggggtaactctcaatgcaacga

SEQ ID NO: 800 - DNA, 702 bp, unidentified
  misc_feature 1..702: note = Ga0116167_1020986 JGI
  source 1..702: mol_type = other DNA
atgcatccgttcactatacgtctaaaagacagaacagtacagcaaagcgagttacaacctttaagattaaaactcgaccaaggagcgaaggttactggtctttcagttttgcgagaagacggcgatgtagcagaaacagtttttctttgcgagatacaccacaaaacagacataaagcaaaaacttgatgccaggcgtgctgttcgtcgaagtagaagaaacagaaagactagatatcgaaagccgaggtttctaaatcgaagacggcctgaagggtggctgccaccatcgttcaaagcaagagctgaccagcttataaatgcggtaaggaaactgacaaagctgttgccaataattgcaatatccatcgaagatgcaaagtttgatactcaaaagttgcaaaatccagagatttctggcatcgagtatcaacgaggcacactttttggctacgaggtaagggaatatcttttggaaaagtggggacgaagatgtgcatactgtggtagaagcgatgtaccactggaaatcgaccacatcgtaccaaggtcaagaggtggcacagatagagtatcaaacctaacacttgcttgccacgagtgtaaccaaaagaagagcaacaaaacagctgctgagtttggatacccacatattgaagagcgggcaagacaaacatacaagcaagcagcattcatgaactcg

SEQ ID NO: 801 - DNA, 298 bp, unidentified
  misc_feature 1..298: note = Ga0116167_1020986 JGI
  source 1..298: mol_type = other DNA
gtcaactacccccgactgaagtcgagggcttgtaaaagccctggttgaccagcctaagcaccggacccaaaggacaaggggacgaaggtgctacgttggtagtgggctcaagacccactccgggatgcttctccagtcccggacactggaagtgctggttgcagacaacctttggggtgtgggcgaaacggaccagcacacgtgccggctaccaacattggcgaggagagtgctaaagtgagtccgctttagcgcgtcacaaggcccgtaagggcattttcaaggagtgagacacatg

SEQ ID NO: 802 - DNA, 1254 bp, unidentified
  misc_feature 1..1254: note = Ga0123348_10016055 JGI
  source 1..1254: mol_type = other DNA
atggtatatatactaaacaaagatggtcatcccttgatgcctaccgaacgtcacggcaaggttcgtcgtatgctgcgtgatggtttagcacatgtggttcgacttgttccatttaccatacaattagattactcgtctggcaaggaagtacaagaggtgtcgttagggatagatgctggcagtaaacacattggggtgtctgcaacaacggagcgacgtgaactattagcaatgcaagtggaagagcgtgatgatatcgtgaaactaattgccgacagaagagaggcaaggcgaactcgaaggaatcgtaaaacacgttatcgtgcagcacggttcgataatcgtcgtagaatggatggatggtttgcgcccagtattgaaaatcgcatctctgcacatttgcgtctaattcgacttgtgtgttcaattttgcctgttactcaaaaaacgattgaggttgcacaattcgactcacagaaaatcaagaatgacaagatttcaggagttgaataccaacaaggagagcaacttggtttctggaatgtaagagaatatgttcttgcaagagacggacacagatgccagcactgcaaaggaaaatctaaagacaaaattttgaatgttcatcatctggaaagcagaaagactggaggcaatgcgccaaacaatctcattacgctgtgtgaaacctgtcataaggcataccatcgcggtgaaatccaattaaaagcaaaacgtggaacaagtctgcgcgatgccgcagtgatgtccataatgcgttgggagatttataaccgtgctcaacgtgagtttacgaatgtgaatttgacgtatggttatattacaaaacacagccgtatcaataatactattgccaagacacattgtgctgacgctttttgtatttcaggaaacgtccaagctgaacgcctaccatggttctatggagttcggctgcaacgtcggcacaatagatctcttcatatattaaagcctacgaaaggtggtgttagaagaagtaatttggcggctcattggattggaaaatcgcaattgcaacaatatgactatgttgaatggaatggatataaggcatttatctctggcagtcaaaatggaagaccataccttaaaaactttgacgataagtatatcatgacacccaaagcatccgtcaatgcaaagacagtgaaattcattcgaagaaagcgtggaagtatgataattgaacaattacctaaaaatattgtatag

SEQ ID NO: 803 - DNA, 283 bp, unidentified
  misc_feature 1..283: note = Ga0123348_10016055 JGI
  source 1..283: mol_type = other DNA
gtttacccacaaaaatgctggtactaacagcagattatgtgtaagccgattagcctcaggcatataaagggcatacgtgttatgcaaattatatgacctacgttaggagtgaatgtataggcaccttggaatggtcgcccaagttccaagctctgcggtcagcgattaaaaggagcgaaagcaacggtgtcgctgatatatgaaaccactctataacattggcgatgggcgcataacgggcgcaagcccgacttatagtttttaaatagaaaatctaaatatg

SEQ ID NO: 804 - DNA, 1269 bp, unidentified
  misc_feature 1..1269: note = Ga0257072_1000039 JGI
  source 1..1269: mol_type = other DNA
atgttcgtgtacatcattaacaaaaacggacagccgctaatgccctgcaagcctcaaaaagcaagaaagctcctgaaggctggcaaggcggaggttgtcaaatatgagccattcactatcaagctgaaatttggctcagctggctacaaacagccgataactttaggtattgacgccggctccaaacatattggggcttccgtgtcaacagaaaaacaggaattatatgcttcggaaacagtcatgcgttctgatgatggcaaggctactatcgtgaatcttatagcaaaacgcagagagcttcgacgtaaccgcagaaaccgtaagacccgttatcgcgaagcaagattcttaaaccatgttcatcgcaagcacaaaggctggcttgctccaagcgtagagaacaaaatccatgtccacctaaagctggtggcggatatccacaagatactgcccatcactaaagtagtggtggaagttgcccagttcgacattcagaagattaagaatcctgatatttccggtgtcgaatatcaacaaggtgaacaacttggttgggctaacgtcagggaatatgtattattccgcgacaatcacgaatgtcagtgttgcaaaggcagatctggagatccgatactgaatgtgcatcacattgagtcgcgaaaaactggcggcaacgcaccaaacaatctgataactctctgcgaacattgccatcagagctatcaccaaggcaaaatttctttacctaagtcgatacatcgcggcatgagtttccgagatgcagctttcatgggcatcatgcgatgggcattctacaatagaattaaggcgttatatcaagacgtcaaactaacttatggttacatcacgaaaaatactcgcatcaagaataacattgccaagacacatacagctgacgcttactgtatcgccgggaacgtcaaagctagacggcttaaacatgagtatttacgtaagcaagttcgcaggcataatcgcaaactacatcgagaagtgccagctaaaggtggtattcgtcgattggctcaagcagggcatttcgtaagaggcttttgcttgaacgatactgtgatggccaaaaatcagcagtggtttattcgaggcatgcgtcaaaagggcagttttgttctaagacatcttgatggcacaaaactggaaattgcgctttcaaaaataacatttttgagacataacaattcttatttaatcgagaggagagaagtggcgcttacctccaccctgtag

SEQ ID NO: 805 - DNA, 288 bp, unidentified
  misc_feature 1..288: note = Ga0257072_1000039 JGI
  source 1..288: mol_type = other DNA
gtcaataacccccgcctagcggctttgcgcttgaggcgggagcttgcggaagcaagctctgattgactagcctaagtcttaactgactacgttgctttcgttatctcacccgtgggtgtttatcctagcttacggctctgagcaggctctgtaaaagttctgagaggtaggaacggtcaacctgaggacggtctggcgttaatccagacaagcgattacaacattggcgaagggtagattactctaatttgaagcttttgcttcggaaaggaggtacacgttatgttc

SEQ ID NO: 806 - DNA, 981 bp, unidentified
  misc_feature 1..981: note = Ga0075017_100018482 JGI
  source 1..981: mol_type = other DNA
atggtaccagtatttgataaagaaaaagttccattaatgccttgttctgaaaaaagagcaagacttcttatggaaagaggcaaggcgaaaccgtattggcaacatggcttcttttgtattaggcttactgtggagccttcggctcgtcattatcaggatgtcgctcttggaattgatcctggatcaaaacgggagggatatactgtactgactgagacgcaagtggtaatcaatattactacagatactccggatcaagtaaaaggtaaggttgaaaccaggagaaatcttagacgaagtcgtcgtcaaagaaaaactccttatcgaaaatgtagagcaaatagatcttcattgaaaaacaaaggcgttccaccatctacaaaagcaagatgggataagaagctgacaatgattcgttatctcacagacatgcttcctattacaaagataaatgtagaggatgtggcagctaaaaccaaacatggaaaaggaagatggaatagatctttttctcctttggaagttggcaaagcatatttttatgaaaatgttgctaaaacttatccagatatttctttgagtaagaccaaaggttttgaaacaaaagctcatcgagatattagggaatttgagaaatctaagaaaaagttagagtggacatgggaagctcataatgtagattctcattctctagcggagatggtacttaataaacaagttaaaccatatcgtggacttttaagattgaagtggatgaatttttcaagaaggcaacttcacgtccaagttcctattaaaggaggtattagaaagccttatggcaaatctattacacaaggaataccaaaaggaatgatttgtaagtatattggcgaaagcaagtcgtgtaatagtaatgatttgtattatcttggtggagaatctaaaggaaaagtgacactttgtaattataattggggaaaacgcgcatcccgatcaatc

SEQ ID NO: 807 - DNA, 248 bp, unidentified
  misc_feature 1..248: note = Ga0075017_100018482 JGI
  source 1..248: mol_type = other DNA
ttcagctaccataatctagataagtagattatgtattgctcacatagaagtaatagttctaaccaaacgttatgatgtgacgaaagtgaattgattagacaggcgataactgaaaagttatcgcaaaaacatatagtagaatcaaacccgttattggttagggttaaagtatgtagagaatgtttcgctagttctcttcctctacgattctagtatgtcgaagcgagattaacaagtcccgtgaggga

SEQ ID NO: 808 - DNA, 1242 bp, unidentified
  misc_feature 1..1242: note = ERB_1001085 JGI
  source 1..1242: mol_type = other DNA
atggtctttgtcttggacaagaaaaaacgaccgctgatgccttgttctgaaaaacgagcaagattattgcttgaacgcggcagagcgagagtacacaaaatgtacccgttcaccatccgcttggtagatcggttgcaagaggattccgtattgcaagaagaacggctcaaacttgatcccggttctaaaacaacaggtgtggctgtcacgttggatggagcaacaggcacaaaggcagttttccttggcgaagtcattcacaagccaggaatcaaagcaaaactagacagtcgacgcgagcttcggagatcaaggcgcaatcggaaaacccgctatcgcaagccgcgtttcctcaaccgcaaacgcaaagaaggatggttgcctccaagcctagaagccagagtcaatcaaacgatgaatgccgttgctaaactgattagattcataccaatcaccgccgttagtgtagaacacgtcaaatttgatacacagttgatgcaaaacgcagagatttcgggtgttgagtatcagcagggcgaacttgcaggctacgaggttcgcgagtatctcttagagaagtgggggcacgcttgtgtgtattgcggagcgactgatgtgccacttgaggtcgaacacattgtcccgaaatctcgtggtggaagcaatcgggtatccaacctaacacttgcttgccacgagtgcaatcaggagaaaggcaatcgaacagcagaagaatttggccacccaaatatccaagcgcaggcgaaaaaaccactcaaggatgcagcaacaatgacccttcatcggcgagagacgagcgatgacgagctagatcacgtgagcgagatcaggcgcgaaactcgttccaaaggcccagccaaagggaattgcgcttcaacgacgcacctcttccgccgatctcataactcgcgttgcgcctctccgtgtggcctgatgggccgttggagcgtgcgatcacgcgcttcttcaggcgcggtcttgcacgacgttaagaccagcacgccgcgcgcagtgagcgcagcaaaagtaggcttcgccgacttccactccatgcccgatgatccggcacccacagtgagcgcaagtcggggcgagagcctgaatggcacattcgaagctatcgaacgtgtgagtgcgcccttgcatgatgacctgaaaagctttgtcgtagtcgttgccacagagttcacactgcgccatggtcacctccttttcgtctag

SEQ ID NO: 809 - DNA, 332 bp, unidentified
  misc_feature 1..332: note = ERB_1001085 JGI
  source 1..332: mol_type = other DNA
gtcatagaccccacggcgcgcagccggggggcttggaggtgccagaaggtacctgagagtcgcttgcgtagctgaacatctatgaccagcctgagtgccggagcccgaaggacaagggcggcgaaagcactacgttccgtgggtcatggcaccccggggtacttctccagccccaggccctgccgcctgcggttaaacgcaagctgggggtgtagcgagccgtgccgcaggcgcggaaagcccttggaacatgggcgaggagagacgcgggcggagtccggtccgcgcgtcaccaggcccgtaagggttatccaaaaggagcggaaacgatg

SEQ ID NO: 810 - DNA, 1257 bp, unidentified
  misc_feature 1..1257: note = Human gut metagenome
  source 1..1257: mol_type = other DNA
atggtttacgtaattaacaaacaaggacaggcacttatgccaactgaaaggtttggtaaagtgagaaggctattaaagaatggtcttgcccatgttatgtaccgtattccattcacaattcaattggattatgacacaactaacttcattcagcccataagtttgggtatagatgctggtagcaagcatatcggcatatcggcaacgacaagtgagaaggaattgtatgcagcagatgtagaacttagaaatgatattgtagagaaactatctactcgtagagaacaaagaagaactcgtagaaatagattgcgttatcgtagggctcgtttcaataatagggtttcatctaaaagaaaaggttggttagcaccatctattgaaaacaaaatccagactcacttaactgttgtagagaagatacataagtttctgccaataactaatattatagtagaaactgctgcttttgatatacaaaagattaagaatccaagtatatcaggtaaagaatatcaacaaggagaacaactcaacttctttaatgtgcgtgagtatgtgcttcatcgtgatggtcatcagtgtcaacattgcaaaggtaagagtaaagaccctatcttgaatgtgcatcatattgagtcgagaaaggttggtggaaattcaagtcaaaacctcataacactttgcgaatcttgtcataaagcataccataaaggtgaaatagaactcgaagttaagcgtggcacatcattcagggattctgcatttatgtctacaatgcgatggagcttctacaagaagttgaagaatatctatcctaatgtaagtatgacttttgggtatatcacaaagcacactcgtatcactaatgggctatcaaaaagccactatgttgatgcaaggtgtataagtggtaatcctaccgctaaacctcttgaatattatttctatcaaaagaaagtgcgttgtcaaaacagacaaatacacaaggctaatttcttgaaaggtgggaggaagaaactcaatcaagcaccatacttggtaaaagggtataggttatttgacttagttgaataccaaaaggatttgtattacatatttggaagaagaggtagtggtttctttgatattaggaaacttgacggtacaaaagtaaacaagggttctcttagttgtaagcagatgcgattgatagatataagaaaaacaataataattgaaaagcgaatgcaaggcgcaatttctcccataaactaa

SEQ ID NO: 811 - DNA, 273 bp, unidentified
  misc_feature 1..273: note = Human gut metagenome
  source 1..273: mol_type = other DNA
aaccagaataatattgtcaactacccacaggctaaagacctgtgggcttgaaaaagcccaagttgattagtctaagcacttcgggtgctacgttaggagagaatatatagttaccaagtgggtgtttgctcaagccccctgctctaaggttagtgattaaacaattccgtgaggtagggatagtgttgctaacgaaaacctctccataacattgacgatgagcatttaacggagaaatccgacttatagtaaaatttttaaaaaaaaagaatg

SEQ ID NO: 812 - DNA, 1332 bp, unidentified
  misc_feature 1..1332: note = Ga0074432_100015 JGI
  source 1..1332: mol_type = other DNA
atgtcagtatttgtcctagataagcgcaagaaacctctgatgccttgtactgagaaacgggcaaggcttctactagaacggaagaaagcggtcattcaccgaacggttccgttcacgattcgcctcaaagaacgcgtaggcggagaagttcaacccgtcgcagtgaagcttgacccggggtcaaaggtcactggaatcgccctcacccgtgaagtgggtaccgaaacgacccaccctatgttcctcgccgaattgcatcaccgaggggcatccatcaagaagtcactcgagcaacgctctggttatagacgtcgacgaaggtcggcaaaccttcgctaccgagcccacagattttccaacagaacgaagcctaagggttggttggcccccagtctcctacatagggtagagacgaccttgtcttgggtcaataggttccgacgactggttccggtcagtcgaatctcgatggagttggttcgattcgacctacagaagcatctcaatccagaaatctctggtattgagtaccaacaaggggagcttcaggggtacgaagtacgggagtatttgttggagaagtggggtcggaagtgtgcttactgtggggttgaaggggttccacttcaagttgagcacattgtaccgaaggcttcgggtggctcaaatcgtgtctcgaacctgacgttatcgtgtcacacatgtaaccagaagaagggttcgaggtctgtcaagacatttcttgcgaagaagccggaggtgctcaagagggttcttgttggtgcgaaggcgccattgcgggacgcagcggcggtgaactcgacaaggtgtgttctatacgatacactcaaggctacagagctacctgtcgaaacggctagtggaggtcaaacgaagtggaatagaagccgatttagtataccgaagactcacgcactcgacgctttatgtgtgggtatattaaaaggcatcaaaaactggttacaaccaacgcttgctatctattctacaggtcggggagtctaccagaggacgagggttacgttatgtgggttcccacgtgggtacctaatgcgaaagaagtcggcgttcggatttcaaactggcgacttggttcaggcagttgtactgaaaggtaagaacgtgggaacccacacgggacgtgtagcgattcgggtgactggaagttttaatatccaaacaagtcacgggttaatacaaggtatttcatatcgttactgccggatggtccagcgtggcgatgggtacaggtacgagattgggctcttcccaactttcaaggacggggtttttgccccgaagaaccaatga

SEQ ID NO: 813 - DNA, 277 bp, unidentified
  misc_feature 1..277: note = Ga0074432_100015 JGI
  source 1..277: mol_type = other DNA
gtaaacaactcctcctttatgggaggtgctttgtgcgggagacatcacaaagcacctgtttaccagggatagcgaaagctacgttgtgattagggatccagaccgacgtccgaatgcttcctcagttcagacctctcgaagacatctttgcagacaagccagagttaggcacgaaacggaagatgtcccaacaccggatcacaacattcccgaggggagacggctcgtaagggccgcgttactaggcccgtaagggctccgcaaggaagatatgtca

SEQ ID NO: 814 - DNA, 1386 bp, Moorena sp.
  source 1..1386: mol_type = other DNA
atgcaacacgtgttggttctcgatgcccagcggcgtccgttgatgccgtgtcgccccgcacgagcgcgattgctcttaacacaaggcaaagcagctgtgctgcgacgctctcccttcctcatcattttgaaggagtccaaaccagacgctggcgtgaagcccatgcgcctcaagattgatcccggtagtcagacgacgggcttggccctcgtcaccgctgcgacggacacctctgagcaggtgcacggtatggtgctgtgggcagcagaattgacccatcggggcagtgaaatccatcgggacgtgaccagccgtggcaaggtccgccgttcccgcaggtttcgccatacctggtatcgcgaggcgcggtaccacaaccggacccgtcccgcggggtggcttccgccctcactggaaagccgtgtgcacaacgtcgccacctgggtccagcgtctggcgcggtggtgtcccatcggagccatctcgtttgaggcggtacggtttgatacgcagttactccaacacccggatattgctggcatggagtaccaacggggggacctcgcagggatcgaggtgcgggagtatctcttgctgaaatgggggtatcgctgcgcctattgccaccagcaggcgacttctaccaattggtgggaaattgaccacatcatgccacgcagtcggggaggaagtgatcgggtctctaatctcgccctcgcatgtcacaaatgtaatagtacaaaaggagaccagactgctcttgagtttgggcacccggaggtccaggcgcaggcgagagcacccttgatggatgccgccgctgtcaacagcactcgacgagcggtgcatcaacgcctcctagcgtttggcatgcccgtggagaccaacagtggcggtctgacgaaatggaataggacacagcatagcctacccaagacccattggcttgatgcttgctgcgtcggccggagtactcctacgtttctgcggggctggcaggaccttgtcccgctcttgatcacggcacagcgctggcagcggcggcagatgtgcttaatgaacgagcatggcttcccgcgtacgagggccaagggagccagccgagtgcagggattcaagaccggcgatatggtcaaggcggtggtgccgagtggaaaacccgaggggatccatgttggcaaagtggcagtcaaagcgcgcggctacttcactgtggctagtgtgcccgatgtgccctctcgctattgccggctccttcagcatgccgatggctatgagtatacccagggagtacccgctgggagatcttcccagtcagcaccgggtcaggcggcgggtagcggagggagcgttgtccgcgaagagaccagagtgtcacgggactga

SEQ ID NO: 815 - DNA, 320 bp, Moorena sp.
  source 1..320: mol_type = other DNA
gtcagatacccggtccccagaagagggcgggcttgtgcgagcaagccatctgaccagttcccttcctctgcggagggaggagccgttgacgaggagcgttcagagtcgcaccctgggatgaccgatccagtcccaggcaactgcaagcgcacggttaaacagcggttgggtgccgcagtgccgtgcgcagagtaccgctcgtcaaccaggacgaggatcaccttacctgcgcgtcttccgagccatcgccaggcaagcagcgtcgccgtgtatggcgtccctttagccagggaagaaagttctgatgtgttatgcaacac

SEQ ID NO: 816 - DNA, 723 bp, unidentified
  misc_feature 1..723: note = Ga0123338_10037050 JGI
  source 1..723: mol_type = other DNA
atgaaagaaaaccagagatatgcttttgtactagataataggggtattaagttatccacaacaaaagaagaaaaagcatggtataagataagaaaaggtaacgcaaaattaatacaactaaaacctatgataattcaattaaattataaggtagacaatacagacaatagtaacatttacgtaggattagatgtaggtgaaacaactggtgtaggtatagttcaaaaatgcaaaacaagaaataaagtaatatttaaaggtgaaataaagcatagaaaagatgtaagtaagttaatggagcaaagaaaaaattatagaaaattaagaagggcagaaaaaagatataggcaagccagatttgataatagaggtagtagtaaaaaagaaggtagattaccaccttcaataaaaacaagacaagatgaaataataagatttataaataaattattaaaattactagatataaataaagtaatagtagaagatgtttcatttgatatacatgtattaacaagtggttataaaccatataaatgggaatatcaaaacacttataggttagatgaaaatacaagaaaagcagtattaatgagagataagtttacgtgtcaaatgtgtggtgcagtagagacaagattagaagcacatcatataacaccaaaaagacaaaacggtgaaaatacattggataacttaataactttatgtagcaactgtcat

SEQ ID NO: 817 - DNA, 292 bp, unidentified
  misc_feature 1..292: note = Ga0123338_10037050 JGI
  source 1..292: mol_type = other DNA
tataaaaagttataagtaattgttagtggtttcaagtcagagtgagtgcagctacaggaaactgagacgcacaatgaactacgttagtgaaagaagttaaacacttacctttggatgtatccatcagtctgaagctctaagagtttttgaggaagaaagtaaacctaagtagccttgatacagaggttatatgaaaacctaaccccaatttaacatgaacttatcgttgacattgacaagaaggaaaatacttttaggaaggttggagaaatcctatgaaagaaaaccagag

SEQ ID NO: 818 - DNA, 798 bp, unidentified
  misc_feature 1..798: note = Ga0187784_10040265 JGI
  source 1..798: mol_type = other DNA
atggcctttgtgcttgaccggaaacaacgaccgctaatgccgtgcacagagaaacgggcacggctgctcctcgaacggggccgggcgcgcgtgcaccgcttgtatccgttcacgatccgcctccgcgaccgggtggtggaggacagcgcgctccagccactgacgctgaaacttgatccgggatccaagaccaccggcattgccgttgcgcgcgtggcagaggcacccgccggatacacgcacgagacagtgcatctcgccgaactggctcaccggagcgatcaggtctgtcgtcagatgcagcaacgcgcaaattaccgccgacgacgtcggacagccaacctccgttaccgagctccccggttccgcaatcggcgtcgagcggtagggtggctcggcccatgcctccggtcaagggttggcaacgtggtcaatgcagcgcggatgtacgcgcggctcgcacccatcacacgcgttgacttggaactggtcaagttcgatacacaaaagctccaggcttcagagacctccgggatcgcgtatcagcagggcacgcttgccggctatgaagtccgtgagtacttgttcgaaaagtgggggcggaagtgtgcgtactgcggtgccgaggacgtcccgctccaaatcgagcacattgtccccagaagccgacacggttcgaatcgcgtcggcaacctgacgttggcatgtcgactgtgtaacgaggccaaaggaaaccgcaccgccgcggaattcggtcacccggaggtccaggtccgggctgacctgcccctgcgaggc

SEQ ID NO: 819 - DNA, 304 bp, unidentified
  misc_feature 1..304: note = Ga0187784_10040265 JGI
  source 1..304: mol_type = other DNA
gtcatagaccccacggctgaagccggggggcttgctcgtcgagcctgtctatgaccaggtcaaggtcctgagcggccggacaccgcggtgacggacctacgttgcaggggaagccaaacgacccactccgggatgcttccccagtcccggactctggaagcgccggttgcagacaacctttggggtgtggacgaaacggatcggcgccgaaggcggccctgcaacattgccgaggggagcggctcgggcacgtccgcccaagcccgtcacgaggcccgtaagggcgcgtaaggaggtcaagatg

SEQ ID NO: 820 - DNA, 1008 bp, unidentified
  misc_feature 1..1008: note = Ga0373634_0000655 JGI
  source 1..1008: mol_type = other DNA
atgataccagtattagatataaataaaaaaccattcttgccctgctcagaaaaaagggcaagaatattaatgtcacgtaaagaagcgaagccttattggtataaaggattattttgtattattttacaaaaagagccttcttcaagaagctatcaaaagatatgtataggagttgatcctggatcaaagatgagtggttatacggtaaaatctgttaaacacacattaatgaatcttcaggtgaaagcgcctaatcatgttaaagcggcagtggaacaacggaaaataatgcgtcaagcacgacgaagtagaaatactccgtatagaaaatgcagatttaatagatctgtaggtaaaagaataccaccatcaacaaaaagtagatggttacaacatcttaatattattagattaacatcaaagatgtatccaataaaagaagttgtagttgaggacataaaagcaaagaccttagagggaaagcgtaaatataatgttaacttttcgccattagaagttggaaaaaactggttttataatcaagttaagttgacctatcctttaaaaacatatcaaggatatgacacatacaatgagcgtcaaagattaggattaaagaaaacatcaaagaagttagataaagtatttgaggcacatgcggtagatagttgggcattatgtaatttagtattaggtggtgataagttaccagagaacaaaaggttaacatatttagagccattagtattttccaggaggcagttacatgtattagtaccatcaaaaggaaatattcgtaaaaaatacggatcaacgatgagccttggaataaagaggggaacattagtgcaacataagaaatatggatattgtttagttggtgggactattaatagcaggctaagtttacataatacttttaattataaaagattaactcaaagcgcaaaattagaagatttaaaaataaaaacgcatttaaaatataaaatggtgtttttaagataa

SEQ ID NO: 821 - DNA, 237 bp, unidentified
  misc_feature 1..237: note = Ga0373634_0000655 JGI
  source 1..237: mol_type = other DNA
atataattatcaacagcctagcaataggtgctttatgaaaactttaaccaagactaagtaaagtaaatggagattagcttagacaagatcgcgctttgtgcggtcgcttgaagtcaactaagtcaataggtcgtggtagaccattatatattaaggatacctctctagtcctttttccctatattgacgagtagcgaagagaaattaaaacaaggtacgtaagtacaaaaaaataaa

SEQ ID NO: 822 - DNA, 1242 bp, unidentified
  misc_feature 1..1242: note = uncultured Bacteroidales bacterium
  source 1..1242: mol_type = other DNA
atggtttacgttcttgataaagaaggaaggccgattatgccgactgaacggcatggcaaggtaagaaggcttttgcgtgatggcaaggctagtgttgtcagactccagccatttaccattcggcttaattatgatagtgacacctataaacaggaggtatgccttggcatcaaccctggatccaagcatttcggagtgtcagcttcatcagaaaagaaggagctgttctctgcggaagtcgtgttaagagacgatatcgttgagaacatctctacccgaagggaactccgtcgtggaagaaggttccgcaagactcgctaccgtatgccgagattcaaaaatcgaggtaaaaatgagggatggttggctcccagtgatattaacaggatagatatgcacatgaagatgattcgtaatgtgcatgatatccttcctgtcagcaaaacaatcatcgagatttcgaattttgacatacagaaaatccacaatccttccataaaaggtattgagtatcagcaaggcccccagatgggattctggaatgtaagggaatacgtgctttggcgtgacaatcatgtatgccgcaactgttttggcaagtcccaggatcctgttctagaagttcaccatatcgaaagcccgaagacgggcggtgatgcgccggataatcttatgacgctgtgcaagacctgtcatcaggcataccatcaaggcaaaatagatttgaaaggcaagagaggtgcatctgatcgcaacgcatccgcagtaaataaaatgaagcaaaaccttattgacagagcaacgaaggagttctccaacgtcagctttacgtatggctatattactaagaatacgagaataagtaatggtattgcaaaaagtgatagttccgatgccttctgcatagccggttgcatttctgcaagcaggttgccttatctgtttaagtgtagatgtgtccgcagacataacagatcacttcatgtctgcaaccctaaaaaaggtggcaagagacgaagtaacctcgctccacactggattgtaggtacaaggctgcaaagattcgacatcgttaaatgggatggaacacgttgctttattttcggcagttcggctggaagactctatctgaaagacatagaaggttcgcgtgttagtcaatcagctacagtcagtgcaaaacaagtcagatttctatcaaggaaaaaaggtagcatgataatgcaaattgttccttgctga

SEQ ID NO: 823 - DNA, 278 bp, unidentified
  misc_feature 1..278: note = uncultured Bacteroidales bacterium
  source 1..278: mol_type = other DNA
gttgacaccctcgcacgtggctgttgactcaagcgtgtacaaagaagcggactagcctcagtcccgggacaccccgggaactacgttgggggtgaatgtataggcactccgggatggtcgcccaagtcccggactctggttggccagtggttaaaaggagcgaaagctacggtgctgctggtatatgaaaccaccccgcaacattggcgatgggcgcataacaggcgcaagcctgtattacaacatagttgtttaattaataaataaagagaattatg

SEQ ID NO: 824 - DNA, 1272 bp, Moorena sp.
  source 1..1272: mol_type = other DNA
atgtcaaactatgtctttttgattgaccaaaacaaaacaccactgaatcctatacatccggcacaggctagaaagttattagattcaggtaaagctgctttgtttcggcgctatccatgtactttaattttaaagcgagtgatagagaatcctaccgtatatccacttgcgctcaaaattgatccaggttcaaaatttactggaatagctctagtaactaaccaaggtaatgtcatctggggaatggagttaaaacaccgtggtcaacaaatcaaagacgctctagagcatcgtttagcggtgcgtagaggacgacggaaccgaaacacccgctacagaaaagcgcggtttcttaatcgtaaacgtccagaaggttggttagctccatcattgcgacaccgcgttctcacaactgagacttgggtcaagcgacttcataaatttgcaccaatcggtttgattactcaagagttagtgaagttcgatactcaagctattcagaatcctgagatatccagcactgagtaccaacaaggaacactacatggttatgagtgccgtgagtacttgctggagaagtggaatcgtcaatgtgcttattgtggagtgaaggatgttcctctagaaattgaacacatccaacctaaatcaaaaggtgggtctgaccggatatctaatctctgcttagcttgccacaagtgcaatcaacgcaaaggaaacaaagatattaaggacttcctcaaaggtaagtctgacatattgaatcgtgttctgaaacaagctaaaacaccgctcaaagatgcagcatcggttaattccactagatgggctttgttcaatattttgaagtctttcggcgtgagcgtcagcacaggtacaggtggtcaaaccaaattcaatcggattcggcttgaactgccaaaagctcactggattgatgctgcgtgtgtcggagcagtcgaaaccataaaacttgtcacgaccaagattcttctcgtgaaagcaactggttttggtagtaggcaacgataccagacagataagtttggctacccacaaaaacatcgtccactacgtccaatatttggattttgcacaggtgacattgttcgtgctgatgttccaaaaggtaagtatgccggaacatttaccgcacgtgtttgcccaatgtctcacggatacggcgagtttgttattgacaaaaaacggagatcaatcaaattggagtacttaacacctgttcaccggaaagatggatacgactatgcctag

SEQ ID NO: 825 - DNA, 278 bp, Moorena sp.
  source 1..278: mol_type = other DNA
ccgaaaaacctatgcagaactagtcaaggctaggcatatctgtacaaagtcggggcgtgcagactaagacttttgttagcgcagcggcgcgatagcacggtctacgatttttgagtcatgacacctacaggtaaacgccagccagtagccctgtcggaagtggttaagtaatcggtaaacaggtttatagccgtagtgccacttccttaaaaagctcttaaatcattgtcgaggcaaactttacttagtaataaggatgacagaatatgtcaaactat

SEQ ID NO: 826 - DNA, 1134 bp, Moorena sp.
  source 1..1134: mol_type = other DNA
atgaacagtcgagttcctgtagtcgataataacgacaagccattaatgccgaccaaggcgagccgtgcgcgtcgaatggtgcgagacggtaaagcgataggtcaatggtcagatctaggtgtgtggtatatcaagctagttgcagaaccatcaggtgacgctactcagcctattgtggcgggtgtagatcctggtaaatcatattcaggcgttggtgttcagtcgggcaaacatacgctgtttagaggccatctggttctaccgtttaatcgtgttagagccagaatggatcagcgccgattgttgcgtagaggtcgtagaggacgacggatagatcgttctattccgtttgctcagcggtcgcaccgtcaaaagcgctttgacaatcggcgcggtaataaacttccgcctagcattagagctgctagacaacttgagttacgggtcattactgagctatcgaaactcttcccgattgttgccattggttatgagcgggtagcagctagaactaaaaaagggtgcaactttagtcctgtccaagtcggtcaagactgggctatcgaacaaatgagtaagttagcgcctgtttaccaaataaaaggatggcagaaagacggcaacggaacttctcaaatccgaaaatttctaggacttgagaaagataaaacaaacaaatcccacgcggaacctgagactcattctgttgacggcgttgctatagcatcaagttattttgtcaaattcaagtcatgtcatcggttcaaagaagatggtaaatcttgtttcggcagcgttggcataacgccatcagttttcaaaattatcactcggttcggcgcagtcaagcgaggtaagcaatacgggttttatcgtcgtcagctccattttgaggttccagccaaaggtgatgttcgcaaacgcaaaggcggtactgtcacaccttggctattcaggattggcgattttgtctcatctacaaaagggaaagcggctgtaactggctatatcggcggctacagcgaacccaataaagtcgtttctatctacgattggcagtggaagcgcatcgggcaatttttagttggcaaaacaaagttactaaggaggtctaacggattatgcgtagcgtag

SEQ ID NO: 827 - DNA, 238 bp, Moorena sp.
  source 1..238: mol_type = other DNA
ttcaatgatccccacctgtaacgaggtgggggagtggtcggagataacccgaccgtaactgcgaatagctcactgagctaattacggtaacactaccaaacacttctctagtttggtttatctgtagggtctggaatctcagacagtagagtaacgcctagaaacaccgtaattagtgggttaagagacgaaacgaaagtttcacaaacatttattggattatctctaatgaacagtc

SEQ ID NO: 828 - DNA, 2184 bp, Parasutterella excrementihominis
  misc_feature 522..555: note = MISC_FEATURE - Any "n" represents any nucleotide
  misc_feature 1346: note = MISC_FEATURE - Any "n" represents any nucleotide
  source 1..2184: mol_type = other DNA
atgccctgttcaccggcaaaagcgcgccttctgcttaaagagaagaaagctattgtggtaaggcgcacgcctttcactattcagctgacgattgcaacgggtgagtccaaacagccggtaagcctgggtgttgatgccgggtacaaacatgtcggcctttccgcatcaacggaaaaggctgagctttatgaatcagaagtcgaactccgtcaggacgtctctgatctgctctctgctcgtcgtgcgttacggcagtctcgccgtaaccgcaaaacgcgctaccgtgccccgaggttcgacaaccgcatccgcaccaagcgcaaagggtggcttgcaccatcagttgaaaaccgaatcaacgcgcacttgtcgcgcgtagaaacggttattcgactgctgccggtcacgaagatcaccgtggaaacgacctccttcgatatgcagctgctgaagaattcagacattgcagggaaagagtaccaagagggcgaacagctcggcttctggaacgtccgcgagtannnnnnnnnnnnnnnnnnnnnnnnnnnnnnnnnncgctaccgtgctccgaggttcgacaaccgcatccgcaccaagcgcaaagggtggcttgcaccatcagttgaaaaccgaatcaacgcgcacttgtcgcgcatagaaacggttattcgactgctgccggtcacgaagatcaccgtggaaacgacctccttcgatatgcagctgctgaagaattcagacattgcagggaaaaagtaccaagagggcgaacagctcggcttctggaacgtccgcgagtacgttcttttcagagacgggcacgtttgtcagcattgtcacggcagatcgaaagacccggtgcttaatgttcatcacttggagagcagacgtacgggcggtgattcgcccggcaacctgattacgctttgtgagacgtgccataaggcgcttcatcgcggtgaaatcacgctgaaggcaaagcgcggacaatcattccgtgcggagaccttcatgggaattatgcgccgggaggttttggaccgcctgaaggcgtcgcatccgaagctagaggtgcaaaacacctacggctaccggaccaagcatgcgcggatctcgaatggcattgccaaatcgcattgtgcggatgctttctgcatcgccggcaatcttggcgccaaaaggctaggcgaattcctattccagaagcagactcgccggaacaaccggcagattcacaaactctccatcctcaaaggcagcctgcgaaaacgcaaccaggcgccctttgaggtcaaaggcttccgtctttttgacaaggtagcctaccagggggaagaaggctttangaagatcaccgtggaaacgacctccttcgacatgcagctgctgaagaattcagacattgcagggaaagagtaccaagagggcgaacagctcggcttctggaacgtccgcgagtacgttcttttcagagacgggcacgtttgtcagcattgtcacggcagatcgaaagacccggtgcttaatgttcatcacttggagagcagacgtacgggcggtgattcgcccggcaacctgattacgctttgtgagacgtgccataaggcactccaccgcggtgaaatcacgctgaaggcaaagcgcggacaatcattccgtgcggagaccttcatgggaattatgcgctgggaggttttggaccgcctgaaggcgtcacattcaaagctagaggtgcaaaacacctacggctaccgcaccaagcacgcgcggatctcgaacggcattgccaaatcacattgtgcagacgctttctgcatcgccggaaatctcggcgccgaaaggctcggcgaattcttcttccagaagcagacgcgccggaacaaccggcagattcataagctttccatcctcaaaggcggcattcgaaagcgcaatcaggctccctatgagatcaaaggcttccgcctttttgacaaggttgcctgccagggagaagaaggcttcattttcggccgtcgatcatccgggtactttgatgttcgaaagcttaacggaacccacatttcagcaggcatcagctgcaagaagctgcgtctgctggaaaagagacaaacctatttaacagaaattcgaaaggagaaggcgcttcctcctctgcctgaaggcaggggtctccgcgcctaa

SEQ ID NO: 829 - DNA, 246 bp, Parasutterella excrementihominis
  source 1..246: mol_type = other DNA
gtcaactacctcggcctaaaggccgaggtttgaaaaagcctctagttgactagcctcagtctgctgttcggggactactttggtcgggaatgcacaggcaccgcgggatgcagatcctagtcccgcgctctgcggccgatggttaaaagctctgagaggtaggagcggtgctgtcggcttgaaaccccttccaacattggcgaaggatcacaaccggtcgaaagaccgaggagataaaacttgaaa

SEQ ID NO: 830 - DNA, 1812 bp, unidentified
  misc_feature 1..1812: note = Human gut metagenome
  source 1..1812: mol_type = other DNA
atggtgtatgtacaggacatagatggtaaaccgatgatgcctacgacaaggcatgggaaggttaggcgattgctaaaagacaacaaagcggtcgttgtgaacacatgtccttttaccatcaaattgatgtacaagacatcagattacaaacaagagattgtgttaggcgtcgactcgggaaccaagcatgttggtttgtcagctacgacgaaaagcaaggagctttacgcaagtgaggttattctaagaagtgatgttgttgatcttctatcaacaagaaggggattaaggaggactagaagaagcaggcttaggtatagaaagcaaagattcaataatagggtaaaatccaagaaggatggatggattgctccatctgtccgccataagattgattctcatgttagaattatcagttttgtatattctatactacctgtctcaaaattgattgttgaggtagcccaatttgatactcaaaagatcaagaatccagagatatcaggtaaagagtatcaggaaggtgagcaattaggattttggaatgttagggagtatgtcttagcaagagacgggcataaatgccagcattgtaagggtaagtcaaaagatcctatccttaatatccatcatattgagtcaaggaagataggaggagattcaccatccaatttaattactctttgtgagacttgtcataaggaatttcataaaggaaatatcaaattgaaagtaagcagaggcaagtcacttcgtgacgcagccgtcatgggaatcatgaaatggaagttgtacgaggagttaaaatccagatacgataacgtttcgatgacgttcggatacataacaaaatataatcgtataaaccatggaattgaaaaatcccatgtatccgacgcttttgtgatttcaaggaattttaattcatgtaggcttggatattattacaaacgtaaattagttcgtcgccataaccgtcagattcataagatgaaaatattgaaaggaggaattagaaagcgaaaccaggctccttttaaagtttttggatttaggttatttgataaagtgatgtttcaaggagaagagcattttatttacgcaagaaggctttctgggcaatttaatattcgggatattaatggagagaataagaaagatgtatcttgcaagaaattaaaatatgtcagccggggcggattaaagcttgaaaaggctgtagaggtatggaagcctgatatagaaggaagcgtatgtatagatgtcggcgcatccacaggaggttttaccgactgtatgcttcaaaacggcgcgaagaaagtgtatgcgatagacgtaggaactaatcagcttgcatacagcctccgtcaggatgaacgtgttgtatgcatggaaaaaaccaatatccgctatgttacagaggatgatatatctgagaaagcggactttgtaacaatagacgtcgcatttatttcactgaaaaaggtgcttgagccggtgtataagcttatgcacaaagaaagtacgatagtatgtctgataaaaccgcagtttgaagcaggccgtgaaaaagttggaaaaaaaggcgtagtcagggatcaaacggtgcatcttgaggttgtaaccgatattataaaatatgtcgatggacttggtttttacatacttggacttgaattttcacctgtaagaggaccggaaggaaatatagagtatcttatttatatgaagaaagacgatgaagctaatgataccggatactggcttgatacggcaagtgatgttgtaagcagagccaattctgcactttag

SEQ ID NO: 831 - DNA, 266 bp, unidentified
  misc_feature 1..266: note = Human gut metagenome
  source 1..266: mol_type = other DNA
gttgaaattcatttaatattttatatatatctatataggatcaggttattagcctaagtcttgaaataaagactacgttattggagaatatatagttacctacggatgtttatccaagtccgtagctctaaggtaggtgattaaacagggattgtatttgggttccagtgttgcctatataaaaccttcaataacattggcgatgggtactaacagggttttgccctgacttatgttgaataaacattgaattagtttgtaaaatg

SEQ ID NO: 832 - DNA, 1320 bp, unidentified
  misc_feature 1..1320: note = Ga0307928_10013462 JGI
  source 1..1320: mol_type = other DNA
ttgaaaaacgtaaacagagtttttgttttaaatcatgacaagacacctcttagtccttgtcatcctgcaagagcaaggcaacttttgtttaaaggtaaagcagcaatttttagaaagtacccttttactattattttaaagaaccaaaaagttaatcctaagtttcaaaatactcaagttaaaatagatcctggaagtaagaccacagggttagctattactttaaaaggaaaaaataaaggatggatcttaatctgggctgctaatttggaacatagaggacaatatattaaaagacttttagaaaaaagaaaaaatgttagaagaagtagaagacatagaaagtgtagatatagaccctcaagatttttaaatagaacaaggaacgaagattggttagctccttctattttaagtaggattaataatgttattgtctgggtagaaaaacttcaggaattttgttacttaagatcttgtattatggaagtagcaagatttaatatgcaaaaaatgatgaatccagaaataagaggagtagagtaccaacaaggaactttacaaggatatgatgttagagaatacttattagagaaatatcacagaacttgtatttattgttctaagaaaaatgtacctttggaaatagaacatgtagttccaaagtctaaaggaggaagtaatagagtatctaatttaactttagcatgtaagatttgtaatcaaaggaaaggtaatcaaccaattgaatttttcttaaaaaggaagccagaacttcttagaaagataaaaagaagtttaaaagtatctttgaaagatgcagcagcagttaacattattagaaaaaggcttagaaaggaagttgattactgtattgaaactaaaacctcaacaggtagtataactaagtttaatagaacaaagcaatattacaagaaagatcattggatagatgcagcttgtgtgggaaaaagaagtggcagaaacgtaagtattccagataattttcaaccacttttaattaaagctatgggacgaggacgtagacaaatgtgtttggtagataaatatggatttccaagagctaaatctaaaagtagaaataaaattattaaaggttttcaaacaggagatattgtaaaagcaattgtaacagaaggtaagaaagttgggacttatgttggaagaatagcagttaggaacaagggtacttgtgatatatctaccaaagaaagtttaattcaaggcataagtttaagatattgtaaattgctacaaaaaattgatggatattcttataaacttttaactggaggttag

SEQ ID NO: 833 - DNA, 266 bp, unidentified
  misc_feature 1..266: note = Ga0307928_10013462 JGI
  source 1..266: mol_type = other DNA
gttaatcattacgtaccacagaattataattctgtgactgattaagtcgacgtaatcagactaagtacttagagtactacgttaaggaagaatatataggtactttggaatgcttctccagttccaaactctacgattaggttttaaacagagataaggtcactgtctcagtgaatctaatactaaaccttccattaacattgtcgaggagaacataacagattttatctagtaggaggaatcctaaattgaaaaacgtaaacaga

SEQ ID NO: 834 - DNA, 1329 bp, unidentified
  misc_feature 1..1329: note = Lactobacillus harbinensis DSM 16991
  source 1..1329: mol_type = other DNA
gtggtgactgaggtggttcaaaatagaatatttgtcctcaatcaggatgggcaagcattgatgccctgtcgtccgtcaaagtgtcggcatctgcttcattgtaatcgtgctatcatagtcagccatactccgttcaccatccagttaaagtatcagtcggggtcttgcttacaggacgtgtcaattggtgttgattcaggtcagcgacatattggacttgcagtaacgagcaacgaaaaagtgctttggcaaggagaagtgactctgcgacaaaatgtaaaaagccttttagatacacgtcacatgtatcgacacacacgtcgacagcgacacacacgatatcgaatggtacgcttctcgaaccgaaagcctagagatatccgcttgggcgtgtggttaccaccatccgttcgacaaaaatgcgagcacaatatccaatggattaatcgagtgcgtaatgttttgccacaagctgatatatctattgaagtggccaaatttgacgtacaaaagttgaaggatccgaccattcacggtatcgggtatcaacaaggcgacgcctttggttatgaaaatgtgaaacaatatgttctagaacgtgatgaacatacctgccaattgtgtaaacgcaaaattgataccgagacgaagaaaacattgaagttgcacattcaccacatcgtttacaggagtaaaggcggtactaacgcagccacgaatctgctgacggtatgtactaagtgtcacacagatcgaaaccatagagccggcggccctctttatgcgttatttgagcaaaaaaagacaataccaccgcttaaaaatgccacatttatgaatatgttgcgtaatcgattgcttaccgcttttcctgaggcgcatttcacctatggctacatcacaacggttcagcgaaaaaagttgggtttggcaaaagcacattatcgcgatgctgtagcaatcagtggaattcaacaaattattgaagagccaaaatcagttgtgatgtttgatcagtttcggacgaaaaaacgatcattgcatgaagcaacggcacgcagggggcgaaagcaaaagaatgttactcaaaaacgagtgaaaaagaatacgaagaaagtaaaaggttggtgcttgaacgattatgttcgaatcagtgatggacgttgcgggttcatcaccgggtttagtggtctctggatggctcatattagggatcgtcagggtggtttggttaaaaagctcgtgagtctgactaagcttgcctttcttcatcacacaggaacttggaggtgtacaactttaccaacagatgtctatgacatgcaataa

SEQ ID NO: 835 - DNA, 341 bp, unidentified
  misc_feature 1..341: note = Lactobacillus harbinensis DSM 16991
  source 1..341: mol_type = other DNA
gtcagttacccacggcgaaagccgagagcaaatatgttcttaactgactagcctctgtctagcaatctaacattaccagactacgttaagtaggtgcacaccttcagatggtgccctagtctgtcgcactgtgagggcaacgtaaacagcggtgagggtgtagccgcagtcgaccctgacatcatccagtgccgtctccacaggcacggaccctatttaacattggcgaagggcaatccacacatgttagtctcattgctgcatgtgatcagccccttacttgaaggttggctgataaataaaaaaacaaaggggtggtgactgaggtggttcaaaataga

SEQ ID NO: 836 - DNA, 1266 bp, unidentified
  misc_feature 1..1266: note = Human gut metagenome
  source 1..1266: mol_type = other DNA
atgcgcggtcagcccttgatgccgtgctcgcctgcaaaggcgaggcatctgctcaaggcaggcaaggccgcggtgagacgacgaacgccgttcacgattcaacttcgaatcgccaccggtgaaacgaagcagagcgtgacactgggcgttgacgccggcgcaaagcatgtcggcctttccgctgcgacggaaaaggaagaggtctttgcgtccgaagtcgaacttcgacaggacatcacggggcttctggctgctcggctctcactgcgtcgtgatcgacgtcatcgcaagacgcgctaccgtgcgccgcgctttttgaaccgtgtccgatcgaaacacaagggctggcttgcaccgtccgttgaaaaccgcattcaggcgcacatgtcgcgcattgatgcgatctgcggactgctgcctgtcaccaagatcgtgatcgagacggcatccttcgacattcagaagatcaagcatccggatgtcgagggcacggactatcagcagggcgatcagctcggcttttggaacgtgcgtgaatacgttctctttagagacggtcacgtttgccaacactgtcacggttattcgaaggacaagatcctcaacgtgcaccacctcgaaagccgccaaaccggcggcgatgcgcccaacaacctgattacgctctgcgagacctgccacaaggcctgtcacgcagggaagatcaagttgaaggtcaagcgcggtcaatcgttcagggcggaagccttcatgggcatcatgcgttggacattgctcgatcgcatgcgcaaggcgcattctggtttgcctgttgagaacacctacggctatctgacgaagaacacgcgcatcactctgggactccccaagacgcattgcgtcgatgcatactgcatcgcggggaacctcaaggccgtacgaagaggcgtctgcctccatcagcgacaggtgcgcaagcacaaccgtcagattcacaagtgtacggtgctctcgaagacgcttaaggacggcacgaagatcggataccgaaagctcaatcaaacaccgcatctggtcaagaacttcaggctcttcgacaaggtgagatgtcttgggcaaaccggcttcatcttcgggcgaagatcgtccggctacttcgatgtccggaggctggacggcgtaaagctttcttccggcatcagctacaggaagctcacgcttctcgaaaagagaagcacctatttaaccgaacttagaaaggaggacggcgcttcctcccctgtctga

SEQ ID NO: 837 - DNA, 277 bp, unidentified
  misc_feature 1..277: note = Human gut metagenome
  source 1..277: mol_type = other DNA
gtcaataacccctgtctgaagacagaggcttgaaagagcctttattgactagcctcagcgcccctctttcgagaggcgctacgttggttgggaatgtataggcaccgtgggatgtacatcctagttccacgctctgcggcctgtgattaaaagctccgagaggtaggagcggtgttgcaggcaccaaaccccttccaacattggcgaaggatgtcaacccggccttcgggccgtgtaggcggaacctgcgggtatccgcaaaggagatgctttgaaa

SEQ ID NO: 838 - DNA, 525 bp, unidentified
  misc_feature 1..525: note = SAR324 cluster bacterium isolate NORP136 Contig_source1382A_8018,whole genome shotgun sequence WGS
  source 1..525: mol_type = other DNA
ctggtaacattagcgaggcacacattacccggcttgccgggattctcttcaaggagaaaagatgcaacgagtattcgtgctcgatacaaagaagaaacctttaaccccttgccgacccaagagagcaaaacaattgctaaaacaaggtatagaaagccccgcttccttaatagaacactgcctcaaggctggctagctccatccctgctcagtagggttttcaacatagaaacatgggttgaaaagttatgttgttttgctccagtcaaagcgatatctcaagagttggtacgcttcgacatgcaacagatggagaacccggaaatttccggtaaggaataccagcaaggcactttagctggatacgagacaaagcaatatctcttggagaaatggaatcgtacttgtgtctattgtggagcgcaaaatgtacccttggaaatcgagcatatcattccaaaaagtaaaggtggatccaatagggttagtaacttaactcttgcctgtgtgtcttgtaatcaaaag

SEQ ID NO: 839 - DNA, 246 bp, unidentified
  misc_feature 1..246: note = SAR324 cluster bacterium isolate NORP136 Contig_source1382A_8018,whole genome shotgun sequence WGS
  source 1..246: mol_type = other DNA
gtcaactacccctccctaaagggaggagcttgaatagctcatgttgaccagcttaagtttttcgaaaactacgttaccttggtgatcttaccctggagtgcttgccagctccaggctctaaggttggatgttaaacagactgagggtataggtcagtgcattcagtgtaaaaagccctggtaacattagcgaggcacacattacccggcttgccgggattctcttcaaggagaaaagatgcaacga

SEQ ID NO: 840 - DNA, 1074 bp, unidentified
  misc_feature 1..1074: note = Ga0395987_006804 JGI
  source 1..1074: mol_type = other DNA
atgttacgagtacctgtggtttcaaaagacggcaaacccatcagccctacaattccatccaaagcaagaaagatgatcagagatggcgtggctacgccgaagcgcgacaagctgggcaacttctacatccaaatgaacatccctgtcggcgagaagattccccacgaaaccatcgccggcatcgaccccggaaaactctactccggcattgccgtccagaccccgaaagcaactctctggatcggacatctggtacttcccttccctgaagtcaagaagtccatgaaaaaccgaaagcagcttcgccgtgcaaggcgctaccgcaaaactccccaaagagagtgccgcttcctgcaccgcaccggccacaagatcccgcccagcattcgatctaaccgggaaatggaataccgggtgctgaccgagcttcgtaaaatctacccgattgacgaagtagtctacgaagtcgtcaaggccaacggttccaaatccttctccccggtgatggtgggccagaagtggcagatcaaccgtatctctaagatcctgccggtaactattcgtgagggttgggagacatcaacgatgcgaaaacatctcggccttgagaaaagtagaaagaagtccgaagcatcgccccagacccacgccgttgatggcgttgcgctggcagccaccaacctgttgagttacgagtcatttgtcaaagccaacgaacacggccatctctggtcaggcgaatgcactgtgaccgatgccccattctccatcatccaaagaccactgctctttcgccgcagtctccacgtgcagaacttcgccaagggcggcgttcgtaagcgtcacggtggaacaacgacaccctacggcttcagaaaaggcgactacgtggaagcagaaaaggccggcaggattgtccggggctatatttccggctacagcgaagccaaaggcgtgttaagtattgctgatcatcaatggagaagaatcgggcaattcactccatcaaaggtgcagctgttgcagagatcgtgtcatttacttgtagaacacaaaaattgcgtcagcatctga

SEQ ID NO: 841 - DNA, 270 bp, unidentified
  misc_feature 1..270: note = Ga0395987_006804 JGI
  source 1..270: mol_type = other DNA
gtcaactacccccgcttagcccatccggggcttgaagcgggggcttgcagggtgcagtcccgcatcgtaagagctgactaggccacgagaaattcgtagcggcatctgcggaccaacccagtagggcgtttttcctaactctattttcggatgggacgagactcacccgccaggcaagcagcaatgcttgcgacacagccgcagattgcaaggtcgaaggaacgtcgtaaggcaaatactccacaaggagggggcttatcccaatgttac

SEQ ID NO: 842 - DNA, 1344 bp, unidentified
  misc_feature 1..1344: note = GENOME_ACESSION: mgm4743561.3MG-RAST
  misc_feature 1167..1320: note = MISC_FEATURE - Any "n" represents any nucleotide
  source 1..1344: mol_type = other DNA
atgagagtattagtggttggcgcaaacggcatcggcttgatgccgacaacgccaaggaaagcgcgggttcttctgaaatgccacaaggcagttgtatgtcagaagaaaccgtttaccatccgtctgaactataagacgggttgtgcgacgcagcactgcgagcttggcatagacacaggtacccagcatatcggggccggtgtcatggtcgggccggatgtgctccgaaaggatgaatgggtgcttcgttccacaatgacaaaacggtctctgatagaaacttgtaagtcaatgcggagaggcaggcggtatagaaataccggctaccgtcatccgaaattccgtccgcataccaagaggacatactcggagaaaccggtgcttcggcacaagcataaaacacactggatcgttaagacaaacagttttaccacaaaccgggaagcagggtggctgccgccttcggtgcagtcgaaggttgaccaccatatccgcaccatcgaaaaatacctgaaagctctgcctctggacacgcatatgacgctagaacttggacgttttgatatgcagaagatcaaaaatcccgatatcgagggaatccagtaccagcagggacggctctaccagtatgaaaatattaaggggtatgtccttgcacgccagcattacaaatgtgcgatttgcgggaagaagtttggctcaaaacggaaggacggttccatcgtcaagatgaaaatgcatcatatgcattatgtctcaaaaggggccacgaacaatcctgatgagtatcttggagtttgtgaccagtgccatacgccggaagcgcatgataccggggcattggaaaaactccgcaggaaggtaagggaccaggccaggggcatgcgcgacatgacaatgatgaacattgtcaccgcccgtctcaaaaaggctttcccgaaaagcgacaaggtctcctacacctacgggaacatcaccaatgcggaccgtaaacagatgagacttccaaaagctcatgcgtatgacgcagttgcaatcgccaaacacgcagccatcgtgcatgataatgattacacagtgcatgacgacgaaggggaaaccatgtatgtgcagcaccggaaaaagaaacggtccctgcatgaggcaaacccgcggaagggcagaaannnnnnnnnnnnnnnnnnnnnnnnnnnnnnnnnnnnnnnnnnnnnnnnnnnnnnnnnnnnnnnnnnnnnnnnnnnnnnnnnnnnnnnnnnnnnnnnnnnnnnnnnnnnnnnnnnnnnnnnnnnnnnnnnnnnnnnnnnnnnnnnnnnnnnnnnntaccaatacgtcgtgccgtgttga

SEQ ID NO: 843 - DNA, 322 bp, unidentified
  misc_feature 1..322: note = GENOME_ACESSION: mgm4743561.3 MG-RAST
  source 1..322: mol_type = other DNA
ttgaatagccgagcatggtcgtaagactgtgcaaagctgtttggtgacagtatccttcgggatacagatgactagctgaagccggacacattgcagaccggctagattccaatcgtaacgacatgaatgcatgatgccctagtgcagtaatgtccgggcaacatatggaggtgtgagaagccgagaatgacccgatgtttcaagcggctgggattgcagcgaagggcaactcgcgagtacccgcaatgggggaaaacaggcgacgtggagacacggacaggccggtatcgtgcctgtcattatcggaaaggaactgatgaga

SEQ ID NO: 844 - DNA, 1383 bp, unidentified
  misc_feature 1..1383: note = Ga0172381_10008462 JGI
  source 1..1383: mol_type = other DNA
atgtacgtaccagtggtagaccaaaatcaaaaaccgttaatgccaacgattccaagtcgggcaaggaagtggattaaaagtggcaaggctactccgttttggaagaaaggtgtattttctgtgagattaaatgtggaaccaagtgattctaaaatacaagagattgcagttggtgttgaccctggttctaaaaaagaaggatttacggttaaatcagaactacatacttacttaaatattcagacagatgcagtaacttgggttaaggacgctgtaaaaactcgtagccagatgcgtagaactcgtaggggccggaattgtccacatagactttgtagaccgaatcggaatatttataaagtttttatgccaccatctacaaaagcacgttggcaatggaagttacgaatcctaaattggttaaagaaaatatacccgataacttgcgttgtggttgaagatattaaggcgtggacttataaaaatgctcgtaaatggaatgtcagattttcaccattagaagttagtaaacagtggttttacgatcaaattaatgtgcaatttaaacttgaaactaaacaaggatacgagacaaaacaaatgcgtgatgagtttggtttgaagaagtctagtaataaattatctaacaaatttaatgcacactgcgtggatagttgggtgttagcgaattggtttgtgggtggtcatacaaatgttgataacaaagacatgctcttaatcacaccaattcaattccatcgtaggatgttacacgcattgcaaccggttaaaggcaatatccgtagaccttatggtggaacacgaagtttaagttttaaacgtggtagtctggttgaacatattaagtacggattgtgttttgtgggtggatttggttctattcgattgtggttggtattcggaggaattactatgagtactaacctaatctttattgatgtggcggggggcatttgtcagttagttattggtcaaaattatcgcaatttgtaccaacaaccacagaccaaagaatctacaaatcaatgcagacattttgcggcacctccttctaaaaatcgctttttaccgtttataaaaagcattctcctcgaagtcggttattttgtcccccgccacttctcaattataaaccatcctgtgtattgttttgtgcaaaagtcattatctattgtatcatctaagcttttactgcataatccccttatagaaaaaataagggggattaagtcatgcgccttttacggtctatcgggttattatttttacttgtttttgccactaatgcgttatacgttcaaggttcgtatctactccataatcacactcaagggatgtggaacgctgtgtgggatatgttaa

SEQ ID NO: 845 - DNA, 226 bp, unidentified
  misc_feature 1..226: note = Ga0172381_10008462 JGI
  source 1..226: mol_type = other DNA
gtcaattaccgtcgcctaaaggcggacggcttgaaagtgagacagaagccaactgttaaattttcaacgtaagaattagactagacaaacccaaagtggagactgaactaactgatcgtggtagatcgaactacgctacggatgccaccctagtctgtagtctctaggttagtcagaatgtcaaagggttgtagaaactcgcaaagaggtttaaaacaaaatgtac

SEQ ID NO: 846 - DNA, 1275 bp, unidentified
  misc_feature 1..1275: note = Ga0268280_1002972 JGI
  source 1..1275: mol_type = other DNA
ttgattaaagtttttctgcttgacaaatccttaaaagcgcaggatccggttcacccggcggtagcccgtatccttctcagcgagcgcaaagcacgaatacatcgtgctcagccgttctgcatccgcctccgcgtgtcttctaacaaagccacgcatggtcttcaactcaaattagaccctgggtcaaagacgacaggcatagccttggtaaatcatcaaagcggcgaagtcgtgtggggagcagagctgacgcatcatggacagctgataaagaagaaattggagaagcgcttagcacaacgccgtgctcgtagatcacgtaagacacgctatcgccctgcaaggttcttaaacagaactaagccaaaaggctggcttccaccttcgctagaacaccgcttaggtaacgttatgacttttgtgcatcgcttgcgtaagcttgctaacattactggaatctcgctagagcttgttaagtttgatacgcaggctatgcaaaatcctgaaatctctggtattttatatcagcaaggtgagctagcaggttatgaaatgcgtgagtatcttcttgaaaaatttaatcgcacttgcgtgtattgcggagctaaaaatgtaccgttgcaagtggaacatgttgttccaaaggctttaggtggttcaagtcgcattagcaatctaacacttgcgtgcgatgcttgcaacaaagctaaaggtgctttgctcatcgaagaatacttgaaaggcaagccagcgctactcaagaaaattaaagcgcagctgaaagcgccacttaaggacgctgctgctgtgaatgcaacacgctgggaactttggagacgcctgtcggctttaggcttaccagtggaatgtggctcaggcgctttaacaaaatttaatagaaccaagcagggcctacctaaagctcattggttagatgctgcttgcataggtaataacacacccgctttgaagttaattaaagtggagccactttatataaagtcttacggacgcggttccaggcaaatttggcaaatggatgcttctggttttcccaaacgttcacgaactaaagaaaagacaaagtttggttttcgtactggcgattgggtaaaagcaatagttcctaaaggtaagcatatgggggtacatattggaagagtaggaactagaagtaaacccagctttgctgtaggtaaagtagatggaattaatttaaattgtattttacttatgcagcgtaatgatggttacgaatatagttatgggacgtag

SEQ ID NO: 847 - DNA, 282 bp, unidentified
  misc_feature 1..282: note = Ga0268280_1002972 JGI
  source 1..282: mol_type = other DNA
atcttcaaagactgatacttaacaaaactgtcgaggttgtaaccttctgttaagtatatacttaacatgggttacccgactcagtgtttgcagtttaagcaaacactacgttatttcggttatgacaccatgggatgcttcaccagttccatgcaactgtcgcctgcggttaaacagggtaattccagtgctgcaggcttaacaagccattataacattgtctaggtgacgtgggcttaggcctatatacccgctaatcacggagagtattttgattaaagt

SEQ ID NO: 848 - DNA, 1362 bp, Lactobacillus salivarius
  source 1..1362: mol_type = other DNA
atgatgtcagaaaagaaaaaagttgattatatctatgtagtagactccaacgacacaccactcatgcctacttcacgtttaggtatggtgcgtcgttggttgaagacaggacaggcaagatggtacggaaatagtcgcaagactatccaatttgttagacctgttactactaatactcaaaaactaacactaggagtagatgctggttttcacttaggtttatcagttgtaggtaatcagcgtgaatattatgcagctgaaagtctaagaaaatcagaaaaagatcgaattactagtcgaagagaattaagacgtactcgaagaggacgtttaagacatcgtaaggctagatttaataatcgtagacgcaaagacggttggctagttcctagtattcaacacagactagattttacgattaaagaaatcaaacgcttatatacgtttttacccattactaatttagtcgttgaagttacaccgttcgacaaccaaaaactactaaatccagatattaaaccttggcaatatactcaaggcaagatgcacggttttaagacgattaaagattatcttctagctagggataattatcgtgatgctttagatggaaaacaatatccagctagccaattaagagttcatcacttagttcaaagaaaagatggtggctctaataaaccagataatttggttttgttatcagatgtaaatcacaatcaagctaaccataataacggtatcttagctaagttgaaagaaaatcgtcaaaagaccattgattatcgtggagcttattttatgagtgttttggcaacaagattaagcgattattttgaacattatacaacaactcaaggttatctaaccgctaacttaagacaaaagtataagattgaaaaatctcacttaaatgacgcttttgtgattgctggcggaactgatgtaacgcttagaatgaacaacgtttactcaaggcaaaaactaagaaacaacaaccgaagtttacagaagttctatgatgctaaatatgttgatagccgagatggtaagaaaaagactggtaaagaattaagttcaggtagaattaaacgttccaaagagcttaattatgataatttaagacagtttagaaaagaaaaagttaaaaaaggtcgtgtttcgattagacgaaatcactaccagttaagaccacatgatgttgtgctaaatacaaagactaataagattgaaagagtcgctagtgttcaaaacaatggaaaagtagttagatttcaaactggtaagacttgttcaattaaaagtgtagttagtttatatcatgtgaatggaatattagaaaagaaaatggaaaatatttag

SEQ ID NO: 849 - DNA, 295 bp, Lactobacillus salivarius
  source 1..295: mol_type = other DNA
acaagttaacagaaccgccgactaaagtaggtgacttgtagaaatacaagctggttgattagcctaagttttaagtaactacgttagggttgaatagataggtactttggaatgccaccctagttctaaacactatggttaattattaaacagagctgaggttcaggctcagtgtgattaacattaaaccaacctataacattggcgaagggtacacacgtgccaactttatgttaggtgcgaattatgattgaaaggagctggcatgatgtcagaaaagaaaaaagttgattat

SEQ ID NO: 850 - DNA, 1467 bp, unidentified
  misc_feature 1..1467: note = Ga0233437_1033046 JGI
  source 1..1467: mol_type = other DNA
atgttagtgtttgtgatggacaagaatggtcgaatgggacatccgactagtaagtgtgggatgattcgacggaaattaaaacaagggaaagcgaagattgtacatcgctttcaagacacgattgttgttaagatctttgatctagttattgatgaagataagacagtcgattgtaaatttattctagggattgatcctggatattcgaacattggttactatgtgatcaaagttgctgatggtaaagtgtatgacattctttctggagaattgaaaacgagaacagagaagatcaagggtttgttattagacaggaaaatgtatcgaaatggtcgtcggagacatcgtcgaaaacgtgtccaacgattacatgggtcagtaaagtttcgacacccaagatggaagaacaggaagaaacatcagtttcaaccaactcatatacatcttattcagacgcatttgaatttgattaagaagatacattcgattgtgaatttcgatgaaattaatatcgagtacttcaagtatgattcacaaaaggcactgaatccagatattaaaggcgttcaataccaaagaggtatacagtatggtttcgctaatactagtgcatatgtattagatagagatggttataagtgtcaatcatgtggcgaaacagatattagtttgaaagctcatcatattgtcgagagaactgataatggttctgatcgtccagaaaatcttgtaactgtttgttataagtgtcaccatgagattcatactggtagaagaaagtgtcctgtgggtctaataggtaatagcactcaatttcgagattcaggtgtattgaattcgtgcatgccagcattattccgattgttacaagatagtaaatttatggtaagaaagactttcggtagtgctactaaagtgattcgagagtatcttgatattcctaagacacatcgaacagatgctttctgtattgctatcgaacaactgagtgaagatattaaatttgatgactctacaggtaatgttgttaattatcaacaattccggagacacaatcgaaagtttgtaaatcgatttgaagatcgtaagtattatattagtgggattcgaactgttcaagcaaggaatcggaagagacgaagtggtcaagataagaaagatgatctatcattagaagatttccgtcagacaacatttaatgggtacgagaatttaatcgctaaagctggtggagtaattatgaataatcctcatacttatgttccagacaaacgatccggaatgaaatttcgtgtaggtaatcaatataagttcaagaaaaaaattcgaacaattattagtactagtaatatccagcaacgggtgttctatgaaaagattgagaaaacacgtttatttgatacgtttacacaaattcgaaagcatggagaacatcttttgtgtaattcgggaatcgttcccgtttga

SEQ ID NO: 851 - DNA, 286 bp, unidentified
  misc_feature 1..286: note = Ga0233437_1033046 JGI
  source 1..286: mol_type = other DNA
gtataatcatgcaagtaaaaccgtgtggatttcgaatagcgaagcattataaatatagattagtcaactactgggagcatagtactcaggattgacacagacaatgaactagagttcaccggtgagtgccactcccagcttgctgtaagtattattttaaaaactggaggtttgaatcctcattgtacgaaagtaggtaacgaaatcgtatattactctagctcagtcgagggagactggtttcgactaactttaagttaactcgatcaaggagtttcaaatgtta

SEQ ID NO: 852 - DNA, 1275 bp, unidentified
  misc_feature 1..1275: note = Ga0209175_10000039 JGI
  source 1..1275: mol_type = other DNA
atgtctaactatgtttttgttcttgataccctcaaaaaacctttaactccctgtaagccatcaatagcacgaaagttgttaaatgctggcaaggcggctgtgtttcaatggtatccatttaccatcattttaaaaaaggaggttgatgccaatcctgaaccactggaactgaaactagatcccggttctaaagtgacaggaattgcactaaaacaaggcaacaaaattatttttgctgccgagttgattcatcgaggatacgcgattaaatctcgtcttgattcccgtcgcgctattcgacgttctcgacgaaaccgaaaaactcggtatcgtcaagctagatttcttaatcgcactcgttcaaagggctggttaactccctccctacaacatcgagtagaaacgacgatgacttgggtgaatcgcgttcgtcaacttgcacccattggatctgtgtctcaagaattggtgagatttgatctgcaaaagatggagaatcctgaaatttcagggattgaatatcagcaaggggaattacaaggttacgagattcgagaatatctacttaataaatgggagagaaaatgtgcttattgtcgggcagaaaatgtgccgttacaagtggaacatattaaacccaaagctaaaggtggaactaatcgaatttccaatctttgtctttcttgtgatatgtgttaccagaaaaaggggactcaagatattgggcaattcttagcgaaaaagccagaagttcttcaacgaattttgtctcaagctaaaagacctcttaaggatgcggccgcggttaattcaactcggtgggcgctgtttaatcgactccaagaaacaggtttacctgtctcaacgggttcaggtggattaactaaatttaatcgagtgcgattaggtttacccaaatcacattggttagatgccgcgtgcgtgggaaaagttgattcactagagattctgacaactcaaccattatgtatcaccgcgaaaggatggggatgtcgccaaatggttcaaaatgacaaatatggttttcctcgaaagaattatcgggctaaacaaaaagtgaaagaatggaaaacgggtgatatcgtttctgtaatcaaaggaaaatgggcaccaataacaggaaaacggatcaaaacggttcgatttcagggtaattttgatgtccgattagatcgctcaaccgtgatctgtgtatctcgaaatcacctcaaggctattcatcgccttgatggatacgattatacctttgtctaa

SEQ ID NO: 853 - DNA, 294 bp, unidentified
  misc_feature 1..294: note = Ga0209175_10000039 JGI
  source 1..294: mol_type = other DNA
acgcgtcgatctgtccagattcctgacaagcaattaaaatagggacttactgaaaccctagacaattcgggacaatccatgaattctaagtaagtccaggctcaggatcagaccaccgttatcgggaagcgttaaagttcctaccttgggatgcttgccagtcccaagccccttaaccgaacagttaaacaagcaagggtttattcaaagctagtgctgtttggatagtaccgactgataacttagccgaggcacacattactgaaaaggtcagacacaaccatgtctaactat

SEQ ID NO: 854 - DNA, 1557 bp, unidentified
  misc_feature 1..1557: note = Ga0306922_10010477 JGI
  source 1..1557: mol_type = other DNA
atgcttcctcagtcccaggctcttcgagttgccgctgcagacaagccagggtcagcgcgaaacgggcgacaacagacggcttgcgctcaacctgttcgaggggaaaagaaaccggcgcctcaaaacgccgagcgcggggtaacccgcacgtttgtattatccaacgcagggcatcccttgatgccgtgctccaatgccagggcgaggattctgattcggaaaggccgagccagggtttaccggcttttcccgttcacgattcagttgatcgacagggcatcaggcgacattcaacccgtcgctataaagcttgaccccggagcaaatacgactggtgtggccattgtacgcaaggacccaaacgattcgaccagacaaagcgtactacacctcgcggaaataacccaccgtggtaacgcgatccgcaaacacatgatcaaaagggcgatgttcaggcgtcgccggagaaatgctaatcttcgatatcgcgcaccgaggtttgataaccgaaccaagcgcgaagactggctgccgccgtcacttcaaagccgtgtcgacaatgtggcctcctggctcaaccggtacaggaaactcgcgcccatcacatcaatctacgttgagtcggtcaggttcgacatacaggccttggaaaacccctgcatcgaaggcttggaataccagcgtgggatgttgttcggagcggaactctgggaatacctgtttgagaaatgggggcgaaggtgcgcgtactgcgacgccgaaggcctggcgctggaggcggaacacatcgtgcccagggtttgcggcggatcgaatagggtcagcaacctgacgcttgcctgccgcaagtgcaaccaacagaaagggtcgcagtcgattcatgtgtttttagcagatgacccctcaagactggcgcgcatcttgagttacaccaaaaaaccgttatcgagcgccgcagcggtaaacgttacccgaaaatccattaaccgggtactgtacgggactggcctggaggttcagtgctcatcgggcggccgaacgaagttcaatcgcacccggcttggcattccaaagacccatgcgcttgacgccgcttgcgtcggggaactgtcaaaacttgagggttggaacgttcccattctctcgatcaaagccaccggacgcggaagctaccagcggactcgtcttgacagttttgggtttccacgaggctatctgacgcgccagaaggctgtgaagggttttcaaacgggtgacttggtaaaggcgacaatcccaaaaggaaaattcaacggcacacaccaaggccggctagcgataagggccagcggttattttgtaatccagagctcagcggggaacgtcggaaccaactggaaatactgcaaacatctcatgcgaaacgacggttacacctacgaaatcaaaccatctccggccacccaaactcttcctagactcgaaacattccagttattgagtcgaaaaacccgtaaacaagaacacgcacacaactcagtaaataacaaaaacaacaacacgttatggcaaatctga

SEQ ID NO: 855 - DNA, 257 bp, unidentified
  misc_feature 1..257: note = Ga0306922_10010477 JGI
  source 1..257: mol_type = other DNA
gtcaacgaccgcccgctaaaagcaggcggcttgtgagctaatcgcaagcccatggttgaccagaacaagtgaaaactacgttgaacgacaagcaaaagactaaccctgggatgcttcctcagtcccaggctcttcgagttgccgctgcagacaagccagggtcagcgcgaaacgggcgacaacagacggcttgcgctcaacctgttcgaggggaaaagaaaccggcgcctcaaaacgccgagcgcggggtaacccgc

SEQ ID NO: 856 - DNA, 1077 bp, unidentified
  misc_feature 1..1077: note = Ga0393278_0001403 JGI
  source 1..1077: mol_type = other DNA
atggttccagtattagacatgaagaaaattccgttaatgccttgtacagaaaaacgtgctaggaaacttatggagaagggagatgcaaaagcatattggaaaagtggcgtattttgtattattttacaaagagagccttcggcaagaaactatcaggaagttgtgattggaattgatccaggttcaaaaagaactgggatcaccactgcaacagaaaagaaagttatctgtaatcaactttttgatactccaagcggagtaaagaagaatgttgagacaagaagaatgtttagaagacacagacgttccagaaaaactccttataggaaatgtagaaacaatagaaggataggtggcgtgccaccatcaacaaaggcaagatggggagcccatcttaaaataatagatttttggaaaaaacttattcctctcactgttgtttctttggaggatattaaagcagaaactaaaataaattgtaggaagtggaataagaattttagtccattggaagttggaaagaaatggtttgagaatgaggttgtagttcgtggatataatttctataaatttccaggatttgaaacaaaagcacaaagagtttatagagaatttcataagacatcttcaaaactaagagatacttgggatgcccataatgttgattcacattgcctttgcgaattaacagtaggagatattaaaccatattatggaattcttaaatgtgaatttttcaaatggagtagaagacaaattcatgtttttaatcctgaaaaatataaagagcaagaaggcattcctaatcttaaaaaagatgggattagaaaacaatatggaacaacaagatctctaggactaaacagaggaacattggttaaacataaaaaattaggtttaacatatgttggaggaacatcaaatgagaaaatttctttacatgatgtgaaaactggaaaaagattaactcaacatgctaacaaagaagattgtaaagttttaactaatttaagatggaggacgcaaattcctcccatggctaaagccatgggtttcctttgcgtaaaaccaaaatga

SEQ ID NO: 857 - DNA, 238 bp, unidentified
  misc_feature 1..238: note = Ga0393278_0001403 JGI
  source 1..238: mol_type = other DNA
gtcaataacccaaggctttagccttgggcttgtgaggaaaatcattcaccagaactaattcacaagggcaagaagagactagattagccaagggggaacaaaacccgataaaggcaactagggagatggtcatggtagacaacatagtatcttcaggatgttcagctagtcttgatgctctacttctcccagtatcgaagctgtagtttactaagaaggagtaatccaaatggttcca

SEQ ID NO: 858 - DNA, 1095 bp, unidentified
  misc_feature 1..1095: note = Ga0272428_1004076 JGI
  source 1..1095: mol_type = other DNA
atgcgaattccagttgttgattcaaatcaaaaacaacttatgcccaccacaccagcaagagcgcgaaagtggattcaatctggcaaggcagttaaacgctggtcagattgtgggcagttttacgtgcaactcactgtagaaccatctggacgcgatactcaggatattgttatcggggttgaccctggcaagaagtattcagggattggcgttcagtctgtaagattcacgttgtacacagcacatttaattctcccttttcaaacggtaaaggacagaatggatgcacggcgactgatgcgacgtggacgtagaggaagaagaatcaaccgccagattgaattctcaaaacgcgctcatcgtcagaagcgctttgagaatcgtcgtcaagccaaacttccaccatctattcgtgccaatcgccagttagaactcaggatcgtgtctgaactctgtaaaatctatccggttacagaaatccgttacgagtacgtccgagctgatgtggatttaacgagtggacgcaagaaagcaagatccggcaaggggtttagcgctgtgatggttggtcagaagtggatgttacaacagttggagcagtttgcgcctgtcgttaaagttgaaggctatcaaacttctaaaactcgtgaacatctaggattgaccaagaacaaaacagagaaagcaaaagctgaatttgccactcatgcggtagacggcgtaagtattgcggcatcgcactttgttgaatatcggaaatatcacagagtaaacgttgatggagctaactggtttgggactgtttcgattacgactgcatcattctttgtgattcgtcgccctccatactcccgtcgtcaacttcatctcatggtgcctgccaagagtggagttaggcgtaagtatggtggctctacaactcgtcatggtgtgcgtaaaggcgatttagtcaactccccaaaaggaattggttatgtgtcaggagacaccgaaaaacagatatccgtcagcagcgatagctggaaacggctagggcagatatcggctaaaaaagtaactttagtccgtcgctctaatggattacttgtttcttag

SEQ ID NO: 859 - DNA, 223 bp, unidentified
  misc_feature 1..223: note = Ga0272428_1004076 JGI
  source 1..223: mol_type = other DNA
ttcaccaacctcggcctcaaggcgcgaggattgtccgaaccaattcggacaacgtaagaggtgaatagcccattgagactcgatttggtacaaacttccaaacacttctctagttcggatttcctttaagcctgattggttcaggcgttgggtcaagccaagacatcttgatcgagttgggttaagagacttaaacgagtaattgggttataccaaaatgcga

SEQ ID NO: 860 - DNA, 1296 bp, unidentified
  misc_feature 1..1296: note = Ga0315294_10016080 JGI
  source 1..1296: mol_type = other DNA
atgttagtatatattattaataaagatagcaaacctttaatgcctactagtcctaggaaagctagattgcttttgaaagaaggaaaagcaaaaatacataagtatgaaccatttactattcaacttatatatggtagttatggttatagacaatcagttacattaggcttagattcaggatctaagaatgtaggtttagcagcagtaactgaacaaggaaaagtattatatcttgctgaagtagaacttcggcaagatattaaagaaaatttagcaactagaagtatgatgagacgcgatagacgaaagagaaaaacaagatatcgaaaaccaagattcttaaatagaaaaaaagcgaaaggttggctaccacctagtattagatccagaatagaatctcacgtaaagctagttactgatgtgactaaaatactaccagtaaaaaatattgtagtagaagtaggattatttgatgttcaagctttaatgaatccaaatattgaaggaaaagaatatcagaatggtattcttaaaggatatgatagtgttaaagaatatataaaagttagagataaatatttatgtcactacaaagatttacgttctgatatactttgtagtaagaagttagaaatagatcatatgataccaacgagtaaaggaggtactgatagaccaacgaatttagtttgttcttgtgctgcacataatagaatcaaaagtaatatgagttatgaagaatttactagtaagcgtctacctaagatagaatcctttaaagaaaccgtttttatgaatgtagtaaagagtcacttagtttctttgctagcaaaacttagaccagtaagtataacttatggatatctgactactctgaagagaaaagaatttggattagaaaagaatcatacagatgatgctatcgctataacaaatatccggcctaaagaatatataggaaacagttatcagattaaacaagtacgtaagaagaagagatctttacatcaaatgactcctttctctagtaagaaaggaaatccgaattcgataagattaaaaaagaatactaaagtagttattgttagaaaacttaaatggtgtttgagagataaagttagagtaggtaatcaagtaggatttatatccggatttgcccttcctaactttgatgtagtagatattaacggaaatataataagattattaggaaggaagagtgatgaagtatcagctaaaaatactcagttgatatgtcgaaataataattggcaatgttgttttaatgttgcataa

SEQ ID NO: 861 - DNA, 266 bp, unidentified
  misc_feature 1..266: note = Ga0315294_10016080 JGI
  source 1..266: mol_type = other DNA
gacgtagctgatacttatattgatgctaggatcgactcaacctcaaaagtgattttaggcgtcgattagtttaagtctacttcaataagtagactacgttaacaaagaaatgaagatacctacgaatgatgctctagttcgtagcaaactatcgtagctctgtaaacagttctcaagaggttagagaacagtcaactacatgtaaaagctttgttaacattaacgaagggcaaataacttctgaaaggaagatatactatatgtta

SEQ ID NO: 862 - DNA, 1119 bp, unidentified
  misc_feature 1..1119: note = Ga0136617_10020436 JGI
  source 1..1119: mol_type = other DNA
atgtcaaaccacgtatttctcatagacagtaataagacaccgctcaatccagttcatccagcacaagctcgcaagttactggattccgggaaagccgctgtgtttcagtgttatccattcacgttgattttgaagcgagtcattgaaaatccaaatgtatatccgttaacactcaaaatagaccctggttcaaagtttactggcattgcgttagttacgaatcaaggcaatgttgtctgggcaatggagttgcagcatcgcggacaacaaattaaggaagctctcttgcatcgtagagcggtacgtagagggcgcaggaaccgcaatactcgttatcgccaagcacgattcctcaatcgtaaaagaccagatgggtggttagctccatctttaagacaccgcattttgacaatagaaacttgggtaaaacgactgcaaaagtttgcaccacttggttcaattgctcaagaacttgttaagttcgacacccaagcaatccagaatccagaaatctctgggattgaataccagcaaggaactttgaaaggttatgagtgccgtgagtacctgttggaaaaatggaatcgtcaatgcgcttattgtggtgtcaaggacgttccgctcgaaattgaacatatccaaccaaaatcacaaggtggttcagaccgtatttctaatctttgcttggcttgccacaagtgcaatcaacgcaaaggaaatagagatataaaggacttcctcaaaggtaagtcagatgtgttgaaccgcgttttgaaacaagccaaaacgaccctaaaggatgcggcatcagttaactcaagtcggtgggcattgttcaatactttgaagtcttttggattgcctgtgagcatcggcactggtggtcaaacaaagttcaatcggattcgattttcgtggccaaaagctcattggattgatgcggcttgcgttcccgcgtgtcaatgccatcaaacttgttacaaccaagattctcaaggtaaaagcaacaggttttggtggtcggcagcgatgtcaaacagacaagtttggctatccgcaaaaacatcgcccgttgcgtccaattctgggattctgtacaggcgatatagttcgcgctaa

SEQ ID NO: 863 - DNA, 249 bp, unidentified
  misc_feature 1..249: note = Ga0136617_10020436 JGI
  source 1..249: mol_type = other DNA
cggtaaaacctacccagagttggacatttattgacaactctaccgaacgtgcagactaagcgaaagctacgatttttgagtcatgacaccaacgaatgaacgccagtttgttgctctgtcgattgtcatgtttggcacggattaacggttgattaatccgcgtgtggcagtccaaacaagctcttaaatcattgtcgaggcaaactttacttagcaataaagttgattgaataaatcatgtcaaaccac

SEQ ID NO: 864 - DNA, 1026 bp, unidentified
  misc_feature 1..1026: note = Ga0376462_0006212 JGI
  source 1..1026: mol_type = other DNA
atggaccgaaaggtcactacttcggtagtagaaaggaaaaatattatggtaatagctctagataagagaaaaaaaccattaggttttataactccaaaaagagcaagaaagctcttagaatctaatagagcagtagttcacagaatgtatccatttattataaggattaaagatgtggatactagagactgcgatacaaaagaatttagattaaaaattgacccaggtagtaaatatacagggctttcaattatagatgacttaggtaatgtatatttcttggctgaacttgaacatagaggctctgttgtaaaagataagcttaaaactagagcaggtgctagaagaaatagaagaagcagagaaactagatatagaagacctaagtttggtaacaaaataggtaagaaaaatgcacaaattaaatatgactcagctagagaggaaggttggttgcctcctagcatacaaagcatagaggataacataattaatttcattaaaaagtactctaaatggattaatattacttctataagtgttgaaggagttaactttgatacccaaaaattagataatgacaaaattaaaggtgttgagtatcaacagggtacactttttggctatgaggtcaaagaatatttattagataaatatgggcgtaattgccaatattgttatgattcaacagagagacgcaatttgtcaggtgataacatattagaaatagaacatatgatatcagtcaaaaatggtggttcaaactctgttaaaaacttgactctagcttgcagtaaatgtaatcaaaagaaaggtagtcaaaacctagaagattggtttaaagttcttgaaaaatcaaaaaccaaacttgataaaaagagagctgaaaatatagcaaaaattcttaaagatgggaagccttttagaggttatagatatgcatcatggtctaatagctataaaaacaagctaattaaggatattaaaaatttagaaaacataaaatctgttgaaatgtcatacgga

SEQ ID NO: 865 - DNA, 325 bp, unidentified
  misc_feature 1..325: note = Ga0376462_0006212 JGI
  source 1..325: mol_type = other DNA
gtcaatgaaccctcggctgaagccgaaggcatgtaatcgcaaggttgcataaattcggttttcggttgaattgagcagactttcgttatcttagttatgatggactggtgtgcttctccagcacctatttcatcgccgaaatctaaacagggcttcgagggaacttttacagcattgctgtaaaagcaaacccagtgattaggttaaccaattcgagagttattaaaaaagctgagataacattgtcgaggagagataaccttcgggttacgtaactatggaccgaaaggtcactacttcggtagtagaaaggaaaaatattatg

SEQ ID NO: 866 - DNA, 1083 bp, unidentified
  misc_feature 1..1083: note = Spirochaetales bacterium UBA4673
  source 1..1083: mol_type = other DNA
atggtttatgttcataattgttttggcttaccgctcatgccatgcactgaggcgaaagctaaacatctgttaaaagcacataaagccaaagttgtgaatcttacaccgttcacaatacgccttaacttcgtcgttgacgatattactcagcctgtaaccctcggtgtagacgcaggctacaaaactataggattatctgcatccactgaggataaagtactctttgaaggagaggtaaaacttcgtgaggatataatagcccttctcgaaggaagacgagcgagaaaaacccgatatcgtgctcctcgttttgataacagagttcgctctaaaaacagagggtggtttgcgccttctgtagaaaatcgtatcggaacgcacttaagtgttattgctaaagtttgccgtctcgtccctgtttctagacagaaaggagagcaactaggtttttggaatgttagagagtatgtactatggcgagacggccataagtgcagaagttgctttggtaaaactaaagacacagttctcgaagtacaccacctagtacaacgtaaagacggtggttcagatagaccggataatctaataacactttgtaagacgtgccatgaagcttatcacagaggagagattaaactagataagccgaaaaaaggattcaaaggcgcaacgttcatgggaactatgagaaaggcacttattaagcgtctaagagagctttatggctcggggatggtagaagtaacttatggttatattaccaaaaacactcgtattgagaatgaccttgataaagctcactacatagacgctagatgtatagcgagccaccctaaagccactcctactaagactatctacagtttacttaagcatcgctctcataacagacagatacatagacttacaatccttaagagtggcgtaaggaaaaataatcaatgtccaagaaagatttcggctttaggctctttgacactgttcaatacaacagagaaatatgctctgtgcagggaagacgtactagtggaagttttagcattcgaaaaccgaatggtgagaaggtttctgaaggcgtga

SEQ ID NO: 867 - DNA, 362 bp, unidentified
  misc_feature 1..362: note = Spirochaetales bacterium UBA4673
  source 1..362: mol_type = other DNA
taatgagtgaggatatcaacaacccacggtgcaagcactggggtatgaggagtgaaaacgactcatgctcttgttgattagcctaagtgctctatgcactactttattagagaatatataggtactgttggatgtcgtcctagtctgacactctacggttcgtgtttaaagagtctcaaggggtagagacagtgatacgaacttcaaacctctaataacattggcgaaggacaccggagagtaagactccgttaccgaagaagacgcgggccttaatgtcgtattgtcttcctctctattctcattcacggcatgagtattagagagtcttaagccgcatcacccataggaggacagtcatg

SEQ ID NO: 868 - DNA, 756 bp, unidentified
  misc_feature 1..756: note = Human gut metagenome
  source 1..756: mol_type = other DNA
atgatttacgtaagaagtaaagaaggcatggtattaatgccaacagaacgttgtggtaagataggttatcttcttcgtcacggaaaggctcacgtagtcagccgtgttccatttgttgtacagttggattacgatagtaccacctacacgcaagatgtgagtcttggcattgatgctggctcaaagcacattggcgtttcggcaagttccgagaagaaggagatgcttgcagcacaagtcgagttaagaagtgatattgtgaaattactttctactcgtagggagttgagacggaatagaagaaaccgcaagacacgctaccgcaaggctcgttttgataatcgcaagaagaaagatggttggctagcaccaagtgttgaacaaaagattgagagccacttgaaggttattcgtttggttcataaactacttcctgtcacgaagaccacaatcgaggtcgctcagtttgatgctcagaaaatcaaaaacccagacataaagggtgatgaatatcagcaaggcgaacagatgggattttggaacgtaagggagtacgttttggcaagggatgggcataaatgtgttcactgcaaaggcaagagcaaagacccaattttgaacgttcaccatttggagagccgcaagacaggcggcaattctcctagcaatctcgtaacgctttgcgagacctgccataaagcttatcatcgtggagagttcgatttgaaaattaagcgaggaagttccttgcgtgat

SEQ ID NO: 869 - DNA, 277 bp, unidentified
  misc_feature 1..277: note = Human gut metagenome
  source 1..277: mol_type = other DNA
tttaagttttggaatcctttaattaggttacagcgattatccattcaatcgtccgaagcggattagccttagccccgaatggaattagggagctacgttaggaatgaatgcataggcacgtcagaatgttcgtccaagttctgacctctgcggtcgatgattaaaagaagcgaaaacaacggtgttgtcggcaagaaaccattctataacatttgcgatgggcgcacaaccccacttcggtgggagatttatttattaatttaaatttgagtttatg

SEQ ID NO: 870 - DNA, 1277 bp, Moorena sp.
  source 1..1277: mol_type = other DNA
atgttcgtgtatgttttgaattgtcatgggaaaccacttatgccctgtcagccacacaaggcacggctgctcttgaagcagggcaaggcaaacattgtacggatggaacccttcaccattcaattgcgccatggcagttccgggtacaaacaagagatatcactcggcattgatgccggaagcagacacatcggagtggcagcaacgacagagcagaccgttctctttgaagcggaggcaaagcctcgcacggatatccagcaactgttggcgacacgtcagcaatttcgccgagccagaaggagccgcaagacccgctaccgaccatccagatttcgcaatagaaagaagccagatggctggcttgctccctcagtccaacaccggctcgatgcccatctcaaactcatcaagatggttcataagctcttgccagtgaaccaaacgacgattgaggtggctcagttcgatatccagaagatccagcatcctgagattgagggcatacactaccagcaagggccacaactgggcttctggaatgtgcgtgagtacgtgctctggcgcgattcccaccggtgccagtggtgccagggcacgtcgcaagatgcagtactcaatgtgcatcacatcgagagtcgaaagacgggtggggatcgtccagagaacctgattaccttgtgtgagacctgtcacgatctcattcaccggaggcaccaagagcacaagatcaccaggaagagcaacgggtttcgggatgcaacccagatgggcatcattgggggaagatctatgagcaggcacgtgctcagtttcccaacgtccatctgacatatgggtacatcaccaagcagtcccggattgaacacaaattggagaaatctcatctcgtggatgcccgctgcatcagtaggaaccccctggcttgctccgatggcacctcttacctgatgaagttcgttcggcgcaataaccgccaactgcacaaagccaccatcagaaaagggggcaacaggcagcgcaataccgctgccaagttggtccatggttttcgactttttgactgcgtgagctatcaagggacagtctgctttgtgtttgggcgcagaagttcgggctactttgatttgcggtccctggatgggaagaagatccatgccagcgccagtcacaaacagttgaaacgagtccagagggcttctgcctgtttaatcgaaaggaggagcggcattcttccctcccctcaaggggcgggtctcctgccgctgaaatcatga

SEQ ID NO: 871 - DNA, 238 bp, Moorena sp.
  source 1..238: mol_type = other DNA
gtcaatgacccccggagagatcgccggaggcttgtaagagccttcattgactagcctgagtcctttactggactacgttcgagcggtcacgatacctccaggtgtctacgctagcctggagccctatcgcctgtgattaaaagttctgatgggtaggaacggtgttgcagaccgaacaagccgcttgaacattggcgaagcgtaccatacatctgaaaggatgatgcacgttatgttc

SEQ ID NO: 872 - DNA, 1362 bp, unidentified
  misc_feature 1..1362: note = Ga0180433_10023929 JGI
  source 1..1362: mol_type = other DNA
atgcagaagttatcacaaagaaatacatgcacaccaacagatgctcaaccagtctgttgcaactgtgattctgaattaaacagagaagaaattctcagtgatcagaatttaaaaacttgtgataacagctccgaggttgatcaagctcaacatacagagcggtcattacaaccaaaagtgtatgtgcttaattgtcggggaaaaccactaatgccttgcagttatgctaagtctaaaagaatggttagaaaaggtgcagcaaaagtcattaaaagatctccttttacaattcaattaaattttgattgtgaaaacaaagttcaagatgtaacattaggaattgatacaggttattccaatattggattttcagcagtatcagaaaaagacgaactgatatcaggagaagttatattagaaaatgggatgactaaacgtattcaagacaaagctatgtaccgaaggaatagaagaaatagattgtggtacagagaaccaagatggaaaaatagatcagctaataaaaaagaaggttggttacctccttctactttgagaagatttaaaactcatatttctttaattaaaaagattaaaaaattattaccgatttctaaaattagaattgaaatcgcaaatttcgatattcagaaaattgaaaatcctgacattgagggaacaggatatcaacagggctcaatgtatcaatatagaaatcgcatagcttatttaatcactagggaaaaaggaaaatgtcagtattgtgataaagaatataaaaaaggtgacgggtggcgactacatcatatttgggggaaattaaaaaatagaccacaagattgggctttagttcatgaatcatgtcataagaaattacacgcaaaacatgaagaatatgtattacaacaaaagaaatcaaattcatacaaagattctacgtttatgaatattattagaaaaagatttataggtttgtttgaaattacatatggaaatataacttttcaaaatagatgtgatttagatttagaaaaatctcatgttaatgatgcttttgttatagctggaggagctaatcaaaaaagatgttcacaatttaaaatagagcagaaaagaaaaaataacaggtgtcttcaacttaacagaaaaggatttaaaccttctattagacgacaacgttattctttacaaccaaaagatttagttaagattaatggagaaatatatgaagttaaaggaattcacagttatggtgcccaggttaaattaaaaaatagttttggaaatataattaacaagtcagttaaaaaattagatgaatggaaatttcatcaaaaaactttaatatggaggacagtctga

SEQ ID NO: 873 - DNA, 256 bp, unidentified
  misc_feature 1..256: note = Ga0180433_10023929 JGI
  source 1..256: mol_type = other DNA
gtcaactaccaaaggctaaagcctttggcttgaatggtaacattcaacgcaagagttgattaggaggcataaaaattatgcagaagttatcacaaagaaatacatgcacaccaacagatgctcaaccagtctgttgcaactgtgattctgaattaaacagagaagaaattctcagtgatcagaatttaaaaacttgtgataacagctccgaggttgatcaagctcaacatacagagcggtcattacaaccaaaagt

SEQ ID NO: 874 - DNA, 852 bp, unidentified
  misc_feature 1..852: note = GENOME_ACESSION: mgm4784220.3 MG-RAST
  source 1..852: mol_type = other DNA
ttgaggcttgacatcattcctctgattctacatgattgcataggttatttctgcgagactcctaagctccgtgcccatcgccaaaaacgcttttctaatcgcaatcaaaaaaaggttgcgccatctattaaagcctcgcggttgatggaaattcgcattgttaaagagcttgcctctatatttcctgtcagttcaattgtttatgaagtcgtcaaggctgatgtagacaagacatcaggtagaaaaggcgctaagtctggtaaaggtttctctcccgttatggtcggtcagtattgggcaattgctcagcttgaggcgattgcgcccgtcgtaaaacgtcaaggctggcaaaaagacggtaatggaacaagccagatcagaactcacttaggactgattaaagacaagcaaaataaagctaaagcaagtcctgaaactcatgcagtagatggtattgcgttagctgccagccagttcactcagtatcggattactcacaagtttggcgaagattctggcgactggatgggtgctgtagagattacgcccgcaccgtttcacgtcataactcgacctgagtacttccgtcgtgccttgcacttcgacaatgccgacaagggcgggaagcgaaagcgcaaaggcggtactgtgaatccgtttggatacagagcaggtgacaaagtaaaggtcaagaccaaaggcgaagtcattacgggctgggtgggaggtttcaccgataccgaaaagtcgaaaaaggttagcgtttacgaccaaaactggcatcgccttgggcagtttggcatcaagcaaatcaaattaattcggaggtctaacaagctatgtgtagcttga

SEQ ID NO: 875 - DNA, 294 bp, unidentified
  misc_feature 1..294: note = GENOME_ACESSION: mgm4784220.3 MG-RAST
  source 1..294: mol_type = other DNA
gcaaactatatccctgttctctcagcaagctataaaccgtccggggactgacctgatgccccatctcttgcagcgtggcggcgagttgatgcgtactctgggttgtccatctcagcgacgactccggatcgcctcgggtacccggttcaattaaggttgccaaatcttctaaaagcgtggtatctgtggtggtcaaacgtttccgtcccccgccaggtctgcgaactgcacccagttccagcccttcatcatcggcttgactcctttgctctagctcttgcattccccatcgca

SEQ ID NO: 876 - DNA, 1242 bp, unidentified
  misc_feature 1..1242: note = Human gut metagenome
  source 1..1242: mol_type = other DNA
atgcgaggagaaccgctgatgccgtgctcaccggcaaaggcccggattttgctcaagcaaaagaaggcggttgttcggcgcagaactccgtttacgattcaactcaccatcgctacgggtgaaaccaaacaacctgtgactcttggtgttgactgcggctacaagcacgtcggcctatcagcgagcaccgacaaagatgaggtgtacgcctcgaaagtcgagttgcgcactgacatcgttgatctgctctccaccaagcgtgaactgcgtcgttcacgacgcaaccgcaagacacgctatcgtgccccaaggtttgacaaccgggtccatagcaaaaacaaaggttggcttgctccttcggttgaaaaccggattcaagcacacctgtcacgagtggagtcggtttgcgatcttgtgccggtcacgaaaatcattgtgcaaacagcggcctttgatattcagaaaatcaaaaatccggatattgaaggcgttggttaccagcagggagatcaactgggtttctggaacgtgcgcgagtacgtgctctggcgtgacggacacgtctgccaacactgcaagggcaagtccaaggatccggtgctcaacgtgcaccatctggaaagcagaaagaccggaggtgacgctcccaacaacctgattacgctctgcgaggcctgccacaaggcattgcatcgcggggaaatcacgctcaaggcaaagcgcggaaagtccttccgtgcagagaccttcatgggagtgatgcgttgggcgtttttcaatcgcctcaaagcaacctatccgcagcttgaagtgagaaatacctacggttatctcaccaaacacaagcgcattcatcatggcatcgccaagacgcattgcgcggacgccttctgcatcgcaggcaacctcacggcaaaacgtgccggaagttatttctttcagaagcaaacccgcaaacacaaccgacagattcacaaactgacggttttgaagggcggtgttcgcaaaaagaaccaatccccctacgaggtcaaaggtttccggttgtttgacaaggtgatctgcaaaggcgaagaggcttttatcttcggccgcagagcgacgggcaggtttgatgtccgccgtctggacggcactcgcatttctgcgggaatcagttgcaaaaagctcagactggttgaaccgcgcagaacttttttaacccaacttgtaaaggaggaaggcgattcctcccctgcttga

SEQ ID NO: 877 - DNA, 249 bp, unidentified
  misc_feature 1..249: note = Human gut metagenome
  source 1..249: mol_type = other DNA
gtcaacgaccccggcctgaaggccgaggcttgaataaagcctgagttgactagcctcagtttccgaaaacggaaactacgttggttgggaatacataggcaccgtgggatgtcaatcctagtcccacgctctgcggtctgtcgttaaaagctctgcgaggtaggagcggtgcggcagatagacaaaaccccttccaacattggcgaaggattacaaccggccttcgggccgaggagataaaacttgaga

SEQ ID NO: 878 - DNA, 1239 bp, unidentified
  misc_feature 1..1239: note = Ga0376486_000912 JGI
  source 1..1239: mol_type = other DNA
atgttagtatatgtattacatcaagatggaacaccattaatgccttgtaaaccagtaatagcaagattattgctgaaaagtggtaaagcaagagtggttagaagaacgccattcacaattaaattaacgtatgataccactaaaaatactcaagaactaacattgggtattgatagtggatctaaaactattggcagtgcagtaagagatgatcaaaatagagtatactatttatcagaagttacagttcgtcaagatgttaaagatcatatggaacaacgtagaatgtatagaagaaatagacgaaacaggaaaacaaggtatcgcaaacctcgttttttaaatcgtaaaaactctattcaagacaatcgttattcgcctactttaatatctaaatatagtagtctaataaaagagttatggtttatatataaaatattaccaataaccaatcttattattgaaatgggaacctttgatccacatgctatgcatagaccagaggttatgtggcatccatggttatatcaaaaaggattacaatttggtttcaataatatcaaggcatatgtattatcaagagatcaatatacatgtcaatattgtaagaataagaataaagatccacatttagaaatacatcatattgtatataaatcacaaggtggttctgatagaccagacaatttacttactctttgtaagacttgtcatgaaaaattgcataagaatcaaattaaacttactaatagtaagttaagatcaacatttaaacatgcgacacagatgaatgtattgcaaagtatgattagaaaatatataccagattatacagaaacatatggatatatcactaagacaattagacaatattttagtctagaaaaagctcattgtatagatgctgtatgcgtagaagctactagtgatatacaaccagagtttcttacagatcgtgttattttcaagaaatgtattagtaaaggtaattatcaattaactaaaggcaaacattctgaaaagaagatgcctaaagctaaaattcaaggatttaaaagatgggatactgtattatataataacaccgtctgttttatcaaaggtagaatgagtactggatatgctgtattatgtgatattcttggtaataagtatagttttaaacctattccaaaatttaataaaatgaaacggatatcagctagaaagtcatggattatgatagagggaatcatgtaa

SEQ ID NO: 879 - DNA, 289 bp, unidentified
  misc_feature 1..289: note = Ga0376486_000912 JGI
  source 1..289: mol_type = other DNA
gtgaactccccacccgctaaagacgggtgagcttcaatattttgaagctctggttcaccagactcaatatctagaaatagatactacgttatcttggatgtagataccttggattgccgcctcagatccttgctctatcgtggcactgtaaacatcgctgaagggaaggcgaagtcaaccacacctcgaagcctagataacattgtcgagaggatgtcggattctttatatggtaacagtatagagatacgcataaccctattaaattaggagattaattatcatgtta

SEQ ID NO: 880 - DNA, 1548 bp, unidentified
  misc_feature 1..1548: note = Human gut metagenome
  source 1..1548: mol_type = other DNA
atggcatcttacgaaaggaggcatccaatgccggagtatatctatgtgttaggcagggacgggagtccgcagatgccgacaacacgaaggagacatgtgcagaagttactggataccggcaaagcacgcatcgccgaacatgtcccttttaccatacagttactttatgacaatacccccgtcctccagcccgttacatttgcagaagatccggggcggacgaatatcgggatggcagccctgtccctgaaaggggaattactgttttctgccgtctgcgagacgagaaataaggagatcgcaaaactgatggaggaccgcaggaagtaccgccgtgcctccaggtctggagaacggaaggcaagacagcggctggcgatacggtttggcacggtcttaaaagccgggatgatgatgcggaagctgccaaagtatgcagcagacaagttcatcacctgtaaggtcatccggaacacggaatcccggttctgcaaccggaaacgggacgaagggtggttgaccccatcggtcaaccatctggtggatacgcacatccatctgctccataagatgcagaagtttctgcccatcaccgatgtggcactggaagtcaaccggtttgctttcctgcttctggaagatccgtccatctctggtgtggacttccagaacggaccattgaaaggattcgataaccgggatgccgcagtctatgacctgcaggatggaaaatgtctgctctgtagaaaagagattgagcattaccatcatatcgtccccaaaagcaggggcggttccaacacccttggaaacattgccggactatgtaaaagctgtcatgacagggtacacaaagacaccatgtatgccaaacgactggaagacctgaaaaagggactggacaaaaagtatggtgccctgagtgtcctgaaccaggcggtcccgttcctctgccagaagctggtacaggagtttggaaaagatcatgtcttttactgtaccggcagggatacggcaagagtacgtaccgccctgggctaccagaagacaaaggaaaaccagctccacgaagtggatgcctggtgtattggacttctggcattggaaaaagttccagaaaagctgccagacttccatccccaccggatcctccagttccggagacaggacagaagtttgatcgatgcacaggtggaacggacatacaaactggacggaaaaaccgttgcaaagaaccggaagaaacggacggaacagaagaccgattccctggaagaatggtttgaaaaacaggtaaaatctttcgggaagaaggaagccaaacgaaagagaagccggctaacggtggtaaaagcgtatcgccggtacaacgatccggaccgtctgatgccaggtgctgttttcctgtaccagggagtccggtacgtcatgcgtggacggcactgcaaaggggcctacctgcaggctgtcggtatgggaagtaaagatttcccagtaaagcaatgtaagatcttaaaacaaaataccgggttagtctttgttgcttga

SEQ ID NO: 881 - DNA, 269 bp, unidentified
  misc_feature 1..269: note = Human gut metagenome
  source 1..269: mol_type = other DNA
gtcaatcacccacgactaaagtcgcgggcttgcaatagcaggtctgtgctttagccgctgggaatttgagcggagacgtgatgtctgtgttcccgtaagggatggcactccgggatgtttttccagtcccgtgaccctgcagagcagacaccaagtctaggaagactgttttacagccatgcacaggcttaccaccggtgcggggatcccgctgatccccgtgggactgcatggcatcttacgaaaggaggcatccaatgccggagtat

SEQ ID NO: 882 - DNA, 1335 bp, unidentified
  misc_feature 1..1335: note = Ga0114934_10005458 JGI
  source 1..1335: mol_type = other DNA
atgaaagatgtaaaaaacagagtcctggtagttgatactaactatcagcccatgactccagtacacccagcggtagctaggaagctaatcaaacaccgtaaagcggctatcttccgtagacagcccttcaccatagtcatgcgttccgagagtaccgagaaacctaaagaacatacccttaagatagaccctggctctaaacaaacaggtctagctgtagtagatactacaactaacacagtagtatgggctgcaactctggtacaccgaggacaggcgattaaagcccgactcatctccagatctcaaataaggagcactcgtagatctcgtaagtgcaggtatcgtaaacccaggttcgataacagagcaaaaccaaaaggatggctaccgccgtctctaatgtcccgaatccataacactatgacatgggtcaacagactacgtaagttctgcaacataacagaactgtcagcagaacgtgttaagttcgatatggccttaatgaaggaccctaccatacaaggcagtggatatcaacaaggagatctctacagaaccaatctatgggagtacctactggagagagaccatcgtgcctgccagtactgtggtgccaagaatgtaccactagaacgtgatcacatacaacctaagtctaaaggaggactagatgtcaaagaaaacctagtactagcatgtaaactatgcaaccaagctaagaacaacacagatgttagggtcttccttaagaacagaccaatgactcttaagaaagtcttaaatcgtaagtcggtaaggttatcagatgcagctgctgttaatgccacacgtaacaaactcttacgggaacttctgaatacaggacttccagtagagacaggaacaggagcacaaactaagcttaatagggtcagtcagggctatcctaaagatcactggatagatgctgcttgtgtaggtgactctgggagagttgttactcttaatagctccatggcaccattagttataaaagccatgggtcacggtaaccgtcaggtaactcatactgacaaatacggcttccctaatagtaaacctaggagcactaagaggctcctctctccagtaggttatgtcaagactggcgatatagtacaactagacgttactactggtaagtatcaaggtatgtctaaggatatgtccagagataggatatcgagtatcaatacaattaaaaacttcttatccatcatagtagacggacggtcaagggcgttcccagttaggcatgtcactcatctactccatcttcatgatggatactcatataaccacaggagtctgtag

SEQ ID NO: 883 - DNA, 279 bp, unidentified
  misc_feature 1..279: note = Ga0114934_10005458 JGI
  source 1..279: mol_type = other DNA
tatacagtaagtaatatagtcatgttgagtagctagctcacttattagataagtgtggtcctataggactaactcaaccagctcgctcctaagggagcagacgatatggataagatcatacctaggggtgctccgccagctcctagctatatggtgtgcgtgaatgacctataggctagcactatagtaatcaggtacacatataaccttcatgtctgagcgaggctaacagtactttacagtacacaacccgaaaggagttaacaatgaaagatgtaa

SEQ ID NO: 884 - DNA, 1605 bp, unidentified
  misc_feature 1..1605: note = Ga0377182_011632 JGI
  source 1..1605: mol_type = other DNA
ttgagattagcaaccaaagagagaactacgttgtacacagagttaaagaccaacgccggggtgcttcctcagctccggcctcttgaagcgcaggcagcagacaagccgcagggttcggcacgaaacgggtctgtgcgtgatgccggtgtgcaacatgcccgaggggagagttcaggaaacgccaagcctgaaccgtcacccgcgcaagcggagcgcggcgtaagccgtgtatttgtattgggtaagaaccatcaacctttaatgccctgtcatccggcacgggctaggaagctgcttcgacagggacgggccgtggttgtgaaacgctttccgttcacaatccggcttaaagacaggattggaggggaaacccagccgatcagagtaaagattgaccccggatcaaagactactgggttggctgttgtcctggaacagggtgaaacgcaacacgttgtgcacctgagcgaactaacccaccgaggctggaaagttcagaagagcatggggcagcgtgcagcgtttcgccgtggaagacgaagcaggaatcttcgttaccgccagccgcggttcaacaaccgaaccaggcctaaaggctggttgccgccaagcctgcaaagccgcgttgacaatatcttgtcttgggtcaacaggattcgtcggctctgccctgtgtcttcgaccacagtagagcgtgtccgattcgacatgcagctcatggagaatccgaatatttcaggcgttaagtatcaacaaggaacgctctttggttacgaactcagggagtacattcttgagaagttcaatcgttcctgtgtgtattgcaacggtctgtcaaaagacccaatcctagaggtagaacatattgtgccgcgaaaccccaaacatggggagcgcggctctaatcgggtttccaatctgaccttggcctgtcgcacctgcaacaaatcaaaggggaattgtcagcccgaagagtggctaaaaattttgtccaaatcccgaaagagaatcgacaagcaacgacacaagggcttgctccaggttctggaaggcaaacggcccactctggcacatgctgctgctgtgaacgcgactcgcaatagattgttttttgatctgctcaacacaggtcttcctgtcgaggccagcacaggaggccaaacaaaagtcaaccgccattggttgcaaattcccaaagcacattgtcttgatgcagcttgtaccggtcaagtttcaacactttatggatggaaccagcctgtgctcttgatctgggctatgggccggggaagctacaagcgaacccgtttaacaaaacatggatttcctcgtggattcctgatgcgccagaaagccgctcacggctttcaaaccggcgatatggtcaaagccgttgtgccaaaaggaaagaagcgtggaacttatgttggtcgggttgctgttcgtgcttccggtagttttaatattaaaaccgagactcagaccgttcagggaataccgtggaagcattgccgtcttctcgctaaggcggatggctacggttatgccgtaacctcgcttcctcctctacctgaaggaaggcgtctccgcgaggaagaaggatga

SEQ ID NO: 885 - DNA, 320 bp, unidentified
  misc_feature 1..320: note = Ga0311301_10001791 JGI
  source 1..320: mol_type = other DNA
gtcacgtaccctatcgccttttgaaacttcatcatgcgatgggcttgtgaagaacgaagtcctggacgtgaccagcccaccaggctcgtcctggtaaccgtttcccatgaatgcataggcactccgcgatgccgatccagtcgcggacgcagcggtcaacgattaaacagacagacagggttcgagtcagtgtcgttggcaaccgaaggaaaccacgggaaaacaggggcgaggataccctcacttcatccggctacggatgaacgacgtctcattacgagacccccgcaaggggatgaaaggaacgaaccatgtcgcgc

SEQ ID NO: 886 - DNA, 1311 bp, unidentified
  misc_feature 1..1311: note = Ga0311301_10001791 JGI
  source 1..1311: mol_type = other DNA
atgtcgcgcgtgttggtgctcgaccagcagaggcggccattgatgccctgcactccggctcgcgcacgcctgctgctcaagcaacacaaggcagcagtctggcgccgttacccgtttacgctgatcctgcgggtcgcccgtccagatgccattgcacagccgttgcgcctcaagatcgacccaggcagccgaaccagcggcctggcgctgacaaatgatgcgacgggagaagtggtatgggcggcagaactcacccatcgcggcgagcaggtccacaaagccctccagaaacgggcagccgtgcgcagggggcgacgccagcggcatacgcgataccgcaagccgcgctttctcaatcgccgacggcccaagggctggcttcccccgtcgcttctcagccgggtgcgcaacatcgagacctgggtcgcccgcttgatgcgctggtgcccactcggggcgctttcgtacgaggtggtgcgcttcgatacccaggccttgcagaatcccgaaattgcaggaactgcctaccaacacggcacactggcgggttatgaagtcaaagagtacctgctgctcaagtggggacaccgctgcgcgtactgcaagcaaacgggcatagccctgcaggtcgagcacctcgtgcccaaggcgcgcgggggcagtaaccgcgtgagcaacctgacgttagcttgcgaacgctgcaaccggaagaagggcaaccgcacttcggaggaattcggctttcctcatctccaggcccaggccgggctccctctcagagacgccgcggccgtcaatagcatcaggtgggcgctgtacgaacgcctcaagtgcagcgggcttcgcatcgagacgagcacgggtgggcgcaccaagtggaaccgcacgcaacgcgacatccccaaagcacactggctggacgcggccaacgtcggtcaatcgactcctccgcgactgctctggcagcacgtgcgaccgctgctcatccgggcaatgggacagcagagccgtcagatgtgccgcatggatgcgcaaggcttcccacgcacaaaggccaagaaaccgagcgcgaaacacgcgtttcggacaggcgatatcgtgcgagcagtcgtcccggcgcacctgaagaacaagggggtgcatgtggggcgcatggcagccagagccaatggtgccttcacgattgccacgcggcgtgggacagtcaccgacattggctatcgctactgcacccgcctgcagcgcaatgacggctacggctatctgactcagagcataagggagtgcagcttcccctcggtcttccaatga

SEQ ID NO: 887 - DNA, 320 bp, unidentified; identical to SEQ ID NO: 885
  misc_feature 1..320: note = Ga0311301_10001791 JGI
  source 1..320: mol_type = other DNA

SEQ ID NO: 888 - DNA, 798 bp, unidentified
  misc_feature 1..798: note = BBAY79_10002962 JGI
  source 1..798: mol_type = other DNA
atgtcaaactttgtattcgtaatagataccaacaaaaagccactagaaccctgctctcctaccatagctaaaaagctactgaaggcaggaaaagctgcggtttttaggcaatatcctttcactatcattcttaagaaggttgtagagccaggagaaatcaaatcatgcaaacttaaattagacccaggctcaaaaacaactggtatagctattctgcaagaagataaacttatctgggcagcagagttaactcatcgaggtcaaaagattaaagacgatcttgaatctcgtagatcactaagacgtggacgcagaggtagaaaaactcgttatcgtcagcctagatttctgaatcgaaagaaagagaaagcttggttagcaccaagcttggagcatcgggttctgactactatgacctgggttaagagattaatcaaatattgtccaattgattctatagctcaagagttagtcagatttgatacccaaaaaatgactgaacctgaaatcagtggcaaagaatatcagcaaggcactctttaccaatacgaggttagagaatatcttctagagaaattcaatcgtacctgtgcttattgcggagtcaaagatactcccttagaagttgagcatatcaaagctaaatccaaaggtggctctaatcgagtatctaatctggcaatagcttgtgtaccttgtaatcaagctaaatctaatcttgatattaaagattttctggctggcaaaccatctgtactcaagcgaatattagcccaagctaaagcacctttgaaagat

SEQ ID NO: 889 - DNA, 268 bp, unidentified
  misc_feature 1..268: note = BBAY79_10002962 JGI
  source 1..268: mol_type = other DNA
gtcaggaatctcgtagatagcgactccgctttaaaaagacggagcttgaaaatctagtacctgaccagttcaagtccttcgaggactacgttaagagcaagagttaaagacctaccttggagtgcgtgccagccccaagctctagaaccgaaaagttaaacagatgtatcgagattaaatcagtgctttttggatagttaccgactcttaacatggacgaggcaaacataatcctttactggagaaagacgcaaaaatgtcaaacttt

SEQ ID NO: 890 - DNA, 1365 bp, Moorena sp.
  source 1..1365: mol_type = other DNA
atggaaacaaaaatgcagaagttaggaaagagaaatacatacatacctactgatacttctctagtcggtagctctatggtcttgtctttaaacagagaggaaattcttagtgagcaagacttaaaaaccttttctaacaactccgaagagaaccattcccaacatacagggaatcagaacttgagagtatctgatattgtgtatgtgcaaaacatcaaggggcaacctttgatgccttgcaaacaacaaaaagcaaacaaattactaaaacaaggaaaagcaatagttatcaaaagaaaaccattcactatacaactaactattgcaacaggagaaaccacgcaaccaatcactctcggcatagatgcaggaagtaaagtgattggtttctcagcgataactgagacacaagaattggtgagtggtgaattagaactaagacaaaatgtgagtgaaaaactaatagagcgagcaatgtatagaagaggaagacgtaacaagttatggtatcgagaaccaagattcaacaaccgaaaacgagaagaaggttggctagcaccaagtatacaacataaacttgacacacaccaaacattaattaacaaaataacaaagttgttacctattaacaacatagtcgtggaagttgcaaagtttgacacacagaaactacaaaatgcagacatagaaggagccgagtatcaacaaggtcaaatgagcggttataataaccttagagcattcatatttacaagagataaatacacttgtcaaatatgcaaagagcaaggaggaatacttgaaacacaccatattattcagagaaaagatggtggtagtaatagacccgataacttagttacattacatttaaagtgccacaaagattttcactcaggaaaaatcaaacacaaatttactaaaccaaaaagtttcaaagacacaagcgttatgaacaatgtttggacaagattagttgataaaaacaattacgaacacacgtttggttacataacaaaagaaaacagacaaaaacttgaattagaaaaatcacacgtaaacgacgcattcatcatagctggtggaagtaatcaaacaagatgtataatcagtaatttgaagcaaataagaagaaacaatcgttgcctgcaacttaacaggaaagggtttaaaccaagtattagaaggcagagatacaaaatacaatcaaatgatttagttaaatttgacaacaaaatttatacatctaaaggtgtgtttaacaaaggaacttgggttaaattaacagatgatttaggaaatacaattaacaaaaatattaaatgtgtagaggtaacaaaatatggaaaaggattacaaatatga

SEQ ID NO: 891 - DNA, 272 bp, Moorena sp.
  source 1..272: mol_type = other DNA
gtcaatcacccctccctgaaggaaggggcttgagccgtgaggtttgagagcaattggttgattaggaggcaaagatggaaacaaaaatgcagaagttaggaaagagaaatacatacatacctactgatacttctctagtcggtagctctatggtcttgtctttaaacagagaggaaattcttagtgagcaagacttaaaaaccttttctaacaactccgaagagaaccattcccaacatacagggaatcagaacttgagagtatctgatatt

SEQ ID NO: 892 - DNA, 1137 bp, Moorena sp.
  source 1..1137: mol_type = other DNA
atggctacgttccgcacaggacgaaaggcccaccctggcgtgcttcctcagcgccaggccctggaatccgcgccagctgacactccccggatcgggaacgaaacagggcacggagaccaccggcaggtggtacccggtgcggaacatggtcgaggggagaccggtaccgcctcacctggcggttccggtgtcacccccgagccctgcggggccgcggagaagggccgtgaggcccacaccacccacccctacgtgttcgtcctcgacaaacacggcacacccctgcagccctgcccgcccgcacgggcccgcatcctcctggcgaagggccgggcggccgtccaccggcacacccccttcaccatccgactcaaggaccgcaccgccgccgactcccagatcgacggcgtcgagatcggtgtcgaccccggctccaagaacaccggcatcgccgtgttcacggaagaagccgggcagcgccggggccggtacagcatccagctcgaccaccgcggcgcgaccatccgcaagaagatgggccagcggtccgcctaccgcaggcgccgccggtcggcgaacctgcgccaccgcccgccccgattcaacaaccgcacccgccccaaggggtggttggccccgtccctgcgacaccgaccggacaccaccatggggtgggtgcaccggctgacccgactcgctcccgtgcgcgtggcgcacgaggtggaaccggacccgcaaccagctgcccaagtcccacaccctggacgcggtggcggtcggcaaggtcgaggcgatcaccgagaccgtggacacggtcctggtcgcggggtgcacgggccgtggatcgtatgcccgtacccgcaccgaccggcacgggttccccggctgcggctgccgcgtaccacgcggttcttcgggttcgccaccggcgacctggtccgcgccgccgtgcccaccgggaagaaggccggaacccataccggccgggtcgcggtgcgcgcctcggggagcttcaacgtcaccaccgcccgcggcaccgtccagggcgtcaaccacaggcacgtccgcctgctccagcgagccgacggctacgcctacaccacccggaaggagaagggcgtttcctcccggccctga

SEQ ID NO: 893 - DNA, 298 bp, Moorena sp.
  source 1..298: mol_type = other DNA
gtaaagggatcctggtcctgaaagaccgggctttcaacccgcgtggttgagggccgcctttaccagacccagccatcacccatgaggaggtgacctcgatggctacgttccgcacaggacgaaaggcccaccctggcgtgcttcctcagcgccaggccctggaatccgcgccagctgacactccccggatcgggaacgaaacagggcacggagaccaccggcaggtggtacccggtgcggaacatggtcgaggggagaccggtaccgcctcacctggcggttccggtgtcacccccga

SEQ ID NO: 894 - DNA, 1626 bp, Moorena sp.
  source 1..1626: mol_type = other DNA
atgactacgtttcctgtgagtgagaagacccaccaagccgtgcttcctcagcggcttgctctggaatcggtgagagcagacaaccccgagggtggggacgaaacggctcatcgacccccggctgtgccgggcactggcatggaacatgggcgaggggagatcggttcgggcggcacccgcctggaccggcgtcaccccgagggtgcttcggcgtctgagggagcggaccgtgaggttcacccggccgtgttcgtcctggacgcacacggccaatcgctggatccgtgccacccggcccgtgcccgtcgcctgctggcggcgggtcgggcggtggtggcccggcacaccccgttcgtcataaggctcaaagaccgcacggtagccgactccgccatccagggtgtgcaggtcagcatcgaccccggcagcaaacacaccggcatcgcgatattcaccgaatacggcgggagccggaccggcgtgtacagcgtgcagctcgaccaccggggtgcgcagatccgagacaagctcacctcgcgggccgcattgcgccggggccgccggtcgcggaacctgcgctatcgcgcgccccggtttaacaaccggacacggccgaaggggtggctcgcgccgtcgcttcgccaccgcgtggacaccaccatgtcctgggtgtcgcgcctgacccggtgggctccggtcaccgccatccacgtggagaaggtcgccttcgacacgcacgccctgtcggcgggtcatccgctcgaaggatcgcaataccagcagggcaccctcgccggatacgaggtgcgcgagtacctgctggagaagtggggtcgcacctgcgcctactgcggcgcccagaacgtcccgctgaacatcgatcacctccacccgcgctcccggggcggctctgaccggatcagtaacctcgtcctggcgtgcatcccgtgcaaccaggcgaagaacgccactccgatcgaggagttcctgaagagcaggcccgcgctcctggcgaagatcttcaagcgggcgaaggcgtcgttgcgagacgcggcggcggtcaacgccacgaggtgggcgttgtggcgggcgttggacgcgaccggcctatccgtgactacggcctcgggcgggcgcacgaagtggaaccgctcgcgcactggcgccccgaagtcgcacacgctcgatgcgctgcacgtcggtgacctggagacggtgactgcctggccgtccatggtgttggtggtgaaggcgaccgggcgcggcacctattgccgtacccgcaccgacgcctacggctttcccaggctgcggctgccccggatcaagcaggtcaaggggttcaccaccggcgacctggtccgcgcgaacgtaccgaatggcaagaaagccggggttcacaccggtcgggtcgccgtccgctccaccggaagattcaatatcaccacgcggcatggcaccgtccaaggaatcggccaccgccacattcggctactccaacgagccgacggctacggctacaccactcaatcagacgcccggactattccgtgtttcctcccggccctgaaggaccgggtttccacgctggaggtaatcgatgacacttccggcatctccccatga

SEQ ID NO: 895 - DNA, 303 bp, Moorena sp.
  source 1..303: mol_type = other DNA
gtcaacgaccccggcctgaaggccagggcctgaggtgccgcattgtgcaccgatggccccgcgttgaccagccccagtcatcagctcaaggaggtgccttttgatgactacgtttcctgtgagtgagaagacccaccaagccgtgcttcctcagcggcttgctctggaatcggtgagagcagacaaccccgagggtggggacgaaacggctcatcgacccccggctgtgccgggcactggcatggaacatgggcgaggggagatcggttcgggcggcacccgcctggaccggcgtcaccccga

SEQ ID NO: 896 - DNA, 1434 bp, unidentified
  misc_feature 1..1434: note = Ga0307928_10027040 | JGI
  source 1..1434: mol_type = other DNA
atggtaacttttcttattgatggaaagaataacatactgcacccaacaaagaaatcagacatgatttatcgctggctgcgtcaaggtaaagcaaaagtactgaaaggtggtcttaaaccaggacaaccattattagtacaggtatttaaaacatttatgaaaccaacaaaatgtaactgtgaattcagaatcggaattgatcctggatacaaacacattggttactgtatttataaaatagatgtggagaaacagacaataattgcattaatttctggagaagttgaaacaagaacttcagaaattacaaaaaatatgttagaacgaaagatgtatcgccaaaataggagacataacagaagaaaaaatgttaagagaaaatttaactcatgtaagtttcgaaaacctgtatggaaaaacagagcaaaacacaagtttcaaccaacacactggcatttgattaactctcacaacaatctcttaaagtggatcttcgacagaattccatttgaacagagtaaattacatatagagtacaatacatttgatatacataaagttatcaatccaagcatttacaaatggcaatatcagaaaggtccacagtacggatttgaaaatgttaaatcatatgtacgatatcgagacaattataaatgtcaaatatgtaacaaaaatgttggaaaagaaatgaatcatgtacatcacattatacatagaaatgatggtctaaatgatcggcctgagaatttgattctattgtgtactaaatgtcatgatgctgttcatgctggaagagttgcatgtccaatatcaacagcaaaaagtttcagagacatgggtgtattaaattcctgtatgaaatatttatttgaagagtatgaaaatgtaatttcagtacaagatatttatggacacattacaaaaactgttcgaaagaaatatggaattgaaaaatcccatgcaaatgatgcgaaagtaatcgcgttatgtgattcaaatgggtttaccgaagagttcagagagtatgattggagtgattctaatattgttataaatttcaaacagagcagaaggcatgttcgaaattgggtacagagatatgaggatcgaaagtattacatgattggaaatccatattgcgatgcatggaatagaagaaaacgatctggacaggagaaaatgagtttgaaagagtttcgaaagttatatccgaaagaacaactgaatgcgaaacctgggagaacaatatatcgaaaaaataacagaaatatcttattcaaacctggtgatataattaattgttcagaaggagttgatactattaaaggctgggcatctacacaacataaagttgttggagaacgccttggacgaattcgacaaggagattgtgaaaaagtgttaaacagttgtggaatgtgtattgtttaa

SEQ ID NO: 897 - DNA, 313 bp, unidentified
  misc_feature 1..313: note = Ga0307928_10027040 | JGI
  source 1..313: mol_type = other DNA
tcaagtaccgggcgcagagcacccggcttgggatgagcgcagagcgcttatgctaacgccgagaactttgcttctgggcttgaacagacactctgaccagatgttcaccctgagataccactcccagtttcaggctctggaggtaaccagtccttattgctgaccagtaggtaacgaagatcagtattacatctggccaagtcgagggagaccaagtcttcataaggagatgccgaccaatggtaacttttcttattgatggaaagaataacatactgcacccaacaaagaaatcagacatgatttatcgctg

SEQ ID NO: 898 - DNA, 1329 bp, unidentified
  misc_feature 1..1329: note = Ga0209749_1010998 JGI
  source 1..1329: mol_type = other DNA
atgagagtactggttttatcaagcataaaggatcccctcatgccctgccatccggcacgggccagggagctactaaaaaagggacaggctgcagtattcaggcagtacccctttacaattatccttaaaaacaggcaggcaggtatttgccagccctttgaactgaaaattgatccaggcagtaaggctacaggtatgacgcttgttgctgattgcaaaaagggttatagggtcttctgggcctctgaagtaactcaccggggtcaggcagtcaggagtagtcttgcggaacgcagggcaatacgaaaaaaccgccgtaaccgcaaaacccggtaccgagctccccgcttcttaaaccgcacaaggcctgaaggctggttggcaccatcgcttatgagtcgtgtgtacaatatgcaaacatgggcagcacgccttataaaagtgtgccctgtaacagacattcatcttgaactcaataaatttgacacccagcttatggagaatcctgagatcacaggtgttgagtaccagcagggcactcttgtcgggtatgaaatcagggaatatctccttgagaagtggggaagaaaatgtgtgtattgtggtaaggaaaacgtaccccttgagattgagcatattatacccagatcaagaggcggtagcagtcgaataagtaatcttgcccttgcttgtaaaacatgtaacaaagataaaggcaacatgacagccgaagaatttggttatcccgaagtccagaaagcagcgaagctgccgctaagggatgctgcagctatgaacgcaacacggtatgctataggcagggcgctcaagcaaacaggtctttatgtggctttctggtctggaggaagaacaaaattcaaccggattagtcaaaactacccgaaagagcactggatagacgctgcatgtatcggagagacaggagacagggttattatccctgccgggacaaaacctttaaatattactgcagccggccatggcaacaggcaaatgtgcgggacaaataaatatggtttcccgatacggcacaggacaagagataaaaagtattttggtttttgtaccggagacatagcaaaagcaatagtgccaaaaggaaaatatgtcggtacttatataggtagcatagccataagagcatcaggatattttgatataaagaatggagcgggaaagcgaattgtacaaggaatttctcataaatattttaaaacagtccagcattttgatggatacagatatgagacaggcaatgcattcctcccggcaataaattgccgggcttcctgcgtggaaggatcgtga

SEQ ID NO: 899 - DNA, 282 bp, unidentified
  misc_feature 1..282: note = Ga0209749_1010998 JGI
  source 1..282: mol_type = other DNA
gtcaactacccgggttttaaaacccgggcatgaaagagagttcacataattctcttcatgccccatgttgaccaggtacagccacggatcataaggtctatggggctacgttattccggtcatgacaccctgaagtgcttgccagctttaggctctgtcgtcaggcattaaacaggcataaggggtttagaccagtgtgtctgacacaacaagccggaataacattaccgaggcaaacattaccgccgcaaggcgagaacaaggagtaatctttttatgaga

SEQ ID NO: 900 - DNA, 1284 bp, unidentified
  misc_feature 1..1284: note = Ga0376086_0000584 JGI
  source 1..1284: mol_type = other DNA
atgtccaatgttttcgtcttaaacaccaataaacagcttcttaaccctatccatccaggtcgggcaagaatgctgttgtctcagggaaaagccgctgtttttcgacgctatcccttcaccttaatactgaaagaggaggtgttaaatcctcaagttgaaccactccgcatcaagatcgaccctggcgctaaaaccagcggactagcaatagtcaacgattgcacaggcgaagttgtttgggtagccgaattgcagcatcgcggttttcaaatccgggatgctttaacctcacggcgtcaactccgacggtcacgtcgcaatcgcaaaactcgctaccgtcaaccacgctttctcaatcgcacccgaccaaagggatggttaccaccgtccctcaacagtcgagttgctaacatcctgacttgggtcaagcggctgtctgcgctatgccaaattacagccatatctcaagagttggtaaggtttgacacccagcagatggaaaatgcagaaattagcgcaattggttaccaacaaggcacgttggctggatacgaaatccgtgagtttctgcttgagaaatgggatagagcctgtgcttactgcggcgcaaaagacaccaagcttgaaattgagcatatccaacctcggtcaaaaggcggttccaatcgtgtcagtaatttgtgtctagcttgtgttccttgcaaccagaaaaaaggtaaccaggatattaaggagttcctcaagggtaagtcagagctactcaagcgaattttggcacaagctaaaagacccttagctgatacagcggctgttaatgcaacccgatggaatttgtatgaaaacctcaagaaaacaggcttacctgttgaggcgggcacaggtggtcgcaccaaatacaaccgaagcttgcgaggtttagagaaaacccattattgggatgcggcttgcgttggggcttcgacaccagaacagttaatcacatcagggattaagccaatactcattgctgccaagggtcatggaacccgtcaacaatgccgcactgacaaatgggggtttccggtgcgttactgctctagaaccaagtttcacaaaggttttcagacgggtgacatcgttaaagcagttgttacctctgggaaaaagattggagtttacgttggtcgtgtagccactcgtgccacgggtagtttcaatatctcgacacctgacgggctaactcaaggcatcagccacaagtactgcatacacattcacaaaaaggatggttattcctatgtatag

SEQ ID NO: 901 - DNA, 254 bp, unidentified
  misc_feature 1..254: note = Ga0376086_0000584 JGI
  source 1..254: mol_type = other DNA
gtaaactacccgccaccaagctgagtacagctatggtgggggcttttaaaaaaaagtccagagtttacccgactaagtaccttgtgtactacgttttagaagccatcacaccctgggatacgaagccagtcccctgctctgtggctgacgattaaacaggcatatcgggttgaagccagtgtcgtcagcgcgacaaacttctaaaacattgtcaaggctaacattacccgcaaggagggacaggaatgtccaat

SEQ ID NO: 902 - DNA, 1587 bp, Moorena sp.
  source 1..1587: mol_type = other DNA
ttgaccagcgggcctggtctccaggaccaggcagacgttgcacacaggttcaagacccaccgtagagcgcttcctcaactctacgctctggaagcccaagcagcagacaaaccaacgggtggtacgaaacgggtttgggcgcaacgccgatgtgcaacagccgcgaggggagattccgcactatgtgcggaacgttacggagacggatgcttttatccgtcaacggatttacggaacctttacgggttccacctgtttggaggtattgtcatgtatgtgttcgtactggacaagcacaagaagccgctgacaccgtgccgcccgtcaagggcgaggcatctgctcggctcggggcgggcggtcgtccacaagcgtttccctttcaccatccgtctcaaggaccggacggcggaagagagcgttatcaaacctgtccgtgtcaaggtcgacccgggcgcccggttcaccggaatagccattgtccgggaggacaggcaaggtggaccccgtctgattgccggaatcgaactggaacacagggggaacgctatacgagacaacatgacgaagcgggcgggctaccgccggagacggcggagcgcgaacacccgctatcgtgccccgagattcgacaacaggcgaagaccggaaggccggtttccgccgagcctgcggcaccggatcgacacgaccgtctcgtggatgcggcggcttacacgcatagcgcctgtctccggattcagcgtcgaatcggtcaagttcgatacgcagaagatgttggacccggaggtttcgggaaaggagtaccagcagggagagcttgagggatacgaggtgcgggaatacctgctggaaaagtggtgtcgcaagtgcgcctattgcaatgccgggaacgttccgctgcaggtggagcacatcgtaccgagagcgagaggcggttcggacagggtgtcgaacctgacgctggcgtgcgagaggtgcaatcgggccaagggagcgcgtcctgttaaagagtttctgcatgacaaaccggcgcttcttggacggatacgggcgcacgcgaaagctccgctgtcctccgccgctgcggtcaactcgacccgcaacgcactctttggcgagatgcgtgcgtttggcttgccggtggagacggggagcggcggactcaccaagtacaaccgcacccgcctcgggctgccgaagagtcatgtgctcgatgctctgtgtgtcgggacagtctcttcagcaaaagttttaacagacagcgtcctccatgttcgctgtacaggacggggacgatactcacgaacactgacggacaaatacggattcccgagagcatacctccctcggggtaagcgctttttcggattcgccaccggtgatatcgtccggacggcggttccgaaaggaaagtacaaaggaacgtggacagggcgggtggctgtacgggaatctgggtggttcgcactgtccacagggaaaaatacgccagacggcaaaaaagagagggttaatgtcaaatgggatacctgcaaaatactggaacgaaacaatgggtacgaatacagcgtaatagcggtgtag

SEQ ID NO: 903 - DNA, 276 bp, Moorena sp.
  source 1..276: mol_type = other DNA
gtcaattacccgccacctaaccgatgttaacgcctcggtttgaggtgggggcttgaaaaagcccagattgaccagcgggcctggtctccaggaccaggcagacgttgcacacaggttcaagacccaccgtagagcgcttcctcaactctacgctctggaagcccaagcagcagacaaaccaacgggtggtacgaaacgggtttgggcgcaacgccgatgtgcaacagccgcgaggggagattccgcactatgtgcggaacgttacggagacggatg

SEQ ID NO: 904 - DNA, 1365 bp, unidentified
  misc_feature 1..1365: note = Ga0310695_10017382 JGI
  source 1..1365: mol_type = other DNA
atgacagtattcgtggcagcaaaagacggtacaccccttatgccgactttcaatatcaaaaaggtacggcgtatgttaaaagacggtcgtgccaaaatctacgggtatagcccgttcacaatacagttacagtatgagagcacgactcatacgcaagaaattgaagcctgtgaggacacaggtgaccattatgtaggattttcactaaaatctaagaaacatgaatatgtttcagggcagtatgaccacttgacggatgagaaactgcgccacgatgatgcccgtaaactccgcaggagcaggcgaaatcataagcgctaccgcaaaccgaggtttgataacaggagacacctcatgccggaaggcgataaatggtttgctccatccataaggaataagatcaacaaccatttatccatactgcaaaagtatcataaagcctgccccataaaggatatttaccttgaatgcggctcctttgacacacagaccttacaggcggtagaggcagggcttcctgctcctaaaggtaaagattttcaaagaggttcaagatatggttacgatactttaagggaagcagtattcgcccgtgacggatacaggtgtatatgttgcggtaaaggtatagaggacggtgcggtactccgcctccaccatttaggttataagacaggcgaccacaccaaccgcatgtcggggcttgcgactgtatgcacaaaatgccacacaccggcagcacataaacctggcggaaaactttatgaacttgagccgaaactcaaacctttcaaagctgcgagttttatgacatcgatgaggttccagctcataaaagacgccaaagttttgcttccaaacacagaggtacacatatgctacggggcatatacaaaacgcgaaagattgtcgcgtcgaatcagtaaatcccacgccaatgacgcttattgcataggttgtttcagatcggcgcacaggacggatataaagcattataaaaaactccgccggaacaaccgcatccttgaaaaattttatgacgcaaaggttatagatgtaagggatggtacagcacataaaggtgcggaattatcctgtaaccgcacaaaccgaagtatttcaaggaataacgaaaacaatctccgtatataccggggaataaaagtgtccaaaggacacaggaacataagaacaaaaagatacgccatacgtcccggtgatatggttctttaccaaggcaaacgatataagtccaaggggttgcagcattatggcgaatacaccactttggaagggcataaggcggtcaaagtaaaagacgtaaaaatcattaaacacactggcgggtgggagacggcagcatga

SEQ ID NO: 905 - DNA, 439 bp, unidentified
  misc_feature 1..439: note = Ga0310695_10017382 JGI
  source 1..439: mol_type = other DNA
gtcaataaccccatctaaatgcattgcattatagatgaggcttgtaaaagaaaaggcttcgcgcctgacttttcaagcctgattgattagcctaagtccgtaagtcttcggaaactacggactacgttaccggtgaattcctgggagggcgaccgtttgtaccaggtaaacaggcactccggggtactccacaagccccgccgaccacttaggtggccggggaatgaaatacaatacacgacactgcggtctgtatttaaacatccgtgtaacagcggatatgcctgagggtagggtaagtgatacagacaataaaaccaccggataacattggcgatgtggacccgcccttttgggcagaaccccgggatgctttatatcccgggaagccgtaaggcaacttgttttaagaaaggaggcataagaataatttatgaca

SEQ ID NO: 906 - skipped

SEQ ID NO: 907 - DNA, 243 bp, unidentified
  misc_feature 1..243: note = Ga0197142_1000319 JGI
  source 1..243: mol_type = other DNA
gtcaagtacccccagctaaagctgggggcttgcgggagtagagcctagccagctggaaaccgcaagggcaaggaaagactagcctgcccaagcaacctgttctacagggggcgtttgaagggaactgaaccaactggacgtggcagtccaaaagacgtagcgaatgcttccctagtttgctacctctctgttggtcagtggcaaagggatgtacacactccgaaaggaggcttacttaacaat

SEQ ID NO: 908 - DNA, 315 bp, unidentified
  misc_feature 1..315: note = Ga0310136_007496 JGI
  source 1..315: mol_type = other DNA
atggtatatgttatttcaaaggatggtaaaccattaatgccaacaaaaaggcatggtaaagttagaaggcttttagaacaaggtcttgctaaagttgttagaagagaaccatttacaattcaactattgtatgatactacaacatatacacaacctgttgtagttggcgtagataatcgttcactgcataaagcaaatccaattaaaggtggaaaaagaccagtaaatactgtaaaggaagttagagggtttagaagattcgacaaagtaagatataaaaatcaaattggtataatctacgggttaagaatctct

SEQ ID NO: 909 - DNA, 255 bp, unidentified
  misc_feature 1..255: note = Ga0310136_007496 JGI
  source 1..255: mol_type = other DNA
gtcaactacccaccacctatagaggtggaggcttgcaaaagccttagttgactaccctcagccaggggaagttaatcttcctatcgggctacgttagactggtcatgacaccctgggatgctgctcaagttccaggctctgtcgtatgtacctaaacagtcctgaggggtagggacagtggtgcatgcataacaagccagtctaacattggggatgagcgcctaactcctaaccaaaggaggcttaccgcatatg

SEQ ID NO: 910 - DNA, 963 bp, unidentified
  misc_feature 1..963: note = Ga0181858_1003566 JGI
  source 1..963: mol_type = other DNA
atgaaaactgtgaaccgtgtgttggtcattgacaagcatgggaaaccgctcatgccgtgtcatcctgcacgggcgcggcaacttctcaggaaaggacgagccgtcatctaccgtcgttatccattcaccatcttgatcaaagaccgggaagtaaggaatgacgggaaagacgtccagccggtcaggctcaagatagatccgggctcaaaggtcaccggcctttcacttgtcggtgagttccaacgagggaagaccgttatctgggctgcggaactgcaccatcggggccagcagatccgtaatgcgcttgcggaacggcgggtacttcgacgttcacgccggtatcgcaagacacggtatcgtgctccacgatttctcaaccgccgccgcccggaagggtggcttccacccagcattatgagccgtgtgtgcaacgtgcgcacatgggtgtatcgcttgcagaagtttgcgcctgttacaagcctttcgatggaacttgccaagtttgatacccaaaagctgatgaatcccgagattcagggtattgagtaccagcaaggcacgcttttcgggtatgaggtgcgggaatatctgttagagaagtttggccgccgttgtgtgtactgtgacagggaaaatgtgccgctggaaatcgatcacgttattcctcgttcaaaaggaggtggtgatcgtgtctccaaccttgtcattgcttgccatgactgcaaccaggaaaaaggcaaccgttcactggaagaattcctggcgcatgaaccagaccgggccaaacgaatcaaagcggagcttgagacaccgctcaaagacgcggcggcagtcaatgcgacgcgatggactctctttcatcttctgaaagagacagggttggagcttgaggttggaaccggcggtcgaacgaagcgtaaccctcttaagccccgaaattggattggacagcctccctaa

SEQ ID NO: 911 - DNA, 266 bp, unidentified
  misc_feature 1..266: note = Ga0181858_1003566 JGI
  source 1..266: mol_type = other DNA
gtcaactacccccgtctgaagacggaggcatgaagcctcggagttgaccagcctcagccagggccaaaggccatcgggctacgttattccggtcatggcaccctggggtgcttgggccagctccaggccactgccgtccggcattaaacaggcatacggggttgaagccagtgtgccgggcatgacaagccggaataacattggcgaggcccacatgaccccacgaagggaggaagcgggtaaccgccatgaaaactgtgaaccgt

SEQ ID NO: 912 - DNA, 1284 bp, unidentified
  misc_feature 1..1284: note = Ga0137378_10000779 JGI
  source 1..1284: mol_type = other DNA
atggtctttgtactcgataggcacaaaaagccgctgatgccctgcacacccaaacgggcacggctcctcctggcgcgtgggcgcgctgtggtccatcgcctcaagccgtttgtcattcgcctcaaagatcggtgcgtcgaagattcggtgctgcaagccatcgcgctcaaactggatcccggcagcaagaccacgggcatggcgctggctcgtgtggaagagacagaggagggagaagtgcatcacggcgtgcacctctcagaagtgcagcaccggggaggggaggtccacgcggccaaacagagccaaaggaatgtccgtcgtcggcgccgcagcgccaatctgagacatcgcaagccccgctaccagaaccggcgcatccccaaaggctggttgccaccctccctgctgagtcgggtgggcaatgtgttcacctggacagctcgatatgcccgctgggcaccaatcacccggatcgaggtcgagcgagtgcgcttcgatacgcagttgctccaaaacccggaaattgacggagtgcagtatcagcgaggcgagctcgccggatgggaggtgcgcgcctacctgctcattaagtacgagtataggtgcgcctattgcgggaaaacgagcgctgccttcgagatcgaccacatccgtcctcgcagtcgcggcggctccaaccgtgtgtccaatctatgtgtcgcgtgtcacgactgcaatcaggccaagggagaaaggacggcggccgagtggaaacacccagaagtggaagccagagccgggaccccgctcaaggatgctgccgctgtcaacgcgacccgcttcaagttggtcgaggccctgcgagtgttcggacggcccatcggcgcgtggacgggcggacggacccgctggaaccgggcgagattcttgctcgagaagacgcacgccttggatgcgctgtgcgtgggggagatcgcgggcgtccgggcagggaagatcaagacactacgcatcacggcgatgggtcggggcgatcattgccgtaccaactggaccaaagcggggttcccgcgtggctacaagatggggcacaaacaagtcagaggtttcaaaacaggagaccgtgtgcgggccgttgtcccagccaggctcaagacggcgggcatccacgtcgggcgggtgcaggtgcgccaaagcggctcctttgatattgagacacgcgagaggaggattgcgggcgtcaatgcgaaatactgtcagctggttcagagaggagatgggtatgactattccctcgcctaa

SEQ ID NO: 913 - DNA, 312 bp, unidentified
  misc_feature 1..312: note = Ga0137378_10000779 JGI
  source 1..312: mol_type = other DNA
gtcaacgaccccacgcgtaaatgcgggggcttgtagtgggtctacaagctcgattcgttgtccagccccagttcctgatcccgcaggccgggagatgaaggaactccgttagatgggtcagggcaccaccgaacgcctcctcaattcggcgccactgccgcccagggttaaaggtcctcatcggggtggggacggtgctctgagcgcaacaagcccgtcgaacatggacgagaggagcggtgtgggaacgcctgcccacgcccgtcagtcagccccttacggggcctcgcaagaggaaaaggaagaagcatg

SEQ ID NO: 914 - DNA, 1350 bp, unidentified
  misc_feature 1..1350: note = Ga0247842_10000474 JGI
  source 1..1350: mol_type = other DNA
atgcagaagttattgagaagacggttaaccgacacacctacggatgtacaatcactcctagtctgtagctctgtggacttgtctttaaacagacctcaaagggtcagtgagcaagttttatcaactctcgataacaatcccgaaggagttcaacctgaatacacacaggggcttaaagccaacaaagtgtatgttttaagcattgagggaaaacctcttatgccttgtactccatgtaaagcaaagaagttattaaaaaacaaacaggcgatagttattaaaagattcccattcactattcagattaattttgaatgtgaaaatcaagttcagaaagtaacgctaggcattgattcaggatatgagaatatcggatttagtgctgtatcagaaacaaaagaattaatatcaggaacagtcaaacttgatggaaaaacatctgaaagattacaagaaaagaagatgtatcggagaggaagaagaaacaaactctggtacggaaaaccaagattccttaacagaacaagaaaagaaggttggctccctccaagtgttgacagaagatatcagacacatttgaatcttatcaacagactgaagaagattcttccaataacacaagttattattgaaacagctaaatttgatattcaaaaaattatgaatcctgaaattgagggcattggttatcagcaaggttctttatatgaatatcaaaacatgagagcttatcttatggctcgtgaacatggaaaatgtcagttatgtggtaaagattttaaaggaaaatcttcacatatacatcattgtaagcaaaggtcagaatcaggaagtaacagagcagagaatttagctatacttcacaaagattgccatatcaaattacataagcaaggtctgaaattatcaaaaccaaagagttataagcctaatacttttatgtccataattaacaaaaagtttagacaagatattccagatgtaaaaattacttatggaaacatcacttttgtgaataggaataatttaggattagaaaagagccatgtcaacgatgcttttgtaattgcaaatagaactatgcaggaaagaattaatccttggaacatagaacaaaaacacagacataatagagcgatacagcttaacaggaaaggttttaaaccttctataagaacatctgtgtacaagattcagccaaaggatttgatagcagttaatggacaagtgttttctgttgtaggaatacagaacaaaggttcttatgtaaaagttaaagattacccaaaagtcattcctacaaaaaatatagagagtatgtataatttcggaggtttagtatggaactaa

SEQ ID NO: 915 - DNA, 268 bp, unidentified
  misc_feature 1..268: note = Ga0247842_10000474 JGI
  source 1..268: mol_type = other DNA
gtcaactaccacgggaacaagccccgtggcttgaacagtgatgttcatggtaacagttgattagggagctaaaggaaactttatgcagaagttattgagaagacggttaaccgacacacctacggatgtacaatcactcctagtctgtagctctgtggacttgtctttaaacagacctcaaagggtcagtgagcaagttttatcaactctcgataacaatcccgaaggagttcaacctgaatacacacaggggcttaaagccaacaaa

SEQ ID NO: 916 - DNA, 1284 bp, unidentified
  misc_feature 1..1284: note = Ga0310696_10000167 JGI
  source 1..1284: mol_type = other DNA
atggtttatgtgttgaacaagtcgggaaccccactaatgccaactagacggtatggtaaggttcgccgtcttatcaaaaccggattagctattgtaattcagcaccaaccgttcactatcaaattattatatgatactcttaacaaagtacaatttgttaatctaggtgttgatgcgggaagtaaacatgttggcttttcggcatctacaacacaaacagtattgtttgaagctcaactagatttacgaaccgacatcactaaaaaaatagcaactcgcaaacaatatcgtattggacgacgctaccacaaaacacggtatcgagaagctagatttaataatcgtatcaaatcaaaacgacataattgggtagcgccatcaattaaaaataaaatcgatagccatatatattggattactcgaatatgttcttttttaccaattaaaaaaataataattgaagtaggacaatttgatactcaattattaaaagcaaatgataataatgaacttgctcccaggggacgtgactatcaaactggtgtgcaactcgccttttggaatacacgcgaatatatattataccgcgacaatcacacttgtcaatgttgcaaagggaaaagtggcgattcgatactgaacattcatcacattgaaagccgcaagattggcggaaatcgaccagataatttaattaccttatgtaaaacatgccatcgcaactatcacgctggtattttaaaattacctagtcgaataaaacgacccaaatcatatcgggatgccgctacaatgaatatgtttcgaaaccacatgtataaacaattaaaacaaatgcttgaaccaattattcaagtaaatgtaacatatggatatatcactaagcattgccgcattaagtataacctacctaaaacacatataatagatgctagatgcattagcgaacacccattagctaaaccgagttcaacatattggcgtatcaaaaaacgaagaaaccataatagacaattgcacaaatctaccattcttaaaggtgggttaagaaaaaataatcaagcaccatatgaagtatttggatttcgattatttgacgctgttaaatatcaccaaatgacttgttttgtaacgggacgccgtttaaccgggttatttgcaataaacaatattgataaaactatacgggacaattcaattagttataaaaaattatctcatatgtatcacactaattctaacctaatggaggaaatgatgtatcattcatctaataccaactaa

SEQ ID NO: 917 - DNA, 295 bp, unidentified
  misc_feature 1..295: note = Ga0310696_10000167 JGI
  source 1..295: mol_type = other DNA
atcaacggcccatagatgtataatctaaaagtgaatcttgaactctttgctctggataacacttttcgttgattagactcagtgaagcataataatatgctgaactatgttaaaaagaccatgacaccctgagatatttggccaagtctctcgccctgtcgaacgatattaaacaacccagatgggtaagggtagtgtatcgttcataaaaatctttttaaccttgtcgatggtcacccacagggattaatccctgcattacctattaaattaggtataaaaggatagcgaaatg

SEQ ID NO: 918 - DNA, 1437 bp, unidentified
  misc_feature 1..1437: note = Ga0257048_100529 JGI
  source 1..1437: mol_type = other DNA
atgaaaacagataaatttgtacttgttatcggcatgaatggtcttgggcttatgcctacaacaccacaaaaggctcgaattcttttgaaagaaaagaaagcttttgtaaaaagaaaagtaccattcacgatacaactatcctacaagacaggaagtgcaacacaacaaacaagattgggaatcgataccggttctcaaaatataggagttggcattactgacaatcaagaaaatgttcattctaaatcagaatataagttgcgttcaacaatggaaaaaagacagcttatagaaacaagaaagacttatcgccaaggaagacgatatcgaaaagtaagatatcggaaacctggctataagcctcatacaaaatatatctatgtaaaatgtccggtaaaaagaaatggtaaaatgacacactggatgaagtcgaaaaatgaatatggaactaacagatgcgaaggatggctaccaccttctgttcagcaaaaagttgaccatcatattcaaattattgacagatatcttgaagctttaccaataaatacaaaactgacaatagaaattggacgttttgatatgcaacaaatcaaaaatcccaatatttcaaatgaagaatatcaacagggacgcatgtatggctatgaaaatatgaaggcatatgtacttcataagtatggctatagatgccctgtatgtggacaaaagtttggaactgaaagaaaaaataagacgattgttctacctcaaatgcatcataagcatttcaagagcaaaggagctacagataacccggacgagtatatgcctgtgtgtgataaatgtcataatgcagcagctcataaaaatggtggagttctcgatgctataagaaaagctgaagctaaaaacattcgaggtatgagagatatgacacttatgaatatcgttgcctatcgacttatggattattataaagaagcatcatttacttttggaaacataacaaatgccgacagaaaagaattgaaaatgggtaaatctcattccaatgatgctgtgactatagcattacatagtgatattctttgcggaaatgtagaaataaatgatacagaaacaactatttattacaagcaagtcagaaagaaaaaacgttctcttcatgaagctacaccgagaaaaggtcgtaaacttccaaataaagaagctaaacgtaataataagaatacaaaagaagttgtttctaaaggaaagaagtattctttatacgacaaggttgtctataatgaacaaaatggatggataacagggtttacaggaacttcagcttatgtacaaacatatgatggagaatatctaattcctgtaggaaagaattataaacaaataagtctttcacaattggaattcgttcaaagaaataacaattggatattagaaataaaaagaaaatga

SEQ ID NO: 919 - DNA, 348 bp, unidentified
  misc_feature 1..348: note = Ga0257048_100529 JGI
  source 1..348: mol_type = other DNA
acaagtaaccgagcttgtaaaagcttggtctttagctgccctgcttcgtagggacgatgactagcctcagtttacataccacaattcgtaagctacgtttatagaatcaacactctacccagcgatgccctaactggtatgggttggagctctgtataagactgaaagtaaggttgccgcaactccatgcatcaagttctatagacattggcgaagggcaacgcataccgtcttgttgtgaagacaggagcgaatacgcagggatgcggatgagacagtgctgtactcatcatatcttttatataaataacaaaggaggcatagttcaaaatgaaaacagataaattt

SEQ ID NO: 920 - DNA, 1236 bp, Clostridium estertheticum
  source 1..1236: mol_type = other DNA
atggtcgaatattcttttgtagtggacttatctggcaacagattaagtccctgcaacaaaaataaagcatattatcttattcgtaaaaataaagctaaaatgcttaataaatttccaatggtaatacagttacaaaaaacagttaaggatgacaagaatgatgatgttaaaaattatcttggaattgatgatggaagtaaaaatgttgggctcggaataattcaaaaatgtaaaacaaaagttagaacaatttttaaaggaactatagaattaaggcaggatgtttctaaaaaaatgactgtacggaagggctatagaatgtatcatagataccataaaaggtatcgtaaaatgagatttaataacagaagcgcatctaaacgcaagaatagacttgttccaactatactacaaaaaaaacagtctatattaagggttgtaaataaactgttaaaatggactaagatagatgctatatatcttgaagatgttcttatagacataaggtctatggttgaaggtaaagctctatacaaatggcagtatcaaaagtcaaatagacttgacaataacatcagattagctgtatttatgagagatggctttaaatgcgtagactgtaattctaacaccaaacttcaaatgcaccacgctaaacccaaaaatagtggtggagcagatagtatttataatggtgtaactctatgcgaaaaatgccacatgaaaacttttggcaaagagttgctgatgatggatggatatttaactaagattaaaggtaagaatctatgtcttacacatccaatgcatgttatgcaaggtaaaaaatatctgcaagtggaacttgaaaaaatagcaccgatatctttgactacaggagctgatactgcaaatcatagaatagactggaatatagaaaaaagtcattctaatgatgctttagtggtttgtgacactgaaattaaagctactgatatcaacattaaagactggtatataagagctttacgtaagaaatcaaagggtgatacagatacgattattgatggatttaaattaagagattatgttaaatatacaaagcgaaatggcataagttatattggatatatcacagcattgtatccagttaagaaacagtttaacatgacaactaaagatgatattgtacttaaaagatacggattaaaaagtcttagccttatttcaagaccaaatagtatacggttttcataa

SEQ ID NO: 921 - DNA, 262 bp, Clostridium estertheticum
  source 1..262: mol_type = other DNA
atatacaaattgtaagaagtgaatgttgctttcaagcctaagtgagtgtagttttttgaaaaggaaatagcacgatgaactacgttagatgatcggttaaagacgtacctttagatgtacttcagtctgaagcactacgatagttagaaagaaactaacctaaggcattgttatggttagacacatcaaaactcaatacaccaccatttgacattggcaagaagaaaaatacccactaggaggatgactagagatggtcgaa

SEQ ID NO: 922 - DNA, 966 bp, Moorena sp.
  source 1..966: mol_type = other DNA
atgcgtcgtccgaaaaaagccccgataaccttgccgaggcacactttacccgcgagagcggagactgaaaaggtagcgacatgcagaacagagtattggtattggacaaaaatcggcaaccgctcatgccctgccatccggccagggcatgagcggttgctggaagggaaggcggcggtgttccggcgctatcctttcgtcatcatcctgaagcaccgggagggtggtgaaaagcaggaattggtggaaaaactggatccgggcagcaaaaccaccggcattgccctggtggcttcgttcgcccgccgtggacccaccgttatctgggcggccgaactggcgcatcgcggcgcggccattcgcaaggcgctggagcagcggagcgggcatcgacggcatcggcggggaaacctgcggtaccgggaaccccggtttgataaccggacccggcctgcgggctggttgccgccgtctctacagcaccgggtggacaccaccgggacctgggtggcgcggtgtggccgatgggcgcccgtaacccgcctctcgcaggagttggtgaagttcgatctgcaggccatggagaaccccgagatatccggaacggaataccagcagggaacactttggggctacgaagtgaaggaatatctgctggagaagtggggccggacctgcgtgtattgcgacgccgagatggtgcccctggaggtggatcatattcatccaaaaggtaagggcggcaccgaccgggcagccaatctcaccattgcctgccacgactgcaaccaggaaaaagatcaacagcccctggatctgttcctgaaaacgggcaagggacggcgccggcgcatgcaggccaacgccaaagcgttcgcgggcaaggacgcgaagaagatcgcgcaacggaagatccatgagggaacccggttgcagcggatacagcgtcaagcgaaagccccgctg

SEQ ID NO: 923 - DNA, 297 bp, Moorena sp.
  source 1..297: mol_type = other DNA
gtcaaccactccccctaaagccctaacgggttataggcggagcttgcgggtaaaaccaaaggctcctggttgaccaggctcagtcccagaataccgggactacgttattggggtcaggacaccctggaatgcgcgccagttccaggctctgtcggataaggattaaacagcaagctgggagtagtgcaagccgtgtccttgtggtatgcgtcgtccgaaaaaagccccgataaccttgccgaggcacactttacccgcgagagcggagactgaaaaggtagcgacatgcagaacaga

SEQ ID NO: 924 - DNA, 975 bp, unidentified
  misc_feature 1..975: note = Ga0105758_1004307 JGI
  source 1..975: mol_type = other DNA
atgccctgttcaccggcaaaagcgcggcttctgcttaaagagaagaaagctattgtgaagaggagaacgcctttcactattcagctgacgattgcaacgggtgagaccaaacagccggtgggtctgggcgttgatgccgggtacaaacatgtcggactgtccgcatcaacggacaaggctgaactttatgcatcccaagtcgaactgcgacaggacatcaccgatctgctctccgctcgtcgtgcgttacgacgggctcgcagaaaccgcaaaacgcgctaccgcgcgccaagattcaacaaccgcatccgcaccaagcgcaaaggctggcttgctccgtcggttgaaaaccgaatcaacgcgcacttgtcgcgcatagaagcggttcttcgactgctgccggtcacaaagatcaccgtggaaacggcgtctttcgacttgcagctgctgaagaatcccgacatttcagggaaagaataccaggagggagaacagctcggcttctggaacatccgcgagtatgttctttgcagagacgggcatgtttgccagcattgttacggcagatcgaaagacccggtgcttaatgttcatcatctggaaagcagacgtacgggcggagattcacccggcaacctgattacgctttgtgagacgtgccataaggcccttcatcgcggtgaaatcacgctgaaggcaaagcgcggacaatcgttccgcgcggaagccttcatgggaattatgcgctgggaggtgctgaatcgcctgaaggcgtcgcatcctgagctggaagtgaacaacacctacggctatcggactaagcacgcacggatcgcgaacgacatcgctaagtcgcattgtgcagatgctttctgcatcgccggcaacctcggcgccgaaaggctcggcgaattcttcttccagaagcagacgcgtcggaacaaccggcagattcataagctttccatcctcaaa

SEQ ID NO: 925 - DNA, 247 bp, unidentified; identical to SEQ ID NO: 779
  misc_feature 1..247: note = Ga0105758_1004307 JGI
  source 1..247: mol_type = other DNA

SEQ ID NO: 926 - DNA, 987 bp, unidentified
  misc_feature 1..987: note = Human gut metagenome
  source 1..987: mol_type = other DNA
ttgaaaaaagaagccgcagggcaccggcaggggaaggactgccgccccgtccggtacggtccgccgtaccgggcagggatgccggacggaaggcgtaagccggaaaggaaacatatggtagcagttgtgaccagtactgggaagcccctgatgccgaccagtgcataccgggcacgtaagctcttgaaaaagggacgtgccgttatctttaaataccgtccgtattttaccatccagctcgtggaccgggcagacggggaagtacaggaagtggaatataaatccgacaccggatccgtccatgtggggatcagtgtgtgtacggagaaaaaagaacttttaagcgaacagcgtgaccttctggagaatgaaccggaacatcacaatgaccggaagaagaaccgcaggacacggcggaaccggaaacggtaccggaagcccaggtttgacaaccggaagaagaagccccaggagggccatgaaaaatggctgccgcctaccctcctccacaagatggaggtccaggtacggctgttcagggaattctgcagggttgtcccggtgacctccgcctgcttcgagatggggaaatttgacacacaggccctgaaagccgtatcgaagggggaacccgtaccggaaggggaaggataccagaagggggaacgctatggcacggataccctccgggctgccgtattcctgcgggacggacatacctgccgtttctgcgggcgttccgtaaaggacggggctatcctccatgtacaccatgtcggttactggaagggggaccggacaaaccgtccggcaaaccttgcctctgcctgtgagcagtgccatacccctgcaaaccatgggaagaacgggatcctgtacggaaaggaaccggagtttaagaccttaaaggatgcatcttatatgacatctgtaaggtggatcatgctggacgagatcaaaaaagccgcccccggggtccaggtgtcc

SEQ ID NO: 927 - DNA, 409 bp, unidentified
  misc_feature 1..409: note = Human gut metagenome
  source 1..409: mol_type = other DNA
gtcaattacccacggccatatctccctccgggagaatgaccggggcttgcagaaggaaagataacttttgttatccggaatgacgtaagcctggttgattacttcaggccagctctgtatgtcagcggccccggctgctgaaactgcagggtaacggctccgttataaaggaatatataggcaccaggggatatcctccacgtcccacttgctctgcggcctgctgttaaacatccctttttgggtacggggaagtgtagccggcataaaccctttataacatcaagtatggagaacacttgaaaaaagaagccgcagggcaccggcaggggaaggactgccgccccgtccggtacggtccgccgtaccgggcagggatgccggacggaaggcgtaagccggaaaggaa

SEQ ID NO: 928 - DNA, 1347 bp, unidentified
  misc_feature 1..1347: note = Ga0311351_10027103 JGI
  source 1..1347: mol_type = other DNA
atgacatcaaccaaagccttcgtggttgtcttagatgtaaatgggaaacccatcatgccgacttcaggcaagcgtgctcggaagtttctggcctctggccgtgctcacatggtacgagtcagaccgtgggtcatccagatgaacgacacctaccaagaagactgtaccctcacagacatgatcgtcaaggtagatcctggcagcaagtataccgatgtggctgtggcgatacagcctgagccaggtgtcttgaaggtcaccaacctgatagagttacagcatcgtggtcgactgattagcatgcagctgaccaggagagccgctttttgcagaaacaggcgaaatcgcaatactcgctatcgtgctgcaaggtttttaaatagaacaaagccaaaaggttggttagcgccatctttgatgcaccgtgtcatcacgacggtgaattggtgcaagcgtttgatgaagtggtacccgatcactgagctggctgtcgagtgtgtgaagtttgacatgcagaagatgcaagacgccagcatccaaggtaaggagtaccagcgaggtgagctcttcgagcgtgaaatgatggagtacttgcttgtcaagtatgaccatacctgcgtctattgtgataccaagatagcccgttttgaaaaagatcatgtactggcacggagtcaaaacggatcaaacaggatctcgaacttaatcttgtcttgcagaccctgtaaccaggctaagagcaacctgtctgtgcagacctttctggctaaagatcctgtcagattagctcgtatcttaaaacagctgaagacacctctcagagatgccgcagctgtgaacgctacgcgtaaccgactgttacttgaaatgatcaaacttggcttacctgtctctacagggacaggcgctcagactaaatggaatcgcagcagacttggtattcctaagacacatgcactcgatgctatatgtatcggagatgtaaaaaccgtatctgactggcaaagacctcatcttgaagtcaagtgctccgggagaggccggtatgctcggaccattaccgataaatacggcttccctcgacttctatgtgctcgtaagaaagtacatggaggttttcaaacaggtgatctggtaaaagcttatcgccctgtcgaaaagaaaagctactatggggtagcttctgtgcgagctagattagaattttctatagatttgggcttcggtagagatgctatttctgttagaagtaataattgtaaattactgcaaagagccgacggatacaaatattttctcaagacatacagctatatctttattcaaggaaaatgtattgtcagttag

SEQ ID NO: 929 - DNA, 269 bp, unidentified
  misc_feature 1..269: note = Ga0311351_10027103 JGI
  source 1..269: mol_type = other DNA
gtccgctacccactctgtaacaagggcaggatgctaaaacatcctagttgaccagtctcagtcctgaaaaggactacgtttgtatagtcatgacaccctggagtgcctcctcagctccttgctctgtcgtctgtcattaaaagtcccgggaggtagggacggtgtggcagacctagtaagctactcaaacattgacgagaggaatttttctaggccgttaaaggcctccgtttaaccaaggagaaaagatgacatcaaccaaagccttc

SEQ ID NO: 930 - DNA, 798 bp, unidentified
  misc_feature 1..798: note = Marine metagenome
  source 1..798: mol_type = other DNA
ctgagtatttttatgagagtttttgtagttaacaaacatggtgaagtattgatgccctgtaagccgcgcaaggcgaagatcttacttcgtgagggcaaggcaacagttgttaagcgcaatccgtttacgatacagctcaagcatggctcaacgggctacaagcaagatttaacgcttggcgttgatacgggacataatgaagttggtatttctgtcgtatccgcaacgaaagaggtcttttctgctgtcgctaagatgcgcaatgatatatctgacaaaatgactacgcgaaaaatgtatcgccgtcaaaaacgtaataagttgcgctaccgagcaccacgctttttaaaccgttctgcgagcgcacgaaaagggaggctggccccttctattcaatggaaagttgatgcgcatattaaactaattaatcagcttaaatccttactgcctatcactaaggttatcctggagacaggtacgtttgatatggctaaaattaacaatccagacatcacaaacgcgcagtatcaacaaggcgttcagtatggatttgagaatgtaaaagcttatattctggcgcgtgatggatacaagtgccaaagtggaaagaaaggctgctgcgataagctacacgtacatcatatagtgtttagatcacaaggtggttcagatgcaccaagcaaccttaaaacactgtgcgaaaaacatcatgcagcgttacatgacggaaagtggtcgctggccgataagaaacacaagagtctgaaatctgccacgacaatgaacattattcgctca

SEQ ID NO: 931 - DNA, 268 bp, unidentified
  misc_feature 1..268: note = Marine metagenome
  source 1..268: mol_type = other DNA
gtcaactacccgcagctaaagcaagcgggcttgtaaggtgacttacgagataggtcttcggactgaataggtgattagtctaagtcttaattgactacgttgtttaggttatgacaccagtggatgcctcccaagtctgctgctctgtcgcttggtattaaagagttcaacgactcggtgtgctaagtgcaaaaagcctttacaacattgacgatgggaatcaacccgcaagggattagttaatttttaactgagtatttttatgaga

SEQ ID NO: 932 - DNA, 1065 bp, unidentified
  misc_feature 1..1065: note = GENOME_ACESSION: mgm4799991.3 MG-RAST
  source 1..1065: mol_type = other DNA
atgcgcgtacctgtactcgattcaaggaagaaaccgttgatgccaactacttcagccaaggccagaatccttatcaaaactggtaaggcgaagccttactggaataagttgggcatcttctgtataatcctaacgagagaagttgaacccgataaccagcaaatagcagttggaattgaccccggatcttcattcgaaggttggtccgtggtcggtaccaaaacaaccatcttgaacggcatgtctgaggcaccaacttatatcaagaaggctgtggaagttcgcagaacgatgcgtcgcgcacgaagacacagaaatcttcgtagacgtgaagcacgatttgacaatagattgaggaataagtcttcgctaccaccatcaaccttagccaggtggaacgcgaaactaaggatattgaatcagttgctcaaggttctgcctatctcagatgttgttgtggaagatgttcaagccaagtccaagaagaattgtaagaagtggaacctatgctttagtccgattgaagccggtaagaattggttctatactgaaatcaggaaacttggactgaagttgtatctcaaacaaggatacgaaaccaagattcttcgcgagaagtttaacttgaaaaaatcttcgcagaagagtaagcagacatttgggtctcatgcagttgatgcgtgggtgttagcagccgatgtggttggcgcaatcaagccaacctgtttggaattgatctattggataccgattaggttgcacagaagacagttacataggttcgaaccaacaacaggaggcttgaggtcgtcttatggtggaacaaggtcaatgggattgaccagaggaacattggtcaagcacatcaagtacggcttgacctacataggcggaactctgaagaacagagtttcgttgcatagcgttaagacgggtaaaagggtgacacagggcgcaaagatccaggattgccggatcttgaccaggatatcctggcggggcacgctcctcccacgaataaattcgtgggtttccgctacccccgcgccccacggagtttcatga

SEQ ID NO: 933 - DNA, 230 bp, unidentified
  misc_feature 1..230: note = GENOME_ACESSION: mgm4799991.3 MG-RAST
  source 1..230: mol_type = other DNA
tccagatatcgttctgggttaaatttcccttcggagttgcgaagcaggcttagtgtttcgatcctacgaaacccatcggggtcggcgtgcccaggagaggtacgtgctagggaagtacacgaacgtccttgtagcccacaatgcttctgcaaagttttttgcctcctagtctactgtttagtctcgcttagccgttcacaagccccggtcttcaggccggggtagttgac

SEQ ID NO: 934 - DNA, 756 bp, unidentified
  misc_feature 1..756: note = JGI24025J20009_10017887
  source 1..756: mol_type = other DNA
atgcaaaaagtatatgtattgaacaaagacggaacacctttgatgccttgtaaagaagcaaaggcaagacatttaataagagatggtagggcaaaagtagtaaggcgtaatcctttcacaattcgcttgaattgggattgtgagaaaaacactcaaacaattactttaggagtagatagtgggtattcgaagattgggttttcagctatcattaatacccaagaattaatatcaggtgaagttcagttaaggaatgatgtatcaaagaaactatcagaaagaagaatgtatcgaagaaacagaagaagtaaattatggtatagaaaacctagatttgacaatagagtatcaagtaaaaagaagaactggttagcaccctcaattcagcacaaattggatactcatatcaaaataatatataaggttagagaaatattacctatttcagatactgtagtagaagttgcttcatttgatatacaaaagattaagaatccggatattcaaggtaaagattatcagaatggagaacaaaagggctactataacatcaaggcatatgttaaacacagagataattatacttgccaacattgtaaaggaaagtctaaagacaagattttgcaggttcaccatataagaggaaaaaaagaaagggcaacaaacagaccagaagagttaattacagtttgtaaaacttgccatgagaaacaccacaagggaattattactattgctgttaaacccatcaagaca

SEQ ID NO: 935 - DNA, 300 bp, unidentified
  misc_feature 1..300: note = JGI24025J20009_10017887
  source 1..300: mol_type = other DNA
gtcaatcgcccctccctaaaggaaggggcttgagtcgtgagacttgagggtaactggttgattagaaggcatagaaatatgcagaagttatcagtaaagttaaagaacacaccaggagatacttctctagtctcttgctctgtaagttctgtattaaacaaagaggaaactcttagtatgcagaacatagtactggctgataacaactccgaagagaacatacgcttatcagtgggcgggcctaaagccattacactgatatatatactaaataaaaaatgagaatctattatgcaaaaa

SEQ ID NO: 936 - DNA, 1443 bp, unidentified
  misc_feature 1..1443: note = Ga0182027_10092596 JGI
  source 1..1443: mol_type = other DNA
atgttaaagcagcagttaagttggagagatacatgcacacctacggatgcttcactagtccgtggctctgtggcttcgtctttaaacagacccgaaagggtcagtgagcgaagcctaaaaacccaatttaacaactccgaagtggaccaaccccgcaaggggagaccggtcttgagagtaccagtcctaaacatgcgcatgcaaccgttaatgccaacaacacccacaaaagcaaaaaaactgctacgacaaggcaaagcaaaagtcattcaaagagcaccattcaccatacaattgctttacgctactggcgaaacaaaacagccaataacactaggcatagaccccggatacaaaaccattggattcagcgcagtaaccgccaaaaccgaattaatagctggcgaagcacccctccgcacagatatacccaaattgttaaaagaaaaagcaatgtatcgacgacaaaaacgtagccgacaccactggtacaggcaagcacgattcaacaaccgaaaaagaacagaaaaacagctaccgccaagcctacaacaaaaacttgattcacacatcagactcgcccagaaactgcaaagaattctgccgataacaaaagtaattgttgaagttgcagcttttgacacccaaaaaatgatgaacacagaaatcagcggagtagaatatcaacaaggaacattacaaggctacgaaatccgagaatatctgcttgaaaaatggggaagaaaatgcgcatactgtaaaaaacaaaacatcccgcttgaaatagaacacataattcccaagtcaagaggcggaacagatagcgtcaacaatctcacgttagcatgccatgattgcaaccaacaaaaaaataatctgaccgcagccgagtttggatacctagaaattcagcagcaagctcaagaaacactcaaacaaacgccattcatgaacgtcataaacgcaagaatcaaagaattacttaattgcgaaatcacttacggttacgtaaccaaaaacaaccgcattgcacaaggtttagagaaaacacacgtaaacgacgctttcaccatagccaaaggcatagaacaacaacgaagcttaacatatattgtaactcagcgaagaagaaacaaccgagcactacaagttaatagaaaaggcttcaaaccatccataagaagaaaaaggcacatcttccaaagcggagatttagtcagatacaaaaaagaattatgtatagttaaaggcgtcttcaactacgggatatgggcaaaattgatagattccaaagaaaaaaacttcaattcaaacgttaaaaacttgaggttgattaagtacggcaaagggctacaatttcacgctaagcaattcagccccaacatgaatgttggggtcttcttgcaaaatttagataaagtcaagaattgtggaaacgcttaa

SEQ ID NO: 937 - DNA, 229 bp, unidentified
  misc_feature 1..229: note = Ga0182027_10092596 JGI
  source 1..229: mol_type = other DNA
gtcaactacctcgtcctgaaggacgaggcttgtctcgtgagggataaggtaagagttgattaggaggctttaaaaaacatgttaaagcagcagttaagttggagagatacatgcacacctacggatgcttcactagtccgtggctctgtggcttcgtctttaaacagacccgaaagggtcagtgagcgaagcctaaaaacccaatttaacaactccgaagtggaccaac

SEQ ID NO: 938 - DNA, 1326 bp, unidentified
  misc_feature 1..1326: note = Human gut metagenome
  source 1..1326: mol_type = other DNA
atgtcggtttctgtatttgttcaggacaggaagcaccggtctctgatgccgtgccgacccgctcgggcgcgaagactcctgaagtcgggccgagctcgcgtcgtgagactcttcccgttcacgatccgcttggtggatcggcttctcgaagattcttccgttcagtccatcctcgtgaagatcgatccgggttcccgtcagacgggcgttgcccttgttcgagcggacgagaaggctcatcaccatgcgctcttcttcgtcaatctcgttcatcgcggcgaatccatccgtgatgcgttgacggctcgccgaaactgtcgccgtcggcgacgcgggaatctccgccatcgtgccccgaggtttctcaaccgcacgaagccgcagggatggcttcctccgtcgcttcgacaccgcgtggataccgcaaccgcatgggtggcgaagctcgtcaaactcgcgcccgttacggggatcgtggaggagctcgtcaagttcgacgcgcagaagctgcagaacccggaaatctcgggcaccgagtatcagcaggggacgctcttcgagtacgaggtgcgcgagtatcttcttgagaagttcggcaggaagtgcgtttactgcggagcggagaacgttccgctcaacatcgatcacgtggtcccgaaggcgcgcggcggttcgaatcgcatctcgaacctcgtgctttcctgcgtgaactgcaaccaaaagaaggattcgcaacctgttgaggttttcctgaaaaatcgccccgaagtgcttgatcgcatcaagcgccggctcaagacttcgctcgcgcacgcggcaacggtcaatgcaacgcgttggtcgctcttcaacgcgctcaaggcgttcggtcttcccgtcgaaacgggttcgggcgcactgacgaagttcaaccgccatacgttcggcgttcccaaagagcactggcttgatgcgctctgcgcggggcgggtgaacggggtgcactaccccgaggggatgggcatccttcaagtccgttgtacgggacgggggagctatcagcgcacgcgggtcgacaagtacggcttcccgcgcggctgcttgacgcgccaaaaacgcgttcacggattcgccacgggcgacatggtgaaggccgtcgtcccttcggggaagaaggccggaacctaccggggccgtgtggctgtccgtgcgcgaggttgctttgtcattcagacgcctgaaggcaaggtggacggcatcggttggcgtcattgccgactgctttcttttaacgacggatacgggtatgcgtggcttcgccccgcacctcattcctcctccgtctga

SEQ ID NO: 939 - DNA, 289 bp, unidentified
  misc_feature 1..289: note = Human gut metagenome
  source 1..289: mol_type = other DNA
gtcaatcacccctgcctgaaggcagaggcttgagcgatcaggccggttgaccagtctcagtgatccaaaaggagaactacgttgcagttaggttacaagacccgccccggggtgcttcctcagctccgggctccggaaacggcagaagcagacaagatttgggtattcacgaaacggtctgccgttgcaatgccggactgcaacattggcgaggggaattcaacttctttgttgatgtcacgggggtaaccccgattaaccgtaaggtttacaaaacatgtcggtttct

SEQ ID NO: 940 - DNA, 885 bp, unidentified
  misc_feature 1..885: note = Human gut metagenome
  source 1..885: mol_type = other DNA
gtggtaaggcgcacgcctttcaccattcagctcacgattgcgaccggcgagtccaaacagccggtgagtctgggtgttgatgccgggtacaaacatgtcggactttccgcatcaactgaaaaggctgaactttatgcatccgaagtcgaactgcggaaggacatcaccgatctgctctctgctcgtcgtgcgttacggcaatcccgccgtaaccgcaaaacgcgctaccgcgcaccgaggttcgacaaccgcatccgcaccaagcgcaaaggctggcttgcaccgtcggttgaaaaccgaatcaacgcgcatttgtcgcgcatagaagcggttctccgactgctgccgatcacgaagattaccgtggaaacggcgtccttcgacatgcagcggctgaagaatcccgacatttcaggaaaagagtaccaagaaggtgaacagctcggcttttggaacgtccgcgagtatgttctttttagagatgggcacgtctgtcggcattgtcacggcagatcgaaagacccggtgcttaatgttcatcacttggagagcagacgtaccggcagcgattcgcccgacaacctgattacgctttgtgagacgtgccataaggcgcttcaccgcggcgaaatcacgctgaaggccaagcgaggacaatcgttccgggcgcaagctttcatgggaattatgcgccgggaggttttgaaccgcctaaaggcgtcgtatcctgagctgaaggtgcacgaaacctacggctacttaaccaagcacgcgcggattgcgaacggcattgtcaagtcacaatggtgcagatgctttctgtattgccggcaacttggaagccgaaaggcctacgggcgcgaaattcatttctttcccagtaac

SEQ ID NO: 941 - DNA, 247 bp, unidentified
  misc_feature 1..247: note = Human gut metagenome
  source 1..247: mol_type = other DNA
gtcaactacctcggcctaaaggccgaggcttgaaaaagcctctagttgactagcctcagtctgtcgttttgaggactacgttggttgggaatgcacaggcaccgcgggatgcagatcctagtcccgcgctctgcggccgatggttaaaagctctgagaggtaggagcggtgctgtcggcttgaaaccccctccaacattggcgaaggatcacaaccggtcgaaagaccgaggagacaaaacttgaga

SEQ ID NO: 942 - DNA, 1020 bp, unidentified
  misc_feature 1..1020: note = Ga0066665_10044143 JGI
  source 1..1020: mol_type = other DNA
atgtttgtacccgttgttaatagcaaacacaaaccactgatgcccaccacagctgccagggcacggcgctggatcaagagcgggaaagccacaccgttttggaagcagggcatcttctgcgttcggctcaacgtcgagccttctgccagcaacatccaaccggttgctgtcggaatcgacccaggttccaaacgagaaggttacagcgtcgtgtccgccgcccatacgtacctcaacctgcaggctgataccgtggactgggtcatggaggcggtaaccactcgccgccagatgcgccggacgcgccgagggcgcaatactccctgtcggcagccacgctataatcgcttgcgaaacacaaagaagctcccaccttctacgaaagcccgctggcaatggaaactgcggctgtgccggtggcttatatccttatatcccatcgcagcctttgtggtcgaagatatcagggttcagacagcaggcaagcggcgatgggatcggagtttttctccgcttgaagtcggcaagcggtggttttatgcggaactagcgaggcttgccccagtgttgacgaaacaaggatgggaaaccaaggagcttcgagaccaacttggcctcaagaaaaccaacaagaaaacggcggaggtgtgggaggcccattgcgtcgacgcctggtgtctggctcattggtgggtaggaggcaaactcactccggacaatatccgcttgcttgcggtgacgcctttgcactggtatcgtcgacaattacaccgacgcgaaccagaaaagggtgggaaacgcaagccctacggaggcaccatgagtctgggcatcaagcgtggcaccctggttaaacacccacattatggacttgtgtatgtagggggcaccatgcgcgggaaactcagcctacatgcacccgagagcggtaggagactcacacaaggggccaaacactccgaatgccatcttatcaagctgttacgctggaggacgcgactcctcccaatccgcttatga

SEQ ID NO: 943 - DNA, 241 bp, unidentified
  misc_feature 1..241: note = Ga0066665_10044143 JGI
  source 1..241: mol_type = other DNA
gtcaagtaactgctcccccagaagggggcttgtgagcacgaacgactggccatcgggaggcccacaagaccaaacacgagactagcttgcccaagctctggctacagggcacttgaagggaactgaaccatctgggtgtggcagcccgcaagacgatacgaatgcctccctagtttgtatccgctctggtggtcagcagcgaagggaacgtagaaactccgcaaggaggcttatcgcatat

SEQ ID NO: 944 - DNA, 1185 bp, unidentified
  misc_feature 1..1185: note = Ga0216255_10000297 JGI
  source 1..1185: mol_type = other DNA
atgagagtttttgttattaatcagcatggtgaagcattaatgccttgctatccccgaaaagccaaaatactgcttagagcaggaaaagcgaaagttatttctcgttcaccttttactattcaactgaaatacggctcaactggttataaacaggatttaactctgggcgttgacacggggcataacgaagttggcttgagtgttgtttcagaaacaaaggaagttttttcagcggtggcttctatgcgaaatgatatttccaagaaggtgactgagcgaaaaatgtaccgtagaaacagaagaaaccgattgaggtatagacagcctcgttttctcaacaggaaagccagcaccagacaaggtaggcttgcaccttctgttcaatggaaagtggatgcccatgcaaaattgatccgtcagttaaaaatgttattaccaataacaaaggtggtattcgaaacgggtacgtttgatacccataagctaaaaaatcctgacattaagaatgagcaatatcagaaaggcgttcaatatggttttgagaatgtaaaggcttatgtcttaagtcgtgatggctataagtgccagtgtgggcaaaaaggatgtgcctctacattagaggttcaccacattaaataccgctctcaaggtggttctgatgcacctgaaaatctcattacattgtgttcaaaacatcataaggcactgcatgacggaaaattgagtctgaatattacaaagcacaaaagtttaaagtctgccactacgatgaatgtgatccgttctcagttgttgaagttgtttcctgatgcgatagaaacttttggttatgtgactaaagcaaatcgctatcaacatgacatcgataaaagtcatagcaatgatgcttttgtcatagcgggcgggtcttttcaggaaagagagttagagcggatggtgagctttaaacgtaagaataaccgttctatccagaagaaccgaaaaggtttttctccttccattagaaaacaacgatatgcaatacaaccaaaagacctggtgaattttaaaggaaagcaataccaggcggtaggcatacagaacaagggagcatacttgaaaatgtccgatggacttaaagctattgtaaaatccatgaagcaaattgaagtggtatttcatcaaaaaggtattatttacgcatga

SEQ ID NO: 945 - DNA, 283 bp, unidentified
  misc_feature 1..283: note = Ga0216255_10000297 JGI
  source 1..283: mol_type = other DNA
gtcaactacccactgagctgaagactcaggggcttgaatcgtgagattcgagatagcggtagcaatatcgtaataggtgattagcctaagtgcttagagcactacgttgttttagttatagcaccctcggatacctcccaagtccgttgccctgcttcttggtattaaaagagttcaacgactcggtgtactaagactgacaagctattacaacattggcgatgggaatcaacctcgtgagaggattagtttttaattaactatttaaggttttaaaatgaga

SEQ ID NO: 946 - DNA, 357 bp, unidentified
  misc_feature 1..357: note = Wastewater metagenome
  source 1..357: mol_type = other DNA
atgttagtatatgttttaaataaccaaggaaccccaattatgccttgtagttcagctaaagctagaaaactactaaaagatggaaaagctaaaatattaaaaggaggaattagaaaattaaatcaagctaagtatgatatacataactttagattgtttgataaggtaaaatatgagaataaagaatattttatatttggtagaagaaatagtgggttttttgatattagaaatttaaaaggcgaaaaagtcaacaaaggtagtattggatataagaatttaaaattagttttaccaagaaaaaatatattaattgagaggagagaaggcaattcctcagctaagctaaagacttag

SEQ ID NO: 947 - DNA, 259 bp, unidentified
  misc_feature 1..259: note = Wastewater metagenome
  source 1..259: mol_type = other DNA
ttataagtcaactaaccccttgctaaagcaagaggcttgaaaaagcctaagttgaccagtctttgtggggtttaaaccccactccgttattttagttatcataccttggtgtgttttgtctagcaccatgctctatgtgggcaacgtaaacagttctgagaggtaggaacagtcgacccaatgtgtatgtctcacatacaagctattataaccaatctaagacaacattacccgaaaggagattatatattttatgtta

SEQ ID NO: 948 - DNA, 852 bp, unidentified
  misc_feature 1..852: note = Ga0306925_10047498 JGI
  source 1..852: mol_type = other DNA
gtggcgtcagcggcgcacacgtacctcaatgtgctagcggatagcgtcgattgggtaaaagacgccgtggaaacacgtgccatgttgcgtcggtcccgcagaaaccgaaatacaccttgcagagcgaatcgcaaaaacagagctaaatgtccatttcctccaagcaccaaggcgcgctggcaacttaagctgcgcgtagtcgatcgctttcgccgtatgtaccccattaccggttatgcggttgaagacataaaggcatctactcacgggaagaacgaacgctggaactcggcgttctcgcctttggaagtaggtaaaaagtggatgtatgccgagttgcgcaaactcggcaccctgacgttaaaggctgggcacgagaccgcagaactgcgcaaggcgtttggtgttgtaaaaggtagcgataagatggcgttgtgctttgccgctcacaatgtcgattcctgggtattggccaaggatgcgttgagagcggcaggaacgccggagaacacgcagcttcttcactgtaaagcgcttcaattcagacgccgagcgctccatctccagaacccggcaaaatacggagtgcgtcgtagtcatgggggtacgctgagcatggggtttaaacgaggatcgctcgttaaacatccgaagcacgggctctcgaccgtaggcggaacgatgcaaggacgagtcagcctgcacagcttgcacgggaaaaggctttgccgaaacgcaaaacgcgaagaaacgacccttttaaaacgaacaaccttaatttttcaagccgtccgcaggaagggcattcctcccatgccggaaggggtgggtttcctgcctaaatctctatga

SEQ ID NO: 949 - DNA, 281 bp, unidentified
  misc_feature 1..281: note = Ga0306925_10047498 JGI
  source 1..281: mol_type = other DNA
gtcaacgacccacgaccaaagccgtgggcttgagggagcacgaaacaaacgatgcgaactgaagttaaatccgagactagcttggacaagattcgaggcgactcgggtcgtttgaagtcaactgagatcactgccggtggtacggcgcaagacatgcggggtgcttcccaagctccgcctcaatctgtggtacagcagcgaagggaatgcatacacagatacaggactggcttaccgcgaaatcctgtagttcccgtccttgctcaggatggcgaaccatt

SEQ ID NO: 950 - DNA, 813 bp, unidentified
  misc_feature 1..813: note = Human gut metagenome
  source 1..813: mol_type = other DNA
atgacaaattatgcttttgtattagatactaatggtaaacaattagcaccaacaaaagaacaaaaagcatggtttctaattcgtaaaaagcgtgcaacattggttagtaaatatccaatggtaatacaacttaataaagaaattccagatgaagacatctgcaaagataaaattcgttttggaattgacgatggtggactccatgtaggtgttgcattagttcaaaaatgtcaaactaaaaataaagtattgtttaaaggaattattgaacaacgcaatgatgtaaaacatcttatggaagttagacgtgaatatagacgttatcatcgttatcacaaaagatatagacagaataggtttaataatcgtagttcttctaaaagaaaaggaagaattgcaccaagtattttacaaaaaagacaagctataataagagttatcaaccaactaaataaatggataaatattactgattattggttagaagatgtatctattgatattagagcattgacggatggttataaatcctgtggttggcaatatcagaaatctaatagattggatgaaaatattaggaaggctgttattcttagagatggttgtaaatgtatggaatgtggcagatcaaattgtaaattagaagtacatcatattaaaccaagaagattaaatggttctaatacattaagtaatcttattacgctatgtaaaacatgtcatcaaaaaacagagggcaaagaagaacagtatatgaaacattattttgatatattgaaatcttctgataagaaaaatcttaattacgcttaa

SEQ ID NO: 951 - DNA, 289 bp, unidentified
  misc_feature 1..289: note = Human gut metagenome
  source 1..289: mol_type = other DNA
tagataaacatactcaaaagtggacacaataagtcttttgagcatggattaacaataggtctcaaggctaagtgactgctactatggaaacatatgttgcagatatgaactacgttgtatagtaaggtaaaaacacacctgtaaatgtaatcttcagtttgctgctctgtgagtgccaatcaagaaacatagctaatgtcctgctatgataacagagaaatacatgtcctctatatgacattgccaagaagaaaaattctccgcaaggaaggtgtcagaaatgacaaat

SEQ ID NO: 952 - DNA, 1443 bp, unidentified
  misc_feature 1..1443: note = mine drainage metagenome
  source 1..1443: mol_type = other DNA
atggaaaagaggtgcgaaatggcggtttatgtactggacaaaaagaagcaaccgttgatgccgtgctcggagaaacgggcacggctgctactggagcgtggacgggcggtcgtgcataagatttatccgttcaccatccgtctcaaggaccgggtcggtggggcactgcagccgctgcggctcaaaatcggtccggccagccacaagaccggaatcgccctggtgcgcgaatccgagacggtggatccggtgacgggagaagtacaacgggtggagcacgtgattaacctgattgacctggagcatcggggcgggctgatcagcaagaagctggaacagcgttccaacatgcgtggcggtcggcggcaccggaaaacgcgttatcgtcccgcccggttcaataaccgcagccgtccggagggttggctgccgccaagtctgcagcatcgggtggacaccacggagtcctggtgcaaccgattaacgtctttggcgccgattacggcgatcagcaccatgctccaccggttcgatacgcagaaactacaggatcctgaaatatcaggcatcgagtatcaacagggcaccctgttcggatatgaggtgcgcgaatacctcctggagaaatggggacgcacctgcacctattgtgacgccgatgacaaacccttgcaggtggaacacatcctggccaaggcgaatggcggcaccgataggatcagcaatctgacgttggcctgcgagccctgcaaccaggagaagggcaagctgttcctgcccgagttcttgagtacgggcaaaaagcggttccgccgctttgaacggaacgcgcggcatttcgctacgacggggaaaggcaacattgatgcaaagaagctcgcagaacgcaaacagcacgaggtgacccgattggcgcgcatacaggcgcaggccaaggcgccactcaaggatgtggcagccattaacgctacccgcgccgccgtactgaggatgttggaaggcacaggattaccggtggagatcagcaccgggggtcgagccaaatggaatcgcacccggttcagtataccgaagcggcacgccctggacgccgcctgcatgggtcaggtggatcgtatcgaggattgggatcgtccctattggcgggtgcattgtgacgggcgtggtcagtaccagcgcaccaatctggacaagaaaggtcgccgtgttggttttttgccgcggcagaaacagcaccacggatttcagacgggggacatggtgcgggccgaagtggcgaatggcgtacataaaggtatccatatgggacgggtggccgtgcgttcgtcggggtcattcaagatgcgcacgaaaactggtctgcacgatggcgttaaagcggaagattgccggttgattcagcgttcagatgggtacagctattttcgggagcacgttgcatga

SEQ ID NO: 953 - DNA, 321 bp, unidentified
  misc_feature 1..321: note = mine drainage metagenome
  source 1..321: mol_type = other DNA
gtcaattaccccgccctgaagggcggagcttgcaaggcggtacgcaggctaggttgatcatggggaccgtgtaacgtcgtgagacgttggtagacgtttataacaggtcgtacagacgcactccgggatgctgcctcagttccgcgacactgcaaggttgggctcatgctgcggaaaggcaaagccgcgaaggaccaatcgtcaccgcaaggtgagagccggttatagaccccccgaggggagacatttgtacaagttgttaccgggcccgtaagggttgcaccccgcaagggcgttatggaaaagaggtgcgaaatggcg

SEQ ID NO: 954 - DNA, 675 bp, unidentified
  misc_feature 1..675: note = Ga0401356_0239 JGI
  source 1..675: mol_type = other DNA
atgtctaatcttgttttcgttctagacactaatataaaaccactcaatctctgtacaccgggggttgctaggggtttactcaaagccgcaaaagctaaggttttcaggaggtttccgtttacgattattctgaacaaaagtcctgatgtcttaaaacggattttggcacaagccaaacgacccttgaaagacgcagccgccgtcaactctacccgatgggctttgttgaatcggctcaaggaaatcgggttacctgtctcaacaggtagtggtgggaaaactaagtacaatcgcattcgtttgaagttacataagcggcactatatcgatgcggcttgtgttggggatgttgagcaattagaaattgcaacgaatcaaccattgctcatcaaagctacagggcatggaactcgtcaaatgtgtcgcacagataaatttgggtttccgagtcggtacgtccccagaaataagtttgtcaaatgctttcagactggtgacattgttaaggctgtcgtcacctctggaaaaaaggttggaacttatgtgggtcgtgtagccgtgcgaacaactggcagcttcaacatttcggcagctaatggattgattcaaggcattagccacaaatattgcagcctagtacatcggaaagatggataccaatacagcttcttctaa

SEQ ID NO: 955 - DNA, 244 bp, unidentified
  misc_feature 1..244: note = Ga0401356_0239 JGI
  source 1..244: mol_type = other DNA
ggctataagccgggggcttgaatgaagcccacacctgaccagaagacccgttgaaaactggtagccgttattagcaagagtttaagttctcaccttgggatgcgtgccagttccaagctctgaaacctcagcattaaacaggtctacaagggttaagccagtgtgttgaggatacgccacctaataacaacttcgaggcaaacgttacgagtttttcaggacagacgcaacaatgtctaatctt

SEQ ID NO: 956 - DNA, 1245 bp, unidentified
  misc_feature 1..1245: note = Human metagenome
  source 1..1245: mol_type = other DNA
atgccttgttctccggcaaaagcacgccttctgcttaaagagaagaaagctattgtgaagaggcgaacgcctttcactattcagctgacgattgcgaccggcgaggccaaacagcccgtgagtctaggtattgatgccgggtacaaacatgtcggcctttctgcatcaacggaaaaggctgaactttatgcatccgaagtcgaactgcggcaggacatcaccgatctgctctctgctcgtcgcgcgttacggcagtcgcgccgtaaccgcaaaacgcgctaccgcgcaccgaggttcgacaaccgcatcagcaccaagcgcaaaggctggcttgctccgtcggttgaaaaccgaatcaacgcgcacttgtcgcgcatagaagcggttcttcgactgctgccggtcacaaagatcaccgtggaaacggcgtctttcgacttgcagctgctgaagaatcccgacatttcagggaaagaatatcaggagggagaacagctcggcttctggaacatccgcgagtatgttctttgcagagacgggcatgtttgccagcattgttacggcagatcgaaagacccggtgcttaatgttcatcatctggaaagcagacgtacgggcggagattcacccggcaacctgattacgctctgtgagacgtgccataaggcccttcatcgcggtgaaatcacgctgaagccaaagcgcggacaatcgttccgcgcggaagccttcatgggaattatgcgctgggaggttttgggccgcctgaaggcgtcgcatcctgagctggaagtgaacaacacctacggctatcggactaagcacgcacggattgcgaacgacatcgctaagtcgcattgtgcagatgctttctgcatcgccggcaacctcggcgccgaaaggctcggcgaattcttcttccagaagcagacgcgtcggaacaaccggcagattcataagctttccatcctcaaaggcggcattcgaaagcgcaatcaggctccctatgagatcaaaggcttccgcctttttgacaaagttgcctgccagggagaagaaggcttcattttcggccgtcgatcatctgggttctttgatgttcggaaggttgacggaacccgaatttcggcaggcatcagctacaagaagctgcatctgctggaaaagagacgaacctatttaacagaaattcgaaaggaggaggtgcttcctcccctgcctgaaggcaggggtctccgcgcctaa

SEQ ID NO: 957 - DNA, 247 bp, unidentified
  misc_feature 1..247: note = Human metagenome
  source 1..247: mol_type = other DNA
gtcaactacctcggcctaaaggccgaggcttgaaaaagcctctagttgactagcctcagtctgtcgttttgaggactacgttggttgggaatgcacaggcaccgcgggatgcagatcctagtcccgcgctctgcggccgatggttaaaagctctgagaggtaggagcggtgctgtcggcttgaaaccccttccaacattggcgaaggatcacaaccggtcgaaagaccgaggagataaaacttgaga

SEQ ID NO: 958 - DNA, 1326 bp, unidentified
  misc_feature 1..1326: note = Ga0213833_1005875 JGI
  source 1..1326: mol_type = other DNA
atgccaaaacaaaaacatagaaaccttgggcagcaaagagtccttgtgctttcaaacacaaagaagccgttgatgccttgccatcctgcaagggcaagacgcttcctgaagcaaggaagagctgttgtctatcgacgtttccctttcaccattttgttaaaagaccgtgaagacggctacatacaacccattgaatgcaagattgatcctggtgccaaagagacaggcattgcattcgtagcctctttcaagcgtgggaacgtttgcatttgggccgctcatcttgaacacaaagggtttcaagtcaagcaagcactcgaaaagcgaagacactttcgaagagcgagacgcaatcgaaagacccgtcacaggaaggcccgctttgacaatcgcgcaaggcccgagggttggttgcctccaagtctacaaagtcgtgtggataacatcacgaacttcatccgtaagtatcatcgctttgttgtcttcactggcttcaccgttgagcatgtcaagtttgacatggtgctaatgcaaaacccagaagtgtccggtattgagtaccaacagggaacgcttcatggttacaccgtcaaggaatacttgctcgagaaatacaagcgttcctgttgttactgcaacaaaacagatgtgcctctggaagtcgaacatgtcgtacctaagagtaaaggcggctcgaatcggattgcgaatctggtgttggcttgtcgcaagtgtaacgaaaagaaaggcaccaaggatattgaagtctttctcaggaaaaagcctgaacgcttgaagacaatcaaagcaggtctcaagaagccactccgtgcagcggctgcggtcaatgccacacgcaacaagattgttagagagcttcgagccttcggattgccagtcactacgacaacaggcgcacaaacaaaattcaaccgaaaggttcaaggctaccccaaagcacactggctcgatgctgctgtcctgggagaacaaggcgaatctgtcgaattactctctggttctatcttacacatcaaggccatggggagaggttcacggcaatcttgcaagccagataaacacggcttccctcgtacaaagccaaaggcaaaagcaaagaaagtcaaagggtttcaaacaggagacattgtcaaagctgttgtccctacaggaaagaaagtgggtacgcacatgggtcgtgtcgcagttcgaagtagcggctcatttaatatcaaaaccaaggacaaaaccatacaaggcatcggttatcaacactgtcagttattacacaaaatggatgggtacgcctatgactttaccgactga

SEQ ID NO: 959 - DNA, 330 bp, unidentified
  misc_feature 1..330: note = Ga0213833_1005875 JGI
  source 1..330: mol_type = other DNA
gtcaacgaccccatggctgaagccaggggcttacgagagtcagcccgtatgttgaccagggtcagtcgctcaaaggcgactacgttcgagtggaacatataggtaccgtatggttcttctccagccatacgctctacgatagatggttaaacggttacggggtgatgccagtgccatttgtagacaaaacccactcagaacattcccgaggagacctttacccgcgaaagcggtgaacgttagacctcaatcattgaggtcacttgataacaaggagttggcacaatgccaaaacaaaaacatagaaaccttgggcagcaaagagtcctt

SEQ ID NO: 960 - DNA, 1482 bp, unidentified
  misc_feature 1..1482: note = GENOME_ACESSION: mgm4547164.3 MG-RAST
  source 1..1482: mol_type = other DNA
atgacaccatgcccaaacacaagcaaggaggcatcaatgcaggaatacatttatgtgttggcgaaagatggcaccccattgatgccaactttaaggaaacgccacgttgagaaccttattaaacgtgacaaagcggtcagagtggaacttgtaccgtatgtcatacagctgacatatgagggccccaaagaaacacagccgttatatggaggtactgaccccggaaggaccaatatcggaaatgccgttatgaccaaaggcggggtagttgtgtacaaagaccatgtgaccaccagaaataaagacatagcaaaactgatggcggaacgaaaaatgcatcgccaacaatcaagacgaggtgagcgtctggcacgcaaacgtcttgccaaacgtcttgggacaacaaccaaacaccttgagagaaggattcttccagggtgtaaagaaccggtaatgttcaaagatattagcaacacagaagcacggttcaataatagaaaacgtgctcccggatggataactccaagtacaaggcacatgatacatactcatatcaatatgattaagcgaatctgcaaaatactgccggttacatattggacacttgaaacgaataaattttcattcatgttaatggaagacggaactgtacgtgggagagacttccagaatggacgacttaaaaactttactgatgtgtacgaatatgttgggaaccaacaaaatggaaaatgtatttgctgcggaaagccaatagaacattaccatcatatcgtaccaagacatagtggaggttcaaaccgtcctgagaacattattggcgtatgcaaaacatgccatgaggaaatacatactggacaaagagatatcacagccattggtgagcataagaaatatgcagcactttcggtattaaaccaggcgataccgttcattgaaatggaactatcaaaaatattcggtaataactttatgacttgtacgggatatgaaacatacgaactgcgtcaacgtttcgccattgcaaaagaccacgacaacgatgccgtatgcattgcatcctaccaggcatccccagattttatcgaggatacacaattaactcatcaagttatgcagttcagaaggcacaaccggcagagaattaattcacaacgtgaacggacatataagcttgacggcaaagccatagcaaaaaatcgtaagccaagatttgagcaaaaagataaggcgttgtctgatttaaatttgtcaccggctgaaatttcaaggctgacagtaataccaagtcgtcggtattacaacaatatggaccgacttatgccgggaaccgaattcttgtatgaaggtcaacgctacatcatgagcgggcagcactcgaacggttctttgctgagagcggtaggacaaggtaacagagagttcaaagcttccaaatgtcgtgtcataaaacaaaacaggggacttgtatacgtctcctaa

SEQ ID NO: 961 - DNA, 238 bp, unidentified
  misc_feature 1..238: note = GENOME_ACESSION: mgm4547164.3 MG-RAST
  source 1..238: mol_type = other DNA
gtcaataaccaatgactaaagtcacgggcttgtaagagctgtcatgtgcaattttagcatgttcgtgatggcggaagtggattattgagcagagctatgacccggtattcaccagtggatggaactagtccgctgctctggttaaccgggccgaggctaaggaaacagttttatggcatggaagagccttacaagctatgacaccatgcccaaacacaagcaaggaggcatcaatgca

SEQ ID NO: 962 - DNA, 1200 bp, unidentified
  misc_feature 1..1200: note = Ga0209345_10000187 JGI
  source 1..1200: mol_type = other DNA
atgttagtatacatactaaacaaaaataatcaacctttaatgccttgcaaaccagcaaaagcgtctaagcttttgagggagaaaagggcagaagttgtcaaaagaacaccttttactattaaattgaaatatggtagttcgggatatgttcaaaaagctatattaggaatagatacaggatatcaactcataggtttttcagctattaatgaaaaacaagaactaatctcaggtgaagttaaattagattgtatgatgcctaaacgcttacaggatagagctatgtacagaaaaagtagaaggaataggttatggtatagaaaaccacgttggagaaataggattggttcaaaaaagaaaggctggctacctccatccattcaaagaagatatgaaacacatttaaaacttatagaactgattaaacaaatgttacctatacataggattataatagaagtcgggaattttgatatacaaaaaataaacaatccggatattcaaggaaaagaatatcaacaaggcaatatgtatgaatatcaaaatattagaagttatcttatgagaagggaacatggaaaatgccaattatgcgggaaggaattttcaaaaacaaattcatcacatatgcatcatattataccaaaaatgaaaggcggtacagataaaacaaacaatctatctttactacatcaaaaatgtcatattagattacataagaaagggttgtataaccaattgaaaaaaaacaagcaatacaaagattctacattcatgaatatcgtcaaatggaaatataaaaaagatattgattgtgatataacttacggagcatatactttttctgatagggttaaaataggaatggagaaatctcatgtgaatgatgcttttataatagctaaaggtgagatccaatccagatgtcattcttttaatatagagcaaaaaagaagaaataatagatgtttacaagtgaatagaaagaaatttaaaccatctataagaaggaaaaggtataaacatagacctggagatttagttaaaatcaatggaaatttatacgaagttaaaggaatacattcctatggtactcggattagattattagattcatctggaaatattataaatatatctactaaaaaattagatgattggatatatcatcaaaaaactttgatatggagagcagcttga

SEQ ID NO: 963 - DNA, 250 bp, unidentified
  misc_feature 1..250: note = Ga0209345_10000187 JGI
  source 1..250: mol_type = other DNA
gtcaactaccctttactaaaggaaggggtttgaatggtaacattcaacgcaagagttgattaggaggcatgagtaattatgcagcagtttggaaatgaaatacatacacaccttggagatgcttcaccagtcccaagccctgtgatttgatattaaacagagattataggtctcagtgtatcagatttaaaaactttccaaacaactccgaggtgaatcaatccatggatagggagtatactttatgtta

SEQ ID NO: 964 - DNA, 1332 bp, unidentified
  misc_feature 1..1332: note = uncultured Clostridiales bacterium
  source 1..1332: mol_type = other DNA
atgttagtctatgtaatcagcaagggcggacagcccctcatgccgacatccagatgcggcaaagtccgcaggatgctaaaacaaggcaaggcaaaagttattaagcgctgtccgtttaccattcagctgctgtatgaacctgaaacagccgttatccagcctgttgaggtcggtgacgataccgggtcaaagcacaacggaatatcagcagttgcagtctatccggacggcagaacaaaggaagtctatgcatcagaggttcagatgcgtcaggacataacgaaaaatctttctgtacggcgtgagatgcgccgcgcaaggagaaaccgcaaaaccagataccggaaaccaagatttgacaaccgggtacgatccaagcacaaaggctggctgccgcctacagtggaaaacaagatccagacacatcgtcatgagctgctgtatgtgtgttcaatccttccggtgaccaaagtaacgatagagacagcatcctttgaccttcagaagctaaaggccgatctcgatggcttaaagcaaccggaaggcactgattatcagaaaggcgagcagttcggtttctggaacgtcagggagtatgtgttattcagggatggccatatctgtcagtgctgcaagggcaaaaggaaagatcccattctaaatgttcatcacattgagagcaggcaagccggcggcgatgcgccaaataacctgataaccctgtgcgagacatgccataaggcataccatgccggaaagatcaaactgcctgcggatatcaaacgcaaagcaactttccgggatgccacttttatggggatcattcgatgggccttctataacgtcataaaggacgaacttggcaccagaggcatcagtgtcaggatgacatacggctatctgaccaagaataccaggataacaaataaccttcaaaagacgcactgcattgatgccaggtgtatagcgggatatccggaggctgatccattaggctattacttctacaaacagaaaataagatgccacaatcgtcagatccacaagatgaccataggcaagcacggcatcaggaaagccaatcaggcgccttatctggttaaagggttcagacttaacgatatagttacagctaaaggcagtgaatggttcgttcacgggagacgtagtaaaggatcgtttgtactggcgacattaaacaatcagaagttggaaatctcaccatcaaaaataagatttgtttctgtttctgacacatatcttacagaaaggagaaaagcgctccccaccctccctatagaggaaggggtacccgcgcttgtgtgctcttga

SEQ ID NO: 965 - DNA, 314 bp, unidentified
  misc_feature 1..314: note = uncultured Clostridiales bacterium
  source 1..314: mol_type = other DNA
gtcaatcacccaccacttaacctgacggtttgaagtgggggcttgcaaaagctctgattaactagcctcagtgcaacggcccggcgtaggccggattccattagcactacgttgtcccagtcacaacacctgcgagcgttatgcctaactcgctgctctgttgtccgttattaaatgttctgatgggtaggaactgtgtggcggatctaaaaagctctgacaacattggcgaaggcatcattacggcccggtatgtgccggcttaaagcgttaaacatacctattctacggaaaggagccgctatcagatgtta

SEQ ID NO: 966 - DNA, 1509 bp, unidentified
  misc_feature 1..1509: note = Sediment metagenome
  source 1..1509: mol_type = other DNA
gtgcgttgccagctccaggccctgtcgttcggcagtaaacaggcatacggggtcgaagccagtgtgcagcacataaaaagcctggataacattggcgaggcaaacattaccccgaacgggaggctctttatgagcaaagtctttgtgcttgataccaagaaaaggccgcttctaccttgccatcctgcgaaggcgaggaaactgcttaagcagggaaaggcagctgtgtttcgatactatccctttaccatcatcttgaaaagggaagttctcgagccagcactgcagccattgaggttaaaggtcgatcctggaagtaagatagccggtcttgcagtagtaaatgatgcaactggcgaggttgtgtttgcagctgagatccagcatcggggagatgagattaaagatagtctagatacccggcggacgctccgaagggcacgcaggaaccgtaagacgcggtatcgtgcaccacggtttttaaaccgcaggagaagagaggggtggttacctccttccctggagagccgggttgccaatgtggtaacctgggtaagtcgtataagaagatactgtcctatccaatccatctcgatggagctggcaaaattcgacctgcagaagctggagaatccagaaatccagggggttgagtatcagcagggaaccctctttggctatgaagttaaggaatatctgctggagaagttcggacacaagtgtgcctattgccacgggaaatctggggacccaatgcttgaagttgagcacgttatacctaaaaatcctaaacatggtccgaaaggcacagaccgaataagcaacctggttattgcctgtgagacctgtaacaaagccaaagataacgatcaaccggaagaatggtatgcacgcttacaggcttcggaagacccgcttgaccaggagcgtgccaggaatttcccggctgttatgcaacagcttaagcaacctctaaaggacgcgactgccgtgaatgcgacaagatgggttctttaccggcaattaaaggatatgggactgccaatggaagccggctctggcggcagaacgaaatataataggtcaaaattaggtctaccaaaagctcactggatagatgctgcgtgtgtaggcgtcagtaccccagagcagattagcattaataaagttgtagtcttggagataagagctgtagggcatggcaagcgccagcggtgcgggaccgacaaatatggtttccctatccggtatgcgcctaaagttaaaacatttatggggtacaagacaggtgatttagtaaaggcagtaattccgaaaggcaaatacgccggggttcatatcggtaggatagccatacgacataagccaagctttaagctaaatggcttcgatgtgcatcctaagtacctgcggctccttcaaggggctgatgggtacgaatatgttttgaaaaggaaaagcgacgtctcctccccaggcataaatgccggggctcccggcgtcgcatga

SEQ ID NO: 967 - DNA, 254 bp, unidentified
  misc_feature 1..254: note = Sediment metagenome
  source 1..254: mol_type = other DNA
gtcagctaccccacgcataaatgcgggggcttgtgatgagcaagcccggagctgaccagcctcagccagggccgtaaggccatcgggctacgttatccaggtcatgacaccctggggtgcgttgccagctccaggccctgtcgttcggcagtaaacaggcatacggggtcgaagccagtgtgcagcacataaaaagcctggataacattggcgaggcaaacattaccccgaacgggaggctctttatgagcaaa

SEQ ID NO: 968 - DNA, 1449 bp, unidentified
  misc_feature 1..1449: note = Ga0172379_10011290 JGI
  source 1..1449: mol_type = other DNA
atgatttactatatcgaagattgtgatggaaatgtaggacacccgacgaagaaacatgatatgattcgtcgatggttaaagagtaaaaaagcgaagataaagaagagatcgaaagactggatgttaatcaaaattcacaagaagattgatcctgagaagactattccagcacaatttcgtatcggattagatccaggatacgaaaacgttggatttgcggtcttcaagttgactgaaacgaaagtggaaaagatacttgaaggagaagctaagttacgaaccaaacaagtgacagagaacttgactgaaagaaagatgcatcgacaaaatagacgccagaacagacgaaagaatgtgcttcgtaaatttgactcatgtaaatttagacaccctatttggaagaaccgtaagaagcataagtttcaaccaacacaaatacacttaattcagtctcataccaacatactaaagaagatttttcaactagtacctctagatgaaagtcatgtagtagtagaatatgctaagttcgattcacaaaagataaacgatccgagtatcaagaactatcagtatcaaaaaggattgcaatacgggtacgaaaacgtgaagaactatgttcgagcaagagacaaatacacttgtcaaatctgtaagaagaagaagtctgttgatcttcatgttcatcacatcttacctcggtctcagcatggaacagatattcctaaaaacttaatcactctttgtaaaccttgtcacgatagagttcataagggtcaagagaagtgtacaaaacctaaattgaatacttttgtcgctagtggagtactgaattcaattatgaaagagctttatgaaatcataagctcggaagtgagtgctagtaagacttacggatatgttactgatactcatcgaaagagtttaggactagagaaaactcattgcggtgatgctagtattatcgccttttgtgacgaagacaacgtatttgagtatgacggtgagtatatcgacaatacaagtcatatgtttttgcaacaatttcgtcgacataatcgtagttttacgaatcaagttgaagatcgtaagtataagattaatggtagtgttgttgcttggaatcgaaatcgacgagaaggacaagataagaaaaaaccatcattaactgagttacaacaagaatacggatatcacaagattcgtgttagtcctggaggtataaaatcacgacgaaataataaagatatgttatttcgtccaggagacatgataaaggtagcaccatcaaaaaagaccgagactttcgctagttacatcgatatctgtaaaggttggttatcgacacaaggaaccatatcaggagtaaactcgattaagaatataccaaatagatatgtgagcaagaaactcaataatggtggtctcgtaatcgataataaattttga

SEQ ID NO: 969 - DNA, 266 bp, unidentified
  misc_feature 1..266: note = Ga0172379_10011290 JGI
  source 1..266: mol_type = other DNA
gtcaattacccagcggttaaagaccattgggcttgcgagctagtatagtcgcaatgccgtttacgggattgaacagacgtagtgactaacgattcaccagcgggtgccactcccagctcgttgctctggaggtagtgagatctaatctcaagtcctcattgctagctattaggtaacgaagactagtattatcgttagccaagtcgagggagacttatttttgtgcatgcacaaaaccgatcaaggaacacaaacatgatttacta

SEQ ID NO: 970 - DNA, 987 bp, unidentified
  misc_feature 1..987: note = Ga0120380_1006999
  source 1..987: mol_type = other DNA
gtggcgaagagcaccaccctcgcaagaggagaatccggcggttctatgaccggggaagtaattcacgaaaggagatacaaagtgatggcatacgttgcagtcctgtcagcatctggaaaatcgctgatgcctacaactgcatacaaagcacggaaactcttaaagagtagacgtgcaaagatctacagctacagaccgctgttcaccattcagctgcaggaccgtgaagaaggtgctacacagcctgttgagctgaagatggataccggtgcacagcatatcgggatcagtgtctgctctgaaaagcacgaatattggaacaggcgctacgatatgctgcctgacgaaaaagaaatgcatgatgaggcaagaaaaaaccgccgtaacagaaggcaaaaacttcgttatcgcgccacacgcttcgataaccgcactcacggccataatcgcaaggaagataagtggtttgccccttctttgaaacataaagaaaacatccacattcagcttgcagaaaagatctgtgcggtagtcccggtgacagacgcttatttcgagatggggcagttcgatattcaggtattgaaagcctatgaagcaggcaagcccattcctgtaggggacgactaccagaagggtgagcggtatggttatgccactcttcgcgaggcagtctttgcgcgtgacaattacacctgtcaggtatgcggcgccaaactggatgacaagcaccatccgattttgagaatgcatcatatcggctattggaagcacgatcattccaatcgcatgagcaacctgatgaccgtttgcaccaaatgtcataccgcagcgaaccataagcccggaggaaggctatatggtctggagccagagcttccaacattcaagggcgccgcattcatgaacacggtgcggtgggatatgtttgcacagctgaaaaaagcattgccgaatgtcagatgccacatgacatatggcaatgct

SEQ ID NO: 971 - DNA, 261 bp, unidentified
  misc_feature 1..261: note = Ga0120380_1006999 JGI
  source 1..261: mol_type = other DNA
gtcaaccaccccgcccatttacttcggtaaatggacggggcttgcggggaccagaatacccccgtaagcccggttgaaaagccagttacatgttgcggaggaaatatacaataggcacttcggaacgctgctcaaattctgaacactgcgggcgtgcattaaacatcctataggggaagggaagtgtgtacgtctcggcggactgacagcaacatcgccagaatgccgtaaaaccctccgataacagtggcgaagagcacc

SEQ ID NO: 972 - DNA, 1224 bp, unidentified
  misc_feature 1..1224: note = Ga0256407_10008120 JGI
  source 1..1224: mol_type = other DNA
atggtgtatgtattgggacaaaataatttacctttaatgcctacagataattataggaaagttagactattattaaaggaaaagaaagctgttgtcgtaaaaagaacaccgtttacaattaaattattacattgtactaatgtatataagcaaaatatttcattaggaatcgatcctggaagtaaaagtattggcttatctgcaacaacgtcgaacaaagaaatttttgctggaacggttatattgagaaacgatgtgactaaactgatttcaactagaaaagaacatagattatctagaagaagtcgtaaaactaggtatagaaaagaaaggtttttaaaccgtaccaaaaatcagaaacctggatggattccacccacatatagacaaaagcttgatgttcatcttaagataattaatatgataaagagtattttacctataactaatttgtgcctagagttaaccgtatttgatactgccttagagcctacgaaatgtagtacatttagacggtctgttttaataagagataattacgaatgtcaatattgccatgggtcttctggagataaaactttacaaatacatcatattgaaactagacaaactggaggaaactcttttggaaatttaataacattatgtaaaacctgtcatgctaaatatcatagaggtgaaatagatatctcacaaacaagaacgaaatccttaaggcacgagtcatttatgaacattttaaatactagattagataagtatttaaaactagagggatatgataatatagacataaccaacggcttaaatacatataatactagaataaagtacaatctcccaaaagatcattcggtagatgcaagatgtattagtggaaatccattagctataatgtgtgatcatttttatatctttagatcagtacgaagacgaaacagacgcattcataaagatacaattcaaaaaggcggaactagaagacttaatcaatcaccaaaatatatgtttggttttcaattgtacgataaagttcattataaaaatgaagaactgtttattatgtctaggagaaaagatggaagaattactttaaaaactataggtggaaagatgagatatgaatctgtttcctataaaaaattgaaattccttgaaccaagaaaagctattattgtagcacgttatacaagaaataaactatatttgaaaggagatttttaa

SEQ ID NO: 973 - DNA, 288 bp, unidentified
  misc_feature 1..288: note = Ga0256407_10008120 JGI
  source 1..288: mol_type = other DNA
gacagggttagcgattcgtaagtaatatttattattacttagtaattgagatatattacttgctgactaccctaagagtattattactctacgttacttaagaatatataggcacctgttgatatttgctctagtcttcagctctgcgattgcatattaaaagatctgacgaataggatcggtgtatgtaatatataaaaccttaagataacattggggaagggcaaattacatctttcgagatgagtcacttcagttggtagtgactgttttgaggtgatagttatg

SEQ ID NO: 974 - DNA, 945 bp, unidentified
  misc_feature 1..945: note = Ga0315286_10038107 JGI
  source 1..945: mol_type = other DNA
atgcagtacgtgttcgtgttggacaagaacaagcagccgctggacctctgccaacctgccagggcaagacagcttctcaagaagggaagagcaaccgtatttcgccgttatcccttcacgatccggctcaaggaccgggagctggaagagtccgtcacccatgtccaccaggtcaagttcgaccccggcagccggataagcggtattgcaatggtcagagaagaggatggcaaggtgctttgggcaggtgaactggcacaccggggactggccatccagagtgccctggatgaccggagagccatccgacgagggcggcgaagccggaaatgccgctaccgcccacctcgcttcgacaaccgcaggcggggggagggttggctgcctcccagcctggaaagccgggtggccaatatccaaacctgggtaaagcggctgaggtggtctgctcccgtggaaagcatctcaatggaactggtgaagttcgacacccaggctctgcagaacccggaaatatcgggagtggaataccagcagggcgagctgatggggtacgagatccgagaatacctgctcgaaaaatggggtcggaagtgtgcctactgcggcgggacaggagtgcccctgcaagtggagcacatcgtcccgaaaagcaggggcggatcaaagcgggtcagcaacctgaccttatcctgccaggagtgcaacctggagaagggcagccgcacggcggaagagttcggtcacccggagatccaggccgaagcccggcagcccctcaaggatgcggcggctgtgaataccacccgttgggagctctggcgcaggctgtctgagagcggattacccgttcattgcgggacgggaggcaggaccaaattcaaccgcacccgtttcgacctgcccaaggcccactggatcgatgcggcctgcgtgggtgaagta

SEQ ID NO: 975 - DNA, 274 bp, unidentified
  misc_feature 1..274: note = Ga0315286_10038107 JGI
  source 1..274: mol_type = other DNA
gtcaacgaccccacgcataaatgcgggggcttgtgagaaccacaagccgagttgaccagcctcagccaccagtcgaaggactgacggggctacgttatcgggagagttgaagaacgcacgttgggatgcgcgagccagccccaacctctgcaactggatggttaaacatcttgagggtctaaagaagtgccacccagaagtgctgaccgataacattggcgaggctcacattaccgccgaatggcgagaaagggagtaatcccctatgcagtac

SEQ ID NO: 976 - DNA, 1284 bp, unidentified
  misc_feature 1..1284: note = Ga0224423_10002744 JGI
  source 1..1284: mol_type = other DNA
atgacagtatatgtaattgactcttgcgaaacacctcttatgccgaccagaaggctcggcagagtcagacatatgctcgactccggtgaagcggaaatagtctgctatttcccgtttacaatcaaactgagaagaaaagtggagcgagtgtacacacaacccctgcgggttggtgttgacactggtttcaaacacgtcggcataagtatatcaactccaagaagagaactcttccgttatcatttccgtcatcgctcacatgaagtgaagaagaacttgaaagaaagaagagaagatagaaccggaagaagacacagaaaagttcgtcatcgaaagccgcggttcaataaccgcgtcaagtcgaagaagaaaggatggattccgccgacatctcgtcatatggtagagtctcataagaaagatatagaacttgctttgagattcattccaaagtctgctatagaatttataaatctcgaaatcggagaattcgacacgcataagatgcgtgactcagatgtagaaggagagatgtatcagcaaggcgacttaaccggcttcgacaacgtcaaagccttcgtcagatggcgtgacggaaacatatgtcagcattgtcacgggaaatccggtgacaagaagatcagagttcatcatatcaagcaccgtgtcaacgacggtcctgataacccagcaaacctagtttgcttatgtcacacatgccatactaaataccataacggagaaatcaaattgaagatgtccaatttgaatttgaagactattgactctcttcgttctgctgctgcgatgaatatagtcaaagatagaatattcgacgaagtgaagaatatgtttccagagactgacgtgagaaagacatacggttacatcacacggaaaaaccgtgtgataagtgaacttgagaagtcacatacaaatgacgctctgattatctcaaagaatttcaatgctgttccggaggaacagactatagaagttaagcatatgagacgtcataacagacagattcataagaaaaatcccattaaaggtgggatccgaaagaaaaaccaagcaaagcatttcataaagggatttgctctcaatgatttcgtctgcttggacaaccaagcaaccgggtttataaccggccgtatgtctagcggatatgtgactatcaagacgattgatgatgaaaagattcacgaaaagacagtcgtttctatgaaacgaatcagattgataagaagagcaaaaggaatgatttatgattacaaaaaataa

SEQ ID NO: 977 - DNA, 341 bp, unidentified
  misc_feature 1..341: note = Ga0224423_10002744 JGI
  source 1..341: mol_type = other DNA
gtcaccaactgtctaagtaaaagacttagcggcttggttctttagggaactgaagccgatggtgactagcctgagtgaaaggagatagccggatggaatccggcagactcccgaactacgttactggagaatataacgataggtaccgatggatataagtcctagttctccgctctacgcttcaagagttaaacagtcctgtacggtagggacagtgcattgaagaaagaaacctccggataacattggcgaagggctaccaacagggcgtaacgccctgcataatccttaacgggatatttataaaatgttaaattaaaattattaaactctcaatgaca

SEQ ID NO: 978 - DNA, 1305 bp, unidentified
  misc_feature 1..1305: note = Ga0224508_10013895 JGI
  source 1..1305: mol_type = other DNA
atgtcgaatgcagtattggtgatcagcagcgcatacaaacccttgaagccgattcacccagccgtcgctcggcgcatgctgcaatcccggcaagcggcggtgtttcggcgctatccgttcacactcatttgcaaatccggggtgaccacgggacaagctgaaaacgttcggttgaagatcgaccctggcagcaagaccactggtctagcgctacttgttgatgatgcgctggtgtggggcgcagagctgaaacatcgtgggcaacagattcaagatgcactcgaaaaacgccggtcgtttcgtcggggccgtcgaagccgcaagacgcgctatcgcaagccccgtttcgataaccggcgacgttgtgcgggctggttgccgccaagcctcctgcatcgcgttgaaaccaccatgacctgggtgcaacgcttgtgtcgatatgcgccggtttgcgaaatctcggtagaatgtgtgcggtttgatatgcagctcatccgcaacccggacattgaaggcgtggactaccaacagggcgaactctggcagcaagaggtccggcagtatgtgttcacccgtgccggatatgcctgtgcctactgcggcgcgaagcatgtcccacttgagcttgaacatatcataccgcggagcaaaggcgggtcgaacgcgcccaacaacctcacagcatcatgtgtgtcctgtaatcaggcgaagggcaatgaatcgattgagacgtttctcaagaccaagcccagcgttctggcccgcatcagggcccaactcaaggcgcccctgaaagatgccgccgctgtgaacgccacacgctggcgtctaggggaggaactttgccgcacgggtcacccggttgaagccggaacgggaggccagacggcatggaaccgcaaacgacagggcttgccaaagacgcattgggttgacgccgcgtgtgtcggtcagtcgacccccgacgcgttgcatatgtgggtgacgcatccgttgcagatcgtctgtgccgggcatagctcgcgccgtatgtgtttgtccgacaagtatggctttccacgcacctcgccaaaaggctctagccaagttcaaggctttaaaactggagatatcgttcgtgccgttgtgccgagtgggaaaaaggcgggtatctatgttggccgggttgccgtgcgaagctctggctcattcaatattcaaacgccaaagaggactgttcaaggtattggctggaagtgctgtatgcttgtgcatcgtgcagatggctatctctacagctttggagcatcgagctccatgctatag

SEQ ID NO: 979 - DNA, 251 bp, unidentified
  misc_feature 1..251: note = Ga0224508_10013895 JGI
  source 1..251: mol_type = other DNA
gtcagctaccgcctcgactgaagtcgagcggcttgaaaacgccgagagctgaccagactcagtcgcgttcagtcgcggctacgttaggcgcgaaataggtaccctggggtggccgaaccagctccaggctctacggtgtcaggttaaacaggtccgatgcggtcaagcccgtgcctgacacgcgaaaccgtgccctaacttggtcgaggagcacatcacctcctttaggagagaagaccatgtcgaatgca

SEQ ID NO: 980 - DNA, 654 bp, unidentified
  misc_feature 1..654: note = Ga0272428_1003415 JGI
  source 1..654: mol_type = other DNA
atgaacggtgtgtatgtcctttcaccagatggggtgccattgatgccttgctcctgcgtgatcgctcgtttgttactcaaagatggaaaagccaaagtcgtgcgtagaacgccatttaccatcaagctgtatacacagccagtgaacccctctacacaggcattgacgcttggcatagatacgggcagttcagtgatgggttcggctgtggctgatgaaaacgggaatgttctctatctttctgaggtggaaatccgcaatgatatggcaggattgtcaaaagagcatgtctttgatgcaacgatgatcgccacgcgagggatcataccaatcttccgcacaaccactgttctctccaaacgatgtgtgcctgatggagattaccagcaaacgaagggaattcgcagtgaacagcgaatcatcacagggaagattgggggatttcgtaagttcgacaaagtgcgttacttaggtcaggaatacttcatcaaagggagaatgtctacaggctacgtcatcttgatggagctttctggcaacaaagtggctttgaaacctctccccaagtttgacaagatgaaaagagtgagcgcccgttcatcatgggtgatgagacaaaaaaccatgccaagtttctcatcctctatcacctga

SEQ ID NO: 981 - DNA, 299 bp, unidentified
  misc_feature 1..299: note = Ga0272428_1003415 JGI
  source 1..299: mol_type = other DNA
gtgaactaccacggggctaaagccctcgtagcttcttcggaagcctgagttcaccagacttgtcaccagaaatggtggcaccgttcgagaggtcatgacacctgcggttgacgcatcagatcgctgctctgtcgcctgggtttaagaaggactgagggaaggttcggtgatccaggctcaaaaagccttttgaaccctgtcgagatgaagccggattctcttcgtggtcacagcgaagagatacgcgccacctgcgtaagcagagcatttttctgaaaggaattctttctatgaacggt

SEQ ID NO: 982 - DNA, 1311 bp, unidentified
  misc_feature 1..1311: note = JGI1684J13235_1001204 JGI
  source 1..1311: mol_type = other DNA
ttggtaaaagttattgccaaagatggtacagtattacaacccacaaacagacatggcaaagttagaagattacttgataacaataaagctgaagtggtatgtaaagaaccttttactattcgtttactttatgaagttgaatcaaaaaaaactcaaacaattaaggtttattttgatactgggggtaaatatcagggctttgccattatttctaatggtaaagtgattcataaagggactattgaattaagggatggtattccaaagcttttaagacaacgaagacagtacagaagaggtagacgacacagaaacaaacgctatcgccaacctagatttgataatcgcaaaagagataaaggttggttaccaccttcagttaggtctaaatataagcatatactgaactggataaataaactaacaagttatctgtcggaatatgagcttactgtagaagtggctaattttgacatacaaaaaataaaagaccctggcattgaaggtaaagattatcagcggggagaaaaatatggctatgaaaatacaaaacaatatcttatctttagagaaaatgccagatgtcagctatgtggcaaaactaaaggtgaagatagctggaacatccaccatattatttccagaaaagatggtggtaccgatactcctgataacctggctttacttcatagtaaatgtcatgagaagctgcataatgataatttagatagagagtttaaaacaaaggcagataatttagataataatggtcaaaactttaagtatacaacttttatgaatatcattaagaacaaattatatagagatttatctgacagatataaaggtaaagttgattttacctacggatatattactaatattaatcgtagaaaactagaattatctaaaacccattataatgatgctatagcaatgaataaagaatctgttgaagataacaaaaagccaatatatatcaaacaggttagaaagaaaaagcgttcattgcatgaagccattccacgagctggcagaggagataaggtaaatagtgagcaaaaacgtagttctaaaaatactaaagaagttgtaaaaaacggcaagaagtgggttttatgggataaaatatatatcccagaattaggtacaacagggtttatatcaggatttagtggtaaatgggtatatgtacaaaatatagatggagaatatttgcaattaccctctaaaacctataagcaaataaatcctgatagtgtaaagcttgtatgtagaaataacaactggattagaaaaaaaacagcatag

SEQ ID NO: 983 - DNA, 291 bp, unidentified
  misc_feature 1..291: note = JGI1684J13235_1001204 JGI
  source 1..291: mol_type = other DNA
gtcaactaccacccctaaattataatcaagatttagaggtggcttgtgaaaaacagtcaagccactagttgactactctaagccttagttggctacgttatcttagttatgatacctgtggatgatgctctagtctgtcgctctatcgtgcataggtaaacagtcctgagtggtagggacagtcgtatgcacccaacaagctaagataacattgaggaagggcaaaatagttttacctacggcttttatagccgccttaacggggtttaaattccttaacgaaaggactga

SEQ ID NO: 984 - DNA, 1227 bp, unidentified
  misc_feature 1..1227: note = Ga0071116_1000008 JGI
  source 1..1227: mol_type = other DNA
atgtcaaatttagtttatgtaattaataagaatgggaatcctttgatgccttgtaaacctgctaaggctaggcatttactagaggctggtaaagctaaggttatcaagcgtataccttttacaattcaactgttatggaattgtgaagagaatgtgcagcctataactttaggaattgataaaggttccaagattactggtttatgtgttgtagaaagtgacaatagcaaagtgttatttcaagcagatttaagacatcgtctagacgttaaagaaaagatggagacgcgtagagagcatcgtaggtctcgtaggaaccgtaaatggtatagaccatgtaggtttttaaatcgcagtagttctaaacgtataggaagactacctccttcaattagaaccaatgttgaggaagtaatcagggtagttaataagttaaaagtgatgttacctataaccagtattgtagtagaagatgtattagtggatataagaaaattgaatgaacccataattaaaggtaagcaatatcaagtttctaatcgcctatctgagaatttgcggctagcatgtttaatgagagataattttgtttgttatacgtgtaagtctaaaggagaactacatgctcaccacattgtatggaggtctaagggtggttcagatactattactaatttgattacattatgtaagaagtgccacaacaaggtacatagtaataaattaacattggacttacgaggttctaacaattttaaagaccgtatagcacaacgtacaatgcaaggtaaatcttatctttatagacaattaggaaatcctgggttagtttatggatatgaaaccgctgagcagcgtaagaaattacaattggataaaacacacatgatagatgcatttataattgctggtggtaataaatatacaactgataactcttatttcataaatttcagacttaggcaaactaggcgacaatattatgatttgcctagaaaaggggtgggtagagttagatatcaagtcaatgaagaattaaatggatttaaaaaaggggatgtcgttttggtaaaatcttttgtgaaacaaattaattcgattcgtagtgatggacgcttaggtttttctaaaagcataaatagtggaccacagacggcactaccaaaacattgtatattactagaacgccagaagacagttgtctttaatacagttaatataaggtag

SEQ ID NO: 985 - DNA, 250 bp, unidentified
  misc_feature 1..250: note = Ga0071116_1000008 JGI
  source 1..250: mol_type = other DNA
ggcaatgtgattatttctaaaaaagataaagcaaattactattatcttttatgaaataaacagcgggctctggataagtgcaagagcagaagttaatttaattattctaccaacagatgttgttccagtctgttgctctagaacttgtaactaagggtagcggaaacgtgaatgtgttacaagtgtaaaaagtttaattaacaaccgcgaggagcaactaactctacggaggacttaaatgtcaaattta

SEQ ID NO: 986 - DNA, 1251 bp, unidentified
  misc_feature 1..1251: note = Ga0180438_10003339 JGI
  source 1..1251: mol_type = other DNA
atgcgtgtatctaacaataaacacaacaccaacacacacaacacctcccgtaaagtgtatgcgtatgtgttaaacatgcgaggacaaccgctgatgccaactacaccacgaaaagcgcgtcttcttttgaagaaagagcaagcaagagtagttaatcgctgtccttttatcattcagttacaatatgccaccggagaaactacacaaccgattaagctgggaacggatcttggatatactaaaatcggctttagcgccacaacaaatcggttagaactgataagcggcatatttacgcttcgcaaagacttgtcaaaaaagataggcgaaagacgaagctatcgtcgaactcgtagagggaaactatggtatagaaaaccgaggtttcttaataggaaacaggaggaaggctggttggcacccagtaagcagcaccggttagcgtcccatcttgaactggtcactaagctggagtcattgttgccaatcagcttcaaaaaggtagaagttggcaatttcgacacacaacgtatgcagaaccctgaaattacaggcgtagaatatcagcagggcgaacttcagggctacgaagtcaaagaatacctgttagacaaatggggacgaaaatgcgcctattgtgataaaacggacgtgcccttagaagtcgaacatatcgtcccgaaaagtagaggcgggaccgatcgagtgtcgaatttgacgatcgcttgtcgcgcctgtaatctaaaaaagggagatcagacggccgaggagtttggctaccctaacatccagcaacaggcaacgcaaccgcttaaagcagctgcctgtctgaataacattcgctggaggatagtggagcagttagaggcagaatatatctacggatatgttaccaaatacctgcgtaataagttagaactagaaaaatctcatgttaatgacgcattcgtaatcgcaggcggaactaatcaagaacgctgccgtccgtacgaggtcattcaagtcaggcgaaataatcgttgcttacaactgaaccgaaaaggctttagaccgtctattaggagaaagcggtaccagttacaaccccacgatcttgtaaaatatgagggcagaacttataaagtaaagggagtccattgctatggaacacgggttattttaaaaaatgttaaaggaaaaaacaaaagtgtaactatcgacaaagtagagttggttacatatggaaagggattacaattcattttatgttag

SEQ ID NO: 987 - DNA, 258 bp, unidentified
  misc_feature 1..258: note = Ga0180438_10003339 JGI
  source 1..258: mol_type = other DNA
gtcaactacctcaccctgaagggtaggggcttgggaacttgttaacgagccctttagttgattagagggctttcctttgtgggaagcagcagttgttgaggttatgacaccctggggtgctccactagccccttgctctgtcgtccattgattaaaagttctgaggggtaggaacggtgtcatggacgggtaagccttgacaacagtctcgaagtggacttactccgtattcgtaagaaaaaggaggttagaacatgc

SEQ ID NO: 988 - DNA, 1071 bp, unidentified
  misc_feature 1..1071: note = Ga0213878_10002132 JGI
  source 1..1071: mol_type = other DNA
atgcaatctacgttgaaagcgaagtccaagactcaccctgggatgcttcctcagttccaggctctgaaagtctcgtttgacgcatcggcaaaggtaaaggccgggacgagcgagacggattcgggcaagcaaaggcttaaagcctcgcgtgttgtggatcagactgcatttcaacatggccgaggggagcgtccgaaaggaccgttaccttctcttcaaagggaagaggaaagcggagtaatccgcgtatttgtgaggtcatcgaatggaaagcctctcatgccctgtcaccctgccagggcccgacaactcctgggaagcggacgtgcccgcgttcacagattatatccatacacgattcggctggtggaccgtaagaagggagctaagcagccggtggtgttaaaagttgacccaggggcagtcacaaccggcattgcgctaaatcggcaagaactccacaacagaaaacaccaagccgtactccacttggccgagctcacccatcgcggggcacaagtccgtgccgcgctagctcggcgagcggcatatcggcgccggcggcgcagccgaaaccttcgctaccgggctccgcgatttcttaaccgaacgaaggacaaagggtggctggtgccaagcctgcggtcacgcgtcgataacatcctctcatggcagcagcgttactccaagctggtgccaatcacctcgatcgaaatagaatctgtcaggtttgatctgcagaaagataacaatccagagattagtggaatcggctaccagcaaggtacgctagcgggctacgaggtacgcgagtatctgctcgaaaagtggggccgtaaatgcgcctactgtgacgcaaacaacgtcccacttcagatcgaccacatcgttcctcagaaaccgaaaaaccgcttggcttcaaaggggtctaacagaccaagtaatctgaccgttgcttgcgagtcatgtaatagagctaaaagcaacaacccagtcgaactcttcttgtccgatcaacccgaccggcttgaatacattctttcgcatacaaagcgaccgctgaatgccgcg

SEQ ID NO: 989 - DNA, 241 bp, unidentified
  misc_feature 1..241: note = Ga0213878_10002132 JGI
  source 1..241: mol_type = other DNA
gtcagctacccgcgctcaaacgcgtgggcctgtagcgatacaagccaggctgaccaggccaagaaagcaactaaatgcaatctacgttgaaagcgaagtccaagactcaccctgggatgcttcctcagttccaggctctgaaagtctcgtttgacgcatcggcaaaggtaaaggccgggacgagcgagacggattcgggcaagcaaaggcttaaagcctcgcgtgttgtggatcagactgc

SEQ ID NO: 990 - DNA, 1446 bp, unidentified
  misc_feature 1..1446: note = Ga0181296_101698 JGI
  source 1..1446: mol_type = other DNA
atgaaagtatttgtggttggatccgatcaaacacctttaatgcctatgcatgctgcaaaagcccgcaaattattaaaacttaagaaagccaggttgaaaagccggaagcccgcttgtattcaacttctttttgcgcccgaaaccatttcgcatcagcctgttaaagttgggatcagcaacggcgccagggagaccggcatagctgttgtccaggaaagagttaaaaagcggagtgttactctcttagtcggagagatatccctggcgaacgacatttccaggcgcattaaagttcgtcgcacttaccgaagggcaagacgcggcagactgcgttatcgtaagccgcgttatgataacagggtcagggtgaagtgtcatgtttgcggtaagaacgccgcgaagggcaaacaaacctgcaaggcgcacagggcggtaaagccggaggataaaatcagcacgaactcctggctacccccttcgcttaaagcgagaaaagactcaataataagagttattaaaaagatccggcgctgggccccggttagttcttgcacaatccaattgggaaggttcgatttgcataaaatcgcagccgtcggcattaatgaagcgggttatcgacaatatcccgtatatgaacgtgatacagtcaaagcggctcttatttttgaatatggtcgcagacaaaaagagggggatacagaaaagattattccacgctgttgttattgcgataaagaaggtaacggagtggaaatcgaacatatcctgcccaaaagtaaaggaggcggtgatagttggcgaaatctcacactggcctgtaaggaatgcaacaataaaaaaggcgacatgacccctgaagaagctggaatgaccctgttatatgagcccaagccgcttcacctgtccagggtctacaagtatatcatgcggtgtcagcaaggcaagaattacctgttgagcaatatcaattcttttggaataccttgtagtttcacttatggacagtttacaagctggcagagaaaaaggtttggaattgataaaaaagattatgacgactcaattttaattgccgcgtcggtatacgacgacagaattagaccggggctgccgataaaaaaagttgcgcctttttatatctggctaacgcctacaaagcgcagacagatatttaacgcttcccattattctccaagcaagagaacgccaaaaggtttctccagcgaagctacggtggactttggttacactttaaagactcttgtagaagtcaataaagcatgcgttatcatgtgggacagagctaaactcgtctcaaaagctattaagaaaagcgaaagcattccgaaaaatgccgtcttggttttaagaaagggagatatcatcaatactttgcatgcaggcaaaaagattacaggtagagtcagctccttgatgagcaac

SEQ ID NO: 991 - DNA, 320 bp, unidentified
  misc_feature 1..320: note = Ga0181296_101698 JGI
  source 1..320: mol_type = other DNA
gcagctccccattgattgtgagccagcttcagcgacaaacccccagtaatgggaataaggatgagctacctttgatgggtttgccaaagtgccaccctggggtgttgttccagctccaggctctggaacctttgagtaggaaaactcgccctactgttttggagggaaggaatccgagatattcaggtacacctcaaaggacaaggttaccattaaagtttagcgaggagcgattttaccgctcttttagaaagagcgagtagcttattataagcgccataatcaaattagagttgataatggggtactcatttatgaaa

SEQ ID NO: 992 - DNA, 1296 bp, unidentified
  misc_feature 1..1296: note = Ga0335394_10010380 JGI
  source 1..1296: mol_type = other DNA
atgcaacgtgtattggtgatcgacaaaaacaagcaaccgctcatgccctgtcatccggcacgagcgagagaactgcttaataaggggaaagcggcggtctaccgtacttttcctttcaccatcatcctgaaagaacgtgagggcggtgatacacagcccatcgcgttcaagatcgatcccggcagcaaggcgactggcatggctttagtcgcagacttcaagcgtggcaagcgggtgatttgggcaggcgaactcacccatcgcgggcagcagatacgcgatgcgctcctgtcaaggcggcaactgcgacgttctcgccgcgcacgacacacgcgctatcgacaggcgcgctttgataatcgccgtcgtccagaggggtggctgccgccgtcattaaaaagccgcgtggagaacatttggacatgggcatgtcgcctgaaccgtgcttgtcccatcgccagtatcagtcaggaattggtgaagtttgatatgcagttgatgcagaacgccgaaatcaggggcgtggaataccagcagggcgaactggcggggtatgaggtgcgcgagtacctactggaaaagtgggggcgcaaatgtgcctactgtaatgcgaaggacttaccgctgcaagttgagcatatcaaccccaaattgcgcggcggcagcaaccgtgtcagcaacttaaccctcgcttgtcacgactgcaaccaggagaagagaacacagacggtggcggaatttggtttccccgaaattcaaaagctggcaaaagcccctctgaaagacgctgcggcggtgaatgccacacgatgggcgctctaccatcgtttggaaacaatcggactgccattggaggtcggcacgggtgggcgcaccaagttcaatcgcacaacgcaaggttacgcaaaaactcactggctggacgcgacgtgtgtgggcgagagtggcgaaaaagtctatatcacggctagcgatacaccgttgttggttaaagcaacgggtcacggttcacgccagatgtgtcgtaccgacaagtatggtttcccatcgcgttaccgtctgcgtcagaagcgccatttcggttttcaaacgggcgacatggttaaagctatcgtccctgctggcaaggttgtgggaacgcatagtggtcgcgtggcttgccgtgcgacaggcagtttcgacatcacaacagcaaccggaaaagtgaccgtatcgcatcgatataccaaggttacccatcacgccgacggctacaattataagaaaggacaaggcgctatccctccccatgcctaa

SEQ ID NO: 993 - DNA, 253 bp, unidentified
  misc_feature 1..253: note = Ga0335394_10010380 JGI
  source 1..253: mol_type = other DNA
gtaagcatccccacgcctaaaggcgggggcttttagccccaatgcttacccgactcagcctcgcaagaggctacgttagcggcgaaaatataggcacttcggaatgctacgccagttccgaactctgcggtgaacgattaaaaagaatgcttgggagcaaacagtgtcgttcgcaccaaaccgtcgtataactttgtctaggcaacattacacccgtaagggaagaaaagttgaggtaactcaaatgcaacgt

SEQ ID NO: 994 - DNA, 1221 bp, unidentified
  misc_feature 1..1221: note = Human gut metagenome
  source 1..1221: mol_type = other DNA
atgcgcggcaagcctctgatgccgtgttcgccagcaaaggcgcgacacatgctgaaggcgggcaaggccgtcgtcgtgcgtcgaacgccgttcacgatcaagctgaccatcgccacgggcgagacgaagcaggacgtgacgcttggcgtcgatgcaggcgcaaggcacgttggcatttccgccacgacggaaaaggaggaggtcttcgcgtccgaagtcgcgcttcgacaggacatcacgggacttctggccgatcgtctggcattccgacgtgcaaggcgcaatcgaaagacgcgctaccgctccccgcgcttcaacaatcgcgttcgatcaaagcacaagggatggcttgcgttgtccgttgaaaaccgcattcaggcgcacatgtcgcgcatcgatgcggtctgcagactgcttcccgtcaccaagatcgtgattgaggcggcatcgttcgacgttcagaagatcaagaatccgactattgaaggcacggactatcagcagggcgaccagcttggattctggaacgtgcgcgagtacgttcttttcagagacggtcatgtttgccagcactgtcatggtcgttcgagggacaagatcctcaacgtgcatcatcttgagagtcggaaaacgggcggtgatgcgccaaacaacctgatcacgctgtgcgagacatgccacaaggcttatcacgcaggaaagatcaagttgaaggtcaagcgcggtcaatcgttcagggcggaagccttcatgggcatcatgcgctggacgctgcttgaccgcgtacgcaagacgcaccctaaactgcctgtcgagaacacctacggctatctgacgaagcacaagcgcattgctcttggcttgcccaagacgcattgcgccgacgccttctgcattgcgggaaatctgaaagcgttgcgaagaggagatttcctcttccagcaacagacgcgaaagcacaaccgacagatacacaggtgttcgattctcaaaggcggagtgcgaaaactcaatcaggcgccattcctcgtcaaggggttccgcctattcgacaaggtaagaatcggcggacagattggttttgttttcgggcgacgcgttagaggcatattcaacattcgtcgccttgacaaaactgtgatcgggaaagacatcaattgcaaaaaactgagtcttctcgaaacacgcaaaacttttttgattgaactacgaaaggagtaa

SEQ ID NO: 995 - DNA, 300 bp, unidentified
  misc_feature 1..300: note = Human gut metagenome
  source 1..300: mol_type = other DNA
gtcaataacccccgcctaaaggcggaggcttgaaagagcctttattgactagtctcagcaaacctcctctgggaggagagctacgttggttgggaatgtacaggcaccgtgggatgtttatcctagtcccacgctctgcggtctgtgtttaaaagttctgagaggtaggaacggtgatgcagacaagaaaccctttccaacattgacgaaggatgacaatcggccttcgggccgatcaacaccggccttcgggccgagcaagcggagcctgcgggtatccgcaaaggagatactttgaaa

SEQ ID NO: 996 - DNA, 1167 bp, unidentified
  misc_feature 1..1167: note = JGI11958J13698_1112174
  source 1..1167: mol_type = other DNA
atgttacgagtaccagttttatcaaaatcaggtaagccgttaatgcccaccaaacctagccgcgctagacgttggttaagggatggcaaagccaaagtggtacataatgacttagaatgctttgctattcagttgacctttgagacaggagaggaagcgcaacccatagccatggggatagaccctggtaagggttactcagggatcggggttcagtcaagtcatttcaccctctggatgggacacctagttctaccgtttaagacggtgaaagaacggatggaattacgacggattatgcgtcgagctagacgagggaaacgaattaaccggaagttgccctactctgaacgttgccatcgtcaagctcggtttgacaatcgtaaaaagggtaaactgccaccgtcaatccgagctaataagcaactggaattgcggatagtcaaagagttgtttaaactgtttccgattagtgccattcattatgagttggtcatggctgacgtagataaaaccagtgggcgcaagtcggctcggtctggcgttggtttctccccagtgatggtaggtcagaaacaaatgcttaagtggttgtctgagttagcgaccgtgataactcaccaaggatggcaaagggacgggaacggaaccagtcagcttaggcaatggttaagattagccaaagacaagaaagacaaatcgaaccagacaccagctacacaagccgttgatggtgtaaccttagccgcgtttgagtttacccgatggcaggaatggcactctgataatgccaagcatggtgactggcaaggcagtgtcgaagttacctcagcaccatttgccataatccgtagaccaccaattagccgtagacagttgcatctgtgtgttccatccaaagggggtaaacggcgcaagtatggcggcacagttacccgccatgggtttaggaaaggcgacaaagttatagccgaaaaagctggaaaaacttacgtcggctggtgttctggagacaccgagaaacaagtttcagttagcggtattaactggaaacgacttgggcaatttagtgccaaaaaagtccagttgttgcagcgaagcacgggattaatcgtcgtgccttcacctggactgtcaaatctccccttattgaaagggtcgatttga

SEQ ID NO: 997 - DNA, 228 bp, unidentified
  misc_feature 1..228: note = JGI11958J13698_1112174
  source 1..228: mol_type = other DNA
ttcaacaaccccacgctactagcgtagagcgtggggattgccggacaaacgacaatttaaaccgttgaataccgctcttagtctcagcttggcacagacctccggatacttccctagtccggattacctctaaaaccttttgtcgggttgttgttggacaagacatcttagctgagatggcgggaagggactaattactttactcggaggtttatcaccatgttacga

SEQ ID NO: 998 - DNA, 723 bp, unidentified
  misc_feature 1..723: note = Ga0206349_1775808 JGI
  source 1..723: mol_type = other DNA
ttgagtaacgtttttgtagtcgacaccaacaaacagccattaaatacgattcatcctggaaaggcacgatttctccttaatagagggaaagcagcggtcttgaagcactttccgttcacaatcattttaaaggttgaaatttccgatccagtggttgcagaactgcgaatcaagatcgacccaggctcaaaaaccacggggatagcgatcgtcaacgaccagtcgggcgaagtcgtctttgcagctgaactatcgcacagaggtcagcagatcaagaagagcctggacgatcggcgtggtgtacgtcgaggcaggcgcaaccgacacactcgctacagaaagccacgttggcacaatcgacgcaccaagaagaaaggctggttaccaccatccttgcagagtcggatcagcaatatcatcacgtgggtccagcgacttgcaagagtctgccatatcacagctgtgagcctggaattagtgaagtttgacatgcaactgatggaaaacgctgagatatcagggattgagtaccaacaaggtacattagcaggatatgaggtgcgtgagtaccttctggaaaagtggggacggaaatgtgcctattgcaacaaggatacggtgcaacttcagattgagcacattcatcctcgggccaatggcggtaccaatcgcatatccaacctctctttagcgtgcgagaagtgcaaccgtgcgaaaggaacc

SEQ ID NO: 999 - DNA, 279 bp, unidentified
  misc_feature 1..279: note = Ga0206349_1775808 JGI
  source 1..279: mol_type = other DNA
gtcagggacccgatcccctaaaggggatgggcttgcagtgatccggtaatggattgctacaagcttcacctgtccagactcagctaggcaactagctacgttagaggcgaaattaggtaccataggatgcgaggccagtccaatgcgctacggttgcaggttaaacaggtttacaagggttagtgccagtgcttgcaacgccaaaccgtccctaacattgtcaaggccaccattacccgggtaaccggaggctctcaaaggagcaagcacttgagtaac

SEQ ID NO: 1000 - DNA, 486 bp, Calothrix parasitica
  source 1..486: mol_type = other DNA
atgcgtgtacctgtaattaatttcgatggcaagccgttaatgccgactaagccaagtagagctagacggtggataaaagaaggtaaagcagtagataagtggtcaaagttaaacctattttacgtacagcttttaaaacctgattctggcaataaaactcaggatgtagtagtaggtatcgacccaggtaagcaatttagcggaatagcagttttatcccaaaaagatactaccaaaggaggtaaaagacgtaaatatggcggcactgttacacagcacggatatcgcaaaggtgattatgtcgaggctattaaagctgataaaacttaccgagggtgggtaagtggagatactaaaactcaagtatcaatttctgatgctaattggaagcgtctgggacagtttagggtatctaaagtaaaacttctacagcgctccaggggtctaatagtaactttccaaaaatacaaagtccacggcgaataa

SEQ ID NO: 1001 - DNA, 264 bp, Calothrix parasitica
  source 1..264: mol_type = other DNA
gtcagtaactcaggtaagacagacactgagcttgccggagccaaatccagcaacgtaagtattgactagcccactgagccgttactcggtaaagacttccgaatgtttccctagttcggattatatctaaactcgtttggtcgagtgcttgacggcaataatgcgggaagaacatctacactgcattttgccttaagaaaggacatcttagtagcggtgggcgaagagacttaaactttacacgaaggattatctcttatgcgt

SEQ ID NO: 1002 - DNA, 1263 bp, unidentified
  misc_feature 1..1263: note = human oral metagenome
  source 1..1263: mol_type = other DNA
atggtttatgtaataagcaaagaaggacagccaataatgccaacagagaaccatgcaaaggttcgtctacttcttaaatcaaataaggcaagggttgtcaaaagaacaccattcacaatacagttggtcagtacaagcaaaacgtacacacaggagataacgctcggtgtggatgcaggatctaaacacgttggtctatcagcttcgacagaaaagaaggagttatttgcagcagagcttcgcccacgaaatgatgtcgtaaatttgatgtcatcaagacgagagttacggcgttctcgtagaagtaggactacacgctatcgtcaagctcgttttcttaataggattcactctaaacacaaaggatggcttgcaccatctgttgaagtaaaaatctggaatcatattcaaggtattaagttgataacaaaacttttgcctattaaaactatctgcatagaaacagcagaatttgacttacagagactcaaggctttggaagcaggagagcctattccagttggtaaagattatcaactcggagagatgtatggacactacaatgtgagacagtatgttctacaccgtgatggctattcctgccagtgttgcggtgctcatagcacagataagaagaaggtaaaactccatgttcaccatctggaaacccgcaagacgggcggtaacgctcctgacaacttgataactctttgtgaagattgtcatacagggtatcatgctgggactgttgcactaccaacgacaaagcgtaagagaaggtctactcgcgacgctacctttatgggaatcatgcgaaagacactgatagaaaggcttcacaatatgttcctagacataaatatttgtagcatttatggctacattacaaaatactggcgcgagaagaaaaatatcaccaagacacatataagtgatgcctttgtgatagcaaagaatcttgatgcagaaagactagaaaaggctttgttgatagttccgaaacgacaacataaccgtcaaattcacaaatgcaagatcaataaaggtggcacgaggaagatgaaccagacaccaaaatttgtgttcggctatcaactttttgatagagttatgtgtctaggacaggaaggttttatcttcgcaaggcgttctagtggatcgtttgacattcgtaaactaaatggtgagaaaatcaaaccaaatatcaactataaaaagttaaagcacttagaaagccgcaaggcattattagtttcttattga

SEQ ID NO: 1003 - DNA, 283 bp, unidentified
  misc_feature 1..283: note = Human oral metagenome
  source 1..283: mol_type = other DNA
agtttgatcagtaaccaacgactttagtcgtgggattttacaatcccttactgattagcctaagttccatgagaactacgttatctgagaatatataggcactttgggacgtgagtccgaatcccgaactctgcggcttgcagttaaacagttctgagaggtaggaacagtgctgtaagcatataaaaccttggaataacattggctacggacaactaaccctagattactaggagataacacctgctttgataggtgctgaaacaaggagttatataatatg

SEQ ID NO: 1004 - DNA, 357 bp, Halomonas pantelleriensis
  source 1..357: mol_type = other DNA
atggcggttttcacgctcgacaaacacaaacggcccctgatgccgtgcagcgagaagcgcgcccggctcaacaagtacggttttccgcgtggctacctgatgcgacagaaacagatccgtggcttccagaccggcgatagggtcaaggccatcgtgccgagcggcaagaaagccggcgtgcatgtgggccgagttgccatccgcaagaccgggagcttcaacatccagaccgaacagggtggcgttcagggcattgcctggcgtcactgcgccctgctgcaacgtggcgatggctacgactatcaccagacacccacccgtaacgacaaaggaggagcgggacgggcggtagcgtga

SEQ ID NO: 1005 - DNA, 293 bp, Halomonas pantelleriensis
  source 1..293: mol_type = other DNA
gtcaactacctctccctgaagagagaggcttgtgaacacaagcccggttgaccagggaaagcggtagccaacccgctacgtttgcaacaggtcgccaagacccacgccaccgtgcttcctcagcggtgggctctggaaggtcagaatcatgctggcgaaaggtaaagcgccgaaggctctgatcgctacggcaacgtaggagccggttgcagacattcccgaggggagacgggccgataggcccgcgacaccaggcccgtaagggcaacgacacggaggaaatcgtcatggcg

SEQ ID NO: 1006 - DNA, 1323 bp, unidentified
  misc_feature 1..1323: note = Ga0136257_102499 JGI
  source 1..1323: mol_type = other DNA
atggatcaaaacagaatacttgtacttttcgcagatggcagcgaagcgatgccttgtcatccagcgagggcacgacaactgctcgacgcggataaagctgcagtatatcgataccagccgttcacaatcattcttactgaacgagaagatggcgatactcaggatgttagtcttcaaattgaccctggaagccaaacaactggattagcactggttgggcatttccaagaaggaactcggttaatttgggcagcaaacttggaacacagaggcgatcagatcaaagaagctttgaggaagaagagacagattcggcgcagcagaaggacgagaaaaactcgttatcgagagcctcggttcgaaaaccgaacgaaatcggatgggtggtttccaccgtccgttcaatctcgcattgataatattagagaatgggcgaaacgactaacgagccgttgtcctgttgcgcaaattaaatgcgagacggttcgttttgatactcagaaaattcaaaatccagaaatcaaaggaaccgagtatcaggacgggaccctgaaaggctacgagctcagggagtatcttctgcagaagtttaatcactcttgcgtatactgtggcatcacagatgtacctttggaactcgatcacgtaaaacctgaaagccgtgggggttctgatcgcactagtaatttagttgtgtcctgcacggtctgtaatcgggacaaaggaagtcagcccgtcgaggaatttgttgaagacgaagaaaaactgagttggatcaaaaagagacaggatgaaaccatgaaggacatgggtgtgatgaacagcatccagtggaaagttggtgaagtacttgaggagaccggtctacttgtaagctaccactctggaggagaaaccaaatataatcggaccgatcaaaactataaaaaagaccactggatcgacgctgcttgtgtcggagaaccgaatgtgcatattccaaagacctatcgatgtttgaaaatcagagcgaaaggtaggggtgatcggcagatgtgtcgagtagatgccaacggttttcctcgcacgtctccgaagcaatacaaacgcatcgatggattccagactggagatctcgttcgggcagttgtgcctgaaaaatacaaaactagcggcacgcatgtagggaaagtcacgattcggtctaatggattcttcgcgataaacacgagagaagaacaagttgatggaattaactcaaaatactgcgagcctcttcagcgagctgatggatactcctactcacaagaaccgaaacaaactacgcactcctctcttgattaa

SEQ ID NO: 1007 - DNA, 317 bp, unidentified
  misc_feature 1..317: note = Ga0136257_102499 JGI
  source 1..317: mol_type = other DNA
gtcaacgacctccgagtaaaaccgggagcttctaacagaagctcacgttgaccagcctaagtcatgctgaaaggctacgactacgttacgggcaaaaataacgataggcaccctggagtgccctcccagctccaggctctgcggcttctggataaacagactgagggtctaagtcagttccagtggcaaacaaactgtccgataacattggcgagggagccctgacctgcaagcgcgacattcgcgtaagcagagactggtaggtaactactactaacaattaataatcgcaaaccatagcgatggatcaaaacaga

SEQ ID NO: 1008 - DNA, 708 bp, unidentified
  misc_feature 1..708: note = Ga0137385_10003252 JGI
  source 1..708: mol_type = other DNA
atgtcacaggtgtttgtcttagatacgaataagcaaccgctcaatccggtgcatcccggttgtgcccgcctgctcttgaaacagggcaaggctgcggtctaccggcgctacccgttcacgctgatcctcaagcgtacggtggagcgaccggagcttcagccgctgcgcgtcaagatcgatccaggcagccagaccaccggcctcgccctggtcaacgatgcgagcgaggaggtcgtgtgggcggcggaagtgcgccaccgggggggacagatcaagcgcgccctggacaagcggcgtgcggcgcggcgtagcaggaggcagcgcaagaccaggtaccgcccgccacgctttcggaaccggaggcctcgcacgggggccctgccgccctccctggagagccgggtgtgcaacgccctcacctgggtccgccgtctgatgcggctctgccccgtcaccgccatcagcttggaactcgtgcggttcgacacgcaagccctccagaatccgcagatcgagggcctcgagtatcagcaggggacgctttggggctacgaagtgcgggaatatgtcctgctcaagtggaatcaccagtgcgcctactgcgacgcgcgcgctgtcccgttggaactcgaccacgtgcagccgagagccaaaggcggctccaaccgcgtcagcaacttaacactggcctgcacttcctgtaaccaa

SEQ ID NO: 1009 - DNA, 312 bp, unidentified
  misc_feature 1..312: note = Ga0137385_10003252 JGI
  source 1..312: mol_type = other DNA
gtcaggaacccgccccctagaagggggcaggcttgctcacaagaagaggaagcctcactcttgaccagtctcagccaccagtcttctccttcggaagagggctgacggggctccattcagggcgaatgcataggcacgtccgggtgcttcaccagcccggaccgctgcggagcagcattaaacaggtggacggggtaaagccagtgtgctgctcatctgaaaccgctcaggaacgttgacgaggtgagcatcacccgcgcaagcggaggctcgcaagagcaaaggaacgcaaggaatggctcgatgtcacag

SEQ ID NO: 1010 - DNA, 975 bp, Moorena sp.
  source 1..975: mol_type = other DNA
gtgttgaagttcgcacccagggatgctgccccagttcctggctctgcaacctctgacttaaagaactgcggtccaggaacggtggtcagaggaaagtaccgcgtgctatccccgtcgaggggatcgttttcactccgaaaggagccttacctgatgaaggtgtttgtgttatcacaagaaggaaagcccttgatgcccacgactccacggcgcgcaagagtgtggctgaaggcaaaacgtgcccgtctcgtgcgccaagagcctttcaccattcgcttgcgctttgccacaaaggcgcatgtgcaagcggcgaaggtgggcgttgatactggctccaaaggcgtgggcattgctgccatcgccaatggcgaggtggtcttccaggccgaggtccatctgcgtgatgacatcacggagaaactgacccaacgacgccagtttcggcgcaatcgacgtgctcgcaagacgcgctatcgtgaagcgcgctatgacaatcgacgccgacctgatggctggttgcccccttctctgcactccaaagcagaggcgaccgtcaaggcggtgcgcttcatggcctcctttttgccggttggtcgggtcaccgtcgaggttggccgttttgacacccaaaggatgcaaaaccctgacatcgcccacttggagtaccagcaaggcgaactgcaagggtacttcctgcgtgagtatgtcttagcaaagtggcagaggacatgcgcctactgtgaggcgcgtgaggtgcccttggaactcgagcatattgtccccaggtcaaggggaggaagcaatcgggccagcaatctcaccctggcctgccatgcctgcaaccggcgcaaagggcagcaaaccgcagcggagtttggcttcccagacgtgcaggcaaaggctcgtgtgccgttgaaggatgccgcgcatgtgtcttccctgaaaagccgggtggtccaggacttgcaagccgtc

SEQ ID NO: 1011 - DNA, 298 bp, Moorena sp.
  source 1..298: mol_type = other DNA
gtcaatgacctccccacagagtggggaggcttgtgaggggttcgcccctcgcaagccggattgaccagacgacacctccgagccagtcgcgccgagaaagcgagcgtcgtggctggtgctgaagaggtgggcgatagcaccaagtgttgaagttcgcacccagggatgctgccccagttcctggctctgcaacctctgacttaaagaactgcggtccaggaacggtggtcagaggaaagtaccgcgtgctatccccgtcgaggggatcgttttcactccgaaaggagccttacctgat

SEQ ID NO: 1012 - DNA, 1068 bp, unidentified
  misc_feature 1..1068: note = Wastewater metagenome
  source 1..1068: mol_type = other DNA
atgttagttccagtcatggatttggacgggaagaccccgctgatgccaacgagaaagcaccgcgctatgcgcttgatcgagcgcggagacgcgaccccgttttggcgtaaaggagtgtggtgtattcggctcaaccgtgagccgagtgcccgcaatcttcaggcgattgtcgtaggagtcgatcccggctcgaagcgggaaggttattcagtagtctcggaggcgcacacgattgccaacgtccaagccgacgcgataacgcacgtcaaagacgcagtcgaagcacgacgtaacgcacggcgctctcgccggacacgtaacaagccacaccgtgcgtgccgttcgaaccgtggcgcgctacgtcggcaggagaatgggtggctccccccgtcaacgcgggcacggtgggagtggaaactacggaacatccggttcctggcgcggctgtaccccgtcactgacgtggtggtcgaggacatcaaagcccgcacccgcaaaggacgaggaggacagtggaacgggtcgttcagcccgctggaagtcggcaagcagtggttctacgtccaagttcagaaagactatcggctgtacttgaagcaaggctgggaaaccgccgagattcgcaaaacattgggcctgtcaaagtcgtcagacaagatgttggaacgttgggacgcgcattgtgtagatgcgtgggctatcgccaacgacgcgctgggacagccacatgccgctcctggcgacacatcgatgctggtcaccaaatcgctgaagttttcacgccgacagttgcatcgcttccagccctctaagggcggtgaacgtcgcccttacgggtctacgcggtctctaggattcaagcgcgggtccatcgtgcgacacccgaaatggggagtgtgtctcgtgggagggacctcccagggacgcatcagcctgcattcgcaggaaaccaacaaacgtctatgccaaaacgccagagttggggacattacgttcctcgcgtataatgataggagccagcgttatgtcccctccgtgaatgttggggtctccacgctgggaatctga

SEQ ID NO: 1013 - DNA, 210 bp, unidentified
  misc_feature 1..210: note = Wastewater metagenome
  source 1..210: mol_type = other DNA
gtcaataacccctccccaatagggaggggcttggggaagcgaaagccacctcgcgaaaccgagataacaccgttgactacacaacaactgaatagttgaactgttgatctgggcgtggcagcccaaacgacgctagagatgcccacctagtccctagcctctcggatcaggagtgtggaaggtgcgtatataggaaggcgtaagccacat

SEQ ID NO: 1014 - DNA, 1464 bp, unidentified
  misc_feature 1..1464: note = Mouse gut metagenome
  source 1..1464: mol_type = other DNA
atggtatatgtactggacagggacgggaggccgctcatgccgacagacaagcacgcatacgtgcgcatcctgctgaaatccggcagggcatcggtggcacgcgtgcacccgttcaccataaaattgaactacgacactacatacaatgtacggccggtcatcctcggcatcgacccggggcggacgaacatagggctgtgcgccgtaacggaggcggggaaaccgctgttcaccgcggaggtgcggacgaggaataaggacatccctggtctgatggcggcgcggaaggcattccgtcaggcgcacaggaagcacaggcggagagagaagcgccagaggcgcgcactggcaaacggaacggcgctgaaggacggaaagatcgagcggcggcttccctcgtacgggaaggacaggaccgtcacatgtaaggtgatcaggaataaacaggcgcggttctcgaacaggaaacgccctgacgggtgtctgacgcccacggcgtcacagctactgcggacgcatttaaacctcgtaaggaaggtggcggggttcctccccgtttcaaaaatcgtgctggaactcaataaattcgccttcatgaggctggacgacccctcaacgcacggcgacatgttccaacgcggcccgctgtacggctatgacagcagcgttgagtccgcagtgtacgcccttcaggacgggaagtgcctgctctgcggcgaacccatacaacagtaccaccacgtgagggaatgcaggcgtgacgggagcgagaccgtgaggaaccgcgccgggctgtgcacggcatgccacagactcgtgcacacggacgaagcggcgcgcggaaaacttgcatccgtcgcggcgggcatgcggaagaagcatgacgcgctgggcgtgctcaaccagatcataccgcacctcgtggaagggctgtccgtggattatgacgtgtccgcaacggcggggtgggagacgaaggagttcagggaaacccacaatattccgaagggtcaccacctcgacgcctacgccgtggcgtgctccgcactggaaaactttgaagtgtgtgttcccaatgaatgttaccacatatgccagttcaggaggcatgacaggaaggcatgtgaacgtgagatgtacaacaggaactatgtccttgacgggaaggttgccgcgcagaacaggcacaaagccatggggcagaaggcggacagcctcgaagaatatatcgcaaagggcgggagaaccgaccgcctgaaggtgaagcatgcccgcagggcgatgaaggacatggcaaggcattaccccggctgccaggtggtacataacggcaggataaggacgctgctgaagcgggcgtcggggagctactggttcgacgacggttcgaaaagccccgtccgtaagacggatgtgacactgaacaattcggggctggtgtttgtatcaaacacgttagcttaa

SEQ ID NO: 1015 - DNA, 258 bp, unidentified
  misc_feature 1..258: note = Mouse gut metagenome
  source 1..258: mol_type = other DNA
ataaaatgattccgtgcaccaatattccgttacataatgacccggcttgtggatgaggtcattttctgaccacatccacgggtcgggtacaggcatattctgacggcgtcggtcgtgccccttacggccgtggcacccgcggatggtttcccagtccgcagcactgcagagccggcaggaagccgggggagacattacccccgcgcaccagcgcggggagtttacattccatgtaaaggagacaagtaaatggtatat

SEQ ID NO: 1016 - DNA, 1509 bp, unidentified
  misc_feature 1..1509: note = Ga0223845_11796712 JGI
  source 1..1509: mol_type = other DNA
ttggcgaagtggaacacgtgcggatgcacagaacccgcctggacatatgccctggcggaagacgtaagtcattgcaaccgtttgtttaaggaaaggagggcgtcagtggctgacatgagagatgtcgcggtgatctcgaagacaggcacgtcactgatgccgacgtcggggtaccgcgcaaggaaacttcttaagaagggaaaggccgttatcgaaaaataccgccctgtgttcaccatccgccttacagaacgcgaggacggtgaggtgcaggacatggaactgaaggaggatacggggtacctgcatatcgggatatctgtctgttccgaaaaacacgaacatatgcaccgtcagtacgaccttctgagtgatgaggtggagaaacacaacgaccgtctgaaatatcgcaggacgcgccgtaacagaaaacgttacaggaaaccgcgctttgacaacaggaagagtcttatcacaaaagacggttttgcgccctccatcaggaacaggcgtgacaggcatgtggatcttgtgcgtgagatatgcgcggtaatgcccataaagcgtgcctacatcgaaatgggacagtttgacacgcaggtactgaaagctgttgaactcggccttccgatacccgaaggggaggattatcagcacggagaacagtacgggttcatgacactcagggaagcggtattcacaagggacagccatacctgtgttgtctgcgggcgctccgttaaggaaggcgccatccttcacgaacaccatatcgggttctggaaaggcgaccgcaccgatcgtccttccaacctcgccacggtctgcgaaaaatgccacacgccttccaaccacaggcctggagggaagctgtatggcatgaatccggtcatgaagcccctgaaggaggcgacattcatgacgaccgtgcggtatgacatgctgaggaggatgaaagaatccgccccgcacgtggcattccatatgacatacggcgcggcgacaaagctgtcccgcagaaatctcggcattgaaaagacacacgcgaatgacgcgtatgccatgggaaaataccatccgaaacaccgtgcgcgccaggaaacgttccggaagagaaggcgaaacagccgtgtactggaaaggttctatgacgcggtgtacatcgatacgcgggatggccgtaagaagaaaggttcagagcttggatgtaacaggacgaaccgccgtgagacgaggatgtctcccaaaaacgaacgtatctttcacgggaagaaggtttcggcgggacaccgttccatcaggaaagaacgtacacgaatcacacccggaagcctggtaaaatacgacagtgaggtgatgaccgtaaaggggatccacagccccgtttcgggaaccaatgtggaattcgcaaagcccgcgtcaaacggaagaaaatccgcctctctgaaaaagctgaaagtactgaaagtaaacctgttttcaggatgggagcgggtaaacactttataa

SEQ ID NO: 1017 - DNA, 402 bp, unidentified
  misc_feature 1..402: note = Ga0223845_11796712 JGI
  source 1..402: mol_type = other DNA
gtcaactgaccacctcccatgcggtgaacgtcccggcgttcatcctgtggaaggggcttgcgggaagaaattttcgtgagtcggttgattagctgagcaggaacaggtcctggtggaaaccgttcctgctgcacttcaaaagagtgtaagtgacttccatgtgtttacagacagaagttaccggaagagaactacgttgccggcgaaaatacaggcaccatgggatactccacacgtcccatgcaactgcgccgtggcattaaacatccctgagggtcaggggaagtgtgctgcggatataaaaccgtcggataacattggcgaagtggaacacgtgcggatgcacagaacccgcctggacatatgccctggcggaagacgtaagtcattgcaaccgtttgt

SEQ ID NO: 1018 - DNA, 1272 bp, unidentified
  misc_feature 1..1272: note = Human oral metagenome
  source 1..1272: mol_type = other DNA
atggtgtatgttatttcaaaatacgggcaaccgcttatgccaattcgtagacacggtaaagttcgaagattattaaaagaagggaaggcaaaggttactcatagagaaccgttcactattcggctactagttgaaactgaaagtaatgtatcagatttaacacttggggttgatacaggttcatcaaaaataggttgtgcagtagttacatcaaaagaagaggttttatatttatcagaagtaaaaatcaggaatgatatatctgtaaagatgaaacggagagcaatatatcgtagagcaagaagaacaaggaaaactagatatagaaaatcaaaatttctaaatcgtggtaattctataagaaaagatagatttagtcctactatgacaagcaagattaactcacatattagagagattgagtttatcaagtctatcctgcctattaaatatttaataattgaaactggaacgttcgatacgcatttacttaaatatgaaggagaggcgttcaatcgtcattggggatatcagaaaggtcaaaattacagattcgctaattcaaagtcagcttgtttaaatagagatagttatacttgtcaatgttgcaaaactaaaaaaggaacacttcatattcaccatattgtatatcggtcaaatggtggcgcagatactttagataatctaattactttgtgtgcagattgccataaaaaacttcaccgcggagaacttaatgactttgaaagtaagttagctggtaagaaaaaggggaaactcaaacacgctacgcagatgaatagtattagagttcaacttttaaaacattatccagaagcaatcgaaacatttgggtttataactaaagaaaatagacaacttataggcttagagaaaaagcattacaatgacgctgttgtaatagctactggatgtttaaataagcctaagtttttagtggatgttgtgtataagaaaatatgtattgcaaaaggtcggtaccgattacatcaaggtcagcgttcagaaatgaagctcccaagaggaaaggtcgaaggttttttaaataaggacattgttaaatatagaggttgtaattatttaattaaagggttaataagtcgtggtggttattgtgcattgatgaatattgatggcattacacagagatttgagaatccgaaaaatgttaaattaaacaatcttaaaagagtgtccgcaaggagtacaacaagatgtataagccagaaaatcattccaaatatagcttaa

SEQ ID NO: 1019 - DNA, 328 bp, unidentified
  misc_feature 1..328: note = Human oral metagenome
  source 1..328: mol_type = other DNA
gtgacgctgcactcagctaaaggccgagtacctttaaggtacgctgcgtcaacagattgagctctcagaaatgagggctacgatagttgagagaaatacatacacacctgcagttgtcgcctcagactgctgctctgtgactactaattaagtcgagaggaaagtgctaagtctctgtgttagtagtttaaaaacctcaattatcattgtcgagaggaagtcggattcttatcttggttacagagataagatacgcactacagttgaaaacgaactggtgtataacattaaatcgttttaatctaagaaaggagccgtagatactatg

SEQ ID NO: 1020 - DNA, 1299 bp, unidentified
  misc_feature 1..1299: note = Ga0256407_10001717 JGI
  source 1..1299: mol_type = other DNA
atggtttatgtacaagacttcgacgggaatcctctgatgccgactgaaaagtacggcagcgtgaggatcatgctcaggaccggacgggccagggttgtgaagtcatgtccgttcaccatacagctcacgactgagaagcgacgctatacccagcccgtgagccttggggtcaggtgcggttcccgccgtatcggcctgtcagcgacgacggagaagaaagaacttctgtgcgctgccggtgaacttaggactgacatcgtggatctcctgtcaacacgacgcgaatcccgccgtaccagacggtcaaggctccgtcacagggaagcacggtttgacaaccgcgtcagcaccaagaaggaaggctggctgccgccatcggtgaggagcagaatggacttccacctgaagatggtggactgggttcgcaggatccttcccgtgactacggtcacttttgaggtcggctcctacgacatccagaagatcaagaaccccgacatctcaggtgagcagtaccagcagggcgaacagctcgctttctggaatgtcagggagtatgtgcttgcccgcgacggccacaagtgccagcactgcaagggcaagtccaaggatccggttttgaatgtccaccacatcgagagtcagaagaccggcggcgatgccccgaacaatcttatcaccctctgtgagacctgccataaggcataccataggggagagattgatctgaaagtccgtcgtggcaacagcttcagggatgcagcagccatcaatgtggtgaagaacgctgtgtaccgcaaggctatacagtctttggatggctgtagtgtctgcaggacatacaggtatgtcacgaagcacagacggataaatgcaggtctggagaacgacagctacactgactatagggtcatcagcggtaatctggcggcaatggtttctgacagtgtattcgcgcttcggcagatacgcaggcataatcgccagatccacaaggcaaatatcctgaaaggctgtcgtctgaaaaagaaccaggcaccctatctggtgttcggctaccgcctgaacgatattgttctcttcaagagtaaccggtgtatcatcaccgggcgcaggagcagcggtagttttgccctgaaggacttggaaaccggagataggtatgcagctgtcagctacaagaggttgtccttgttacaagtctgtaacagaactgtagtgtttaaccaaaaaagaggaatgtccggcgtttcctcagcccgcctgaagacgggagtatccacgccgaatgaatcatga

SEQ ID NO: 1021 - DNA, 278 bp, unidentified
  misc_feature 1..278: note = Ga0256407_10001717 JGI
  source 1..278: mol_type = other DNA
gtcagccacccacccctgaagggatgagcttgtaacagctccagctgattagacggcactctaatgtgcagccgttacgggcgaatatacaggcacctttggatgttcttccaagtccgaagctctgcggccagtggttaaacagtcctgggaggtagggacagtgctgctggcacacaaaccgcccgataacaacgtcgatgggagcattaccctccttctggaggagtcatctgccaaaaggcagtatttttaaacgactaaaaaagtaaagtatg

SEQ ID NO: 1022 - DNA, 1479 bp, unidentified
  misc_feature 1..1479: note = Ga0223824_10002447 JGI
  source 1..1479: mol_type = other DNA
atgtatgtagtttatgttttagacaaagacggcaatccactcatgccaacaaaaagatttggacatgtacgtaagcttttgaaatccggacaggcaaaagctgtatccactaaaccttttgtgattcaacttttgtacgagtccactaaatttactcagtcactttatggcggaactgaccccggcagaaccaatattggtgaagctgtggtcaaccagaagggggaagttgtctatgctgcgcatgtcatcacaaggaataaagatattccaaagttaatgactaatagagccgctcatcgcagagcttctcgtcgtggcgaacgactccgtagaaaacgcagagcgaaaaccaacggtactttaacgaattttcccgacgggcgaaagctacctaaatataaggatggggttctagtgctgaaagacattattaatactgaggcgaagtttgctaaccgcaaacgtcccgctggatggttaacaccaacagcaagacaatgtgtgcaaacgcatattaatatcatcaaacagatttgcaaaatcttgcctgtaacaaactggacactggaatacaacaaatttgctttcatgagaatgaatgatggctccgtaaaaggcatggattttcagaatggtagaatgaaatgtttcgccaatgttaacgagtatgtctgttcattacaggacggacattgcgtcctgtgtgatggtaagattgaccattaccaccatatcgtacctcgtcataaaggaggtagtaatactccggagaatattgttggactatgcagtgagtgtcactctgaaatacatcaaaacaaagttacccttgatgatattggtcttaaaaagaaatatgctggtacgtccattgttaatattgccatgccatatatttacgaagagttattaaacatgtttagtgaggagcattttcacgtttgtgatggctatgctacctcaaacaaaagagcagaaaataatattgacaaagagcattctgctgatgctgcttgtattgcagcaattggcagcaatgtcaatcttaaatatgatatggaaaatatctttgaaataaggcaatatcgcaatcatgatagagctatcgttaataatcagcctgaacgaacctataaagtaggcagaaaggtcgttgccaagaaccgcaagccacgttttgagcaagataagaaagtgcctgctataagtgattggtatgaacagctttgcgacgaaatcggctatcggcaagctcgtatagcattatcaaaagttagagttataaagtcgtatcgcagatacaacgatactaaaagaattctggccggtgcgatattcctgtttcaagataaaagatatgtccttaccagcagccttacaaacggacaatattacagagcttatggatatggacaaaagaatttttcagctcgaaattgcacaattgtacaacgaaaatctttagtatatgtttag

SEQ ID NO: 1023 - DNA, 223 bp, unidentified
  misc_feature 1..223: note = Ga0223824_10002447 JGI
  source 1..223: mol_type = other DNA
gtcaactacctctgctttatgcttcgcatttgaagcaggggctttttcgagcccctagcagacgtagttgagcagagacatgacgtagcaggattaagttccgaaacaccgggggtgatgccaagcctccagctctgtgcgtagctacgccgagtctatggcaatctaacttcgtgacgactgtcacgaagacttatctcaaaggagatttcaaatgtatgta

SEQ ID NO: 1024 - DNA, 1365 bp, unidentified
  misc_feature 1..1365: note = Ga0307929_1001023 JGI
  source 1..1365: mol_type = other DNA
atgttaagtaattcagtatgcgctttaaatcaaagaggtaagccgttaatgccttgctctcaaagaaaagcaaggcttttgcttaaggcaaaaaaggcaaaaatagttgctcatagaccttttactattcagctaaattatgccactggggaaactaaacaatcaattaccataggcgttgatgctggttacaaaaatgttgggatctcaattgtaagtcctaaaaaagaatttttatcaagtgaaattcaattgcttgaaggacagattgaacgaaacaaaaagcgaaagatgtaccgaaataacagaagaagtcaattgaggtacaggaagccaaggtttgataaccggaaaacgcccaaagggtggttggcaccaagtattgggcataaatttgatagtcatattaagtttattgaacacttaaaatcagtctttccgattactgaagtgattattgaagtggctacctttgatattcaaaagattaagaatacagatataagtgagactgaatatcaaaatggtgagcaaaaagatttctggaatcttcgggaatatgttttccatagagattaccatcaatgccagagtctaaaatgtcaggaaaaggaaaaacaagacaaaaatcagatattaagaacacaccatattggtttttggaaaaaagatagatccaataggccagggaacctaatcactctttgcactaaatgtcatacacctaaaaaccataaaaaaaagggtatgctgtttggttgggaacccaaggttaaatcctttagacctgaaactttcatgtcaacggttgggtggaaaatggtcaatcaattaaaatgcaagcatacttatggttatcaaaccaaatcaaaaagaattaatcaaaagcttgaaaaaactcattatactgatgctttttgtattgctaatggtactcatcaagaacgaaccgcaccaataatgtttaagcagaaaagaagaaataaccgaagtttagaaaggttctatgatgctaaatatattgacattcgaacaggtacggttctcaaaggtgctgagttacattctggtagaacaaccagaaacaagaatctcaatagtgagaatttaagaaaatatagaggggaaaaaaagtcaaaaggaaaaagagtgattcgaaggcagagatatctttttcaaccgcatgatttagttgtgtacgaaaacaaaatttggaaagtaattggtacacataataagggagcttctgttagaattacaaatggtcaacaaacgtttagtcgatctccaaagaaactcaagcataaattacatattaattcattaattttaacacaggaggtggcaattcctcccctgagctaa

SEQ ID NO: 1025 - DNA, 303 bp, unidentified
  misc_feature 1..303: note = Ga0307929_1001023 JGI
  source 1..303: mol_type = other DNA
gtcaacaacccctgagctaaagactcaggggcttgcaaagtaacttttgcaagcctggttgattagcctaagttttaattaactacgttactttagaaaaatataggcacctttagatactccactcgtctgaagctctgcggttagtgtttaaacatctctgagggtaaggagaagtgatgctgacaaccaaaacctattgtaacattggcaaagtggacaaattatcttcggatgaggacaggacttgagagtacccgtcaattttttagaaaaagtaggtaaaaaatgttaagtaattca

SEQ ID NO: 1026 - DNA, 1401 bp, unidentified
  misc_feature 1..1401: note = GENOME_ACESSION: mgm4530144.3 MG-RAST
  source 1..1401: mol_type = other DNA
atgggagatgtaggtatagtccaacctacacgtcacccagcactgctggaggaaggaggaaaactccatatggtgtttgtgttgaacagggataaaacacctttagcaccctgtcacgaggcagttgcaaggaaattgcttaaacaaggaaaagcagttgtacacagaattttccctttcacgataaggctcaaagaacagaaggatacatcaatgtttaaaccagactacagactcaaaatcgattatggaagcaggcatacagggattgcaataatcaaaaacaactctgaagtaattttcatgatgcagctacatcataggacagacgtaaaagaaaatatagatagaagacgtgcattccgatgtagcagaagaaacagaaaaacaagatacagaaaaccaaggtttttgaacagacgaagagatgaagattggttaccacctacactacagagcagggtaaacaacattgcaacgtgggtaagaagactttgtgagttgtgtcctattacagtgatttcttatgagaacgtcaaattcgatacgcagttgctaaggaatccagagatttcaggtattgagtatcagcgaggaacgttgcaagggtatgaggtcaaagaatacttgcttgagaagtttggcagaagatgtgtttactgtggtgctacaaacgtaccacttgaagttgagcatgtaattccaaaatcaagaggtggaacaaacagagtagataatcttgttatagcctgtcatgaatgtaatcagaagaaaaggaataagacagcggaagagtttggatatccagaaattcagcaacttgtcaaagaaccattaaaggactgtgcagtagtcaacactactagatggaagatctacaaggttttgaaggcaactggactgccagtagaatgtggtacaggagctactacaaagatgaacaggctgagacttggtttacctaaagaccatcattttgatgctgtatgtgtaggacattctacacctgacaggatttggttcaagacaggaactgttttgcacgtgttagcaaaaggtagaggcacaagacagattgctgtgcttgatagatatggttttccacgagggtatagaactaggaagaaatgtttttatggctttcaaagcggagacatagtaagagctaacgttccgaaaggcaaatacaaaggagtatggacagggatagtagcatgtagagaaagtggatattttgatataaagaacagagctggaaaaaggattgctcaaggtatttcatacaaatattgcaaagtagttcagcggtttgacggatattgttatgagttggaacaaacaaaaatatctggcacatttcctctccaacctgtagaggttggagcctccatgtgccagtag

SEQ ID NO: 1027 - DNA, 290 bp, unidentified
  misc_feature 1..290: note = GENOME_ACESSION: mgm4530144.3 MG-RAST
  source 1..290: mol_type = other DNA
gtcaactaccacccgtctgtagaggcggaggcttgaaagagccatggttgaccagcccaaggaactgacctgaaggacaagggaatgatgttcctacgttatccctgtcagggcactctggggtgcgtcccaagctccagacactgccgtgcagacttaaacagtcctgagtggtagggacagtggtctgcacatggcaagcagggataacatgggcgatgggagatgtaggtatagtccaacctacacgtcacccagcactgctggaggaaggaggaaaactccatatg

SEQ ID NO: 1028 - DNA, 774 bp, unidentified
  misc_feature 1..774: note = metagenome
  source 1..774: mol_type = other DNA
gtggttgagcagaagcatggatggatacgtgtcacaaggcaggcactgccggattttcccagttcggcacaatgcagagtgtccacccagcttagggaaacagtacgacaaggtgtgcacaggtttacaaccggtgccgtccgatgcgctggacggcggtactgcacgcagcatttaatgaaacaaaaaggagggcatcacatgccggatacagactacatatatgtgcttggcagggatgggaaaccgcagatgccgacaaaaagaaaaagatatatcaaaaagctgcttgatgctggtaaggcaaggattgcctgccttggtgccggtttgataccggcggcagcccaggggtttacctatgtacataaaatcgtacagttccggagacatgaccgtgcaattatcaataaccagagggagaggacatacagactcagtggaaagatcattgcaaagaaccgcagaccacggtttgaacaaaagtgcccatcactttccggctggtatgaagaacaggttaaatgtcatggccggaaggaggcagaccggatgcggtcacagcttaccgttgagaaaagcacaagacgttacaacaatccggaccgtctgatgcctggtgccctgttcgaatacatgggtgaataccatgtattgtccggacagttgtcaaacggccagtatcttcgtgcgtatggtgataagaaaacaaactacccggcaaagaaatgccggatcataagacacaacgaggggcttgtatttgttgcgtag

SEQ ID NO: 1029 - DNA, 198 bp, unidentified
  misc_feature 1..198: note = metagenome
  source 1..198: mol_type = other DNA
ataaggtaggaaaggcaggggaagaagaggtgtgattatggcagaaagaacagggaaaaagaaaaagactccgatgtatgcggaccggatcggcggtgtccgtccggtgtatgcatgcccgtcatgtggggagcatctgtttattccggatatctgcgtagcgtgcgggcagaaaattaaatgggatagttaatgtgt

SEQ ID NO: 1030 - DNA, 1341 bp, unidentified
  misc_feature 1..1341: note = Ga0310691_10013239 JGI
  source 1..1341: mol_type = other DNA
atgactgtattcgttcaggacataaacggaaacccgctgatgccgacagaacgctgcggcatggttcgccgcagaataaaagaaggcaagatgtctattgtctcatatgaaccgttcacggttcgactgacatacgacaacgggaagaattatgttcaggaatgtactctcggcattgactcggggacgagtcatatcggtttgagcgtcactactgaaaagaatgaacttttcagtgctgaagcagaagtaaggacaagggaagtaaaagacaaacttaaagaaagaaaagaaaacagaagacacaggagatgtaagaaccgtcgctacagacaagcccggttcaataaccggactcacagcaagaaagcgggatggcttcctcctactgtttggcagaacataaacacatacactcttttgataaaaagagtgagttctattcttccagtcagtaaaataatatttgaagctgctgactttgatacacagaagatgtgcaatccagatatctccggggaagaataccggcacggtcagatggaaggccatctgaacacaagggagtttgtattatggagagacaactatacttgtgccatatgtaataagaatgctttcactgacaaagtgaaagttcattcacaccatatcatatggaaaacaaacggaggttctgacagacctgataatcaggtctgtgtatgtgagaagtgtcacaacaagattcacaaaaacaaggcacatctgccagagaacctgaatatcaaagcaaagactgctttgaagttaagggatgccggactgatgaacaacataaagtggcaagcagtcagggaaatcaggaaaacatttcctgatattccggtgaaagtgacatacggatacaagacaaaatctgtcaggtatgttcataacatagagaagtctcatgcaaatgacgcatacgtcatttccggaaatatcaatgcgattcattcagacagaatctatttgtacagacagaaccgtcgtcataagagacaacttcaggactttgcaccgagatcaaggagagacaaggatgggaaattcaaaatgtcaagaaaagagagaaagaaaagaggatatgtgataaaaagatgtaaggagataaaggagatatacggcttcacgaagcgaagcctcgtcaaatacaataataagttattcactataaccggtctcagagcgaccgggaatttctcactcagaaacaccaaagacaaaactgaatcaattgattcagtttcacacaaagaactcaaattgataagaaaacaatacaaatcattgtatatagaaaatatcaagaaaagataa

SEQ ID NO: 1031 - DNA, 341 bp, unidentified
  misc_feature 1..341: note = Ga0310691_10013239 JGI
  source 1..341: mol_type = other DNA
gtcaccaaccgccgggtctgaagaacccgcggcttggctgaccggaaggtcgacacaggctgatggtgaataccctaagtctacggagacagccggtcgatgaccggcacactcccaggctacgttacttcagaatatatagtcactatcggatgtttgtccaagtccggtactctgaggcagataactaaacagttctatgcggtagggacagtgagtctgcatacaaacctgaggataacattggggatgggctttcaccggagcaattccgttgctccgtgtacttatggattagtttccatttaaattaaaaaaaaaacaaaagaaagaaaatgact

SEQ ID NO: 1032 - DNA, 642 bp, unidentified
  misc_feature 1..642: note = Ga0117908_1060975 JGI
  source 1..642: mol_type = other DNA
atggtgtcgggtgttgcctgcgtaggtaacggagaaatccttttctctgctgatatcaaacatagaaatccagtggcattgcaacagaaagatggtttcaagacatttgtgcaagtccgagcagaaagacgcagagcacgcagaaaccgtcatagatggcacagaaaagcaagattcaataatagagcatcatccaaaagagctggtagattgcctccaactattaagatgaatgtcatggaagttgttagagttgtcaggcaaattcctctcccaatttcccatatcaccgttgaagatgttgctgtggatattaggagattaagcaatcctgatgtggaagggagtgaataccaacaatctaatcggctggacgagaatctaagacttgcctgcctgatgagagacaacttcacttgtcggaaatgtggtaaaaaggaaatcaaactcacatctcatcatatagtttggacttctaaaggtggcaaagatagtatttacaacttgataaccctttgcgagaattgccatgaaaaggtacactctacgggagaaagcggcaaaatcaagctcaaaggcggcaaagtaacgacaggctcggaacgaagtggagaggtttcatccgatggatggtttttctga

SEQ ID NO: 1033 - DNA, 288 bp, unidentified
  misc_feature 1..288: note = Ga0117908_1060975 JGI
  source 1..288: mol_type = other DNA
gtcaatcacccctcctgattccgagaatcagaaggggcttgcgtagacaatgcgcaagccccaggttagaccagcccccttcatctacgaggtgaaggagaagttacctgttgtatcacaccctgggatgtgcttccagttccgatccataaggacacggctctgtggcttattcgtaaacatttctgtgagggtaggaagagtcgaataagcgtaaaaacacaggataacaggggcgaggaggaatttactctttacacgtaggaggttctaacaaacataatgcgt

SEQ ID NO: 1034 - DNA, 1008 bp, unidentified
  misc_feature 1..1008: note = Ga0117908_1013265 JGI
  source 1..1008: mol_type = other DNA
atgttacaaagagtaccagtattacaccaagacggaacaccactgatgccgtgcaagccagcaaaggctcgtaagttactacgtaatggtaaggctgtcaagcgctggacaagagaaggtgtgttctatattcaacttacttgggatagtacaaaacgtactcagccgatgtgcttgggtattgacccaggcagtaaattcgatgggtacgctgtgctaactgaccaggagattgtgacctccgcaatggcaatattgccagacattacgaggaaagtaaagaacaggagaataatgcggaggtctcgacggcagcgtaagaacagacggcgcaaggtacgtcggaaagatacgaagaaggctggatggattagccctacacaaagagccaaagtggaattcagactaacgctaattaggagatacctgaagttatatcctattacctactttgctgtggaagatgtacggttcaatcactacaagaagcgatggggtaagcacttctctggtgttgaaatcggtaagactatgctttatatcgaattggagaagtttggcactctctataagttcgagggttggcaaacaaaggaactaagggatagagatgggttgaagaagagcagtagcaaagacaagttgagttttgactcacatgcggtagatgctgctgtaatagcaggagaagtaatagggtatgtaggtgattataatgtaccagagttctgggtattcaaacgccctaatctacgaagacgttcattacacttgcagaacccgcagaaaggtggaataagacgggtacatggtggaacatgggcattaggtattaggaagaacactgtgtgtatctggaaggatggcgtatatcgcacaggtggttcaacgaaaggtcgattaagtctgcacgatatgtcaatcaaagcaaagcgagtaacacaaagtgcgaaggtagaagatttgatgttactataccaccagactatttacgcggaaaggatgtag

SEQ ID NO: 1035 - DNA, 298 bp, unidentified
  misc_feature 1..298: note = Ga0117908_1013265 JGI
  source 1..298: mol_type = other DNA
gctaaaattgaccttcaactcgcacttgacagcatgaatggagatatgccccccgaacttatcgctatcgacctgaaaggcgcactggataaacttggaataatcgtgggaaagacaagtacggacgatattttggagagaatattttctaagttttgtattggcaagtgagagtcaataacccctgaattcaatttaggggcttgtgggaatgctaccacaagggtaactgttgaactatgactcagctttagctacgtgtttgagccaaggtggagcgatatagtcgggtacaaag

SEQ ID NO: 1036 - DNA, 708 bp, unidentified
  misc_feature 1..708: note = Ga0137372_10037833 JGI
  source 1..708: mol_type = other DNA
ctagacacgaacaagcagccactcaacccggtgcatccaggacgtgcacgtttgttgcttcaagcagggaaagctgccgtgctcaagtactacccatttactatcatcctcaagagcagtggagagcagccacaggtagagcccttgcgcatcaagctcgaccccggcagccgcaccactggcatagctcttgtcaacgaccggagtggccaggtgctttttgcggctgaactcacgcaccgaggccagcagatcaacaaggcgctcgacgaccgccgagcggtacgcagaagccgcaggcgtcgacacagcagataccgcaagcccagattcgataatcgccgcaggccacagggctggctggccccttccctcatgagtcgagtacacaacgtggtgagctgggtacaccgactccgaaagctctctccgatcacagccatcagcatggaattggttcgcttcgatctgcaaacgatgcagcagccagggatcgagggcatcgcgtatcaacaggggacgcttgctggatacgaactcagagaatttttgctggaaaaatgggggcgtgcctgcagctattgtgggaagcagaacatccccctccaggtcgagcacatggttgcgcgtgccaacggcggcacgaaccgcgtcagcaatttgtgtctctcctgtgaaccctgcaatacacgtaagggtacccaggac

SEQ ID NO: 1037 - DNA, 271 bp, unidentified
  misc_feature 1..271: note = Ga0137372_10037833 JGI
  source 1..271: mol_type = other DNA
gtcaggaacccaatccccttttaggggatgggcttgtttcggcaagctcacctgaccagactcagctagcccgctagctacgttcagagcgaaataggtacgtcggggtacgttgccagcctcgaccgctacggtgcaaggttaaaaggtgtacaagggtcaagccggtgctttgcacgccaaaccgcttatgaacattgtcaaggcacacattaccccggtcacacgggaggctcgtaagagcacaccaaggagttatccagtgagtttc

SEQ ID NO: 1038 - DNA, 1299 bp, unidentified
  misc_feature 1..1299: note = Ga0137380_10001296 JGI
  source 1..1299: mol_type = other DNA
ttgagcaacgtctttgtcttagataccaaccaccaggcattaaaccctgtccatccggcgcgagcacgcctgctgctctcctgggggcaagccgccgtgtttcgtcgctatcccttcaccatcatcctgaaaggggctctcgaccatcccgttcttgcccccttgcgtctcaagctggacccaggcagcaaaaccaccggaatagcgatagtcaacgatgcgacgggggaagtcgtctttgccgccgaactcacgcaccgagggcaggccatcaaagagcgtctggatacgcgacgggctgtccgccggagccgacgggcacgcaaaacacgctaccgcaagccacgctttgacaaccgacgccgcgcatcggaatgggttcccccttctcgcgagagtcgtctctccaacaccctcacgcaggtcaagcgccttatgagcctgtgtcccatcacagctatcagtcaagaactcgtcaaatttgacctgcaagccatggacaagccggagattgccggagccaactaccaacaagggacgctggccggatacgaactgcgagagtacctgctcgaaaagtggcagcgtcgatgcgcctattgcggcaaagacaacgtgcctctgcaaattgagcatattcatcccacaagcaagggcggcacgaatcgcgtcagcaatctcacgctcgcctgtgagccctgcaacatcgcgaaaggcacgagggatatcaaggagtttctcgcgaacaaaccagacgtactcaagcgcattctcgctcaatcaaaagcaccgcttaaagatgcttcggcggtcaatgccacacggtgggaactctcccgacgcttgcaagcattaggcttgccggtagaatgtggcagtggaggactgaccaagttcaatcgtctctcccaaggactcgacaaggcgcactggattgatgccgcgtgcgtgggcaagagcaccccaccgtgtctctctctccatggggtagtgccacttctcatcacggctacaggctcaggcaatcggcaaatgtgcggcacgaataagtacggcttgcctgttcggcatcggcaacgccagaagcaccactatggatatcaaaccggcgatatggtgcgagcggttgtcacctcaggccgacgcgttggggagtatgtcggacgagtgctcgtgcgtgccactggctcctttgatattcaaaccaaacaaggacgggtgcaaggaattagccatcgtttcttcacaccccttcatcggcgggatggctatcgttatcaaaaaggagaggtggtatga

SEQ ID NO: 1039 - DNA, 249 bp, unidentified
  misc_feature 1..249: note = Ga0137380_10001296 JGI
  source 1..249: mol_type = other DNA
gtcaggaaccccgggctaaagccacggggcttgtgtgaacaagccggaacctgaccagtctcagccgggcaaccagctacgttgggagcgaatgcataggcacgttggggtgcgcggccagccccaacctctgcgacggatggttaaacagagctaacgggttaactcagtgctctccgtatcgaaaccgctcacgaactttgacgaggccaccattaccctggaaacaggaggctcatcttgagcaac

SEQ ID NO: 1040 - DNA, 1134 bp, unidentified
  misc_feature 1..1134: note = JGI24023J19991_10009125
  source 1..1134: mol_type = other DNA
atgtccgttgatagccaaggcagtcagcgagctaagcctgcattgcccctcgaagggtgctcaacaggcccacgggagcctggccggataccggcactaatccccgtgctccacaaggacggcacttccctcacaccctgtaaaccggcgaaggcccgcaagctgttgaagggtggcgtagcagagaagcgttggaacaagctaggccaattctatattcagatgttggttgaaacaggcaaggagaggccagagatgtggctggccgacgatcccggctccaagtatgacggattagcgatagcctcgcacaaacaggttcagatggcggtcatgctggagctgcccacaggtattgcggacaagctcaccaatcgtagtcagttgcggcgggctaggcggttcaagctacgccggaggcccaagcgatttgataatcgccacaggccggagggctggattgcgccttcacagaaggcgaaggtagagtttcggctgaaggtcattcgtgagttgtgcaggatctatccgatcaccggctttgtcgtggaggatgtgcggttcaaccattaccgcaagcactggggaaagaacttctctaccgtcgaaattgggaaggcatacctctacgaggagttaaagaagctgggccagctcaagctctacgagggctgggagacacaagaggagcgggatgtgcaggggctcaagaagatcaagtcgaagtccaagcgcgtgctggagagccatgctgtggacgcggtagcaatgctctctaggtggctgggaacgcttgacttacgggtgccggagttttgggtgtttaagcacccgaacctacgcaggcgaagcctccatcttcagaatccagctaaaggcggggtccggcgagtgcatggcggcacagttgctttaggcgttcccaagaatacaatctgcattttgaaaagcaggctctatcgcacagggggttctaccaagggtagattgagcctgcacgatctatcactagaggcaaagcgagtcaggcggaacgcaaagattggagagattaagctgctattcaggcagactatatttggaaaggaggttctcaagggctttgcccttgcgcctgctcctccccatggataa

SEQ ID NO: 1041 - DNA, 221 bp, unidentified
  misc_feature 1..221: note = JGI24023J19991_10009125
  source 1..221: mol_type = other DNA
gtcagggaaaactggtctagccgagcttcctaatgaggatatatatcgctttatagatatagctaatgtcttttatggacctggtcttaatattgtgtgggttacactgagagcctgggttaaagatccatataatccaaacattgtcaaaccctttcccgctgtggtagaaggagaaataaatctaacagtagagtagtagtcaacgaccccatagctaa

SEQ ID NO: 1042 - DNA, 1386 bp, unidentified
  misc_feature 1..1386: note = Ga0079367_1013592 JGI
  source 1..1386: mol_type = other DNA
atgcagcatattttcgtgctggacgccgagagaaagccgcttatgccctgccatccggcccgggcgcgagagctgatgagcaaaagcaaggccgcgcgattccgccagtacccgtttaccatcatcctgagtcagaggagcggaggcgcagtcgaagcactgcggctgaagattgacccgggcgcgaagacgacgggcctggcgctggtcgaggagagcaccgggcgcgtggtgtgggcggcggaactcgagcatcggagcttcgcgatcaaaaagaagatggaggaccgcagcgggcaccggcgcagccgccgcacgcggaagctgcgacatcggcccgcccgttttgagaatcgaacgcggccggaaggatggctggggccgtcgctgcgcagtcgctgcgaggggaccatcacctgggtgcgcagattgcaggagctggcgccgatcacgcacctgagcttcgagcaggtccgcttcgacatgcagaagatggaaaacccggagatctcgggcgtcgagtaccaacagggcacacttgcgggctacgagctgcgcgagtacctgctggagaaatggggccggaaatgcgcttactgcgggcgcgaggacgtcccgctgcagatagagcacatcgtgccgaaaagccgcggcggcagcaaccgggtgagcaaccttacgctgtcatgccccgcgcataatatggagaaaggcaacaggacggcggcggagttcgggcatccggaggtcgaggcaaacgcgaagaagccgctgcgcgcggcggggatgctgaacgcaacgcggtgggcgatctggcgtgggctcaaggaggtgggattgccgctggagagcgggagcggcggccgcacgaagtacaaccgcacgcggcagcgatacccgaaggctcactggattgatgcggcgtgcgtgggcgaatcgggcgagaagatcatcatcgacagcgatcaccggccactcatcatcagcgcgaaaggacatgggagcagacaaatgtgcgcgacggacgcatacggcttccccaagcagcataagagcaggcggaagctgcactatggctttcagacgggggacatcgtgcgcgcagtgctgccgaaggggaaatatgcaggcacccacgtcggcaggatcgtggtgcgcgcgacgggcagcttcgacctgaaagagatggggagcgggcagaagatgacggcgaactggaaatactgcgaagcggtgcaccgggcagatggatatgagtatggcgcagggcaatcccttgaggagcttgtggaggcggcggaagcgtgtcgcgctgcgcgcgacgggccggacggtagtccggcccctccggacggcaacggcgcgtccatacggcagcaatggtga

SEQ ID NO: 1043 - DNA, 265 bp, unidentified
  misc_feature 1..265: note = Ga0079367_1013592 JGI
  source 1..265: mol_type = other DNA
acatgaacgcctctcacctcgcgcgcgcgcgaagcgcggcacagtcgcgctcatgaggccagcctcagcagccaacgcggctgctaccttacgggcgaatgtataggcactccggggtgcgttgccagccccggacaatgcgggcagcggctaaacaggcacaagggtgtaggccagtgccgctgccgagaaaccgcccgataagattggcgaggcaaacgttacccccttcgggggagaaaggcgggtaaccgccatgcagcat

SEQ ID NO: 1044 - DNA, 1227 bp, unidentified
  misc_feature 1..1227: note = Ga0134857_007242 JGI
  source 1..1227: mol_type = other DNA
atgccctgttcgcaaaagaaagcaaggttattactaaaacaaaataaagctaaaataactaactataatccatttactattcaattattagtcccaactggtgaaacaatacaagaatgtaatttaggaatagatagtggtgctaaaaatgtgggttttgcaattacttcacaagataaagtattaataaaaggagaaatagaattaaggcaagacgtttccaaattattaactactaaaagaacatttagaaaaagcaggcgaaaccgcaaaacaagatataggaaagcaagatgggaaaacagaacacgaaaagaaggctggctacctccaagtattcaatcaagaattgataatcaaattaattggattaataaatttatgtcattattgcctaattgtaatttaattgttgaagttggtaaatttgatacggctaaattaataaatccagacatacaaggtgaagaatatcaacaaggaaatttatatgaatatgagaatataaaatcatatcttatagtaagagaaaataacaaatgtcagttttgtggtaaagagtatgatggtaatgggtggcatattcaccatataaaacaaagaaaagatggtggaacaaataaagtggataatttagcacttgtacacgaacaatgtcataaagattatcatttaggtttattaaaagttaaattaaaagaaccaaaggattataaagaaacagcatttatgaatatattaagacaacagatattcaaaagagttaattgtaaaataacttatggtagttacacaaaggttgatagaaatagtttaaatttagataaaacacattataatgatgctattgctataagtgggattaagaaagtcaaagaaaaccctgaacaattattaaaaataaaacaatttagaaaaaagaaaagaagtttgcatgaagctataccaagaaaaggcagaaaagaaaaaaatataactcaaaagagaaatagtaaaaatactaaatgttcaaatgggttttatcttaatgacaaagtaaaagtattagataaggtaggttggataagtggattttgtaatggaggttgttatataaaagatattgaagataattatataactttagaaggtaaaacttataaacaagtaggatttaagaatttagaattaatatgccataataataactggcaatatgggatgttgtgtgtttcatctcatgaatga

SEQ ID NO: 1045 - DNA, 258 bp, unidentified
  misc_feature 1..258: note = Ga0134857_007242 JGI
  source 1..258: mol_type = other DNA
gtcaactacccacgactgaagtcgtaggcttgtagaagtaattctattaggtctaaagttgactactctaagtcttaattgactacgttagatataatatcacaccataagatgatacccaagtcttatgcaactgtgtaggctctgtaaacagttctgttgggtaggaacagtcaacctaatttggagattttacctcaaactatatctaacattgaggatgggtaaataactctgaaaggagaacgaaacttgaga

SEQ ID NO: 1046 - DNA, 1038 bp, unidentified
  misc_feature 1..1038: note = Ga0224514_10000173 JGI
  source 1..1038: mol_type = other DNA
gtgaaatttatacctgtaataggtaaggataaaaaacctttaatgcctaccattccatcacgagcaagaagatggattaaagaaggtaaagcaactcctttttggaagaaaggaattttctgtgtaagattaaataaagaactgtcaaacgaaaaattacagaaagttgtcgttggtattgatccaggcagtaggagagaagcatttacaattaaatccaaaagtcatacatatgcaaatattttatccgatgccgtttattgggtgaaacacaatttggacaccagacgaatgatgagacgtactagacgcagacggaaaacaccatgtaggaaaccaagatttaataacaaacctaaaaaagtatttctatcaccatccacaaaagctagatgggatataaaattgagagtttgtaagtggataattggaatatatccaataacagattttatagtagaagatatcaaggcgaaaaccaaaggaaagaaaaagtgggattgtatattttctcctttacaggttggaaaaacttggttttacaaggaacttgaacgcttaggaaatctttcattgaaacgaggttatgaaaccaaggctctaagggacaaattggatttagagaaatcttcagataaaaaggcagaaatatttgaatcccataacatagactcttgggttttagcaaatgagatcgaacagggacatgaagcaccagataataaagaattattgagattggtgcctttgaggaattataggcgacaattacatatgtttcagccatctaaaagaaatatgaggagacgggtaggtggaacaattagtcttggattaaaacgtggatctataggaaaacatatgaattatggattggtctttataggagggtattgtaggaatagaattagtctacatgaaccaagagcacataaaagaatttctcaaagtgccaaattggaggacattcatattttaacaaataatagttggagaattatagatttgggagagaaagatggatattataggttgtga

SEQ ID NO: 1047 - DNA, 241 bp, unidentified
  misc_feature 1..241: note = Ga0224514_10000173 JGI
  source 1..241: mol_type = other DNA
gtcaactatccaaaaattggatctgagaatcgagaccgacgagtgtggatcagattaaacaggagactagagtgaccaagttcagaaatggacgtttgaaggaaactgaactatctgtccgtggtagggtgaaagacgttatgagtgcttccctagcttatatcctctctgatggtcagtctcgaagggaaaatacatactctgtgaaaggagacttatagtgaaatttatacctgtaata

SEQ ID NO: 1048 - DNA, 1104 bp, unidentified
  misc_feature 1..1104: note = GENOME_ACESSION: mgm4547164.3 MG-RAST
  misc_feature 415..552: note = MISC_FEATURE - Any "N" represents any nucleotide
  source 1..1104: mol_type = other DNA
atgctggtatatgtattaaactcaaacggacagccccttatgccgacaacgcgctgcggcaaggttcgtaggctattaaatacgaagcaggcaaaggttgtcaagcgctgtccgttcaccatacagtttttgtatgatacaacgaattgtgtacagccgatcgaccttggaatcgacgcaggatccgaacatatcggaacatccgcatgtacggagagaaaggaactgtacgcatccgagattcagctgcgtaccgacatcacaaagatcctttcggaccgcagacagtaccgccgatccagaagaaacaggaagacccgatacaggaagccgagatttctgaaccgcgtacacgcaaagaacaaaggatggctcgcgccttcggtcgaagcaaagatatccgctcacctgaagnnnnnnnnnnnnnnnnnnnnnnnnnnnnnnnnnnnnnnnnnnnnnnnnnnnnnnnnnnnnnnnnnnnnnnnnnnnnnnnnnnnnnnnnnnnnnnnnnnnnnnnnnnnnnnnnnnnnnnnnnnnnnnnnnnnnnnnnnncctcatccggaaggaacggactaccagcaaggagaccagctcggcttctggaatgtcagagagtatgttcttttcagggacggtcatacctgtcaatgctgcaagggcagatctaaagacaggatcctgaatgtacaccacattgagtcgagaaagacaggcggcgattcgccggacaacctgatgactctttgtgagtactgtcataagcagtatcatttgggaaagatcaagcttccggacagtattaaacgaggccagagtcttcgggatgcggcattcatggggatcatgcgctggacgttctacaacaggctgaaggaactgtaccccgggatagtatccatgacatacggatacatcacgaagaatacaaggattcgtcacggactggagaaatcccatgcggttgatgcgagatgtatttcagggcatcctgatgcaaatccgttggggtttatctactttcaaaagaaggtacgctgtcataacaggcagttacggaaagccaacaccttaaagggcggcattgttaaatctaaccaggcggaa

SEQ ID NO: 1049 - DNA, 313 bp, unidentified
  misc_feature 1..313: note = GENOME_ACESSION: mgm4547164.3 MG-RAST
  source 1..313: mol_type = other DNA
gtcaactacccaccacttaaaccctaatgggttttgaagtgggggcttgtgacgaagttcatcttcgttataagtccggctgactaccctcagtctctccgagagactacgttactttggtcatcacacctgcggacgttcgtcctaatctgcagctctgtggttcgtcattaaacagtcctgacgggaagggacagtgtggcggacgcaaaaagcctttgtaacattggggaaggacaccttacggttagtacgcaccggcttacagcattaagcgtaccgataatctacgaaaggagtcgcggttatgctg

SEQ ID NO: 1050 - DNA, 1251 bp, unidentified
  misc_feature 1..1251: note = Ga0209992_10008281 JGI
  source 1..1251: mol_type = other DNA
atgcttaactcaaaaaaagcggcagtctatcgacgggcaccttttacgattattttgaaagatcgatctgagggtgacgttcaacctgtccgtgtcaaaattgatcccggttcaaaaacaacgggtattgccgtggtgggagaatttcccaagcaaggtaatgttgttttgtggggggcaaaccttgagcatcaagggcaagcagtcaaaatgaggttaaccaacagaagtatgctcagaaggggtagacgtggacgtaaaacccgataccgtccggctcgatgggaaaacagagcaagacaaccggtcacttatgacaaatggctacccccatctttacgttctcgattagataacacccgttcgatcattagtaagttaatggataggtcaccagtaacggatttctctgttgagattgtacggtttgatatgcaaaaaatacaaaaccctgaaatctctggtgtggagtatcaacagggtgaattgatggggtatgaagttaaagaatacctgttagagaaatggggacgtaaatgtgcttattgcgataaagaaaacgttcccttacagactgagcatattgttcccagagcaagtggcggtacgaataatgtctctaatttaacgattgcttgtgaaccttgtaatcaacgaaaagataatcagaatgtcgaggtatttcttgcccgaaaacctgagaaattagcacgactaagaagacaaatgatatcgactgtaaacttgagagatgcggcggcagttaatgcgtctagatggtcattagcgaactatctacaagatacttatggactacctgttgaacatggatcaggtggacgtacaaaattcaatcgtgctaatcaatcgattgataaagaccattggaaagatgcggcttgtgttggtgaatcaggatcatccatttttattcctgagtctcttaatccattaaccattaagacacggggacgtggaaatagacaaatgcaacgtgtggatcgttatggctttccaagaagtagagcacggtcaataaaacgtctacatggacttcaaactggtgatattgttcgattagatcaacctagtggcaaatatcagggtacttatgtcggtcgattatctgccattcaatcccaaaatggaggacgggggacaataaaagtaaatggtaatagtattattactaattggtctaacttcacacgacttcaatgcatcgacggatatgaatattcttatggttaa

SEQ ID NO: 1051 - DNA, 357 bp, unidentified
  misc_feature 1..357: note = Ga0209992_10008281 JGI
  source 1..357: mol_type = other DNA
gacaacgttgtgactaccctctgtttttaggggacgaacaacgcgatttcttgggaagtgacctcaacgagggttgtgactaccctctgtttttaggggacgaacaactggtgtttactaagtgtttgtttttgaaaacagatgtcgcaaccagaccactcagaaatgagtagacgatagggatgaaataggtacgttagggtgcttctccagccttaaccactacgggtattagttaaacagtacgatgggtaatacgacagtgctgataccgttaaaccattctatatctggtcgaggagacctttacaggatgaatctttcgagattttgactgtgacgtaagtcaaaaaacaa

SEQ ID NO: 1052 - DNA, 1602 bp, Brachybacterium phenoliresistens
  source 1..1602: mol_type = other DNA
gtgcttcctcagcggcctgctctggaatcgacgtcagcagacaaccccggggcagggacgaaacggggcgtcgagcctgggaccatccaggacacgggtgtgcaccgtgggcgaggggagaccgcggctccgtccgcggcgtcaccggggaagggctcgttcccgcccccggacggcgggagtgatcccgtcacccacgagcaaccggcatccgagggtgggacctcggatgcgcctcgccgcgccgaggcacgggtgctcgtcctggatcggcgcgggaagccgctcatgcccacgactccgcgtcgtgcgcgtcagctgcttcgttccggccgcgcccgagtgcatcgggtgcagcccttcgtcctccggatcgtcgaccgcagggtcgaggactcggagacagagcccctcgtcctgggcatcgacccgggattccgacataccggcgtcgccctggcgcgcgagcaggaggtccccgacccccgcagcggccgggcgacgacgatccgacacggcctcttcctcctgcgggtggaccatcgcggcgccgtgatccgcgaccgcctctcggcacgctccgccctgcgccgcggccggcgctcgcgcaagctccgctaccgggcgccgcgcttcgacaaccgcgcccgtgccgcgggctggctcgccccgtcgatccgccatcgggcggagaccaccgtgacctgggcgcgccgcctggccgcctgggcccccgtgacgcggatcgacctcgaggtcccgcgcttcgacgcccgtgccctgcaccgggccgacgccgccgtgggcgaccgcggccagggcaccctgcacggcaccgaggtgcgcgaatacgtcctggagcgcgacggccggacctgcgtgtactgcggtgcgagcggcctgggcgccgcctccgtcccgctcacgctggaccatgtgcgtgcccgggcgcacggcgggccggacgcgccggcgaacctcgtcgccgcctgcgtcccctgcaaccgcgacaagggcgaccgcgaggtggaggagtacctcgcccgccggcccgccgtgctcgcccgggtgcgccgcagcctcgcctccgtggtgcagcaggacctctcggtgtccgtctcccgcagcgccctctgccgcgcgctgcagtccgtcggccccgaggtgcgcacccactcgggagggcgcaccaagtggaaccgctcccgggccggcctgccctgggaccacgtgaccgatgcgctgtgcgtgggccgcgtcgacgcgatcgcgtccctgccggcgctgcagcatgtcgccgtctccatggggcgcggctcctattcccgcacccgcatggaccggtacggcttcccccggctccgcctgacccggcgcaagatgcaccacgggctgatcaccggcgacctggtgcgcgccgtggtccccagcggcaggagagcggggacccacgtgggccgcgtcgccgttcgggcgagcggctcctgcaacatcaccaccgcccgcagcaccgtccagcacatcgggcaccgccacatcaccgtcctccagcgcggggacgggtaccggcatctccgcgcgccggtggcgctggccgcctga

SEQ ID NO: 1053 - DNA, 309 bp, Brachybacterium phenoliresistens
  source 1..309: mol_type = other DNA
gtcaggcgccccaccacagacatcgacgggccccagggcacatcggtggatgtcgagtctgaccagctcgagacaccgctcagagggaggtgactacgttgcacacacgcgagaagacccaccaggccgtgcttcctcagcggcctgctctggaatcgacgtcagcagacaaccccggggcagggacgaaacggggcgtcgagcctgggaccatccaggacacgggtgtgcaccgtgggcgaggggagaccgcggctccgtccgcggcgtcaccggggaagggctcgttcccgcccccggacggcggga

SEQ ID NO: 1054 - DNA, 1305 bp, unidentified
  misc_feature 1..1305: note = Ga0116183_1003561 JGI
  source 1..1305: mol_type = other DNA
atgcagcatgtgttggtagtggatacagatagaaggccatgcaacccagtagcacccgggagagcaaggatacttctatccagaggcaaggctgcggttcttaggcgctatcctttcacgattgtgttgaaggggagatcggcaggtgaaacccagcctcttcgtcttaaaatcgatcccggttctaagcagacagggttcgcgctggtgaatgaaatcacaaggaaggttgtgtttgctatggtgcttacgcaccgcggccagcagatcaggaatggtttgctgtctcgaaaaggaatcaggagaaacagaaggaatcgcaaaaccagatacagaaagccccgtttcctgaataggatgaggaagaaaggttggcttccgccgtctctgcagcatcgggtcgataccgtgacaacttgggtgagcaggctgcagaggtttgcgccggtctcagccttatccacacaacttgtgaagttcgacttgcagaagatggagaatcccgaaatatccggtgtcgagtatcagcagggaacgttgcagggctacgaggttagggaatatctactggaaaagtggggacgtaaatgcgcctactgtggagcagagaacgtacccctgcaagtagagcacatccacccgaaggcaaagggtgggagcaacagggtatccaacctgacgctgtcctgcgaggtgtgtaatacagaaaaaggaacgcagcctattgaaatattcctgaagggcaggcctctgaccttaaagcgtatcctagctcaggccaaggcaccgttaaaagacgcggcggcggttaatgcaaccaggtgggctctgtacgaaaggctgaaagatacagaacttccagttgaagcaggaagcggcggccttaccaagttcaacaggacaaggcaaggctacgggaaaggccactggatcgatgctgcgtgtgtcggggtgtcaggagaatcggttgccatcccggtagggatgcaacccttaacagttaaggcaacaggccacggcagccgcctgatgaccagggtggacaagtacggtttccccaggcaggtatcaaagaaaggtggtgccgtcttcgggttccaaaccggagatatcgttaaagcggctgtgccatcagggaaatacgagggcactcataccggcagggtagccgtaagggcaagaggctctttcgtgattgcaacctccgccgggaaaattgaaaccggctacaaaaactgtagcctactacaccgaaaggacgggtacaactacggggcgcattccccgtccaaccaagtcctgtga

SEQ ID NO: 1055 - DNA, 279 bp, unidentified
  misc_feature 1..279: note = Ga0116183_1003561 JGI
  source 1..279: mol_type = other DNA
gtcaattaccccacccaagcctaacggctatggatgaggcttgcgggaaaccgtaggcctggttgaccagcctaagttcttcgaaaactacgttattgcggttatgacaccctgggatgcgtgccagttccaggctctgtcggcatgagttaaacagttctttagggtacggaacagtgcttatgccatgacaagccacaataaccttggcgaggcaaacattacccccgaaaggggaggctcgtaagagcagaaaggtttcatgtcttaatgcagcat

SEQ ID NO: 1056 - DNA, 684 bp, Moorena sp.
  source 1..684: mol_type = other DNA
atggtatatgttatttcgaaggatagtaaaccattaatgccaacaaaaagacatggcaaagtaagaagactactaaaacaaggtcttgcaaaagttgttagaagagaaccatttacaattcagttgctgtatgacacaacgacctatacgcaacctattacagttggggtagacattggctcaaaagtaatcggtgtttcagccataacagacaaacaagaattatttagtgcagaagtagaactgcgacaagatataaagaaactgcttttagagagaagagagtatagaagaaacagaagatatggaaaaacaagatatagaaaaccaaaagatgcaaatcatgtttcgacaataggatggcacatagtaaacaggttgaaacaacaatacgatgttgaaataacttttggcagtatcacaaaagcaaaaagaacagaaatggggttagagaaaacacatagaaacgatgcatttgtaatagcaggtggtagcaaagatgttaacagagctactgaatggtactttgggaaatatttcagaagacaaaacacgtcattacacaaagctaatctaatcaagggtggaattaggcaatcgaatactgtaaaggaagttaaagggtttaaaagattcgacagagtaagatataacgatcaaataggcatgcgctggatactttga

SEQ ID NO: 1057 - DNA, 233 bp, Moorena sp.
  source 1..233: mol_type = other DNA
gtcaactacccgccgcctatagaggcgggggcttgaaaaagccctgattgactaccctcagccacataagtggctacgttagacaggtacaccctatgatgctgctcaagttccaggctctgtcgtacaggtctaaacagtcctgagaggtagggacagtgatctgcacataacaagcctgtctaacattgaggatgagcacctaactccgaaaaggaggcttaccgcatatg

SEQ ID NO: 1058 - DNA, 1386 bp, unidentified
  misc_feature 1..1386: note = GENOME_ACESSION: mgm4547164.3 MG-RAST
  source 1..1386: mol_type = other DNA
atgcttacctacgtactatcggcagacggctcacccctgatgccgacatacaacatccgtaaggtgagacacatgcttaaagacggccgtgccgtcattgtcggtcataagccgggattcacgatccggctgacctatccgcttccacagcaggaaggaccgtgcgtacagccggtagagatctgcgaggacgcgggatatcagcacatcggagtctcggttaagtccgagaagcacgagttcgcccatgagcagtacgatctgctcttggacgaaaagcagcgtcatgacgatcagcggagataccgccggatgagaagaaaccggctccgctatcgcaagccccggttcgataatcggcagaaggacgatcaatggctcgcgccgtcgctggagaacaagaaacagcgccatgccgatatcgtccggatgtatgcgaaagtcctgcctcttacgagcgctacggtcgaaatcgcgacattcgacacgcaggcactggaagccaaagcgtccggaaaggaagcaccggaaggaaaggattatcagcatgggccacgctatcagatcgcgacgaagaggaaagcggtctttcagcgggacggttatacctgccaggtatgcggaaggaactctttcaaagacggagcgatcctgagggtccaccacatcggatactgggaaaaagaccattccgaccgtatgagcaatatgatcaccgtatgcacccattgccatacgccggccaaccacaagctgggagggaagctctacggctgggaaccgaagatcagaccgatgggcggagcggcctttatgaatgccgtccgctggcagatcgtcgaaaagattcgcacggactttccggacctggacgtccatacgacctatggggcgtggacggaacttgccagacgacagcggtgcaccggaaagacacacgccaacgacgcctattgtatggggttcttccgtccgaaacatcgggcgaaggaagttctgtataagaaactgcgccgtgcgacacgcgtccttgagaaattctacgatgccaagtacatcgatcttcgagacggcgcgaaaaaaagcggccaggagctctcctgcgggaggacgaaccggccggaaagccgtcattcgaagaaagatcagcggatgcaccggggtcagaaagtgtccaaaggccgacgttcgatccgccggcagcattacgccatccagccgggatgcgtcgtccggtaccggaaacagaagtgcgtgacaaccggaatacacaactatgggacgaggctcctgatcggcggaagttctgtcgccgttaagaatatacagctcctgcgatatgcgggggcatggaccttaagcaaaagaaaggaggtccgcgcataa

SEQ ID NO: 1059 - DNA, 386 bp, unidentified
  misc_feature 1..386: note = GENOME_ACESSION: mgm4547164.3 MG-RAST
  source 1..386: mol_type = other DNA
gtcaataacccacgactgaagtcgcgggcttgctaagagcaagctccggcagcagtcgagcccttcggggcattattgattagccccagtaccggcagcaatgccggcactacgttacccgcgaatatacaggcaccggcggatgcttcacaagtccaccgctctgcggtccgccattaaacatccctgatgggaaggggaagtgtggcgggcaaaaaaccgcgggataacatcggcgatgtgaacacaccgaaagcggtatcttcggatgccgtaagtaagcaggatccatatcaggaccggcctccacgagcggataccggtatgggagccgtaaggcaaaacatttcgttaaccatttcaggaaggaagcatcaggtatgctt

SEQ ID NO: 1060 - DNA, 1374 bp, unidentified
  misc_feature 1..1374: note = Ga0247841_10015468 JGI
  source 1..1374: mol_type = other DNA
atgcagcagttacaagcaaagttaaagaacacacctacggatgcttcccaagtctgtagctctgtaagttccgcattaaacaaggaagaaattcctagtgtacgggacacagtactgacttgtaataacctcgaagggaatctacttcaacatacaggagggcagaaccacaaagtctctgctgttgtgtatgtgttgggcataaatggctctccaattatgccaactagtcctatgagagccagaaaactgttgaagtctggtaaagcaatggtagtaaagcaattcccatttaccatacaatcaatagttcctataggcaataataagcaagaaatagtattggggattgatagtggttataagaatattggttattcttgtaaaacttctaaaaaagaattgtttagtggcatagttgttctggaaaacaaaacgaaggaaaggttatctgaaagaagaatgtatcgcagttataaaaggggcaaattgtggtatagaaagccaagatttaacaatagaaagaaaagtagtacttggcttcctccctccattgaacgcaactatgatgttcatctgttaatgtttgacaagattaagaagtttttaccaatagccaaaactattgttgaaaacggcaattttgacatacaaaagattattaatccagaaattaaaggcaaggaatatcaacaaggcaatatgtatggttttgaaaatttaaaagcgtttgtaatctctagagagaaaggcgagtgtcaattctgtggtaaagaaaaaggcaatgatgtttggcgtttccaccatattaatggccgaatgactagttctaattctgcttacaatttggctttgttacattctaagtgccacgacaagatacataaaaagaatttagagaagtcaatcaatagtaacagggaatataaagaaattacttttatgaatataattaaggatagattccagaaagatttagattgtcaaactacttacggatatattacttacgcaaaaagaatggaattgaaacttcccaaaactcacattaacgatgcttttgtaattgctggtggaactaaccaaattaggtgcttgcccatgacggtaattcagaaaagaaaaaacaacagaactctacaatgcaatcgcaatggttttgccccttccattagaaaacaaagatatatctatcagcccaaagatttagtaacgataaataataaaaaatatagcattgttggcactagaaattatggcgaatatgtttatgtaaagaataaaaatgctattaaaccattgaatttttctgtaaaaaagatacaaaaacattttatgaacaatagtttaatatttcaaggaagcaagagttaa

SEQ ID NO: 1061 - DNA, 289 bp, unidentified
  misc_feature 1..289: note = Ga0247841_10015468 JGI
  source 1..289: mol_type = other DNA
gtcaattgcttctgcctaaaagcaggagtttgcgcagtaatgcacaacgagtaaatatgtaaaagtatttgcaagagttgattagagggcaggagaaagcaagatgcagcagttacaagcaaagttaaagaacacacctacggatgcttcccaagtctgtagctctgtaagttccgcattaaacaaggaagaaattcctagtgtacgggacacagtactgacttgtaataacctcgaagggaatctacttcaacatacaggagggcagaaccacaaagtctctgctgtt

SEQ ID NO: 1062 - DNA, 807 bp, unidentified
  misc_feature 1..807: note = Ga0070741_10034480 JGI
  source 1..807: mol_type = other DNA
atgccttgcacccctccgaaggcaagggtcttgctcaaagagggaaaagcgaaaccacggagtcgatgggaggccaaagcaaggattgtggctcatctggggaagaccttgcccatcaccgatgtcgtggtggaagatgtagctgccgtgacaaggaaagggaaaggtggcaagtggaatggatcgtttagtcccgttcaagtcggcaaggaccatctctatgggatgctgcaagagatggggttggtgcttcacttgaggtcagggtggcaaacaaaggagttaagagacctgtatggtttgaagaaaacgaaaagcaaatcgaagcaatcttttgactctcatgccgtagacgcctgggtgctagcagcagccatcacgggtgccaaagagccaacctgtaggcagttgtggtatgtcgtcccagctatcctccacaggcgacaattgcaccgactgcaagccgcaaaaggcggagagcgcaagccctatggggggacgcgttcgcttgggtacaagcgtggaaccctggtcagacacaagaaatacggcctctgtaccgttggcggctttgaccgcaagcgtgcaacggtgagcctgcatgactatcaaacgaacaaaaggctgacgcagggagcaaaagtggaggggtgccaaaccttaacgtggatggcattccgttcctggttggtcagagagccacatcagaagacaggcaagggaaccgcccatcccaagccgctgcgatcaggaagacctgcttcatccccacatctctgcgaaaggggtctccgcaggtcgagttga

SEQ ID NO: 1063 - DNA, 247 bp, unidentified
  misc_feature 1..247: note = Ga0070741_10034480 JGI
  source 1..247: mol_type = other DNA
gtcaggaaccccacggcgaaagccgggggcttgcgaaagggctagcgcaacgtaagtttctgtctagtgggtcttcctctgaagacaggcagcattgtagagctacaagaacgtccagataccaccctagtctggaccgcttctcaccacgcccaagtggatgctacggatacaatcgtagctaagcccacagtgccaccacgaagggtcattgtaccctggctttgaccaggcgaaaggaaatcct

SEQ ID NO: 1064 - DNA, 1044 bp, unidentified
  misc_feature 1..1044: note = Ga0163155_10003458 JGI
  source 1..1044: mol_type = other DNA
atgtttgttccagtagtagattctttaaataaaccattgatgccaaccacgtgttcaagggcggctagatggattaaattcaaaaaagcaactggtttttggaaacgtggaatctattgtgtaagactaaatgttgaaccctcagatagaaagtttcaagaaattgcagtaggaatagacccaggttcaaagagagagggtttcactgtaaaatcagaatctcatacttttgctaatatacaaacccatgcaattggttgggtaaagagagcaatggaaacaagaaagatactgagaaggacaagacgttcaagaaatacgccctatagaaaatgtagatggaatagagcaataggtggtttagttccaagcacaaaatcaagatggcaattgaagttaagaatttgcaaatggttattgaaattattcccaattacacatttcaattgtgaagatattaaagcagtgagtaaagaaggacaaagaaagtggaatgtgtcttttagccctattgaagttggtaagcagtggttttattctgaacttagaaaactaggaactctaaaagagacacctggattttcaacttatattgatagaaatgccctaggtttaaataagacaagaaagaaactaagcagtggatttgatgctcattgtgtagacagttgggttcttgcaaatcaaatagtgggtggacatacaaaaccagataatacaaaagttctagaaataattccattgcaatttcataacagacaattgcatgttcagaatttttctaaaggtggagttagaaaaagttttggcggttctatgagtgaaggttttaaaagaggaagtttagtaaaacacatcaagcatggactatgtttgattggtggtgcatcaaagggcttcataagtctacacaataaaaacagtaacaaaagaatatgtcagaatgcaaagaaacaagatattaacttcttatcctataacacttggagggtgacaattcctcccacagataaatcagtgggtttccttgtcacgattgcatga

SEQ ID NO: 1065 - DNA, 190 bp, unidentified
  misc_feature 1..190: note = Ga0163155_10003458 JGI
  source 1..190: mol_type = other DNA
gtcaataacccacgaataaatatcgtgggcttgtgaaaggtagccaactatcaaacacaagattaaaaactattgactagacattaataattaggtttctgaacgtggtagttcaaaagatattgaggatgcttcactagtcttctttccctctgaaatccaatgtcgaagtgatgtagaaaaagagtta

SEQ ID NO: 1066 - DNA, 1287 bp, unidentified
  misc_feature 1..1287: note = Ga0315289_10016130 JGI
  source 1..1287: mol_type = other DNA
atggtagtttttgtaattaacaagcatggggaggcattgatgccttgcagtacaagaaaagcaagattgcttcttaaagaagaaaaagcaaaaattgtaaattataaaccatttacaattcagttgctttatggttcttctgggtataagcaagaaaccaaattaggtatagatataggggcaaaacatgttggagttgctataacttctggaaacactgtgttagtaaaagggcagattgatcttagacaagatgtttcaaaattattagaaacaagaaaaatattaagaaaatcaagaagaaatagaacaactcgttatagacaagcaagatttcttaatagggttgcttctaaaaaagagaactggttacctccctcaattcaaagtagaataaataatacagtgatgtggataaataaattttataatttattacctaagtgcaaattaagtattgaagtagctaaatttgatattcaaaaaattgagaatccggaaatttctggaaaagaatatcaacagggaactttatatgaatatagaaatagaattgcttatttaatagctagagaaaaaggaaaatgtcaattttgtaataaagaatatcaaaaaaataatggctggagattacatcatattttcggtaagaaaaaagatagaccggcagattgggcattattgcatttgcaatgtcataatgaattacatgctaaaaaactagaacatattttgcaaaaacaaaaatctaaatcttataaagaagctacttttatgaatattataagaaaagggttgtttagtatttttcctgaagcaaatttcacgtatggaaatataacttttcaagatagatgtcaattagatttaggaaagtcacatgttaatgatgccgtagcaattacaggaataaaaaatataaataaaaattctgattctatattttttataaatcaatttagaaaaaagaaaaggagtttacatgaagcaacagcaagaaaaagaaaaaatggtaatatattatcaataagaaattcaaaaaatactaaatctttaaatgggtttaatttaaatgatcaagtaaaagtttttaataaaattggatttatttctggattcacatctggtgcttgctatataaaagatatttttggaaaatatataatattaccagaaaaatcgtataaacaagtatcatttttaaatataagaaaaataagttataataataactggcaattcatcccccacctgaaggaaggggatttcttgccagaaataggttaa

SEQ ID NO: 1067 - DNA, 242 bp, unidentified
  misc_feature 1..242: note = Ga0315289_10016130 JGI
  source 1..242: mol_type = other DNA
gtcaattacccctccctaaagggaggggcttgaacggtaacgtttgagagtaattagttgactacactaaggtctttgagacctacgttatttagatgatgatacctacagatgatacccaagtctgtggctctatcgaggcgctgtaaacaaagaggaaactcttagtcaacctcatttagtaaagtctttataactttgtggatgggtaacaaatccgaaaggaggaaaacttaatggta

SEQ ID NO: 1068 - DNA, 1029 bp, unidentified
  misc_feature 1..1029: note = Human oral metagenome
  source 1..1029: mol_type = other DNA
atgtatgtcgtctatgtattaaatcgtcaaggcaagccgctcatgccaaccaaacgatttggacatgtgcggcgtatgctaaaaactggcaaagcaaaagccatttcgacaaagcctttcgtcattcagttgcagtacgagtccacggattttgttcagcctctttatggaggaacagatcctggacgcaccaatattggcgaggctgtgttaaacaacaaaggcgaggtcgtgtacgcggctcatgtcataacacgcaataaggaaataccaaaactaatggcggatcgtgccacacatcgtagggcttctcgccgtggggaacgtctacgccgtaaacgtcgcgcaaaagccaatggtacaatgacatgcttcccagaaggacggaagctatcaggatataaagatggggttcttgaattaaaaggcatcatcaacacggagagtcgcttcaacaatcgaaaacgccctgccggatggctgacacctaccgcaaggcaatgtattcagacgcacttaaacatggtgcagaacatctgcaagattcttcctgtcacagattggacactagagtacaaccgcttcgcgttcatgcaactagaggatggttctgttcgtggatggggtttccagaacggcaggctcaaaggctacgccaataaagaagactatatctatgccttgcaaggcggcgtttgcatttgttgcggtgctcctattgaacattatcaccatatcaaaccacggcacaaaggaggttctaatactcctgaaaatcttgttggactttgctccgtttgccatgcagagatacatacaggcaaacggaatttagacaaaattggcaaatacaaaaagtatgccggaacttctatcgttaatatcgctattccattcatttgggatggcatagtgaagatgttcgggaacaaggctcatatttgtgaagggcaagagactgccgaacttcggagggcgaacaatatttcaaaggaacactttacagatgcagtctgtattgcaggtatt

SEQ ID NO: 1069 - DNA, 230 bp, unidentified
  misc_feature 1..230: note = Human oral metagenome
  source 1..230: mol_type = other DNA
gtcaataacccaccgcccatcaccaaatggtgattaaggcgtgggcttgaaaaagcccagcgttattgagcagagacaaataatgacacgacaggattaagttccgaaccaccttgggtgatgccaagcctcttgctctgggcgtagtcgtgccgagtctatggcaacacaacttgatgactttatgtcattaagacttatctctaaaaggagatttttgtatgtatgtc

SEQ ID NO: 1070 - DNA, 1536 bp, unidentified
  misc_feature 1..1536: note = Ga0395764_001082 JGI
  source 1..1536: mol_type = other DNA
atgaaagtatttgttatcggtatgaacgacagaccgctcatgccaaccacaccaagaaaggcacggatattacttcgtgataagaaagccacagtagtaaaaaaagtgcctttcacaatcaaactgaattacaaaacgggttctgcaacacaaacgggttatatggggatagatacaggatctcaacatatcggtgtatccgttttacgtgaaaatgctgaaggtaattatactgttttatcgaaaacagagtattcgcttcgcacaaccatgaataaacggaaactgatagaatctcgtaaaacccttcgccgtggtcgaagatttcgcaaaacgccgtatcgacatcctaaatggcattttcatacgaaacgggtttatgttaaaaaagcgataaatcgtaaaaaacatacgacacactggaagaaaaaatctgtgaagtttacatcatccagacaggctggatggttaccgccatcaatccagcaaaaagtggatcacacaattactattattaagacctataaagaaattcttccagacagcattacagcaaatgttaccatagaagttggacggttcgatgtagctcgaatgaaaaatcctgaaatacatggggagatgtatcaacaaggatcgcaatatgaccatgagaatgttcgagcgtatgtattcgagagagatggatataaatgtcagtgttgcaaaaagaaagccgggacaaaaagaaaagatggttctgttgtaaagattattgcacatcatatcgattttgtgtcacaaggtgcaaccgatgatcctgacggaatgattacaatctgcaataaatgtcatacaacaaagaatcataagccgggcggcattctttataaatggatggtagcaggtaagaagatggctcgcagatatcgtgatgccacatttatgaatatactaagaaagcgtttgtttgatgctttcccggattgtcattttacttatggtaattttactaaggtgaatcgggaaaaactgaaactggataaaacacatgcaaacgatgcaaccgcaattgcattgtcatatgttttttatattcttaaagatgcgatatctgtatatgataatgaagaaactgtctatatacagcaggttcgtaaaaagaaacggtcgcttcacgaacagaccccacgtaaaggcaaaaaagacaaaccaaatacaaaacaggtgagaaataacaaaaatacaaagtctgtaactgttaaaatgaaaagaatggttgatggtaaaccagtaagggatgaaaacaaacatatcgtatatgatcataaaacaataagtatttttgataaggtatcatacaataatagagaagggtgggtcacatcattttccgaatcttcatgtcgcatacaggatgtgaatggtgaatacataaaaaaatatgaaaactctgaattgattcctgtgactgaagtgacatttttgcatcataatagtaattggttaataggtcccaaaatggagttgccacgattaaaaacgaataaagtctaa

SEQ ID NO: 1071 - DNA, 303 bp, unidentified
  misc_feature 1..303: note = Ga0395764_001082 JGI
  source 1..303: mol_type = other DNA
tcggcaattgaattaccgagcatgtgttcgcatatgcaaagtggttctattgttttccttcgggaacaagttgactagccttagtgaagcttactcttcggagtatgtcggaactagattctgattatcaatactctaacttgtagtacccaagcaagggtgggttcaggcaacggatgtttactgggagtaggtaaacaccgacctgatgcaagaagtagtcaggattttggcgatgggtgattacacggcagtgaaggtggctgtatagtccacctaatatgcaaaggagttactatgaaa

SEQ ID NO: 1072 - DNA, 1125 bp, unidentified
  misc_feature 1..1125: note = Ga0373632_0063621 JGI
  source 1..1125: mol_type = other DNA
atggcagtttttgttttagatcgtaatggcaaggcattaatgccgtgcaatgagaagcgcgctagcttattgctaacacgcaatcgtgcgcgcgtgcatcgcatcctgccattctcgattcgaatcattgaccgtcaggcgtcttcctgtgagtttcaagcattacgcattaagttagatccaggcagtaaaacgacaggcatggctttagtaagagaatcagataacggcagcattgctgtgctgaatctgttcgagttaattcatcgcggacgtcaaatcagtgaagcattaacagcaagaagcaatatgcgccgccgtcgccgtactgctaatctgcgctatcgcgcaccgcgttttctgaatcgcggaaataagcaatctggctggttagccccaagcctgcagcatagaatcaacaccagtatggcttgggtaaatagattccgtaaattagcgccgatcagcgctatctcgcaagagctggtgaagtttgatatgcagcagatggcgtcaccagaaatctctggcgttgaatatcagcaaggcactttgctaggttacgaggtacgcgagtatttgttagagaaattcaaccgcacctgcgtttactgcgacgctaaagatacacccatgcagattgagcacatccatcctaaagctaatggcggcactaaccgcatcagtaatttggcgttagcttgcggcccctgcaatcagcgcaaagccgcacaggatattaatgtgtttttggcaaaagatccggtgcgtctaaaacgcattttagcgcaagttacaaagcctttgaaagacgcggccgcggtgaatgctactcgatgggctttgttcagcgcattaaaagcgactggattaggtgtggaaatcacatccggcggtaagactaaatacaaccgcagtcgcctgaatattccaaagacgcatgccttggatgcggtctgtgtcggcgctgtagaatcgattgaagattggaataagccgacattgaatatcaaatccatgggccgcggttgctatcaacgcacgcgcctgacggcctttggctttcctcgcggttacttaacgcgcgttaaaaatattcaaggctttcaaacgggcgatatggtc

SEQ ID NO: 1073 - DNA, 342 bp, unidentified
  misc_feature 1..342: note = Ga0373632_0063621 JGI
  source 1..342: mol_type = other DNA
gtaaaccaccccgaccttaaggtcggagcttttagaggaaaggctaaaagttcaagtttaccagcctaagccgtgtcatttagcggctacgttgtacagatgtaaaagacctacgtcaggatgcttccttagtcctggcctctagaagtagcgacgcagacaagcgacagggtaagtacgaaacggtctgctacaagataagcaattatcgaagctgctgtacaacattggcgaagggagagtgattgaactgtcgtgagacaggttaatcaccgtcacaagacccgtaagggttgacgatctgcaaagacagataattattaaaataggagatttatggca

SEQ ID NO: 1074 - DNA, 1287 bp, unidentified
  misc_feature 1..1287: note = Ga0137373_10002777 JGI
  source 1..1287: mol_type = other DNA
atggtctttgtgatctcaagcgacggagcgccgctggacccctgccatgaggccagggccagggagttgctgaagaagggccgcgcggcggtttggcgcacctacccattcacgatccggctgaagaaccgcacggcggctgaaagcgtcacgcacgatcatcggctgaaaatcgatccgggtagcaagaccactggcctcgccgtcgtccaggagaggaccgggcgcgtagtgttcgccgctgaactcagccaccgaggccaggtcatccgcgacgcgctgctggcgcgccgggccctccggcgtagtcgccgcagccgccacacccggtatcggcctgcgcggttcgataatcgccgccgcccggcgggttggcttgcgccgagcctgctgcaccgagtcctgaccacggaaacctggctcaatcgtctgcgacggctctgtccaatcgcggccttgtcagtcgagttggcgcggtttgacactcaactgttggacaacccggagatcagtggagtggagtaccagcagggcactctgctcggttacgaaatccgggcctacttgctggaaaagtggggccgctgctgtgcctactgcggcgtgaccggcgtacccttgcaggtcgagcatatcgtcccgcgcatgcggggcggcagcagccgtgtctcgaacctcaccctggcctgcgcggactgcaaccaagcgaaagggaacaaaacagccgccgagtttggctatccccacatccaggcgcaggccaggcaaccgctcaaggacgccgccgcgatgaacagcgtgcgttgggcgctctatgggcggctgctggcgaccgggctgtcccgcgaagtcggcacgggtggacggacgcgtgccaaccgagcgcggctcaacctgcccaaggcgcattggagtgatgccgcagtggtgggcgtgagcacgccggacaatctgcgtgtggtggccaggtccgtcctgctcatcgccgccaaagggcacggctctcggcagatgtgcgggacgaacgccagcggcttcccgattcgccacaaactagggcagaaacggttcttcgggttccagacaggtgacttggtgcgggcggtcgtgcttactgggaggcgggcgggcactcacgtcgggcgtgtgttgtgtcgcgcctccggttggtttgaccttacaacgaagcaaggtcgccaagcgggcattagccatcggtattgccggatggtgcagcgggccgatggatatgcctatgcaaccagaaaaacgagcgcggcttcctga

SEQ ID NO: 1075 - DNA, 284 bp, unidentified
  misc_feature 1..284: note = Ga0137373_10002777 JGI
  source 1..284: mol_type = other DNA
ggtgccagggtagtttttctgcagtctctggatgtcgtgggcttgcggggcaaccgcaggcccgtcctgaccatgaccaagtggtagccaacccgctccgtgcgggaggccatgacactccgggctgcgtcgcgccaggcccggactctgtcgcccgtcatcatgagccgtggggtaagcggcgaaggtggtgggtaagacaagcctcctgcacatggtcgcggcgcacatcacccccgcgaggggagaggccccggtaacggggcataggaacgaagcaaatg

SEQ ID NO: 1076 - DNA, 1380 bp, unidentified
  misc_feature 1..1380: note = Ga0373625_0005570 JGI
  source 1..1380: mol_type = other DNA
atgaaagtatttgttttaagttcagataaaaaacctcttgatccctgcaatccagcaagagcaagaaaaatgcttaatcaaggtaaagcctctgtgtttaagcaatatccttttactatcattctaaaatcgtgttggtcattcatggtaaaaacaagtgaatatagattaaagattgaccccggtagcaaggttgctggattggcgatagtatcgtcaaaaggtgaagcggtatttgcgtgtgaggtaaagcacagagggtatactatcacagatttgctaaagtcaagacgtggtattaggcggtcaagacgtaatcgcaaaacacgttaccgaaaagctaggttcatgaataggcgcagacagggacaatttagtcccaatatcagtattgatgaagaaaaaaatataaaaggcaagggctggcttccaccaagtttatgcagtagaatgtataatgtggaaacatgggttagacgattaagaaaactctgtcctataaaaacaatatcttatgagctgacaaagtttgatacacagcggatgcagaatccagatatttcaggtgtggaatatcagcaaggtgaacttgcgggatacgatgtaagagagtatttgttagagaaatatgagaggaaatgcgtttattgtggcgcaaaagatgtgcctttggaagtagaacatgtcattccaaaagacaagggtggtagcgatagggtatcgaaccttgtaatctcatgtcgtaagtgtaacatgagaaaggcaaataaaagcattgaggagtttttgaagagcaaaccagaccaattagctaatataaaaatacagttaaaagagccattaaaagatactgcctctatgaacgctacaagatgggcattgtttaacaaattaaaagcattaggattgccgattgagataggaacaggagctactacgaaatataatcgttcaagacttgatttgccaaaggaacactggatagacgccgcttgcgttggattaagcacacccgataatcttgatattagtaatacaaagcctttatgtattaaagctgttggacatggctctcgtcaaatgtgccgtgtttatggtttaagttgtaaaggtcagaagtcggaatctggcaaagtaaagatgcccgggtacccaagatcgaaagctaaatcattaaaatgttatggcgggattcaaactggtgatatagctaaggctgttgtcccttcgggcaaggaaaagggaacacatgtaggcaaagtagccattcggagtactggagatttccatgttattaataagacaggtgatcatgaccatattcatcgtagattttgtgaattgatacaacatgctgatggatattcatataattattaa

SEQ ID NO: 1077 - DNA, 259 bp, unidentified
  misc_feature 1..259: note = Ga0373625_0005570 JGI
  source 1..259: mol_type = other DNA
gacgacaaaagcttgactcaaacatagccgagaaatcgggatagtaaccagactcagccctgaaccagattcagggctacgttattcatgtcatgataccctgagatgcgctgccagtctcaagctctatcgtatagcattaaacaggacgatggaactaagccagtgattatacatgacaagcatggataacattgtcgaggcaaacattaccccagaaatgggagacgccccttgcggggcattttgaaatatgaaa

SEQ ID NO: 1078 - DNA, 918 bp, unidentified
  misc_feature 1..918: note = GENOME_ACESSION: mgm4784118.3 MG-RAST
  source 1..918: mol_type = other DNA
atgtgcaaagttctattaattgacaccgaaaaaagaccgttaagcccaatttatccagcccaagcgaggcaattgttaagaaacaaaaaggcagcagtttttaggcgtttcccgttcactttgattctcaaagaatcacgtcctgattccccgatctcacctttaagattaaaaattgaccctggtgcaaaatttacgggaattgcactggtcaacgattcaacaggagaggtcgtatttgcagccgaattaaagcatagaggtttggcaattcgagattctttaacgtcaagaaggcaacttcgcagaagtagaagaaatcgtaaaacacgttatcgcccaccaagattcttaaacagaactagaccgttaggatggctagcgccaagtctacaaagtcggattgggaatattaaagcttgggtcgagaaactacgcaaattcgcaccaattgcagcaattagccaggaattagtacgcttcgatctgcaactaatgcgcaatccagatcttcaaggtaaggaataccaacaaggtacacttgcgggttatgaaactagagaatacttgctcgaaaaatggaatagacaatgcgcttattgtggcgtaaaggatgttccacttcagatagaacatatttacccccgagcaaaaggaggctctaactcaattacaaatctgactttaagttgcgaaaaatgtaacaaaaagaaaggaactaaggctcttaaagaattcctcaaaaaagaccagtcaaggttagaaaaaatcttgaaacaagcaaaaagaccattggcagatgcagcagcagttaatgcaactagatttgcacagatattgttcaattattcacaaaaaggatggttattcctatgcgtcatagctcctgccccccgtttcctctcaccgccaaactga

SEQ ID NO: 1079 - DNA, 260 bp, unidentified
  misc_feature 1..260: note = GENOME_ACESSION: mgm4784118.3 MG-RAST
  source 1..260: mol_type = other DNA
gtaaacaacccaccaccaattgctaagagcaatatggtgggggcttttaaagaagctctagtttaccagtctaagtgttaaatcactacgtttaaggcaagtgttaaagacctaccaggggatgcgaagctagtcccttgctctagaacccaacgattaaacaggcttaaagggttaaaccagtgtcgtgcgtggatagttaccgaccttaaacattgacgaagctaacattacccgaaaggaggcactttatgtgcaaa

SEQ ID NO: 1080 - DNA, 1098 bp, Moorena sp.
  source 1..1098: mol_type = other DNA
atgccaagagtacctgtaatttcaaaagacaacatccctctaatgccgaccaaaccaagtcgcgctagaaaatggattaaagaaggaaaagccctagggcaattcaacgacctcggtattttctatatccagttaaccgaatccccatctagcaatcaaactcaacctatttctgtaggaattgaccccggtaaattgttttcaggaataggtgttcaatcccccctctataccctttggacagctcatctagagttacccttcaaacgagttagaaaaaggatggagaagcgtcgtataatgcgacgagcaagacggggaagacggattaaccgtaagcaaacctttgaactgagagcgcatcgccaaaagcggttctctaatcgaaaacaatcgaagttaccgccaagtattaaagcaaaccgtcaactagaaattagagtagtttctgaactatctaaaatctatccaattactggtatatactttgaatacgtgaaagccgacgtagatttaacgtctggtagaaaaggagctaaatcagggaaagggttttcagctgtaatggtaggacaaaactgggcgatcgaacaattgtctaaaactgctcctgttcatacacgctttggttgggagacatctaatcttagaaaacatttagggttagaaaagtcaacaaataaagccaagcaaagtccagagagtcatgcgaacgatggtatcgctttagcttgtttccattttttacagtacttaccttttcatactactacctcccatggacatctatggaaaggaaaagttaacttaacaacagcaatctttgctgtaattaaaagacctccagtcagtcgtcgtcaacttcatctaatggttccagtcaaagggggagtaaggcgaaaatatggaggaacaactacaaaattcggtttaagaaaaggtgacttagtctttaccccaaaagggattggctttgtcagtggacagaccgaaaaacaaatatctgtcagcgatgctaactggaaaaggttagggcagataagctctcttaaagtaaaattaatccgacgttctacgggtttaattgttagttgctag

SEQ ID NO: 1081 - DNA, 228 bp, Moorena sp.
  source 1..228: mol_type = other DNA
ttcaccaaccctgacctaaaggtacagggattgaccaaaccaatgtggttgacttaagcggtgaatagcccacagagcctaactatctcacagacctccgaatacttctctagttcggattcaatctaaacccgattggtacgggtgctcttaaagacaggacatggttagttaggtgggcgaagggacacaaactctctctcttgaggattatctcccatgccaaga

SEQ ID NO: 1082 - DNA, 732 bp, unidentified
  misc_feature 1..732: note = Human gut metagenome
  source 1..732: mol_type = other DNA
atggtgtatgtactgaacaggatcggccagcccctgatgccctgtaaggaggcaaaggccagaaagttattaaaaaatcataaagcaagagtagataaaagagagccgtttacgattcaattactgtttgactgcgaaaaccggatacaggatattacgcttggcatcgatgccggaagtaaacatctgggactgtcggcaacaacagaacaaaaggaattgtatgccgcagatgtggagctgcgaagtgatattgtggaactgttatcaacccgcaggcaatacaggagaacacgcagaggcagattaagatatcgtgctccgagattttgtaaccgggttcgttctagaaacaaaggctggcttgctccgtccgtcgaacagaaaattaagactcatttacgggtggtcaacgatgtatgcaggattcttccggtttcgaaaatcattgtggaaacagctgctttcgatgtacagaaaatagagaatccggatataagcggagaaggataccagcagggaagccaattggatttttggaatgtcagggagtatgtattatggagagataaccatgaatgccaatgctgccatgggaaatcaatggataaaatattaaatgtacatcatatagagagccggaaaaccggcggtgattcaccgaagaatctgattactttgtgtaaaaattgccatgatcaatatcatatgggaaaaataatccgaacttga

SEQ ID NO: 1083 - DNA, 245 bp, unidentified
  misc_feature 1..245: note = Human gut metagenome
  source 1..245: mol_type = other DNA
ggcgtgtcaataacccaccacgaaagcagtgagcttatataagcttttattgactagacccggtgtataaagcactccgttatgtaagaatatatagttaccagtggacgtacagcctaatccactgctctaagaatggtgattaaacagttctgacgggaaggaacagtgttgctgttagaaaaccttatataacatcgtctaaggctgcatgacttcggcatacaggaggatttaaaatcatg

SEQ ID NO: 1084 - DNA, 900 bp, unidentified
  misc_feature 1..900: note = Ga0307928_10009122 JGI
  source 1..900: mol_type = other DNA
atggtaaaacaacaacagaagttattcaagagagatacatgcatacctagagatacttctctagtctctggctctatgattagtaatgtaaacaaagaggaaactcttagtcatactaattcaaaaaccttagataacaatctcgaagagaaccaacaccaacaaacaggtgggtttaagaccaaagtgtttgtaatagcaaagagtggaaaagttttgatgccaactactccaagaaaagcaaggcatcttttgaaacaacagaaagcaaaagtagtaacgacaaaaccatttgcaatcaaacttaattgggattgtgaagaaatagtgcaagaagtcaatttaggaattgatactggagtaaaaacaattggttattcagtaacatcaaaaactaaagaattgatttctggagaatttgtgttaagaacaaatattagtaaaaaaattagcgatagagcaatgtatcgaagaaataaaagaaataaactttggtacagagaagcaagattcttgaatagaactaaatcaaaacccaaaggttggttagcaccatcagttcagcataaaattgattcgcatatcagattgattaataaaataaaatctttgattccaataactaaagtaattattgaatcaagtcaatttgatgctcaaaagttacagaatccagatattgaaggaagtgaatatcaaaatggtcaaatgaaagatttcgagaatgtaaagatgtttgttagacaaagagataaatacacttgtcaaatctgtaagaaaaaagatgataaaatgttagatgttcaccacataattcagaggaaagatggtggaagcgatagaccagataatctgataacattacatcaatcatgtcataagaaattccatttgggtaag

SEQ ID NO: 1085 - DNA, 264 bp, unidentified; identical to SEQ ID NO: 745
  misc_feature 1..264: note = Ga0307928_10009122 JGI
  source 1..264: mol_type = other DNA

SEQ ID NO: 1086 - DNA, 612 bp, unidentified
  misc_feature 1..612: note = Ga0126373_10059781 | JGI
  source 1..612: mol_type = other DNA
atgccctgccagcctcgcaaggcacgccttctgctcaaagcaggcaaggccaaagtgaaaagcatggtgccttttaccatccaactgctctatgggagtagcggctacacgcaagaggtctccttgggcatcgatgctggcacacagcatatcggcgtctctgcgacaacagagcaggccgtcttgttcgaggctgaggtctccccccgtacagatgtgactgaactgctggcaacgcgccggcaatttcgccgggccaggcgtcaccgcaagaccagataccgcaaagcgcgcttccccaatgtgcatctgacctatggatacctaactaagtctacccgcatcgctcaccaattggagaagtcccacatcatggatgctcgctgtatcagtggtaacccgtgtgcgcagagtgagggagcttcctacctcatgaggtgggtccgacgcaataaccgccaactccacaaggcgactatcaggaagaaaggacagcgacaaaaaaacactgcatccaaatacgtccagggctctcgcctcttcgactgcgtgcgctatcaggggaagccttgctttgtattcggcagacgcagtagtggctattttgatctt

SEQ ID NO: 1087 - DNA, 241 bp, unidentified
  misc_feature 1..241: note = Ga0126373_10059781 | JGI
  source 1..241: mol_type = other DNA
gtcaaggacccgttcccctcaaggggatgggcttgcgtgagcaagccttgtttgactagccttcgtctcgtcgaagactccgttggatgcgtcaggatacctacgggtgcctactctagcctgtagctctatcgctggtgattaacagttctgatgggcaggaacggtgttgccagcagaacaagcgcactcaacattggcgaagagtaccagactccgaaaggaggtagacgttgtgttc

SEQ ID NO: 1088 - DNA, 687 bp, unidentified
  misc_feature 1..687: note = Ga0120401_1040793 JGI
  source 1..687: mol_type = other DNA
atgaatggtttcgatacgcaagctactcaacccaaggtttatgtcagaaacaaaaatggtaatcctttaatgccatgcaaacccgcaaaagcaagaaaactattgcgagacggtaaagccaaggtagtgtctcggtctccttttactatccaactcctctgggattgtgaggactcagttcaatctgttaccttaggtattgacaaggggagtcacataacaggctttagttgtgttggaaacgaacagattttaatgtcaggccaaatccatcaccggacggacatcaaaggaaaaatggacgctcgaatttggacgactaaaggtggaaaagatagcatctacaatttgataactctttgtgagatttgtcatgacagagtacatcaaaaaggcgaaagtggcaaagttaagatcaaaggcggtaaggtagtaacaggtatggatggattttctgataggattgctcaaaggacaatgaaaagccgcttcgcctctccgcttcgctccgagcaaggtaaaactttaatgtaccaaaagttagaaaaaatagcctccttatcaactgtgtatggttatcagacttcagcttaccgtaagtcactttctttgcccaagacgcatgacattgatgcgatgttaattgccactctttatactggtgaagtgattaggtaccatcgtgac

SEQ ID NO: 1089 - DNA, 346 bp, unidentified
  misc_feature 1..346: note = Ga0120401_1040793 JGI
  source 1..346: mol_type = other DNA
tcggtagtttacataaaaccgtaaactacaaaagccgacatggagctaacagtgggcatccagagactctatctggatgcagaagttagatagtcaccgcaaagcggggacctctacgggatatcacaccgacagatgttgttccagttttcgtcttgaaagggtgtacaccgtctttcaagacaaattggtcgctctgtgggaccgtattaagggtagccgaaaggtgaaggtgtgcggtctgtaaaaaaccgatctaacagccacgaggagcaaaaaactctcacattcaggaggtcataggtacgttatgaatggtttcgatacgcaagctactcaacccaag

SEQ ID NO: 1090 - DNA, 1473 bp, unidentified
  misc_feature 1..1473: note = Ga0101770_1001685 JGI
  source 1..1473: mol_type = other DNA
gtggcagttttcgtgttagacagacacaaaaaaccgttaatgccatgtaccgagaagcgggcaagaaagatgcttgaagccggtcgtgccgtgatacacagaatgtatccgttcacaataaggctaaaagatcgaaccgttgaggaaagctctttgcaaccgttgaggctgaagatcgatcccgggtcaaaagataccggactagccgttatacgtgagaagagccaagaagagggagctgtaatatggctatgcaaccttcatcataaagcaggcattaaagacaagctcgattctcgcagagccatcaggcgaagcagaagaaacagaaagacaagatacagagccccacggttcttaaacaggcataacgagaagtgcagagcttgcggcagaaacgcccaacatggaaaacactactgcaggcaatgcaatgaggctaagaactttgtagataatgggcataggaatatttggttgccgccttcgctaaatgctcgtgttatgcaaacgataaatacagtaaacaagctcagaaagtttatgccaataagggcaatatctatggagcttgtgagattcgatattcagcaaatggagaatcctgatatatcgggagttgagtatcagcaaggtgatttgttaggctatgaggttaaagaatatctgcttactaaacacaattattcctgcgcttactgtggggccagagacgatattcttgaggttgagcacgtagtgcctagaaaacccaaagcagggccaaagggcaccaacaggcttggcaatcttgtcatagcttgcagggagtgtaacatggccaaaggtaatctacaaccgcaggagtggcttgaaatattgaagaagtcgagtagcaagaaagatcagactagagctaagaatttagctaacatcctgaaagtggtaaaacgaccactccccgatcctgccatgatgaatgccacacgatggaaacttttcgagttattgaagagcactggtctcccattagaatgcggttcaggtggaaggacgaagaaacaaaggatagatcatggcctaccgaaggcatcatcagacaagaaagaggtctatcactactacgatgcttgctgtgtggggacaagcacaccggacagactggactttaagacaagttacgctgagatgtggtccgcaattggtagaggaacaaggcagatgtgtttccctgacaaatatgggtttccgagcaagcatcggcagaggcacaagcaatactttggtttccagactggtgacattgtaagagctatgaaacctaaaggcaaggatgcaggagagcatatgggtagagttacagttagagtatctggtagtttcgacataagaaaccacaagggggagattgtttgccatagcgtaaattataagtactgcaagttgattatgaagggcgatgggtacggatacggcaaaactttaaggggataa

SEQ ID NO: 1091 - DNA, 288 bp, unidentified
  misc_feature 1..288: note = Ga0101770_1001685 JGI
  source 1..288: mol_type = other DNA
ttcaactaaccttttaaccactaacgcgcaaaagttgtaggccaactaggcccgaaagggcaggcgaaaccagcctaaacccgaaacttagggctacgttatcctggtcatgacaccttggaatgcttctccagttccaagctctgtcgctcaacgttaaacagatgattgtagcgaagtcagtgcgttgagcgtaaaaagccaggataacattggcgaggagagactcacgaaagtgagcgttacaagtcccgtaagggaatttttaaggagcgtgttaaagtggca

SEQ ID NO: 1092 - DNA, 1347 bp, unidentified
  misc_feature 1..1347: note = Ga0114977_10001865 JGI
  source 1..1347: mol_type = other DNA
atgaacagagtttttgttttagatacaaataaacaaccactagctccttgcactccagcacgggctagacagttgttagataacaataaggctgccgcctatcgatataatccattcacgattatattgcatagagaagtagaattagatgtacaagatatctattctatcaatttagacccaggtgcagtgactaccggattagctattatcggccatttccctaaacaaggtgatgttgtgatttttggtgcagaaattacccataaatctaaagctattaaagctaaattatatgcccgtagcggttttcgcgccggaagacgtagccgattacgttatagaaaaccaagatttgataacagaaccagaccagaaggatggttgccaccatctcttgaatcacgggttaattgcattacccattttgttaataaatttaaacagttattatctaatgctaatatgtgcaatattgaattgcccaaattcgatacacaaaaaatgaataatcccaatatcaaaaattatcaataccaacaaggtgttatgaaagattttgataatacaaaagattatttaatccatagagatggcgaatcttgtttctattgtggtgctactgatactaaattatttaaagaacatgttgcgcctcgcgcaattggtggtaattcggttaataatctggttttatcatgcatagcttgcaataccaaaaaatctaataaaccagttgatgaattcttatcagataaaccagaagttttagataaattgaaaaataagaatgtccctcagtgggcggctgccgccatgaactcaatgcgaaatcgtttgatatcagatattactaaattaaatattgaaattggggtttactccggataccaaaccagttataatagaaatatgttgggttatatcaaagaacattggattgatgcagcttgtgttggtgaccatgttcaggtacatatccctcataatatgatacctgtgaaaattaaagctatcggcaaaggctctcggcgcgtagtgaataacgacaaatatggattcccatgcatcaataaaaaaactggtgaacaacaagccgctggaaatataaaacgcatccatggattttcaacaggagattttgtacacctatccgccaccggaaaatataccggtgaatataaaggacgaatagcagctatttctaaacgagggattttagcatttaaactaaaaataccaattccaacaattgttaaaggcgtacctaaaatgcaaaatatgatttatagcaattataaaaatttccgattaatacaacatggggatagttatgaataccattaa

SEQ ID NO: 1093 - DNA, 271 bp, unidentified
  misc_feature 1..271: note = Ga0114977_10001865 JGI
  source 1..271: mol_type = other DNA
gatgcaataataagttttgttaggatggtttttaaactatcttaatgttcaaccagactaagttattagatttatctaataactacgttatgaagaaaagttaaagacttacctatgggtgcttctccagcccgtagctctaagagtacagaactaaacaggggctaaatcgatggcaacagtgggtgtacatgaacttatttataagtttgtcgaggagagcagtactaggtgggagaccacatttttatataggaaaaatatgaacaga

SEQ ID NO: 1094 - DNA, 726 bp, unidentified
  misc_feature 1..726: note = Ga0137384_10058259 JGI
  source 1..726: mol_type = other DNA
atgtcacgcctgttgattgtggatgcccaacggcgtccgttgatgccttgcacgcccgcgcgtgcgcgcctgctcttaaggcagcggaaagctacagtgctgcgcaggtttccattcgtcttgattttgaaggaagcgaaacaggaaccagtcggtcaccccctacggctcaaacttgatccaggctcgaagacgaccgggctggctgtggtcaacgatgcttctggcgaagtcgtctgggcagcggaaatcacgcatcgcggggatcaggtgcagaaaaacctgctgactcgccgaagtgtgcgtcgccgccgtcgccagagacataccagatatcgccaagcgcgctggctcaatcgtcgtcgtcccaaagggtggcttccaccttccctgcgttcacagatacaaaatgtgctcacctgggtcgtacggctctcgcgcttttgtcccattggcgcgatctcgttcgagctggttcggtttgacatgcaactgctccagaatctctcgatcgagcgcatacactatcagcgcgggacgctttggggcacggaagtccgccagtacctcctcgccaaatgggagcatcggtgtgcctattgtactgcgactggattacccctggagatcgaccacgtggttccacggagtcacggaggcagcgaccgtgtggctaatctggtcattgcctgccgggcgtgtaacctggccaagggggacaagctc

SEQ ID NO: 1095 - DNA, 311 bp, unidentified
  misc_feature 1..311: note = Ga0137384_10058259 JGI
  source 1..311: mol_type = other DNA
gtcagcgaccccagcgctgaacgcgcggggcttgcacatgtgcaagccccgaagctgaccagccccctccttgccaggcaaggaggagccgttaggagagaaagcataggcaccggcgagtgacttttccagctcgccgctctgcgattgcacattaaacagcgtcatggggttcaaaacgcagtgtgtgcaatgtatgaaacctttccataactgggcgaggaaaaccttaccgttgacgttttccgggcagccggcaacgccaacgcgccgcctcataacgaggcacgtttggagggagtatgtcacgc

SEQ ID NO: 1096 - DNA, 1338 bp, unidentified
  misc_feature 1..1338: note = rank12_10070934; GENOME_ACESSION: IMG_3300001484_$F_3300001484
  source 1..1338: mol_type = other DNA
atgatgaacgaagcagtttacatcatcggtattaacggtaaacctaaaatgccttgtttcagaaaaggcagaatcaggcatctgttaaaagaacacaaagcaaagtgggtgaagaattcagtcttacctactctgcaactcttgtacgaacaagactgtgtctacactcaagatgtaaatcttggtttagatgagggtgccaatcacatcggtgtggctgcaacttcacacgggaaagagattctgtctcttgaacttgaaatccgaagcagtgacatcaagaaatgtaaagatgagcaaagaacaaacagaagagacagacgtaacaggaaaacccgttacagaaagccgagattcaataatcgggttgcatcgaagaaagaaggatggctgtctccaacagccagacacagagaagacactcacgtaaatctcgtgaagtatattcatcgtattcttccaatcagttgtcagactttcgaagaaggcagatttgatacccaaatgatagaaaacccggaaatcagcggcactgactatcagcacggaaagatgtatgagcatgagaacttcaaagagttcgttcgctacagagacaactatacgtgtgctatctgccacacaaggggaaagggtgatgtgcatcatatcataccggtctcaaaaggaggcactaaccgtgccgacaacggtgttttcctctgcaagaaatgtcacgaagatttacataaggggaaagtcaaattaccagagaatatcaatcttgctgcaaagaatctaaagaatctgaaagatgcagcagcaatgaacactatgtcaaaacgactcatcaaaagaatgtgtgagacatttcccaatgttatcacacgacggacgtttggttctatgactaaagcgaagaggtttaaatacaatatcaaaaagtcacatgcggcagatgcgcgtgtgataagcggccagccagaagcgacaccgctcggatacacatactgcttgaaacaattgagacgccataacagacagatgcacgagcatcagccgagaatcagaaaggcacacgacgggaaacccggcatggcaagagcaagaagacggaaattgggatatgttcgaagagagtgtaaggaaatcaaatctgttttcggtttcacaaaacgaagcatcgttttgtatgaaggaaagaaatggatgataactggtctaagacagaccgggttcttttctttggtaaatataaaagacaaaaaagagaaaataaattcaatcaaatatacaaaactcaaacttataaaacctcaatataaatcaattgtaatagatgatatcagaagattataa

SEQ ID NO: 1097 - DNA, 315 bp, unidentified
  misc_feature 1..315: note = rank12_10070934; GENOME_ACESSION: IMG_3300001484_$F_3300001484
  source 1..315: mol_type = other DNA
gtcaccaaccggctaagctaaagacttagcggcttggctcctcaacgaatcaaagctgatggtgactagcctaagtgaaagagcatatgctctcgaactacgttactggcgaatacataggtaccaagggatgttcgtcctagtcccttgctctacgtctgggtattaaacagtcctgtccggtagggacagtgtattcagaatataaaccgctggataacattggcgaagggcatctacagagacagtagtctctgacttacagatttaatctgttattttaaaaaattaattaaacaaatgatgaacgaagca

SEQ ID NO: 1098 - DNA, 834 bp, unidentified
  misc_feature 1..834: note = Ga0116142_10030893 JGI
  source 1..834: mol_type = other DNA
atgaaaatggtgtttgtggtagataagaataaaagacctttaaatatgtgtcattctgcaaaggcaaggaagttattgtctgataacaaagctgtagtaatttcttattatccttttgttatccggttaaagaaagaagttaatactcctatagtagcagattatcaaataaaaatagatcccggtgcaaaatggacaggtttggcaatattgcagaatgaagttaatgttaactttttaggagtattaaaacataaggcatttgaggtagtggataagttaaaatccagaagctctttaaggcatgggaggagaagcagaaaaacaagatacaggcaaccgagatttgataatcgtggaaacgctagaaaattaggtagaataatgccttctttaagatcaaggtttgataatattacaaattggattaagaagttacagaagttctgccctataggagaaattgtttatgaaaatgttaaatttgatactcagttattggaaaatcctgacatagtcggaactgaatatcagagaggagagttatgtggatttgagataattgaatacttacgagagaaaacgggctttaaatgtgcttattgtggaaaggggggaatgaaggaaaaattagaagtggagcatattatcccaagaagcaggaatggaagcaataggataagtaatttaaccttggcttgccataagtgcaatcaaaagaaaggaaatatgaccgctaaagaatttggtaaacctgaagttcaaggtaatgctaaaaaacctttaaaagatacagcaatggtaaatagttctcgtaaaagaatgtatgaagaa

SEQ ID NO: 1099 - DNA, 283 bp, unidentified
  misc_feature 1..283: note = Ga0116142_10030893 JGI
  source 1..283: mol_type = other DNA
ttcgaaaactactattcacaaattcgagagtgaaaactctcactatgtaaccagccataagtcgagtgactacgttagaaatgttatgacacctacggatacttcctcagttcgtagcaactgtcaagtattattaagtgaggtcttgattgagactacagtataatatttatgtaagcatacctaacattggcgaggggagatatttcgaaagaagtacgttacctgttgatataaataaacaacagagattatctgaaaagataaggagtaaatgaaaatg

SEQ ID NO: 1100 - DNA, 1407 bp, unidentified
  misc_feature 1..1407: note = Ga0180432_10045612 JGI
  source 1..1407: mol_type = other DNA
atgcagaagttattagcaaagtttgagaacgtaccagagaatgcttctctagttctctgctctacaagttctgatttaaacagagaggacactctcagtgatcagaacatacaactgactaataacactcccgaagagaatcattcccaacgtacagggaggtcattaaaaccatttgtgtacgtattatctaaacaaggcaaacctttgatgccttgttctcaagccaaatctcaaagaatgttaaaaggaggaaaagcacatgttataaaaagaactccgttcactatccaattgaattttgaatgtgcaaacagaattcaaccaataacttgtggaatagaccctggttattctcatattggattcagttgcactactgataacaaagaactcttatcaggaacagttgaacttgataacaatatgaaatcaagacttgatgacagacgaatgtaccgtagaaatagaagaaacagactatggtacagaaaaccaaggtttaacaataggacatctacaaagaaaaaaggatggtttgcaccatccattcaaagaaaacttaacactcatgttaatcttgttaaaaaactaaaacaaattctcccaataacaaagataatagtggaagcagcaaactttgacattcagaaaattaacgatccaaacataaagggagaacaatatcaacaaggttctttgtttggatatgagaacttaaaagcatatttaattcacagagaacaggggaagtgtcaactatgtgggaaagaatacaataatggttggcatgttcaccacatcattccaagaaatgatggtggaacagacaaaccagacaattgtgcactccttcatgataaatgtcataagaaactgcacaagcagaagttattttcttcattgaagaaagccaaacagttcaaagcagagacctttatgtccatggttagatggagactaacagaagagttaaagaagataatttctgatattaatgtgacatttggatatataacaaagataagaaggcatgagaacaatatagagaaaacacattcaaatgatgcatttattatatcgggaggaagtgaacagggcagatgtttgtctgatataatagttcaaaagagggagaataacaggagtttgcagaagaacagaaaggggttcaaggtttctgttaggaaagagagatataagattcagtccaaagatttggttaaaatagaagggaagtgggaagagacaaaggggacacattgcaagggaaagagaataatggttaatgggaaatctattagtattaagaaagtagaagagatatataatgtagggagtttaatatggagggcggcaattcctcccctgcctaaaggcaggggtctccttgtcgcaagaggatga

SEQ ID NO: 1101 - DNA, 268 bp, unidentified
  misc_feature 1..268: note = Ga0180432_10045612 JGI
  source 1..268: mol_type = other DNA
gtcaactacccctgcctaaaggcaggggcttgctccgtgaggagcaagagtaattagttgattagggagcttttaaggagacttaaatgcagaagttattagcaaagtttgagaacgtaccagagaatgcttctctagttctctgctctacaagttctgatttaaacagagaggacactctcagtgatcagaacatacaactgactaataacactcccgaagagaatcattcccaacgtacagggaggtcattaaaaccatttgtgta

SEQ ID NO: 1102 - DNA, 1350 bp, unidentified
  misc_feature 1..1350: note = Ga0311361_10020611 JGI
  source 1..1350: mol_type = other DNA
atgcagcagttagaaaagagagatacatacacacctacggatgcttcacaagtccgtagcaactgtgattcattattaaacagagaggaaactctcagtgtaatggatttaaaaacctcttctaacaatcccgaagtgaatttacctgtccatagcaggggcttagagccactaatctatgtattaaatttaagtaatgaacctttgatgccgtgtacggcttgcaaggcaaagaaactattgaaaactaataaagcaatagttgtaaaatttaaaccttatactattaaacttaattttgaatgtgaaaataaaacacaagaggttactttaggaattgattctggaagtaaattcattggtttctctgccgtgtcagatgataaggaactaatttgtggtacgttaattttagacaataaaacaaagagtaggcttactgaaagaaaaatgtatagaaaatatcgtaggaataaactttggtatcgaaaaccaagatttttaaataagaaaatcgaaaaaggatggctaccaccatcaattcatagaaaatatgatactcatttaaatctaattaatcggattaagtatcttttaccaataaataaggtagttattgaagttggtaattttgatattcaaaagatagaaaatcctgacattaatggaattgaatatcaacaaggcaataagtttggttatcaaaatacaagggctttcttaatgttcagagaaaaaggattgtgccaattatgtggtaaatcatttacgaaaggaaatacagcccacgttcatcattgcaagcaaagaaaagattctggttctaattcggttaagaatttagttatattacataaaaaatgtcatgagagattacacaaaaaggggttaaaattaaagactccgaagtcttataaagatgcttctttcatgaatatcatgaaaaataggtttgtcaaagatattcctgatgttgaattaactttcggttatataacttttataaatagagtaggcttagacttagaaaagactcattataatgacgcttttgtaattggtgatggttcagttcaagacagaattaagccaatagaaattatacagaaacaaataaataataggacacttcaaattaatagaaagcattttaagcctgccattaggaaacaaagatactcaataaggccaaaagacttggtatttgtaaatggtaaaattcattctgttattggcacacattgtaaaggtcgtagtataatattagaaaataaaataaataatcagaaatcaatatcgttgtgtaaaatagaaaaggtgtatcactttggtagtttagcaataagataa

SEQ ID NO: 1103 - DNA, 276 bp, unidentified
  misc_feature 1..276: note = Ga0311361_10020611 JGI
  source 1..276: mol_type = other DNA
gtcaatcacccaaagctgaagcaagcagtgggcttaacccgtgagggataagagcaattggttgattagggagcaataaaagaaattaaaagcaaaatttatgcagcagttagaaaagagagatacatacacacctacggatgcttcacaagtccgtagcaactgtgattcattattaaacagagaggaaactctcagtgtaatggatttaaaaacctcttctaacaatcccgaagtgaatttacctgtccatagcaggggcttagagccactaat

SEQ ID NO: 1104 - DNA, 1275 bp, unidentified
  misc_feature 1..1275: note = Ga0163148_10007436 JGI
  source 1..1275: mol_type = other DNA
atgtctaaccaaattttcgttctagatgccaacaaaaagcctttaaccccttgccgccctattacggcaagaaaattgttagaagccaataaagccaaggtatttagacagttcccattcacaatcatgctcaaaaaggaagttactgccacaccggaaccgattgagttaaagcttgacccaggttccaaagtaacgggcatagcccttaagcaaggaaacaaagtcatctggggtgcggaattaacccaccggggcggcgcaatcaaagcaagcttagagtctagacgttcccttcgtcggggacgtagaaaccgtcacacccgttatcgtcaagctcgattcctgaatcggactcgttcaaaaggttggttagctcctagcctcatgcaccgggttcggactactgaaacttgggtcaagaaattgattaagtttgcgcctatcggctcaatcgttcaagagttagttcgctttgatttgcagcaggttgagaacccggaagtcacaggtgttgagtaccagcaaggcgaactagctggctacgaagtcagagaatatctacttaacaagtgggacagaaaatgcacctactgttctgttgagaacgttccgctacagattgagcatattcaacccaaagctaagggcggttccaatagaatctctaacctgtgcttggcttgtgagaaatgcaatcaaaaaaaggggactcaggatgtcaaagactttttggctaagaagtccgaccttttgaagcagatcttggctcaagctaaacgccctttgaaggatgctgccgctgtgaattctacccgttgggctttgttcaacaccctaaaagaaacgggtctacctgtttctactggtagtgggggactaaccaagttcaaccgaacccgcttaggtttgcctaaaactcattggctggacgcagcttgtgtgggacaggttgagacattggaagtattaaccatccagcccttgctaattaaggcaacgggtcacggttctaggcagatgtgtaggacagacaagtttggttttccttcccggtatgtgcctaggttaaagtttgtgcaaggtttccagactggcgacatcgtgaaagcggtggtcacgaaaggaaagaacattggcacccatgttggtagggtggcagtgaggacaagagggatcttcaatatctcatccgctctgggtttgattcagggcatcagtcacaaatactgcaaaaccattcacaaaaaggatggctacggttacggattttaa

SEQ ID NO: 1105 - DNA, 273 bp, unidentified
  misc_feature 1..273: note = Ga0163148_10007436 JGI
  source 1..273: mol_type = other DNA
gtcagatacccagccctaaaggactgagcttgcagactgcccgactctagcgagcgggtataaaccaagctaatctgaccagcctaagccttaactggctacgttttttgagtcacgacaccgggcgaatgcgaagctagttccctgccctgtcgttgaaagttaaacagtcttaaggtcactgagacagtgctttcagcctaacaagctcttaaaacagtggcgaagctaacttaacgtgaaaacagtagagacaaaaccatgtctaaccaa

SEQ ID NO: 1106 - DNA, 1104 bp, unidentified
  misc_feature 1..1104: note = Ga0272448_1029175 JGI
  source 1..1104: mol_type = other DNA
atgaattacgttccggtcatctccagtaccggtaagcccctgatgccctgccacccggccagggcacgggagctcgttcgcaggggccgggcagtacgcaggttccggaaagggtttttctacatccagcttctcgaccgcagcgaggggcaaacccagcacgtgatatgcggtatcgacccaggttccaaaagggaaggattcacgatcaaggacacaaagcgcacgttcctgaacttattggcggatacggttacccacgttaaggaggctgtagctatcaggagaaagatgcggcggagcaggaggtacaggaagaccccctgtaggaagcctcgggctaacaggagatgtggcggaattccgccttccattctggctaggtggggttggaagcttaggttgtctaggtttttatgctccctgtaccctatcgacctgttcgtggtcgaggacatcaaggcaaggcttcgcaaggggcagaagaggtggaacgtctccttctcccccctccagatagggaaggaatggttttactgggaactccgcaagctcgccccggtgaccctcgttaaggggtacgagaccgctcaaatgcgggaggagctagggttgcgcaagtcctcccggaaggacgaggagagtttctggtcccactgtgtggactcctgggtcttggcagcatccgccgttggtggatcggttccagaagacacctggatcgtccggatcgcccccttgcggtttcgtaggcgatccctgcatctgcggcagtcagctaaaggtagtgtacgcaggcggcatggcgggacagtcagcttggggctccggcggggcacgcaggtgctccacccgcgcttcgggttctgctatgtcggcgggtatatgggggaccgccttagcctacacgcggtgcgagatgggcggcggctgactcgaggggcccgccaggaggatctgacggtgctcgcaccttgctcttggagggtgtgggtgccggagaaaagggtgaaaggaggtacattctatgagaatacgagtgacttcaccggacacttgtgtgaggttgaatcttccggggggattcaaattcataacggctga

SEQ ID NO: 1107 - DNA, 246 bp, unidentified
  misc_feature 1..246: note = Ga0272448_1029175 JGI
  source 1..246: mol_type = other DNA
cttgaagaccgagatgtctcgggtatatgtgttgtggaagtggggaatcctgagcgagggaggaccacttgcacaatgttaacggatgcccgagactttgccaactatgttttggatgaatgtcaagtaccccggactgaagtccggggcttgtgaggagtagcggaaatgccgaccgcgaaaccgcaagacaccgtgcaagcggtgggaaaaactagcctggccgagcaaccggacccagtaatg

SEQ ID NO: 1108 - DNA, 1365 bp, unidentified
  misc_feature 1..1365: note = Ga0224414_10007183 JGI
  source 1..1365: mol_type = other DNA
atgcaaagctgcgtatttgtgatgagcaaagatggtgaacggctcatgccgacaaagcgatctggccgagttcgccatttattaagagatggaaaggcaaagatcataaaccacagaccgttcaccatacaactggtatatgaggtcagtacatatacccaacctatggagttgtgtcaggatacagggtatcagcacataggaatctcactgaagtcagaagcgcacgaatatgtgagtgaagaacgaatcctgctgaaagacgaaaaacagcgtcatgatgatcagcgaagatacaggcgagacaggaggaaccggcttcggtacagggcagtgcgcttcagcaactgcaaacggcgggaaggatggctggcgccgagcctgcagcacaaagcagatgcgcatgtgaacgagatcatcagatatgcggcagcagctccgataacggatatatacatggaactgggagaatttgatccggcactgctgaaagcgctgggcaaaggagagccggtcccggagggatccgattaccagcatggcgatctctacgggcaggaaactctgcggaaagcggtctttcaaagagatgggtacaaatgctgtatatgcggaagaggagtggaagaaggggcgatactgcatatgcatcatgcgctgttctggaaaggtcggcacggcagtcagatcgatgagcttgccactgtatgcgagaaatgccatacatccgcgaaccataagaaaggcggattgctatggggatacgagccaaaacggtttgcaagtcttgagaatgcgacttttatgaacaccgtccgatggaatatctacaacagagtaaaaaagcagttggaagatatcaatgtccatataacatacggtgcaaagacatcaacagagcgaaaactgctgaatatggaaaagagccactgcaatgacgcatattgcatgggtaactacagaccggaggacagagcagagcagcagacatttcagaaagtgcggaggaacaaccggatcctgagcaaattctatgacgcgagaatagtggatatacgcgatgggaagataaagagcggatcggagttaggaagtgagcggacaaaccgcagggaatcgaggagcagcgataaaagtctgaggcaatacagagggactaaagttactaagggcagggtgtccgaaagaacgcagcactatcagataagaccgggagacattctgctgtggaaaaacacgccatataaggcaacaggagtgcattgtaacggaacaagggtgctcctgcaaaacaaaaagagtgtctcattaaaacaaataacaatacaaaaacatataggaggatggcagtttctccacgcctga

SEQ ID NO: 1109 - DNA, 318 bp, unidentified
  misc_feature 1..318: note = Ga0224414_10007183 JGI
  source 1..318: mol_type = other DNA
gtcaataaccccgcccgattcaaagaatcggacgaggcttgtccagtaggataagcctgattgataagcctgagtcttgaaacagagactacgttatgcagtgacgcataagcaactcaccttaggatgctccacaagttctaagctctgaggatatgcattaaacatctctgagggtaggagaagtgtgcatattttaaaaacctgcataacattggcgatgtggaccacagcaatggcggagagatccgtacatgctgaattatccggatggccggatggaaaaaaggaaaggaattctgccggatgcaaagctgc

SEQ ID NO: 1110 - DNA, 1227 bp, unidentified
  misc_feature 1..1227: note = Ga0182027_10069116 JGI
  source 1..1227: mol_type = other DNA
atgaaagtctttgtaattagtaagagcggtaagccactaatgccaacttgtccggcaattgcaagattgttattaaaaacaggtaaggataagtgtattagggtaacaccatttacaattaagatgttggttgagacaacggagtatactcaaccagttgaagcgggaatggatacggcggggaaaattatgggttgtgccgctaaaacaaatggagaagtagtttatatgtcagaagttattttgagggatgatattcataggaagatggtacaaaggaaaatgtatcgtagccatagacgatataaaaagactcgttatcgtcccatgagatatagtaaccgtatatctgcaaaaacaaaaggacgaatggctccaagcattaagtctaaggttgattctcatttgagagagaagagttttatggaatcaatattgcctaatgtaaaatggacaatagagattgctaagtttgatttgcagaagataaataatcctgacattaagggaagagaatatcaaaatggtccgatgaaagattattataatattaatgcttatgtgttgaatagggataattataaatgtcaaaaatgtaaagggaaaaacaaggacaatagattgcacgtacatcatattatatggagaagtattggtggaacggatgggccaagtaatagaataactctttgtaaaacctgtcatgatcgattgcataatggagaatttgatataaaagggagtaaatcaaaatctaaatatgcgtctgaggtgtcaatgataagttctcaattgcagaagtattttggggaacataaagaaacatttggatatgagactaaatataaaagagaacaaattttaggattgcagaaagaacattattttgatgcggttgctatttgttgtaatgataatgaaaaagtaaaagtaagtaatgttgtttatattaagagacatgtttctgctggggattatagacagacgaatggcaagagaagtgaaaagaaaattcctacgggtaaattgtttggattgagaaaatatgatttgattaaaactaaaaaaggaattgggtggatttcgggcaaaagaagtgaaggattttttgaattatctgagataaatggaaattcaatatgtcatgctattaatataaaaaaatataataaacgtatttctgcgagatcgaccacattggtttctatggtaaattcaaacagataa

SEQ ID NO: 1111 - DNA, 283 bp, unidentified
  misc_feature 1..283: note = Ga0182027_10069116 JGI
  source 1..283: mol_type = other DNA
atcgtctaccattatcctaattcgttagaataatcctttcggggtaagacgatcagaccactaattggattcgttgattagtagccgttatctaacatgtagaaaccttcagatgccgtcccagttggaagctctttcgtggctctgtaaacagttctaaggtaaggaacagtcaaccacagcgtgaaggttagataacaggtcgagggaaggtcggattctggtattatccaaaatatcagatacgcataactccaagttgttggaaggatataagatgaaa

SEQ ID NO: 1112 - DNA, 1320 bp, unidentified
  misc_feature 1..1320: note = Ga0307430_1002475 JGI
  source 1..1320: mol_type = other DNA
atgaaggtctttgtactcaacaagcacggggaaccgctgatgcccacgacgccacgaaaggcccgtctgctgctgaagcagggcaaggccaaagttgccggcagggagccgttcaccattcagcttttgcacggatcgagcggctacaagcagccggtcaccctcggcgtcgacgggggctatgcaaccatcggatactctgccctgacggagagagaagaactcatcggcgggcaggtgcacctcctggccggggtgtcacagcggatcacggagcgaaagatgtaccgcaagctgaggcgcaggcgaaagcgataccgtgccccccggttcgacaaccggcgtaagccggagggctggctggccccgtcggtgcagcacaaactggacgcccacttgaaattgatcacacgcgtccgctcgatccttccagtaacacgggtgatcattgaagtcgcgaatttcgatatccagcagatcaagagaccggacatttcgggggtcgagtaccagcagggagaacaggcggggttctggaacgtgcgggagtacatcttgcacagggacgggcacgaatgccagaaccccgagtgcaccaagaagagcgttgtgctcaagacgcaccacctggggtattggaagaacgactacagtgacaggccggacaacctgatcacgctttgtaccgagtgtcacacgcaagacaaccaccggccgggagggcttctctacggatgggaaccgagagtcaggcccttcaaagctgagacgttcatgacgacggtgagatggcgcttgatcgatgcagtcggagcggaggcgacgtatgggtacctcacgaagagcaagcggatcgcgctaaagctggagaagagccaccacaacgacgcgttcgtgatcgcgggcggggcggaccaaacgcgggcggaggcggcggatttcgaagagatcaagaatcacgcccgtgcgcgctccaggttctacgatgcgatctacgtcgacacacgtacgggagagaaggcatacgggaaggagctccactgcggcagaacgacgcggaacaggaacctgagcggggaaaacctgagaaagtatcgggggcagaaggtacgaaagggcagagtctctatcaggcgcaacgactatccgatccgtcccagagatatcgtgttgtgcgacggggagaaacacgtcgtgaagggaatgtgcagctatgggaaacaggttgagctgtatgtgcctgatggcaagccacggtacgtcgctacgagcaaggccgtgccgctgagaaagaggagggggttatgcgctgtcgtttga

SEQ ID NO: 1113 - DNA, 291 bp, unidentified
  misc_feature 1..291: note = Ga0307430_1002475 JGI
  source 1..291: mol_type = other DNA
gtcagcaacccgccccccgaaggggttaggcttgcgggagatacttgcaagcccggctgatcagcctcagccaccagccttcgggctgatggggctacgttcattgcgaatacataggcactttgggatattgccaagtcccaaacactgcgggccaagattaaacatcgctgagggtaggcgaagtgttttggccgacaaaccgctttgaacattggcgatggcaaccactcccacaagggaggcaagcttcttgttagcttgcacactatcaggagcacgacgatgaag

SEQ ID NO: 1114 - DNA, 1008 bp, unidentified
  misc_feature 1..1008: note = Human gut metagenome
  source 1..1008: mol_type = other DNA
atggcagtatgtgttttaagtgcaaacggtgaacggctgatgccgaccgaaaattacggcaaagtgcgccatctgctgaaagatggccgcgccgtgattgcgaagcgaaacccattcaccatccagctgacctacgataccagtacctatacccagcccatcgaaatgtgcgttggcaccggctatgagcatatcggcgtcagcattaagacgaaggcaaaagaggtcgtatcgcagcaatatgatttgctcacgaatgagcgctcccgccatgacgactgccgagcgtaccgccggacgcgcagaaaccgcctgcggtatcgggctgcacggttcaataaccgtgtatccagcaaaaagcccggttggattgctccgtccctggataacaaggtggagcgacacctggatattatctcccgctatctgtctgtcatgcctgtcaaggatgtctttatcaaggccgcgacatacgatacacagctccttgcggcgctggaggcaggggagcctgtcccgcagggcaaggactatcagcatgggccgcagtacggccacgatacgctgcgggaagctgtctttgaacgggaccactatacctgtgtgtattgcaagagaggtctgaaagacggcgctatccttcatgtccatcacgcctactactggaagggtctgcatgggaacagcatgagggagcttgcgacctgctgcgagaagtgcaacacacctgccaatcacaaggagggcgggaagctgtggggcttcgataagcctctgcggaaatataccggcgaagcgtttatgaatagcgtgcgctggattctctatcagcgtgcgatggctcgcttccagggtgctgcggaagtacacatgacctatggcgtcatctccaagcgtgttcgcaccaacctcggcctcccgtattcctgcgctacggatgcctactgcatgggcgagctgcgtccggaagccagatgcgaaacagaggtcttccagaaatacaggcga

SEQ ID NO: 1115 - DNA, 440 bp, unidentified
  misc_feature 1..440: note = Human gut metagenome
  source 1..440: mol_type = other DNA
gtgcgtaccatcaaacccggtttatccttggcgatgtggaccacagtaacgccgaatgagcggcaagtgctgatttacctttttggtttgtcatttgaatattaccatttctgtattcgttgatgcccccgccaaatgacaggtagctataccatggctgggactacatcaataagcgtgtcggttgacgtcccccaccaaatgacaggcagctataccaagaagcatctcacacattaaattagttcggttgacgtcccccaccaaatgacaggcagctatacctgaccccccatgtaaaccctgcgatgataatgttgacgtcccccaccaaatgacaggcaactataccctgacggtgaatgcctttacctgtgccaccgttgacgtcccccaccaaatgacaggcaactatacccggctgcgaaagggaaaagaaa

SEQ ID NO: 1116 - DNA, 1470 bp, unidentified
  misc_feature 1..1470: note = Ga0190313_1000813 JGI
  source 1..1470: mol_type = other DNA
atgatcgtatttgtagtagattcacgcaacaatattggtcatcccacacgcaagtgtgacatgatcagacgattattaaaacgtggcaaagccaaagttttaaaaggcggactcaagtcaggtcagcctatattagtacaaatattcaagaagtttgataagtcaaaaacaatcgattgcgaattcagagtcggaatagatcctggatacaaacatatcggttattgtgtttacaagatatatagtaacaaagttataaagttgttttcaggcgaacttgaaactagaacatcagatgttaaagacgggttagatactcgtcgaatgtatagaaataatcgacggggcaatcatagaaagaataataaacgcaaattcaaggtggctaaatttaaacatccaatttggaagaatcgacgcaagcacaaatttcaaccgacacattggcatttgattaattcacacagcaatctattaggttggatttttgatagaataccattagatcaaagtaagttacatgttgaatataataagtttgatttgcataagataattaaaccgaatattcgtaattggcaatatgcaaaaggtacacaatatggtttcgagaatactaaactatatgttcgaaatcgagataattatcaatgtcagatatgtaaacagtatattggtcgattaccaaacgaagtacaccatatagtttggaaatcaaatggaggatcagacagtccacttaatttaatattactttgttcggaatgtcataaaaaagttcacgcttgtaaaatagtatgtcctactaaatcaggatcagtcaataaatatcgtgatgctggtgtattgaattcatgtatgaagcatatgtttgctgaatatgaaagtattataccaacgcaagatacatatggatatattacaaatgctgtccggaagcaatggggattagaaaagacccatgcaaacgatgctagtgtaatagcaatatgtgattcgaatggctttatggaagagcttagacaatatactcaatggtcggatgaagatgtaactatcaattttaaacagtatagaagacatgttcgtaattgggtacaacgatatgaagatcgaaaatattatattgatggttttaaaaatcctagaaaagcgtttgcgtggaatcgtaatcgtcgatctgggcaagctaagaacaagtgtagtttagtagaattaaaacaaaaattaatatctaaaaatgcattaaataaagttcagattattgctaaacctggtggaagagttatgaaacaaagtgaaaagaagatgacatttcgtcgtggtgatataattcgttgttcgaaaggaactgcaactgtgcaatattatgagcttgggcataaagtaattaatactgttcaattatgcaaaattaaacaaaaatattgtaccaaaatattaaacaatagcggaatgtgtgtaatttag

SEQ ID NO: 1117 - DNA, 301 bp, unidentified
  misc_feature 1..301: note = Ga0190313_1000813 JGI
  source 1..301: mol_type = other DNA
ccgatcattaacccggacaacccttttaatttatgcggcgaaataattaccaatacctaagtctaatggattagggccgcgacagacgtattgattaaatgttcaccctagaatgccattcccagttccaggctctggaggtgtcggtgcttaatattattatttaatattaagtacctagtcctcattgtcgacaaagtaggtaacgaaagtcgatattacatttaatcaagtcgagggagaccaatctaactttttaagttaatctctatcatgagattttttaaggagatacatgatc

SEQ ID NO: 1118 - DNA, 978 bp, unidentified
  misc_feature 1..978: note = Ga0272429_1007931 JGI
  source 1..978: mol_type = other DNA
atgtcaacgattagtcattcaatcccggtgattggtgtcgatgggacgccgctcacgccgaccgtgccgtcgaaggcgcgcaaactcgtcaaaggagggcaggccacgggcttctggaacaagctcgaccagtactgcatccgcctgaccgtggagacacggacgggcgggctcgacgcggaactgggcgtcgaccccggcgccaagtatgacgggtacgccgtcgtctgcggcaacgagaacctcctgaatatcaaggttgatgtgcccgacaaagagaagatcgtgcgcaagatcgccgaacgtcggcagctacgccgggcgcgtcgttcccgcacatgccgtcgccgaccacagcgcttcagcaatcgtcgccgctctcctgggtggatcgcgccgagtcaactcgtgctggtccaggtgcgcctcaaggttttgaccgtgttgtgtgacacctatccgatcaccaacgtcgggttggaggatgtggccttcaaccacggcgcacaccgttacggcaagcacttcagtaccgctgaaattggcaaggccagggtgcgcaccttgctggaagaacgagggacgttggtcgcgcgcttcaggggctacgagacgaaggcgctgcgcgagggctacggctacaagaaatccagtagcaagaaagctgatcgcttcgaagcccactgttccgatgccctcgcgttggccctggcggtgcggcgtgacgcctctctcgcgccggggccgttcgtggtcattgatgatcgctaccgcgcggtgcggcgtcgcttacacgacacgcagcccgcgccgggtggcctgcgcgcgccgtacagcagcggggttgtctttggcttgcgcaagggattgatgatcgggacgccgcgcgggaaggttggacaactctgcggagagttgaaaggaggttatcgctattacgacaccgacggaaagcggcaatcgaccacaaagtgttag

SEQ ID NO: 1119 - DNA, 270 bp, unidentified
  misc_feature 1..270: note = Ga0272429_1007931 JGI
  source 1..270: mol_type = other DNA
gtcaagaaccgccgcttgaaagcggcggcttgaaatgagggtatcaccgaccgcgcgcggcgaacgtgcgcgggagttttgactagggggcatcatccgatgcagacgctccgcagggctacaagaacgtccgactgcttcacgaggccggaccccttcgctagaacccttcaatagcacggtacgtttcggcgcacctacgcccggcgggcacccccgacgcgagaagacatccgaaaggatggttgtatgtcaacgattagtcattca

SEQ ID NO: 1120 - DNA, 978 bp, unidentified
  misc_feature 1..978: note = Ga0137383_10000411 JGI
  source 1..978: mol_type = other DNA
atggtgttcgttttggacagacacaagaagccgttgatgccctgtacccccaggcgggcgcgactcttgctcgcgcgccggcgggcggtggttcatcggatcaggccgtttgtcatccgtttgcgagaccgacgcacccaggacagcgtgctacaagagagcgtgctcaaaattgaccctggcagcagaaccagcggcatgaccctggtgcgggcagaagagacgccagcgggagaggtgcatcatgcgctcttttgctccgaagtgcagcatcgaggagagctcgtccatcgaggcaagcagacccaaagcaatgcccgacggcgtagacgcagtgccactctgcgtcaccgcgcgccacgcttcgacaaccgggctgttgccaaagggtggctgccgccctcgatgtgctcccgtgtgggtaacatcctcacctgggccaggcgatacagccgatgggtgcccgtcggcacctggacgggaggacgaacgcggtggaaccgggcgcgcttgggcatcgcgaaaacgcatgccaacgacgcgttgtgcgtgggagagatcgcgggcgtcaagctcttgaggctgaagacgctccggatcaaggcaacaggccgaggcgagcattgtcgcaccaactggacagcagaaggcttcccgcgcggctacaagatgcgtcagaagcaggtgcggggctttaagaccggcgacttggtgcgagcggaggtgccagagccgctcacgacggcaggtatccacctgggtcgtgtggccgtgcgggcttctggctcgttccgcgtgggcaaagtggacgggatccacgcgcgttatggtgtcctggtacagagggcagatgggtatgagtacgaatggaccgagcagcagaacaggaggctgttccccacccctgccccaaggaaaggaacgcctgcttcctccccatctttgaaaagtggggcatccgcaggcggggattggtga

SEQ ID NO: 1121 - DNA, 319 bp, unidentified; identical to SEQ ID NO: 137
  misc_feature 1..319: note = Ga0137383_10000411 JGI
  source 1..319: mol_type = other DNA

SEQ ID NO: 1122 - DNA, 975 bp, unidentified
  misc_feature 1..975: note = Human gut metagenome
  source 1..975: mol_type = other DNA
ttgagagtatttgttttaaacaaacgagggcaaccgttgatgccgtgctcaccggcaaaagcaaggctgcttctcaaagagaagaaagcaatcgtcaaaagacgcacgccttttacgattcaacttacgatcgcaacgggcgaagcaaggcagcctgtaacgcttggcgtggattccggctacaagcacattggtctttcggccacaaccgaaaaggccgaactctatgcctcggaagtcgaactgcgtcaagacatcacggatcttttgtctgcccgtcttgctttgcgccgctctcgccgcagccgcaagacgcgctaccgtgcgcctcgtttcgacaaccgggtggcaagcaagcgcgaaggctggcttgctccttctgtggaaaaccgcattgcggcgcacatgtcgcgtgtagaagcggtcatgcaggtcttgccggtgactgccataaccgtcgaaacagcggcgtttgacacgcaactgctgaagaacccggacattgccggagaggcgtaccaacaaggcgaacagctcggattttggaacgtgcgggaatacgtgcttttccgggacggacacgtttgtcagcactgccgcgggaagtccaaagatccgatactcaatgttcaccacattgagagccgacggaccgggggcgatgcgccgaacaatctcatcacgctgtgcgagacctgtcacaaggctttccatcgaggggaaatcgaactcaaagtcaggcgaggaaagtcgttcaaagcggaaaccttcatgggcatcatgcgttggacgctctttgagcgtttgaaaaaggctcacccggaactcagagttcgcaacacctacggttatctcacaaagcacaagcgcatctcacacggaatcgcaaagagccactgtgcagacgcgtactgcattgcggacaaccttggtgcaaagcgactggagggctttttctttcaaaagcaaacccga

SEQ ID NO: 1123 - DNA, 250 bp, unidentified
  misc_feature 1..250: note = Human gut metagenome
  source 1..250: mol_type = other DNA
gtcaactaccccgctctaaagagcgaggcttgataaaagccttggttgactagcctcagaccgccccaaaaggcgggctacgttggttgggaatgcataggcaccgcgggatgtcaatcctagtcccgcgctctgcggttcgcggttaaaagctctgagaggtaggagcggtgccgtgaacaggtaaaccccttccaacattggcgaagaatttcaaccggtcgcaagaccgaggagtcaaatcttgaga

SEQ ID NO: 1124 - DNA, 1428 bp, unidentified
  misc_feature 1..1428: note = GENOME_ACESSION: mgm4547164.3 MG-RAST
  source 1..1428: mol_type = other DNA
atgaaaccagtatatgttgtaggttataacggccaagggcttatgcctacgaccccaaggaaggcaagaaaactagtggaatcaggaagagctgtagtgctttttaagactccgtacacaatcaaacttctgtataaaacaggagttaatactcagcccacattcgaaggaacagatacgggaagccagcacataggcgttgccgtaacaacggatgagaaagtcttatcaaaggaagagtatgcacttcgaagcacaatggacaagcgtgctcttatcgaaacaagagcttcttacagaaagggaagacgttatcgcaaaactaggtaccgtcatccgaaattcagaccacatacaaaacgagtctatgtggaaaaaccagttcgttataataagcacttaactcactggaagaaatgtaagaatgtattcgcatcaagtaaaaagaagggatggcttccgccatccatccagtccaagtgtgatatgacgatgcaaatcatagacagatataagatgatacttccgccaaagacaaggtttcgtcatgaagtcggaagattcgatatcgcaagaatcaaagacccgtccattcacggggagatgtatcaatacggacgtctttacgacgaggagaacgtcagagcctatgtgtttgagagagacggttacacttgcaaagtttgcaagaagaaggccggttctaaacgaaaagatggttctacagttaaacttgcggcacatcatatcgactttcgctccaaaggagccacagataatcctgacaggatgataactgtgtgtgacggatgccatacaacagttaatcatcaaaagggaggaattctttatcagtggatgcttgatgagaagaaagtcgccagaggatatcgagacgagacgtttatgaacatcattcgcaggaaattattcaaagagtttcccaatgacgaattcacttacgggaacttcacggctgccgacagaaagacgcttggcttagagaagacacacgccaacgacgctgttgccattgcatgtcagggacgtcctgttaaggataatcctgatacaacctattatcaacaagtaaggcataataaacgttcacttcatgaggctacggcgcgtaaaggacgcaaagaacccaaccgtagacagattcgcaatgcgaagaacacaaaatctgtcacaattgggcgctataatagcaagaaaacattttatgtatacgacaaggtttcttacaaaggacaggtgggatggataagcgggttcactaaaacggcggcttatgttaaggacaaagatgataactatatcaagtatcctgataagagttacaaccagataaatttaagcgatttgtctgtgatatcacacaacgacaattggctgattggagcagtgtctccaataggcaagtag

SEQ ID NO: 1125 - DNA, 342 bp, unidentified
  misc_feature 1..342: note = GENOME_ACESSION: mgm4547164.3 MG-RAST
  source 1..342: mol_type = other DNA
gtcaactacccaccactaagcctaaggcttgaagtggggggcttgtaaaagccaacactttaggcaggcagtggagaatgttgactagcctcaggagttagatgtatttagtgcagctaactactacgttacagagatgaatacgcccaacatgctgctcaagtggataaggcgttcgggcaacggatgtctgatatagggtaagtaggacaccgacccaggagcacgaagtctctggacattggcgatgagcaatacgtgctgtggacacgggcagaaccgtcgagtctctgccgcaaatcacattcttagaggaaggaggcataagccttgatgaaacca

SEQ ID NO: 1126 - DNA, 1392 bp, unidentified
  misc_feature 1..1392: note = Ga0210056_1025515 JGI
  source 1..1392: mol_type = other DNA
atgcagaagttattagtagagttaaagaacgcacctacggatgttccacaagtctgtagctctgtaagtcctgtattaaacagtccgtgtgaggtaatggacagtgtacaggacatacaactggctaataacaactccgatgtggaccaacttgggaacaggaggaacacacttttagtagtgttcacactgaacaaaaatggtaaacccctaatgccttgtaaacctgcaaaggcaaggcatttactaaaagaaggcaaagcaaaagtagtaagaggtcagccttttactattcaattactatatggttcgggaactgcaattcaacctattattcttgggatagatcctggatatgacaagataggattttctgctatcacagataagaaagagttaatttcaggagaagtcagattaagaaaagatgtatcagcaaaattaacagaaaggagaatgtatagacgaaacagaaggaataaattatggtataggaagcccagatttcttaatagagtatctaaaaaagaaaattggttagctccatctattaggtataaattggatagtcatattagcctgataaataaaataaaggaaatattgcctatatcagatactatagttgaaatagcctcttttgatgcccagaaaatagtaaatccagagattagtagtattaaatatcaacaaggagaattacagggatatgaaatacgagaatatttattagaaaagtggggtagaaaatgtgcttactgtggtaaaaaagatattccattagaagtagaacatataataccaaaatcaagaggtggaactgatagggtatctaacctaactctttcttgtcaaaaatgtaatctcaagaaaggaaacagaacagcaaaagaatttggatatccagaaatacagaagcaagggaaagaatcactaaaagcaactgcatttatgaataatgttaggtggaggttagttaatatattgaattgtaagtggacttatggatataaaacaaagcacgatagaattaaattagggttagagaaatcacacagcaatgatgcttttacaatagcaggtggtaataagcagttagggtcggttcaatatattggaaataggtatagaaggaatgatcgttccttacaacttaatagaaaaggatttacaccttccattaggaggcaaagatataatttacagccacatagtttagtaaaatggaacaatcaattattaagaattagaggaatatcttgtaaaggggcaagagtagttttagagaataagaaatcagtcaagatagatagtgttcaattatataaatatatgagaggatggcaattattccctgatataaatgacggagtttccttgctacaaaattaa

SEQ ID NO: 1127 - DNA, 250 bp, unidentified
  misc_feature 1..250: note = Ga0210056_1025515 JGI
  source 1..250: mol_type = other DNA
gtcaaccacctctccttaaaggaaggaacttgtgaaagcaagtccctggttgattagggggtattgaaaaatgcagaagttattagtagagttaaagaacgcacctacggatgttccacaagtctgtagctctgtaagtcctgtattaaacagtccgtgtgaggtaatggacagtgtacaggacatacaactggctaataacaactccgatgtggaccaacttgggaacaggaggaacacacttttagta

SEQ ID NO: 1128 - DNA, 1308 bp, Moorena sp.
  source 1..1308: mol_type = other DNA
atgtctaattttgtttttgtactcgatacgaagcgacagcccctcgcaccgtgccatcccgcacgggctagggaactgttagccaagggaaaagcggcaatttacaggcgctatccgttcaccatcgttttaaatcgcgctgtgggcgacgtgccgccatcgtaccaactcaagattgaccccggctcccaaactaccggactcgccctcgtaaatcgcagccagctcgtttggggtgcggaattgcaacaccgaggcgctcgcattaaagcgaaattggcaacccgtcgcgtctgtcgtcggaatcgccggaaccgcaagacgcgatatcgcaagcctcggtttctcaaccgtacccgcccgaagggttggctgccaccgtctctaaaccatcgcgtcgaaaccacgatgacgtgggtgaaccgcttgcgaaaactttgtccgattgtgtgcgtctctcaagaactcgtgcggttcgatacccaaaaactccagaaccccgaagtgagtggtattgagtaccagcagggtgaattgttgggctatgaagtgcgcgaatacgtgttgcaaaagtggggtcgaaagtgcgtctattgcggcgttgagaacgtgccgttagaggtcgaacacatccagccccaatcgaagggtggaagcgatcgcgtctccaatcttaccttggcttgccgtccgtgcaaccagtctaagggcaaccgcgacgttcgagagtttctgttggagaaaccctccgttctcgagcgcatcttgagacaggcaaaaaccccgttgaaagatgcggcggcggtcaacgcaactcggtggcaactgtaccagcgattgaaagagacgggtttgcccgtcgaagtcggaacgggcggtttaaccaagttcaaccgcacccgattggggttgccgaaagctcactggctcgatgccgcttgtgtgggagagacgccatcgctgcatttagcaactgaaactccgatagcgatcttgagcaaaggtcacagcacgagatttcgcaccctcatcgaccgttacggattcccccgcgccgtgagacaaacgaaggcgcaagtcaacggcttacaggcaggcgacatcgtgcgagcgatcgtgccgaacgggaaatatcgcggacagtggacgggagcgatcgccggagtgcgaaaaaaacgcccacctgccttgcgtccttttggaaaaaaacagatcgatttaaccgctcaaacacaaatccagatcgttcacaaacaagatggctatgaatacgacattaattcgtgcgggcattcctcccgacgctga

SEQ ID NO: 1129 - DNA, 260 bp, Moorena sp.
  source 1..260: mol_type = other DNA
gtcaaccacccgacgccgatcgagcacgggtacggcgcgggcttgaaaaagcccgacagttgaccaggctaagtcctttacagactccgttatcgaggtcacgacaccgataagttagccagcttgttgctctgtcgtcggtcgttaaacagccctactcgggttaaggcagtgcgaccgacctcacaagcctcgataaccttgccgaggcaaacgttacgtcgcctaagcgacaggagtagacagaaatgtctaatttt

SEQ ID NO: 1130 - DNA, 831 bp, unidentified
  misc_feature 1..831: note = Ga0307954_1000334 JGI
  source 1..831: mol_type = other DNA
atggctgtttttgtactcgacagacagaagaacccactgatgccgtgctcggaaaaacgagcccggcttttgctcactcgcaggcgcgcggtggtggtgcgagcgtatccgttcactattcgcttgaaagaccgcgctggcggtgctgttcagaaagtcgtgctcaagatcgaccccggcagcaaagaaaccggcttagcggtgtccagagtcagcgcccaaggggagcatgtactgtgcttgatagagctgactcaccgtggccatcagatcagcaaagcattggaccagcgccggggatttcggagtcggcgccgtggtcaactgcgctaccgtgcaccaagattcagcaaccggacaaagccaaaaggttggctggcgccgagcctgcagcatcgagtggataccaccgccagcatcgtcaaccgtctttgtaccttggtgccggtgtcgtcaatcagccaagagctggtgcggtttgacctgcaacagatggagaatcccgaaatcagcggcgttgagtatcagcaaggcactttgttgggctacgaagttcgggagtatttattggaaaaatggggccttgaatgcgcttattgtgccgtgaccgacactccactggaaattgaacacattgttccgaaatcgaacggcggctctaaccgaatcagcaatctgaccctcgcctgtcacgactgcaatcaggaaaaaggctcgcaaactctggccgagttcttccaaacgtccagtcgcctgaaagacaaacagccgcgcatggacaacgtgctgattcagtgcaagcgccccttgcgggacgctgcggcggtgaac

SEQ ID NO: 1131 - DNA, 293 bp, unidentified
  misc_feature 1..293: note = Ga0307954_1000334 JGI
  source 1..293: mol_type = other DNA
gtcaactaccccgccgtgaacgacggggcttgtagagaacacatttcaagccaggttgaccagggaaagcggacaccaacccgctacgtttgccacaggtcgttaagacccactccggtgtgctacctcagcaccggacactagaaagctgggatcacgctggcgaaaggtaaagcgccgaaggtttcagttgccgcgcaagcgggagccggtggtcgacattcccgaggggagagaggtttcggcctccgttacaaggcctgtaaaggcactatttggaaaacgatatggct

SEQ ID NO: 1132 - DNA, 1272 bp, unidentified
  misc_feature 1..1272: note = Ga0376687_0042770 JGI
  source 1..1272: mol_type = other DNA
ctgctcaggaccgtcagacagcccggtaacggggccctcatccgagggcacagaaaggagtcacccatggtgtttgtgctcgaccaacacaaaaagccgctcatgccgtgtacccccaggcgcgcacgcctcctgcttgcacgcaagcgggcggtggtccatcggctcagccccttcacgatccggcggcatcggaccgcagcgtccaggagagcacgctgcaaccggtggtcctcaagatcgatcccggttcgaagaccaccggcctggccctggcgcgggtcgaggagacggatgagggggaggtgcaccacgcgctgcatcttgccgagctcacccatcggggagaagagatccgcgagcgtctgcgcaaacgggcggtctatcgccgccgcaggcgttcggccaacctgcgctaccggccagcccgcttcctcaaccgtcgccgtgcgcccggctggcttcctccgtcgctgcgctcacggatcgacaacgtcgtgtcctggacttcccgctaccggcgctgggtcccgctggtgcgcgtggaggtcgagcgcgtcaagttcgacacccagaggctcgcagaatccggagatctccggggtcgagtaccagcgcggggaactggccggttgggaagtgcgatcctacctgctggagaagttcgagcaccggtgtgcctactgcggccgcacggacacgcccttcgaactggaccatatccagtcacgcagtcgcggtggttccgaccgggtgtccaacctggcgctgagttgccacgcgtgcaacgtcgccaagggagatcacaccgccgcggagttcggccatcccgaggtggcggctcaggcgaagcagcccctgcgggatgcggccgccgtcaacgccacgcgcgttgcgctctgcgacgaactgcgcaagcttggtctgccgctcaccagccttgtgtggcggacgcacgcgctggaaccgggcgcgcttcgcgatccccaagacccacgcactggatgcggatgtcgcgtgggagcactggcgggagtcagcgcctcccggcacaaaactctcgcgatcaaagcgacgggtcgtggccgctacagccgcaccaatgtggatgagcatggcttcccggtgggctatttgatgcgccacaagcaggtgatgggcatcaagacgggcgaccgggtgctccagttcgctgacggctacgactacgcactggtggacacagggtctgagcacgtcgcagtggcgcctcccccgaccctgtgtccacca

SEQ ID NO: 1133 - DNA, 323 bp, unidentified
  misc_feature 1..323: note = Ga0376687_0042770 JGI
  source 1..323: mol_type = other DNA
gtcaacgatccccacgcatgaatgcgggggcttgtcccccgggttgatgccgtcttcgttgtccagccgaggtgcccgagccttgtggcaaggcgctgatgggtaccagcgttgcgctcgtcacgacacccgcgtgtgcttcctcagcactcggcgctgtcgttcatcgttaaaagaacctgtcggggtacgggtcggtgcggtgagcccaacaagcgagcgcaacactggcgaagggagcgtcctgagcccgcctgctcaggaccgtcagacagcccggtaacggggccctcatccgagggcacagaaaggagtcacccatg

SEQ ID NO: 1134 - DNA, 837 bp, unidentified
  misc_feature 1..837: note = Ga0172375_10015289 JGI
  source 1..837: mol_type = other DNA
ttggcatcaagacgttccctgcgccgcggccggcggacccggaagacccgctatcggcaggcaaggtttcttaaccggaagcgcaatcagggctggctgccgccgtcattggagagccgggttctgaacgtcaattcctgggtaaaccgcttgaggcgattagcgcccgtaagctcgatctccctggaactggttaagttcgacacgcagaaactccaaaaccctgaagtttccggcgtagagtaccagcaaggcgagcttttagggtatgaagtgcgagagtaccttctggagaaatggggccggaaatgcgcgtattgcaagactgcgaacgtaccgttgcagattgaacacattgttccgaaaattcggggcgggactaaccgggtatcaaatctaacgctggcctgtgagtcatgcaatcaggcaaaaggtaatcttaccgccgccgagttcggccatcctggcatccaatctcaagccaggatgccgctcaaggatgcggctgcggtcaatgcaacgagatgggcactgtttaatcaattaaaaggtctgggccttcctgtcgagatgggcagcggcggacggacaaagttcaatcgagtgcgccagggatacccgaaggctcactggattgatgcggcgtgtgttggggaatctgggtctaagatcaatattccttcttgggcaattcctgtgcaaatcaaggcggtcggtcacggttctcggcaacgatgtggaacggataaatatggctttcccgttcggcatgcaccgaaggccaaatctttcatggggtatcaaaccggggacattgtgcaggcgaacatcccgtaa

SEQ ID NO: 1135 - DNA, 254 bp, unidentified
  misc_feature 1..254: note = Ga0172375_10015289 JGI
  source 1..254: mol_type = other DNA
gtcaaccaccccacggctgaagccgggggcttgagagatcaggcctgaggttgaccagccacagccagggccgcaaggccatcgggctacgttagtcaggtcatgacaccccgggatgcgtgccagttccaggctctgtcggccagcattaaacaggcatacggggttgaagccggtgtgttggccacaaaaagcttgattaaccttggcgaggcaaacattaccctggaaacaggaggctcattgtgagcaag

SEQ ID NO: 1136 - DNA, 1461 bp, unidentified
  misc_feature 1..1461: note = Ga0180732_1000856 JGI
  source 1..1461: mol_type = other DNA
atgaaagtttatgtaatttcaaaatcaggcaaaccattaatgccgacagaaagatttggaaaggtaagaagattattaaagtcggggaaagcaaaagtggttcaccgaaagccttttacgattcagcttctttacgagactactgaaattgtgcaaccattgattcttggggtggatacgggagcgaatgacattggagttgtagttacaaaagaagatggtgaacctgtatttttaggtgaattagaaacgaggacaatagaagttgctcaaaatatgaaggatagatgcgaacatagaagggcaagacgcagacatcgcagagaaaagcgaaagagaagagcaaaggcagcaggtacgatttttgaaaagaaaaaataccacattaacggctgtgaagaagcaataacttgcaaactcatcaagccgggaatggtacgatttgaaaatagaaagcgagcggataaatggcttactccaacttgtactcacttattacagacgcatattaattttatcaagaagatagcaaaaatactaccgattgctatagtcaattttgagtatgccaaatttgatttgcataagattaataatcccgatgtaaaaggtaaagattatcaaaatgggagaaagaaaggatatgtcaataccgctgaatacgtgctttgccgagataaacattcttgccagttatgcaaggtaaagagtgggaagatgcgcgttcaccatgttatttggcaaagtgagaatggaagcgatactcctgagaatttagtgacgttgtgtgaaaagtgccatgaaaaagttcacaacaatcagaaagcagacaagaaaataaaaggattatttgaaggaatcaagaaaaagtatgtccatgctaccattcttaattcggttttacctaagttgtttcaatggttaaaaagcacttttgaaaatgtcaataagacctatggatacgaaactaaagagaaacgttgggaatataatttgccaaaatctcatgtagttgatgcttatttaatagctattggtgataaccccccccatgatttgacgagttgtgaatcgttcttgttcaaacagttcagacgacataatagggcgaacataaaaagacaagaagaccgaaaatattacatcgggaagaagaaagtcgctgttaatcgtaataaaaggacaggacaaacctttgatagcttaaaggatttagtcacaaaatgtgcagaacatgagactgttctgaatctgttgactgtaaagccagcgactagaccgaagagaagcaccaagccttttgggatgggcgatgtcgttaaattcaggggagggattcatatagtcaagggatttacaggaaactacttgggatttgttgatgctgctgatggcaaatacaacaaaaacataaaagaagcggaattggttatcaaaaatcaaggaattgtttgtatttga

SEQ ID NO: 1137 - DNA, 257 bp, unidentified
  misc_feature 1..257: note = Ga0180732_1000856 JGI
  source 1..257: mol_type = other DNA
tcatcatatagctcgtgacattagcattgaagctgttgatggtgcgttggagaaaggtttaatttctgttaaaaaatattaaaaagcattcagctttttataaaaatatttagcaacaaaggttagaccacaggctaaaaaaggagttgcaggtaagagcaccttgtgattttcccagtccaagtagctgttaatcctgtaactaagtcagggaaaccaacgaccgaaaggtcgctttacaggagtttttcatgaaa

SEQ ID NO: 1138 - DNA, 1326 bp, unidentified
  misc_feature 1..1326: note = Human oral metagenome
  source 1..1326: mol_type = other DNA
atgtctatgagtttgacatatgttttagataagaatggacaacctttaatgccaactcaaagatgtggcaaagtctatagactactaaaatctggaaaagcaaaggttgttcaaagagaaccgtttactatcaaattattatatgaacctgaaactcatatagttcaagatttaactttaggagtagatactggttcaagtaaaattggtactgcagtagtagataatgatgcaaatgtttattatgcttctaaagttacaatcaggaatgatatttctaacaagatgagcagacgcagaatttatcgtagagctaggcgaactagaaaacttagatatagacctgtaagatttagtaatcgtaaaaactcaactaagaaagatagattttcaccgactatggtgagcaaaatcaattcgcatattagagaaattgagtttgtaaagtctattttacctgttaagacactagttattgaaactggtacatttgatccacatctactggagcacatagaagatggaattgcttttaacaaacattggggttatcaaaaaggatctaactatggttttgctaattctagagaagcttgcttaaatagagacaactacacttgtcaatgttgtggagctaaaaatactagactggaagttcatcatattatttatcgttccaaaggtggtagtgatgaattagttaatctaattacgctatgcgagaagtgtcataaacttcttcatgatggaaagttaaaagaatttgagtcaaaacttagtggtaaaagaaaaggtatattaaaacatgctactcaaatgaatagtattcgaattcaactattgagacactatccagaagctattgagacatttgggttcatgactaaagaaaacagacaatcgtccgatttagagaaatcgcatgtaaacgatgctattatcatctctacaggttgtattacaaagcctaagtataagacagaagtgtactacaagaagaaatgtatacctagaggtgactatgctgttacattgtacgctggacaaggaaaaaagaataagttaggcaaaactactaagccaagaaatacaagaccagtgtatggatttagaaagcatgataaagttgaatactgcaatactatatgctttttgaagtcattgaggtttgctggtaatggtccgcttatggacattgacggtaatattttgaagtttagagagcgatatggaaaagctgatacgacgtcagtaaagaacctcaagagaatatcagctagaaaaaattgcttgtgtacaaaagtgactttcttgtgcacatcatga

SEQ ID NO: 1139 - DNA, 339 bp, unidentified
  misc_feature 1..339: note = Human oral metagenome
  source 1..339: mol_type = other DNA
atcaaattgccttgtatacatcagatggtgagcactcagtgctaaaggttaacagactaagctagtagaaatactagactacgatgattgagtgagatacatacacacctgtagttgccgcctcagactgctgctctgtggctaagtattaagtagagcaaaaagtacaaaaagagctcggtgtacttagcttaaaaacctctttcatcattgtcgagaggaagtcagattcttaacttggtaacagagttaagatatgcacaaaggtctattacaaatacctgcttacagcataaaatttgtgaagtccattagaaaggagtcatgtctatgagtttg

SEQ ID NO: 1140 - DNA, 1491 bp, unidentified
  misc_feature 1..1491: note = Ga0307930_1006096 JGI
  source 1..1491: mol_type = other DNA
atgatttacattgtagacgcaaggaataagataggccatccgaccaagaagcatgatatggtaggtcggttaatccgaaacgaaagagcgaagattattaaaagattgaacaaggatgttatgatagttcaattattaacaaaggttttttctaaaagcgaaaccattgattgtgaatttaggataggtattgatcctggatatgcaaatattggatttgcagtatttaaaatccatggaaacattatcacaaaacttattaaaggagaggcatgtttacgaacaaaaaagatcaaagaaggacttgatgccaagaggatgtatcgccgtagtcgaaggtatcttgctcgaaagaatattaaaaagaaatatggaacaggtcgagctaagttcaaacatcctgcttggaaaaatcgaagtaaacacaaatttcagcctacgcatcttcatgtaattcaatcacatgagaatgtgttggcaaaattattaaaattaattccaatcgaacaagttaaaatccatttggaatataataactttgatattcataaaatgattaatcctaagatacaatctttttggtatcaaaaagggttacagtttggttttgaaaacgtgaaaagttatgtgaggaatcgagataattatcaatgtcagatttgcaaaaaggatgttggtagtatcagaaacgaggtccatcatatcaaatggaagagtactggtggctcagatcgtcctgaaaatttaatactgttgtgtgaagtctgccacaacaaggtccataaaaagggattaaattgtccagacaaatctatttcagtaaacggataccgtaatgctggagttttaaactcagttatgggaacaatatggagtaggtttgaaaatcaatgtccagttcaagacacctatggttatattacaagtggtgttcggaatcgagacaacattattaaatctcatgccagtgatgccagcgttattgcatttaatgatagcttgggaagtcaaaacattgaagattattcttggaaggattataattctaaattaaatatgaatcaattccccagacatactcgatcattcacattaagacataccgaccgtagatatacaattttaaattctaatttacctgggaaaaagaaaactgtagtggcttggaatcgcaaacgaagggcgggccaagatcctaagaagcaaagccttgccgagttgaaacaatctcttatgattgatggaacgcttaactcaacagttatagttgcaattccagggcaaaaggtaatgagaagtttgatcactgattacacgatccgaaaaggtgatgttgtcaatgtgggctcaatgattaaagtttgtaaaggtgtgcaaaacaaaggtacggttgttacttttgaaaatgatttaaacccaaagaaattagatacatttggaactaaaaaatgtcataaaataataaacaattgtggattggtgacttattaa

SEQ ID NO: 1141 - DNA, 265 bp, unidentified
  misc_feature 1..265: note = Ga0307930_1006096 JGI
  source 1..265: mol_type = other DNA
aacctaaaggatttgggcttgcagttaatcgcaagctgatttaattcaggattgaacagacgtttaatcaaaggttcacttacggatgccactcccagtccgtagcaatggaggtaagcggagcattgcaagtcctcattgctgattagtaggtaacgaagatcagtattacttttgattaagtcgggggagacgaaccgaactattgaaccattcttagtttgcccgatcaatgggtttttattaagaggtaaaaatgatttac

SEQ ID NO: 1142 - DNA, 1587 bp, unidentified
  misc_feature 1..1587: note = Ga0182741_1016627 JGI
  source 1..1587: mol_type = other DNA
gtgcttcctcagccccggaccctggaaaccgcgccagcagacacggctggggtagccacgaaacggggcgcggtagacggcatccgcccgacaactggtgtgcaacatggtcgaggggagaccacccgcgagggtggcggcacgcccgatcctgttccggcaggtcgggcagcaggtgcgggtgaccgcaccatcaccagtcgagtgttcgtgctcgaccgcaagggtcggccgttgatgccgactcatcccgcacgcgcacgcgagttgctgcgcaagggtcgggcgcgagtccaccgcctgaccccgttcacgatccgactggtggatgtggacgccaccgaccccggggtggttgtcgatggagtggagctcggcatcgatcctggaagcaagaccaccggcatggccttgttcgtcaccgacgcatccggtaaccggacggcagtgtccctgatcgaactggtccaccgaggactcgcgatcaagatgtccctgtccaagcgggcggcgctgcgccggggccgccggtcccggaacctgcgctaccgcgcacccaggttcgacaaccgcacccgcaagcccgccgacggcctggacgtgtggctgccaccgtccgtgcggcaccgggtggtcaccactgtggcctggctggaccgactggcacggctggctccgatcacccgggtgcatgtggagtcggcgcgcttcgacacccacctgctccacgagcccgaggtcagcggcgtcggctaccagcagggcaccctggcgggcactgaggcacgtgagtatctgctagcgaagtaccagcaccggtgtgtctactgtgacgccaccggggtggtgctgaacctcgatcacgtccgcccgcgctcgcgtggcggcagcaaccgggtctccaacctggtgaccgcgtgcgtgccctgtaacgaggccaaggacaacctgccggtggagcagttcctggcccatgacccagcccgactggcgcgggtgctggctgggttgaagaagccgttgcgtgacgccgcagccatgaactccactcggcacgccctggtcggtgccatcgcctcacgcgggttcgatcccgtcactgccaccggtggtcgcaccaagtggaaccgcacccggttcggcgtccccaagacccatgcgctggacgccctgtgcgtgggtgaggtcgggggagtgtccggatggccgagcaccaccctggcggtgacagcaaccgggcgcggctcctacgcccgcacccgcagcgaccggcacggctttcctcggctgcgactgactcgggtcaagcgtcaccacgggttcgccaccggagacctcgtgcgggcagtcgtgcccaccggtaagaaggcgggcacccacttcggcagggtcgccgtccgcgccaccggcagtttcaacatcaccacctccgctggcaccgtccagggcatccaccaccgtcacgtccggctgctgcaacgagcagacggctacacctacgcaaccatgaaggagggagtcgggacgaggggcagcgcctatccctccccacggctaaagccgggggtatcccggcgcacccgatga

SEQ ID NO: 1143 - DNA, 301 bp, unidentified
  misc_feature 1..301: note = Ga0182741_1016627 JGI
  source 1..301: mol_type = other DNA
gtcagacaccccacggctgatgccgggggcttgaagccctcagcatcagcagtctgaccagaccgagacaccttgaaggaggtgactacgttgcacacgagcgaacagacccactccggggtgcttcctcagccccggaccctggaaaccgcgccagcagacacggctggggtagccacgaaacggggcgcggtagacggcatccgcccgacaactggtgtgcaacatggtcgaggggagaccacccgcgagggtggcggcacgcccgatcctgttccggcaggtcgggcagcaggtgcgg

SEQ ID NO: 1144 - DNA, 1311 bp, unidentified
  misc_feature 1..1311: note = Ga0164242_10000581 JGI
  source 1..1311: mol_type = other DNA
atgagtgttttcgttttggataagaagggtagggcactgatgccgtgcagtgaaaagcgcgcacggctcctcctgacccggaggaaagcgtttgtcaaagtgatgcagccgtttactattcagttgaaagaacggctgttggaggactcggagctacaatccgtcgagcttaagctcgatcccggttccagacataccgggatggcgctggtgagagacgcggaaggtatcaagtattgcttgaatttgtatcaactggatcattgcggtcagatgattcaccggaagctattgaggcgagcaatgtatcgaaaacagcgccgttcacgcaagacgcggtatcgacaagcacgctttctcaatcgccggaaacccaaagggtggcttgcgcccagcctgatgcatcgggtgaatagcacactgagctgggcgttgaaattccaacgctgggtaccgctcacgaagctcgtcgttgagcgcaatcgctttgatattcagaagctccagcgcccggagatcaaggggatcgaataccaacggggtacactctttggcatggaggtctgggaatacttactggaaaagtgggggcatcgctgtgtgtactgcgaggctcctgaccgtaaattgacgattgatcatgttacccctcgctcacgcggaggcagcgatcgcgtgagtaaccttgtaccggcctgcgagtactgtaaccagtttaagggcaataagcccgttcaagaattcctgaaaaggcatccggatcgcttgaagcgcattctggaagggcttaagcaatcgctaaaagacgccgctgctgtaaattcaacaaggtacaagctcattgaggttttcgaacaactgaagcttccaattgaaaccgacactggagccatgactaagtggaatcggcgtcggttaaatgtgccaaaaacccactcacttgatgcgctttgcgttggagatgtgcgatccgtttctgattggattggcaagcccactcaggtcattgcatgctacggtcgcggtagatatcaacgcgtcatcttagataggttcgggttccctaaggctaatctaacgcgcatcaaacgtccgtacggattcggaactggagacatagcccaagttttttcagaggcacatgtgaaacgtcagttccctttccagatctccaagatgcatagattgacagttaaaatagatggattcttccaactggcgcggcgtaaaaagatagtgaagctatcctaccgctatcttaaaatgaagcagcgcaataacggctatttcattacgctgcaacgtttctaa

SEQ ID NO: 1145 - DNA, 268 bp, unidentified
  misc_feature 1..268: note = SL_8KL_010_SEDDRAFT_10003558 JGI
  source 1..268: mol_type = other DNA
tcaatgaagcgtctttcactgacaaactacacacctaggtttccgaacctagcttcaccaggaaaccagactcagcgtgaccgcggtcacgctacgatacccgtgaaattaggtacccctgcgtgcctcctcagcgttgggctctacgggtgtatgttaaacaggcctacaggtttaagccagtgcatacatcgttaaaccacgggatatctttgtcgagaggacctttacaggatccgtaaggattcatggagaaagaaccatgagt

SEQ ID NO: 1146 - DNA, 870 bp, unidentified
  misc_feature 1..870: note = Ga0209697_10006283 JGI
  source 1..870: mol_type = other DNA
atgaaaatatcaagagataagcaacaggttgcagacaaaccagagcagaaaaccgctgtggtattcgtccgcaatatgtggggcaaagcaatcaaccccaccaagcctggcaaagcttatcgtcttgtaagagacggtaaagcagtgccggtttgtgcaaagccatacacgatccagatgcttggacactgcggaggatctgttcagccgtacagactcggactggacagtggttacagtaatgttggggcttcggttatcaacgaacggactggagttgaagtcctttcaatggaaattgaacttcaaaaagggcaaaaagatcgtaacaccgatcgcaaaactcgccgtcacggcagaagaaacaagaagtgccgacatcgggcagctcggtttgataaccggagaagggccaaaggcaaactggctccgagcattcagcataagctggacactcatgtcagaatagccaccgcccttatcaatgaaaagttcgtgcctatcagccgggctgttgtagaaggggctcagttcgatattcagaagatcaaaaatcctaatatcgaaggtgttgactatcagcaaggtgaccaagctggcttttggaatctccgtgaatatgtttttcacagagatgagcacaaatgccaaaatcctgattgtaaacacaaaaaggagaagaaccttcccctacaagtgcatcaccttggcttctggaaaggtgatagtactgaccgtcccggtaatctgatcacgttgtgtgttcattgccataggcctcagaaccatgcaaagaaaggatttttatacggatgggaaccaaaacttaaaaacttccgtcctgaaaccttcatgagcaccatctactag

SEQ ID NO: 1147 - DNA, 419 bp, unidentified
  misc_feature 1..419: note = Ga0209697_10006283 JGI
  source 1..419: mol_type = other DNA
cccgcatgaaaccgcggcttgaggtgggggcttgttacgagcagtacggtatttcgtagcaagctcggttgattagcctcagtagcgtgtcgtgatgacattgctactacgttttctgagaatctcttccagcagcatcggaagagtgtaataggcaccttgggatcctccacacgtcccaggcactggagaaacaacgaatctgttgcaatccggttggttgtcaaatgacagctacttgcggtttagtgattaaacatcgctttttgggaatggcgaagtgttgctaacaaaaacctcagaaaaacattggcgaagtggaccaatggatgccttcgggcatccacacgaggcttacgagtcctcgttaaaaatcaaaagaaagggccgtctatatgaaaatatcaagagataagcaa

SEQ ID NO: 1148 - DNA, 354 bp, unidentified
  misc_feature 1..354: note = Ga0137371_10000193 JGI
  source 1..354: mol_type = other DNA
atgccatgtcaaccacgcaaagcacgccttttactgaaagggggcaaggccaaagtggtgaagatggtgagaaggaacaatcgacaactacacaaagcgaccatcagaaagggtggcaagaggcagcgtaacactgcacccaagtatgtgcatggttttcgcttgtttgattgtgtgaagcatcaaggacagacctgctttgtgtttgggaggaggagttctggttacttcgatctacgtacccttgatggtgccaaagtccatgccagtgccagttacaaaaagttggctgttgtccagaaggcttcggccttgttagtagaaaggagggcggcgtttcctcctgtctcgtaa

SEQ ID NO: 1149 - DNA, 232 bp, unidentified
  misc_feature 1..232: note = Ga0137371_10000193 JGI
  source 1..232: mol_type = other DNA
gtcaagaacccaatccccatgatcggggacgggcttgcagaagtcctgcttgactagcctgagtgcaaactacgttgggtgagtcatgatacctatggatgcttactctagtctgtagctctatcgtttacggttaaaagttctgaggggaggaacggtgctgtaagtgtaaaaagctcatccaacattggcgaagagtacctgactccgaaaggaggtaaacgctttgttc

SEQ ID NO: 1150 - DNA, 1536 bp, unidentified
  misc_feature 1..1536: note = Human gut metagenome
  source 1..1536: mol_type = other DNA
atgtatgtagtctatgtattagatgaagaaggcaaaccgcttatgccgacaaaacgcttcggcaaagtcagacggatgctcagggacaaacttgcaaaagttgtatcagtaaagcctttcgtaatccagcttctatataagccaaaaacacatatcacccaaccgttacacggcggcacagatcccggtcgtaaaaacatcggcatgtctgtaatcaatgacaaaggagaaatcctctactcctctaccactgaatcaaggaaccaagaaatcccgaaacttatggcagaaagaaaagctcaccgtcaagcatcacgcagaggcgaacgtctccgcagaaaacgccgggcgaaaaaatataaaacaacaacaactttcccggaaggcagaaaactgctgggttatgaaaacggagtccttgctctgaaagatatcatcaatactcaggctcgttttaataacaggaagcgtcccgagaattggataacgcctacagtaagacaatgcattcaaacacatatcagccttgtcaggcagatatgcagattcttgccggtaacagactggagtatagaacataacaaattcgcttttatgaaaatggaagacggtactgtaaaaggtacagactaccagaatggcagactaaaaacctataaaaatgtgaatgactatatctggcatctgcagaacggaaaatgcgcaatctgcgacagcaaaatagaacactatcatcacatcgtacaaagaacaaaaggtggcagtaaccgccccgacaatataatcggactctgtgaatcctgccacgctaaagtacatagtggagaaactagtctcaaagaaatcggcgaaaagaaaaaatacgcccatctttccgtgctgaatcaagcaataccgttcatctgctccgagctggaacagctctttggtgaagataatttatatacctgcagcggttatgagacttatacatatagagaaatgtataagctggacaaaacccatgatatagatgcagcctgcatagctgctataccgcacaacatagaaacaccgatacaaaaagtcaagacctataaaatcaagcagtaccgtaaccataacaggcagataatccattgccagaaagagcgtacctacaaactcggcaaggaaaaaatagccaagaacaggaaaagacgtacagaccaaaaagaattgtctttcaacgaatggtataagatacaaaagaagaactgcagcaaaacagagcttgcagaaatcatgaaaaagctaacagttataaaaagcatccgcgcttacaacaacatgaaaagattaaagcccggcagtgtttttatatatgcaaagcctgaaaccaaaaaagctgaaaagccagagcaaaagcataagcaagcaatcaatcacagcgggaaatacattttaagaggtgctattaccaatggaaaatactacaaagccgaagactataataaaaacaatttctcggcaaaaaactgcagatttcaatacttcaagtctctgctctacatctaa

SEQ ID NO: 1151 - DNA, 209 bp, unidentified
  misc_feature 1..209: note = Human gut metagenome
  source 1..209: mol_type = other DNA
gtcaattacacccacctaaagaggtgggtgcctgcaagcttgcttgcaggcaaaaaaggtaattgagcagagacatgatgcagcgctcactacggggtaatgccaagccccgtaccctggttacagctgcacctagtctatggcactcttacattcccttcttagggaatgaattatcttatttttaaggagaaccaaaaatgtatgta

SEQ ID NO: 1152 - DNA, 1698 bp, unidentified
  misc_feature 1..1698: note = Ga0079226_10027342 JGI
  source 1..1698: mol_type = other DNA
ttgcatacaggcgaacagaccgaccttggggtgcttcctcagctccaagctctcgaacccgcgtcagcagacacggctggggtagcttcgaaacggggcgcgggagacggcgggcgtgcccgctcgacaaccggtgtgcaacatggtcgaggggagaccgggcgcaaagccggcgtggcaccttcgggtgcggcccgtgagggcaacccgaccaccggggttgcggtggtgttcgtggtggacaagcaccacaagccgttgcagccgaccaccgagcggcgggcacggaagttgttgaaggcgggccgggcggtggtgcaccgccggtacccgtttgtgatcagggtcaaggaccgcacggtgggcggctcctgtgtcgacggtgtacaggtcgggatcgaccccggctcccgccacaccggcatagccgtattcaccgagaaggccactagtaaaggagtggtgcggaccgggttgtggctgggcgagttggatcaccggggccagcgaatcagccgaaacctgtcatcgcgggcggcgctgcgccggggccgacgcagccgcaacctgcgataccgcaagccgaggttcctgaaccgtcatccggccccgtgtgactcgtgcggagccaacgctcaaagtggcaagcgactgtgccgaccgtgccagaaccttccccgtgccgagcgtgaacgtggggcgcgcccggcacggctggccccgtcgctgcggcaccgggtggacactctcgcctcctgggcgaacaggttgcagcggtgggcgcctgtcaccggctggcatcaggaattggtccggttcgatctgcatgcgatgcagcgcccgggcatcaccagtgtcgagtaccagcagggcaccctggccggcttcgaggtccgcgagtacttgctgtccaagtggaaccacaagtgcgcctactgcggcgcgtccggagtcggccccggctcggtgccgctgaacatcgaccacattcacccgggcagcaagggcggctccaaccggatctccaacctggccctggcgtgcgtggcctgcaaccaggccaagagcaacatgccggtggaggacttcctggttggcaagccggccgtgctcgctcgggtactggcgcaggcgaaggcgccgctggccgacgcagcggcggtgaacaccacccggtgggccgtgtttcacatgttggcggacaccgggcttccggttaccgccgcctccggcgggcgcaccaagtacaaccgcacggtcacgggcaccccgaaagcgcacgcgctggacgcgttatgcgtcggcgttctcgaccgggtgaagtcgtatccgtccacgaccatggtgatcggctgcgccggacgcggcacctatgcccgcacccggtcggacaaacacggcttccaacgcctgcacctgacccgcaccaaacggcactacgggttccagacgggagacctggtcaccgcagccgtacccaccggcgccaaggccgggatccatatcggcacggttgccgttcgagcacgcggaatgttcaacatcaccaccgccgccggaaccatccgcgacatccatcaccgacacgtccgcctgatccagcgggcggacggatacacctaccactcgacatcgacaccacgcgtccggctcctctccaccgcgaacgacagagtacccgccggacagaagaaatga

SEQ ID NO: 1153 - DNA, 295 bp, unidentified
  misc_feature 1..295: note = Ga0079226_10027342 JGI
  source 1..295: mol_type = other DNA
gtcacttaccccgtcgtgaagggcgggggttgtagccccgttcggcaggactgagtgaccagactgagaaaccctttgaagggagggaatctacgttgcatacaggcgaacagaccgaccttggggtgcttcctcagctccaagctctcgaacccgcgtcagcagacacggctggggtagcttcgaaacggggcgcgggagacggcgggcgtgcccgctcgacaaccggtgtgcaacatggtcgaggggagaccgggcgcaaagccggcgtggcaccttcgggtgcggcccgtga

SEQ ID NO: 1154 - DNA, 1164 bp, unidentified
  misc_feature 1..1164: note = Ga0315295_10106663 JGI
  source 1..1164: mol_type = other DNA
atggctacgaccaccacacgtcagaagacccaccagtccgtgcttcctcagcgggctgctctggaatccctgtcagcagacaccgttggagtaacgacgaaacggggcagggaggctcacgtcacgggaaaccgtggcgtggcagcgggtagtgatcatggtcgaggggagaccgtacgcgacgatcgccgtcgcgtacggcgtcacggacaaccgggtcacaccggaagttccgtcaccggtgggggtgaccccaccaccacaacaactgaatcaacaactgaacaggttcgtttcaccgcgggaaaggttttcgttctcgaccgccacggtgaaccgttgatgccgtgccacccggcgcgggcacgtcaacttctcgacaagggccgcgctcgcgtggcccggatgtatccgttcaccatccgtgtggtcgatcgcactgtcgccgacagtgaggtcgatggtgtggtggtgaaactcgatcccggcagcaaggcgaccgggatctcggtggctcgcgtcgatatcgacggcgggatcactggtctggtggcggtggaagttcgccaccgcgggcatcagatccaccagaaactggtggcccgcgccgcgttgcggcgtggccggcggacacgtaactgccgtcatcgggcaccgcggtttctcaaccgtgcacgtccgaaagggcggctggcgccgtcgctgcagcatcgggtggacaacgtcaccggctgggttgaccggtttcgccggctggcaccggtcaccggtatcgcaatggaactggtgcgtttcgacacccagctactggagaacccgaacatcagtggtgtggagtatcagcagggcaccttggcgggtttcgaggtcaaggagtacctgctggagaagtgggggcgcaagtgcgcctactgcgacatcaccggggtggcactcaacgtcgaccacatccacccgcggtcacggggtggaagtcaccggatctccaacctcaccctgtcgtgtgttccctgcaaccaggacaaagacaaccagcccgtcgagcagttcgtcaccgatcccgcacggttggcgcgcatcctggcagccgccaaacggccgctgcgtgacgccgcggcggtcaacaccacccgctgggcactgtggcgaaaactggctgccacc

SEQ ID NO: 1155 - DNA, 315 bp, unidentified
  misc_feature 1..315: note = Ga0315295_10106663 JGI
  source 1..315: mol_type = other DNA
gtcaaccactccgccctgaaggacggagcttgtgggggcttgttcccgacaagttcctgacatccgggatcggttgaccagaccaagccatcactgaaaggaggcgatcaccaagatggctacgaccaccacacgtcagaagacccaccagtccgtgcttcctcagcgggctgctctggaatccctgtcagcagacaccgttggagtaacgacgaaacggggcagggaggctcacgtcacgggaaaccgtggcgtggcagcgggtagtgatcatggtcgaggggagaccgtacgcgacgatcgccgtcgcgtacg

SEQ ID NO: 1156 - DNA, 1380 bp, unidentified
  misc_feature 1..1380: note = Ga0265297_10033497 JGI
  source 1..1380: mol_type = other DNA
atgtatttcatagtagatggaagaaacaatcttcagcatccaacgaagaaacatgacatgattattcgctggatctcaacaggaaaagctaaattcattggaagagatatagttcaagtatttaagaaattcgacagatctaaaactatcgactgtagatttatcataggtctagatcctggatacaaaaacatcggttatagtgtttttaaaatttataagaatcagatccagaatattctgaatggtgaagtactaactagaacttctgagattactaagttaatctcagaaagaagaatgtatcgtagaagtaggagaagcaaacaccgagagaatattctgagaaaatttggaagagcaaaatttaaagctcctagatggaagaacaggaagaagaaaccatgggctcctactcacatgcatctgtttcaaagtcatctaaatcttcttcagtgcatcttcaataggatagattataatcaatcagagatagtattagaacattttaaattcgattctcaaaaagctttagattcaactgtctctagctggaagtatcagaaaggtcctcaatttggattcgaaaatgttaaagcatacgttagagctagagataattataaatgtcagatatgtggtgagaaattattaagtcttagcgtccatcacatccaagagagagctgatggtggaagtgatagacccgagaatttagttactctgtgtcaaagttgtcatttactccttcatcaaactctagctgaatgtccaagaccctctaaagcttctccaatgagagatagtggagtattgaacagttgtatgaactacttagttaattatatttctccagcttatactatcactggatctgacactgccgctctgagacactactataacattgagaaatcacacgttaacgatgctaaagtgatagctttatctaaattagatctagaaaatttcaattgtcaagacttatccaatactgtcaatcttaaacagtttcgtcgtcacacgagaaactgtgttcagagatacgaagatagaaaatacatctgtgacggatttacagttgcttggaatagaaaatctagatctacacaggctgagtcgaagccatctttacaagagtttaaacaagaatatccagaagaaaaagtagtagctaaacctggtagaataatctactttagaactaattctcaagctaagtttagacctggagacatctttaaacatcagaacattaattatgttctcaagcagtgggcttctactcaaggaactgtaacatctgaaactgaaattaaatttaaaatcagaaattgtcgcaaaattagaaacaattcaggattagtaaccacccgctaa

SEQ ID NO: 1157 - DNA, 282 bp, unidentified
  misc_feature 1..282: note = Ga0265297_10033497 JGI
  source 1..282: mol_type = other DNA
gtcaactaccacccgctaaagcaggtggcttgaaagagccaacgtagctttagttgttggggttgaacaggcactgggtgtggaaacacacccaaggatctgatctagtgttcaccatggggtgccactcccagctccatgcaactggaggtaacagatagtaatatcttaagtcctcattgctgtcatagtaggtaacgaagacagtattacactagaccaagccgagggagactaaagacaggacctgatctataggtcactaactaggagaaacagatg

SEQ ID NO: 1158 - DNA, 984 bp, unidentified
  misc_feature 1..984: note = Ga0256842_1000027 JGI
  source 1..984: mol_type = other DNA
atggtttttgtattaagcaagaataaaactcctttagccccaactagcgaggctaaagctagaattttactaaaaaaaggaaaagctattgttcacaaagtttatccttttacaataagattaaaagagaataaagagtgtaaaaaaatttttgaaataaaatttgatgtaggtgcatcagttacaggagtagctatagtagatgcagttaaatgttttttctttgcagagatagtgcatagaggagcagtaattaaaaaagcaatggactcaaggagagcaataagaagaagtagaagaaatagaaaaactagatacagagagccaagatttgataatagaactagacctgaagggtggttacccccaagtgtgaaatcaagagcagacaatgtaataaattttgcaaaaaaatacgctaaattaatacctattttctccgtagctgtagagaaggatttatcacatctaaagcctaaaaaaacaccaaaacaggcatcaattgttcaaagtgctagaacttatactataaaagagttaagtagaaactttgatgtaatagtaggagaggggtgggaaacttacgcaaatagaaaagagcttggtttaccaaaacaacactactatgatgctatgtgtattggaaaagaatataaatatgaaatagtaacagataaagttttagagattaaagcacaaggaagaggaagccgacagatgtgtcgaatggatagatttggatttcctagaactaaagctaaaagctctaaaatagtaaaaggtttccaaacaggtgacattatgaaagcaatagtaagcaaagggaaaaagataggaacttaccttggaaaagtggctgtaagagctagtgggaattttaacattactaccacaaaaacgactattcaaggtattaattataaatactgtagaacaatacaaaaaggagacggatatgcatacgcaatatcgacaatcaaatag

SEQ ID NO: 1159 - DNA, 273 bp, unidentified
  misc_feature 1..273: note = Ga0256842_1000027 JGI
  source 1..273: mol_type = other DNA
gtcaataacctctcccaatccttgacggatatggaagaggcttgattgaccagactgagttgctagaaatagctaactacgatatttatgttaccacaccttggagtgcttctccagctccaagctctgtgtaggctctttaagttgggttaaagccctgtgaacctagggacggtttgccatagcaaacaagcattaatatcattgtcgaggagagagtcaaaagaccgttaccactgcaaggtgagttaatttgaaaaaggattttaaatg

SEQ ID NO: 1160 - DNA, 1281 bp, unidentified
  misc_feature 1..1281: note = Ga0209123_1000186 JGI
  source 1..1281: mol_type = other DNA
atgaacggagtatttgtcatcagtaatagcaaacagccgcttatgccgacctcgccggccagggcacggaagctcctatccggaggcaaggccgctgtgttccgaagttatccattcacgatcatcttaaaggatcgtgcaatcggggttattcaaccggtcagggtgaaaatcgatccggggtccaaggaaacaggcatcgccttggtcaacgaagtcacaatgaaagttgtcttcgttatggtattggttcaccgtggattggccatcagcacgatattagcatcccgtagggtactccggagtggccgcagaaaccgtaacaccagataccgcaagccgggattggcgaacacgacaaaacctgagggttggctggcgccatcgctattacaccgggttcatacgacgatgacctgggtcaggaggctttcttgcctagcgccggtcgctgcaatctctcaagagctggttaagtttgatctccaaaagcttgagaacccagatataagcggcatcgaatatcagcagggcacgctggctgggtatgaggttcgggaatatcttttggagaagtggcaccgcacctgctcctactgcgatgctaaggatatcccactccagattgagcacgtaaaagccaagaccaacggcggcaccaaccgtatcagcaacctgacattggcgtgcgaaccctgcaacacggcgaaaggaaaactctcaatcgaagtttttctggcaggtaaaccagatcgcctgaaaaagatcaaggggcagctaaggcaaccgctcaaggacgcaaccgcagtcaatgcaacgcgttggcgtttgttcgagtccctgaaattaacaggactgcctgttgagaccggatctggaggtagaactaaattcaaccggacgattcaaggatacggcaaagcacattggatcgacgcagcctgcgttggagtctcgggcgccagtgtcatcatcccttcgggcctccaccccctggtcgccaaggcttctggtcatggcaaccggcagatgtgtggcacagataagttcgggttccccatcaggcatcggactgcccagaagcaatttttcggttttcagactggcgatatggttacggccaacgtccctaaagggaagaaaattggaatacataccggccgtgtgctggttcgtgccaatggtaatttcgatattcaaaccggtacaggtcgtgttgccgggatcggccacagacactgcaccatggtccatcaaaaggatggctatgcatatcaataa

SEQ ID NO: 1161 - DNA, 284 bp, unidentified
  misc_feature 1..284: note = Ga0209123_1000186 JGI
  source 1..284: mol_type = other DNA
gtcagataccccacggctgccgggggcttgaaaaagctctaatccgaccagccacagccaccaattcaacggatcggattgacggggctacgattaacggtcatgaccggaggatatgcattgccagtatcccgatggtcgctataaggaagaaacggcgaagggtaaaccgcgaacctgaccagcattgacaagctgttaatcattggcgaggcacacattactcccacaagggaagacggtccgtaaggaccaaacctatcaaaggatgtcggatgaacgga

SEQ ID NO: 1162 - DNA, 1950 bp, unidentified
  misc_feature 1..1950: note = Ga0373956_0001933 JGI
  source 1..1950: mol_type = other DNA
atgtttgtccctgttgtagaccagaaccagcagcccatgatgccgacgacgcctgcccgcgcccggcgctggatcgccagcggaaaggcgaccgctttctggagaggcggtctcttctgcgtccggctcaatcaggaaccatcgtcgcgcgtcgtgcagccggtagcggtggggattgacccgggatcgaaacgggaaggctacagtgtcatctcggcggcacatacctatctcaatatccaggccaaagccagggtgggtgtcaaagaagcagaggagcaaagcacgcggatgcgccgaactcgccggaaccgcaagacgccttgcaggcagccacgtcccaaccgcaggcagagcaagaagacactgccgccatcgaccagggccaggtggcagtggaaactgcgggtggcccgttttctatgctcgctcttcccggtcagcatcatcgcggtggaggacgtggctgctgcaaccaggccgggcaaacggcgttggaatcgctcgttttcgccgctggaagtggggaagcactggttttacgaggagatccgcgcgcttgctcctctggaactcgtgcacagctacgaaaccaaagctgtgcgtgagcagttggggctcaagaagacgagcaagaagttggccgaggtctgggaagcgcattgcgttgatgcctggtgcctggcctaccgtgcggtcggtggcaacaccgccccggatcatcggggtgtggtcgtcttcgcgccactcatctggcatcgccgccaattgcatcgctttcaactggaaaaagggggcatgcgcaagccctatggcggaacactctcacaagggatcaaacgagggacgctagtccagcatccgaggtggggcaaggccctggtgggtggcacgatggatggcagactcagtctgcatgatccaggaacatacaagcgactgactcagggcgcgaaggtggcagagtgtcacgtcgtgacggtgttgcgatggagaacatgcttgcttccgctccatcccctccccaagaaaagacgtgcttcctccccggcttcaaaagcgcgggttctgggcaagtcgcgtttgatgagcgtaactctattgcgtgagggcgagcgagaggcaagcatgcagaagcttgctggcgcttcgtcgctctcgtttgctcataaacgcgtgtggacgtcaaaaactgcttcgcgtctgttcaccgtcctggcacctgtgctgctcggcatggtcctgctagggggctggtactttagcacgtccagaggactggttgccacctacgagctgccacctccatctgatgtctggacctctctgtcggttgggttcggctccggcctttttctgcatatggcctgggtgacgctgcaggagagcctgggtggctttctgctggcggttatgatcgccctgccggtgggcttcggtctggcgaaatggcgcctgttcgcagcgacgatctacccctacctggctgccggccaggctattcccgcaattgtgatcgcaccattcctggttgtctggatgggctatggcatgggacctaccgttgtgctctgcctcctggtggtgcttttccctatgatcatcactactgctctgggctttcagacgcttgatcaggcgctggtggatgcagcgcgcgtagagggggcctctttgtggccaatgctcaccaggatcgaattgcctctggccctgcctgcgatcatggcagctgtgcgcactggtctgactctatcagtagttggggcgctggtcggtgaatttgtgaccaacaccgatcagggactgggggccctggtgcagattgcgaagaaccagtatgatgtgccgctgatgttcgcgaccgtgctggtgctggcaatcatggcgggggtcttttacgggatcacctggggcctgaccaggatatctgagattctctctacctag

SEQ ID NO: 1163 - DNA, 239 bp, unidentified
  misc_feature 1..239: note = Ga0373956_0001933 JGI
  source 1..239: mol_type = other DNA
gtcaagcaccccggcatgtcatgccggggcttgtgaagccttccgactcgccagcggaagacgagcaagcgaaagagcgagactagcttgtccaagctctggcaacggggcgattgaaggaagctgaatcacctgggcgtggcagcctccagaacgaacaggacgcctccctaatcttgttccacttcggtgatcagcagcgaagggattatcctacccgaaaggggcttatcgcacat

SEQ ID NO: 1164 - DNA, 732 bp, unidentified
  misc_feature 1..732: note = Ga0316622_100118550 JGI
  source 1..732: mol_type = other DNA
atgctcgtgtacgtgcaggaccaggaagggaaaccgctcatgcccacccgccgctgcggggcggtgcgccgctggctgaagagcggccgggcccgcgtcgtgcggcgcgaaccgttcaccatccgattggtggaccgggcgggtgggtacacccagcacttgcaggccggcgtggacctgggcacagcgcacgtcggggtagccgtcgtgtccgcccaggaggaagtgttctccggcgagttccggctgcgcacggacgtgagcgggctgctcacggagcggcggcagttccggcgggcgcggcgtagccggaagtgccggcaccgccctccgcgcttccgcaatcgccgccgcagggacgaactcgccccctcggtgcgggcccaggtggcggagacactccgggtggtgcgactggtggagggcctcctgccggtggccgcctggacgtttgagatcggcaacttcgacccgcaccagttggtccatccggacgtgcggggggtgggctaccaacagggcgagcagtacggcttcgccaatgcccgggagtacgtcctgtggcgggaccgccacacctgccaggcgtgccgagggcagtcgggtgatccgcgcctgaccgtccaccacctgcggcagcgccaagagcgcgggagcaaccggccggccaacctcatcacgctctgccggacctgccaccaacggcaccaccagggaccgccgctccccttg

SEQ ID NO: 1165 - DNA, 291 bp, unidentified
  misc_feature 1..291: note = Ga0316622_100118550 JGI
  source 1..291: mol_type = other DNA
gtcaaccaccacccgcttcagcgggtggcttgtggggaagcccacaagccacgggttgaccagccccagccagggggccacaaggccccaccgggctacgttcaggaggtcacgacacccggtcgtaaacgctccagcggccggcaactgtcgggtaaggtcaaaagccccgcgtggtaggggcggtgccttacccagggcaagcctcccgaacatcggcgaggagcaccacacggcccaacggccggcttaccccgcaaggggtagaaggaaccagcgatgctcgtgtac

SEQ ID NO: 1166 - DNA, 1287 bp, unidentified
  misc_feature 1..1287: note = Oscillatoria sp. pcc 10802
  source 1..1287: mol_type = other DNA
atgaaggtttttgttttggatacaaatcgaagacctctcgatccgacgactcctcgtagggcaaggaagctgctcaagggaggaaaagcagctgtttttaggctgtatccctttactgtaattcttaaacgggctgttgacagtgagccagttcagccactcagactgaaaatagatccgggttccaaaaccaccggattggccattgttagcgaaaggaccggcgcagtcgtttgggcggcagaattgacgcatcggggttttcaaatccgtgaggcattaaatagccgcaaggtgaaacgacgcaaccggcgctaccgaaagactcgctatcgcgcacgaagattcaacaaccggcttcggaaagctggatggttgcccccaagccttaacagcagggttgagaatattgttgcctgggtgcgccggctgcggcgttttgcgccaatcagcgctatttctcaggagttagtcagatttgacacgcaagttatccaaaacccagagataagtggggttgaataccagcagggtgagttacaaggctgcgaggttcgtgaatacttgcttgagaaatgggggcggaagtgcgcttactgtggggccaaagagactcccctagaagtcgagcatatttatcccaggagtaaggggggaagcaattgtgtttctaacctcactttggcttgccacccgtgcaacgagaaaaagggaaaccgagatgtagcggattttctgtcgggcaaaccagacctactgcagcgcatcctctccgctgccaaagcgcctttgaaagatgccgctgctgttaactcaacgagatgggcgctgtatgaaggtttgaaaaatacaggattgccggttgaagcaggttcggggggactgaccaaatataaccgaaaacgccttggcttaccaaaaactcactggcttgacgccgcctgtgttggcgagtcaactcccgaaaatttggatgctagcaaaatcgaaaagccactgttaataaaagcgacagggagaggctgccggcagcgcgttaacccagacaaaaacgggtttcttatttcccataagtccagagctaaaacttatcagggatgggcaacgggtgatatcgcacgagctgacattccgaaggggaaatacaccggcatccacagagggcggattgcaatcggtcaagacggccagttcaaaatacaagtggcccacaagaagcgattcagcgtcaattacaagtatttaacgccaattcaaaaaggggatggctacggttatagcttctag

SEQ ID NO: 1167 - DNA, 328 bp, unidentified
  misc_feature 1..328: note = Oscillatoria sp. pcc 10802
  source 1..328: mol_type = other DNA
gtctgacctaattcctgacaaaggaggtgggttggagcgcggcggacaatcgcgatccactaaaggcgtataaatcgtaaattcggtattattacgtcagccgaaaggacgggatcgccagtttcagcctgggttttagaacgaccgggctacgttggggaagtcatgacacccacaggtgcggtgccagcttgtggctctgtcgctcagcattaaaaggtgtagttagtggaagccagtgtgttgatcttaaaaagcttctccaaccttaacgaggcaaacattacccagcaatgggctgacctgtgagggtttaatttgcatgaag

SEQ ID NO: 1168 - DNA, 711 bp, unidentified
  misc_feature 1..711: note = Ga0101763_1138JGI
  source 1..711: mol_type = other DNA
ttgggcaatggagttgactcacatagggctacaaataaagactgcactcgaaaatcgtcgagctgttcgtcgcaatcggcgcaatcgaaaaacgcgatcgagaaacctcgattcaaaaatcgcaagcgccccgaagggtggttaccgatcagcctaatgcacagagtttttggagtcaaaacatgggcagatcgcctaactaggttagcccctgtaggttctgtcgttcaagagttggtaaggtttgacactcagaagatgcaaaacccggaattatcgggagtcgaatatcagcaaggagagttgtttaggtatgaagtgcgcgaatatctactagaaaagtgggggcgaaaatgcgcctactgtagtgtttctgacgttccaacaggaaccggagcacaaacaaaatttaatcggtgtcgtttaaatctgccgaaagaacattggattgacgcagcctgtataggtcaggttgatactgtaaagttagcaactacccaacccttgcttattaaatcaactgggtacggcagtcatcaggtcattcaaatcgacaaatacggctttcctcgtaagggctatcaagtcaagcttcctgtcaaggattggaagactggtgacattgttaatgtggttgctgataaaaatgctggattaagaggcgtcaggctaaaaactgttcgtgccaaaactcttgcggcatccggttaa

SEQ ID NO: 1169 - DNA, 182 bp, unidentified
  misc_feature 1..182: note = Ga0101763_1138JGI
  source 1..182: mol_type = other DNA
agctcacccgcaagggtaaacgttattccggtcatgacaccttggggtacgtggctagcgacaagctctgtcgggtgtcgttaaacaggcaaccgggtgcgctcattgccagtgcggcattcgcaaaaagccgtgtatccctcgcgaagccaacgtgttgagacgcaacaatgtctaattac

SEQ ID NO: 1170 - DNA, 1485 bp, Moorena sp.
  source 1..1485: mol_type = other DNA
gtgcagacaaggcacgggtggccacgaaacggccccgccagctacgcggggttgcaacatggtcgaggggagatgtgccgcgaggcacacgtcaccgccgaaaggcgtgaacaaaggagtaatccaattcaatcacaggtttttgtattgaaccaagaaggacagccactgatgccctgccaccccgccagggccaggcaactactcaaaaaaggacgggctgtcgtccatcgcgctgtacctttggtgacccgtcttaagaatcgcaccaaagccatcgtgcagccggtgcgccttaaagtcgatccgggcagcaaggctacaggcatggcgctggtgcgacaccagccctcagactctattaccgtgctgagcctttttgagttacagcaccgtggtcaccagatcagtgagtcattgacagcccgccgtcacatgcgtcgtcggcgcagaggcaacctgcgctaccgcgcaccccgcgttcttaatcgcgctcgctctgccggttggcttccacccagcctacagcaccgcatagataccacgctggcctgggtcaaacgccttcaacgctttgcccctattaagaacatcagttgcgaactggtacgcttcgacatgcaggcgatgcagaatccagaaattgacggcaccgcgtaccagcaaggcacgctgactggttacgaagtgcgtgagtatctgctcgaaacatttggcaggcagtgcgtctactgcgaggccaaagacaccccactacagattgagcatatccagcccaaggcactgggcggcaccaaccgaattagtaaccttgcgctggcgtgccggtcttgcaaccagaagaaggctgcgcaggcgatcgaaaccttccttgctgacaagcccgagataccgcgccatatacggaagcaggccgagcgcccactcaaggatgcggcggcggtaaactcaacgcgctgggcacttacccaggcgctgcgttcaaccggcctaccgctggagctggcctcgggtggccgcacgaagtacaaccgcgaacgccttaatgtgcccaagactcatgcccttgatgctgcgtgtattggcgagttccgtgtactgaaaggctggcggaggagcactttgcacctccgctgcacggggcgcggcaggtatcaacggaccagactcagcaaagacggctttccggttggctacttgatgcgccataaacgagtcaacggcttccaaacaggcgatctggtcgaggcccacgtgccctcaggcaagaaggcaggaacctaccaagggcgcatagcagtacgcgtctcgggcagcttcaacatcaggacagacgaagaagttattcaaggaatttcgtatcgatattgcaaactgattcagcgtggagatgggtacggatacattgtgagacctcaaatgacaagccacaaagcacagagtatgcggcctgctttgaatgccgcgctattccatccacaatga

SEQ ID NO: 1171 - DNA, 299 bp, Moorena sp.
  source 1..299: mol_type = other DNA
gtcaaccgcccctcccctaaaggaaggagcttgcagaaaggattcccggtaagctcgaggttgaccagaccaagaatgggtacgtcccaatctacgttgcgactagagctaaagaaccgaccctgggatgcttcctcagtcccgggcaatcgaaggcggcggtgcagacaaggcacgggtggccacgaaacggccccgccagctacgcggggttgcaacatggtcgaggggagatgtgccgcgaggcacacgtcaccgccgaaaggcgtgaacaaaggagtaatccaattcaatcacag

SEQ ID NO: 1172 - DNA, 1392 bp, unidentified
  misc_feature 1..1392: note = Ga0209639_1000561 JGI
  source 1..1392: mol_type = other DNA
atgcatgtatttgtattggatacgaacaaaaaaccattatcgccgtgtcatgcggcggtagcacgaaaacttcttaggcaggggagagctgcaatctataggcagtacccatttgcgataattctcagagaaattaaacaatgtgcagaacccacaaagttacgcatcaaaatcgatcccggttcaaagactacaggacttgtagtgctgtgggaaaggaataatacgggtatcgtaatatgggctgtagaactcaaacaccgtggtcatgccatcaagaaattattagataagcgtagggcgaatcggagaagtaggcgaaacagaaagactcgatatagagcttgtcggttccttaatcgagcgagggctgggggttggctcccaccttccttgcaaagtcgggtccaaaatacgctaacatgggttaaccggctttgtaggttggcacctattagtagttgctcaatggaacttattaagtttgatactcagcttatacaaagtcctgagatttccggtgttgagtatcagcaaggcgagttgcaaggctatgaggtcagggaatatctcttagagaagtttggccgaaaatgcgtgtattgcggggagacagacgtaccgctgcaagtagagcatgtcatcccaaagcatccagcggttggtccgatagggacgaatcgggtaagtaatctgacgttagcgtgtgaggtctgcaacaaagctaaaggaaatagtcagccgaacgattggctggaaaagctgcaacagtccacgatagctaaagacaagatacgggctggaaacttgcccaaggtcttgaagcaacttaagcaaccactcaaggatgcggcagcgattaatagtacgcgctgggcgctttatcgggtgttggagcagttaggacttccgttagaagttggttcaggcggccttactaaatttaaccgaacgcaacgtaatttaccgaaaacgcattggctagatgccgcttgtgttggaaaaagtacgccggaacagatcgtcttttctgatggtccaatcctggctatctctgctaccgggcatggaaaacggcaacgatgtgttacggataagtatggattccctattaaacatgctccaagggcgaagtcgttcatggggtttcagacaggtgacatagttaatgctgtaattcctaaaggcaaatataagggaatgcacacagggcgtgtagcgatccggttcagaccgagctttaaactgaatggatttgatgtgcatacgaagtatctaaggattattcacagagctgatggctacgcttatgagtttgctttgggggtgcaggtttcctccccacagatgaatctgggggctcccacctggcgcttgattggtggagattaa

SEQ ID NO: 1173 - DNA, 254 bp, unidentified
  misc_feature 1..254: note = Ga0209639_1000561 JGI
  source 1..254: mol_type = other DNA
gtcaactaccccacggctaaagccggaggcttgtagggagaaatctttataagctcagttgaccagcctaagtcttgcaacaaagactacgttatcgaggtcatgacaccttggaatgcgtgccagttccaagctcctgtcgcttagcattaaacaggtgtactagggtcaagccagtgtgttaagcataacaagccttgataactttggcgaggcaaacattacctccgaaaggggagattgcagaaatgcat

SEQ ID NO: 1174 - DNA, 1260 bp, unidentified
  misc_feature 1..1260: note = Ga0209347_1003246 JGI
  source 1..1260: mol_type = other DNA
atgttagtctacgttatcaacaagcacggtaaaccgttaatgccctgcaaaccaaagaaggcaaagaggctgctgcaagagggcagagcgaaggtcgtgaggcgcacgccctttacggtccaactgctttacgggtcgagcggttacagacaacgcgtcagggtcggagttgacacgggagccaagtacgtgggggttgccgctgttcgaacagacgagaaaggaagagcaaagaatactctgctgcaaggcgagtgtcatttgcgagcagatattcgcggcaagatggaccggcgcagggcctatcgcagagcaagacgtggccggaagacgaggtaccggaagccaagatttgataacaggcggcgatgggaaggatggttggcccccagcattcagtcacgggttgacggcacgctgaaggtaatggagttgcttcgccagttgctcccggttgcttcagtagaagtggagaccgcgcaatttgacacggcagcgatggcaagaggagtcttgcgactgaggccctggcagtaccaacggggcgagcagtaccagtttgaaaacgtcaaatcatacgttcgacatcgagatggatatcagtgtcgccagtgcaaggctaaaggtcgtccgttggcggttcaccacctacgacaaagagctgatggcggaacaaaccgtcccgctaacctgatcacgctatgtgaagagtgccacgatcgggtccatacgggcggaatcaagctgactgcggttcctggaagaacgaatctccggtatgccgcgcacacccaggcaggaaagacggcgcttatgacagccctacgggaacaactcccgacctctgagacgacaggcgccgtgaccaaagtcgatcgacttgagatgggactatcgaaaactcatgccaacgatgcgctggccatagcggctacaggggtacccgtcgaacccgtggacacccagttctttatgcgctgtgtcccaaagggaaactaccggctgttcaaaggtgctcgcagccatattcgcaatcaaagcgcccgcgagctatttggcttccggcgcctggacaaagtatgcttgcccggtggtcaagaagggttcgtcaaaggcaaacggtcctctggttacttcaatgtgagcacgcttgacggcactgtgatcagcgcgtcgatttcgtacaagagattgcgtttattagagaaacaaacatctctacttgttgagaggaggcaggccgtttcctccccggactga

SEQ ID NO: 1175 - DNA, 272 bp, unidentified
  misc_feature 1..272: note = Ga0209347_1003246 JGI
  source 1..272: mol_type = other DNA
gtcaactaccccggactgaagtccgaggcttgcaggagcctctagttgaccagcctaagccttgagatagaggctacgttagcagtagagcttagacgccttacccggaatgtccggataggtgacctaccctggggtgccccctcagctccaggctctagaactccctggttaaacagtcctgagagggtagggacagtgccttggagatgcgctggctgctaacattggcgagagggacctaactccgagaggaggtagactctatgtta

SEQ ID NO: 1176 - DNA, 1479 bp, Moorena sp.
  source 1..1479: mol_type = other DNA
ttggctctggaattcgagtcagcagacaaccccgggatcagggacgaaacggggctcggacgccgtaaggcatccggtgtggaacatgtgcgaggggagatcaccggcagtgcacctactgccggtggcgtcaccccggaccatcaggtccgggagcccggccgtgaggccgaccccgccgtgttcgtcctggacaagcacggcacgccattacagcccaccagccccgccagggcccgcaagctcctggtatccggccgcgcggtcgtcgcccggcacacaccgttcgtgatccgtctgaaggaccgcaccgccgacgcctcggaggtcgacggtgtcgagctgggcatcgaccccggctccaagcacaccggcctggctgtgttcaccgcccgggacggtgagcgccggggccggttcgcggtccagctcgaccaccggggcgccgcgatccgcaagaagctggagcagcgatccgcctaccggcggggccggcgtacccgcaacctgcgctaccgcgcaccccgcttcctcaaccgaacccgcccgaagggctggctgccgccgtcgctccagcaccgtgtcgacaccaccatgtcgtggaccggccgcctcgcccgctgggcaccggtccgtacggtccacgtcgagcgcgtcgcattcgacacccacgccatcagtgccgggaagccgctggaaggagccgagtaccagcacggcaccctgcacggcacggaggtccgcgagtacctcctcgcgaagttcggccgcgcctgctcctactgcggcgcgacgggcgtgccgctgaacatcgaccacatccggccccgcagccgtggcgggtccgaccgggtctccaacctgaccctcgcgtgcatcccctgcaaccaggccaagggccaccggcccgtcgaggagttcgcccccaagcaggccgccgacatcctcaagcgcgcgaaggcccccctccgggacgccgccgccgtcaacgccacccggtgggccctgtggcgggccctggacgcacgactgcccacccggaccgccagtggcgggcgcacgaaatggaaccgcgtccggtgcgcactgcccaagacccacaccctcgacgccctggccgtcggtgacctcgacaccgtcaccgcatggccgcgcaccgtcctggtcgtcaaagccaccgggcgcggcacctacgcccgaacccgcgccgacaagcacggtttcccccgcctgcgcctgccccgcaccaaacagttcttcggctacgccaccggcgacctcgtccgggccgtcgtcccgtcgggaaagaacgcgggcacccacaccggccgcatcgccgtccgatcctccggcagcttcgcagtccgcaccgccggcggcctctacaccgcccggtacaagtacttccgtctgctccagcgcgccgacggctacgcctacaccacgcaacccgaaggcgggccgagtgatgcgccctga

SEQ ID NO: 1177 - DNA, 335 bp, Moorena sp.
  source 1..335: mol_type = other DNA
gtaatgggatcccccgcctgaaggcggcgggggctttcagcccgaccggctgatggtccgctgttaccagcaccagccaactgatatggaggtgaccgaagttggctacgttccacgcaggacagaagacccacccatctgtgcttcctcagcagttggctctggaattcgagtcagcagacaaccccgggatcagggacgaaacggggctcggacgccgtaaggcatccggtgtggaacatgtgcgaggggagatcaccggcagtgcacctactgccggtggcgtcaccccggaccatcaggtccgggagcccggccgtgaggccgaccccgcc

SEQ ID NO: 1178 - DNA, 891 bp, unidentified
  misc_feature 1..891: note = Lachnospiraceae bacterium UBA2891
  source 1..891: mol_type = other DNA
ctgatgccgacgaatgcgtaccgggcgcggaagcttttaaaaagcggacgcgccggaattgagtgttataaaccggtgttcacgatccggcttacagaccgggaggaaggagctgtacagcctgttgaatacacctgcgatacgggatatcagcatgtgggtatatctatcaaatctgaaaagcatgagttcgtgcacaatcagtacgatatgctcaaagacgagacggaacgccacaatgactgccgtaaataccgcagggtaagaagaaaccgcaaacggtatcgcaaacccagattcgacagccgttctaaaaagaacaaggacatggcgccttccctgcgtcaccgcatggagaaccagatccggctgttcgaatcgttctgcagggtgctgccgattacaacggccacatttgagatgggcaaatttgatacccagctcctgcaggcgatcgcggaagaaaagcctcttccaaagggaagggattaccagcatggttcgaaatacctgtaccagacagaacgtatggcagtatttggcagagatcactatacgtgccagatctgtgggcgttccgtcagagacggtgccattctgcacacccatcatatcgggttctggatgagcccaccgtaccggtcaggcaggatcagcaatctgctgaccgtctgtgagaaatgccatacggcatggaatcacaagcctggcggcaggctatggggtattaagcccaaattaacaaatttgacagcagcgacatatatgagcactgtcagatgggcgatgtaccggaggctggtcaaaacacatccggatgtggatatccatatccagtacggtgcaaagaccggtatcaccaggcaggaacgtcatatcgccaaaacacat

SEQ ID NO: 1179 - DNA, 342 bp, unidentified
  misc_feature 1..342: note = Lachnospiraceae bacterium UBA2891
  misc_feature 283..337: note = MISC_FEATURE - Any "N" represents any nucleotide
  source 1..342: mol_type = other DNA
gtcaactacccgcgactaaagtcgcaggcttgtaaaaccgtcaggttttgacgattgtacaggcttggttgattagcctgagtgcttcgtgcactacgttactgtgagccgcgtccggatactccacaagtccggaccaactgggaactgtcgttaaaaactgctgagggaaggcagcgtgcggcagctgttttcaacccacggataacattggcgatgtggaccaccgtggctgcggagtaatccgtaagtacgagaatccgcaggtctctgcgactgcggnnnnnnnnnnnnnnnnnnnnnnnnnnnnnnnnnnnnnnnnnnnnnnnnnnnnnnnagtgt

SEQ ID NO: 1180 - DNA, 1002 bp, unidentified
  misc_feature 1..1002: note = metagenome
  source 1..1002: mol_type = other DNA
atggttccagtattggacaaaaacaggattccgttaatgccttgctccgaaaaaagagctaaaaagttaatggatagaggtgatgcaaggcccttttggtgtaaaggtgtcttctgtattattctacaacgtgagcctaaaagcaggcatatgcaagacattgccgttgctatcgatccgggcagtaaatttaatggctacactgttaaatcagaagctcatacgcttttgaacgtacaagctcatgccatcacagatgtcaaaaagaaaatggaagaacgagcaatgcttcgaagaggaagaagagggcgcaaaacaccttatagaaaatgcaggttcaacagatcggttaaagaaagacttgccccatcaacaaaagcaagatggcaacaacatttaaacatcgtaaagtggtttggtaaaatgtacaacattaaacatattgttgttgaagatattgctgccaaaacactaaagggcgcaaagaaatggaataaaacctttagccctttacaagttggaaaaaaatggttttatgataccgtagagtctttaggttatttgcttcataagtttaaaggatatcaaactgctcttatcagaaatagtttaggcttaaaaaagaactcaaaaaaagataaaaaatgtttttatggtcactgtgtggatacgttttgtttggcaacacaagttataggcggcagcggtgtgcctgataatttatttgtaaagtttataaagccattaagatgttatagaagaaaattacatgaaatattaccaaagaaaaatgggttgagaagaaattatggcagcacgttgtcattgggcataaatagaggcacattagttgaacatataaagtatgggatatgtttaataggtggtacatctaagggcagattaagcctacatgatttggcaacgaataaacggctttgccaaaatgctaaaaaagaagatattaaaattctaactcaaatgagatggaatatttattaa

SEQ ID NO: 1181 - DNA, 250 bp, unidentified
  misc_feature 1..250: note = metagenome
  source 1..250: mol_type = other DNA
atcaactacccacccactaaagatggggtgggtttgaaggaaaaccttaacgaggactaacttcaaattaaacgggagattagactggacaagatcacggaagtggtcgcttgaagtcaactaaagggttatctgcacagagaggcaaagattatcttatgaggtgtttccctagcctataagctctaatcaccctgagtgtcgaagggaatagttataaagtgcgtaagcacataaaaaaaaaacgtta

SEQ ID NO: 1182 - DNA, 1536 bp, unidentified
  misc_feature 1..1536: note = Ga0257069_1000440 JGI
  source 1..1536: mol_type = other DNA
ttgaaacacaaacaaaaagagcgcgtcaacatcgtctacgttgttgacaaaaacggcaggccgctcatgccgacaaaacacttcggcaaagtcaagcatatgctacgggatgggcgtgcaacgatatatctgcatcgcccgttcacgattcggctatgctacgaaacgccggggaaaacacaatctgtcgttatcggagttgatcctgggcggacgaatattggccttgtttctgtatcgcagaaaggggaggttctttacgctgccaaggtcgagacaaggaacaaagatgtgtcgaaactcatcgccgaacgcgcggtacatcgtagagcttcacgcataggtgagcggcagcgtcgtaagcgtcgcgcgagaaagcatggcacgacaaccaagttccccaatggtagaaaactccccggttacaaagatggcgtgcttgaactgaaggatattatcaatcaagaggcgcggttcaacaatcgtaaacgcgcagctaagtggttggcgccaactgcaaggcacttgcttcagacccatcagaatcttttgttacatgtccgtcggtttcttccgataacagcagttgccattgaacataacaagtttgcattcatgcttcttgaggatgggaccgttcgcggcgctgatttccagaacggacggctcaaggggtacgagtctgttgcggtttatgttcgtgctcgtcaaaatgacaagtgcgagatttgcggagcaccaatcgaacacatccatcacatccaggcgaggagcgagaacgggagtaatctccccgaaaatctcgtcggcctttgctcgaaatgtcacgaagccgtgcatgttggaaagaaagaaatcaacatcaaaggctttgcgaagaagtacgcaagcacgtcggttttaaatcaagcattgccacattttcttttttggctggaaacggcctttggcgatggaaatgtccgaacttgtgcaggttgggagacgaaagttgagcgtaagcggttgggcttttcgaaagaccaccactatgatgcagtatctattatctcggcttgtggccatccggttgatttgaatctcgggggtggacggattttagtacatacccctcatctgattatgcagttccgacatcatgatcgccagattattcattgccaattcgagcgcacatataaagttgtaggagataacggaaagttgatttccgtggtaaaaaatcgaaagccccgtttcgagcaaccaaaatcaatgcctgcgctcaatgtgtggtacgatgacgaagtgaagcggagcgggcagcacaaggctcgtctggctctatctcagctcgttgtagtgaaaagcaatcgacgttacaagaaccccgctcgggttatgccaggaaccgtattccgctacgaagacgatttgtatgttatgcaaggcagcgtgtcgtacggtcagtatttttgcgcgatcggtcaagggaaaaggatgttctcttctaaaaaatgcgaagttttgtgccgtcgaggacttatttatctgtaa

SEQ ID NO: 1183 - DNA, 279 bp, unidentified
  misc_feature 1..279: note = Ga0257069_1000440 JGI
  source 1..279: mol_type = other DNA
gtcaacaactcctactttatgcctgttaacgtttgaggtaggagcttgcaggagaaaatctgcgagtcaccagaaaatatctgggggagttgagcagaggcatgacgcggcgggattaattccgaaacaccgagggtaataccaagcctctcgcactgtgggtagccgtgccgagcctatggtttgtacctgctttttgcttttgcagggattatgtacctaacggtacaaaggaggtgttttattttgaaacacaaacaaaaagagcgcgtcaacatc

SEQ ID NO: 1184 - DNA, 1263 bp, unidentified
  misc_feature 1..1263: note = Human gut metagenome
  source 1..1263: mol_type = other DNA
atggtttatgttatttcaaagagggggaaacctctcatgccatgtacaaatgttattgcaagattgctgttaaaacaggacaaagcaaaggtaaaaagaagatgcccgtttatgattcagctgacttatgatgctacgcaatatatccaagattgtacgcttggtgtagacaccggaagcgctcatattggtgctgctgtagtagatgctgacaaacgtgttttgtacatgtctgaaacgaaaatcagaaatgatatcacacagaaaatggacagacgcagagcctatcgtaaagtaagacgatatcggaaaacgagataccgcaaaacaagatggatgaaccgtaaaaattccaaaagggaaaacaggttctctcctacaatggtgagtaaactacattcacatcagaaagagattgaatttgtaaaatctattttgcctattacgaggcttgtgattgagacaggtacatttgattgccatttaatgaaaaacccaatgttatacaatcaaaaatacaggcattggggttatcagcaaggacctgattatggttttgcaaataccaaggcaaaagtcttaaacagagacagttatacttgccaatgctgcagggggaaacggaaagattctaagcttgaagttcaccacattgtgtaccgctctaagggtggctctaacgaagaagataacctgattactctttgccatacctgccattctgcacttcatcatggaatgatgaaattaaaggtaaacggtaaacaaaaaggtaacttgcgatatgctactcaaatgaacagtatcagaacacagttgttaaagctttatccagaagctattgaaacatttggatatgtgacaaaagagaatttgcaactgtcaggtctgccgaaaacgcattgcaatgatgcggttatgattgccagtggaggaaatacggtgaatttcaaaacacatagcttatgcaggaaaaaatgtatccccaaaggggattatcagcaaacaaagggtatacgaagtgagcagccacttataacgaaaaagatatacggatttcgcaaatttgataaggtacaataccttggtaaagaatattttattaagggcaggatgtctactggatatactgtacttatggatattgatggaaacaaagtagatttttcgtatatgccgaaaggttataagacaccaaaattaaagaactgtaagagaattacggcaaggaacgggtggatgattcaggaaattgctatctga

SEQ ID NO: 1185 - DNA, 295 bp, unidentified
  misc_feature 1..295: note = Human gut metagenome
  source 1..295: mol_type = other DNA
gtgaactacccatcccctaaagggaatgggcttccattaaatggttcaccagactcagcagccagaaatgactgctacgataattaggtcatgacaccctcggttgacgcatcagaccgttgctctatcgagtatgtttaagttgggttggtgtaagcaaagccctgtgatatattcgcaaaaagcctttttatcattgtcgagatgaagtcggaacaactgtatggtaacagtacggcatagtacgcaccacctgcttttaagcagagtatttatcggaggatttactcaatgg

SEQ ID NO: 1186 - DNA, 1305 bp, unidentified
  misc_feature 1..1305: note = Ga0310136_005540 JGI
  source 1..1305: mol_type = other DNA
atgacattggcgaggccaactttacctccgaaaggagagattgcagagatgtatgtatttgtcgttgacgccgaaaggaaaccgcttgctccatgtcacccagcagtagcgaggaaactgctgaagcaggggcgtgcggcagtgctgaggaaatatccgttcactatcgtacttaaagagacgaaggaaactcatccgcaggacattaggcttaagattgactccggctcaaaagcaacgggaatgataatattacacaaaaacaaagtcatttgggcagcagaacttgaacaccggggacacaagataagggaaagattgctggagaggaggcagcttcgccgaagcaggagataccgcaaagaaaggtatcgcaagccgaggtttgacaaccgcaggagaccggaaggttggctcccgccgagccttgaaagcagggtcgccaacataataacctgggcaaaccggttaataaagctgtgttcaatctcagcaatatctcttgagcttgtcaagttcgacacccagaaattacagaacccggagataaccggtatcgagtaccagcggggcgagctttacggctacgaagtcagagaatacctgttggagaaatgggggaggaagtgtgcctactgcggcaggaacgacgtaccgttagagcttgaacatatagtgccaaaatcgaggggcggcaccgacagggtgtccaacctgacgctggcttgccacgactgcaaccagaagaaaggcaatctcacggcagaagaattcggttattcagaagtgcaaaaaaaggcaaaggtcccattgaaggatgttgccgcagtcaatgcaacacgctgggcgttatatggcagactgaaagaaactggtttgcctgtggagtgcgggacaggaggaatgacgaagtacaaccggagcaaactgggtttgccgaaggagcattggacagacgcagcctgtgtaggggccagtacgcctgaaaacctgcgggtgagcattaattctgtcttgcaggtcaaagcagttgggcatggcaggagacaaaggtgcataacagacaaatatggttttccgaaggcgtatgcaaacagacaaaaaacatatcagggttttgcgacgggagatattgtaagggcagtaataccaaaagggaaatatgcggggagccatattggcaggatagtcataagacacaggccgtcgttcgggctgaacggctttgacgtacacccgaagtatctgacgattcttcagcgaggcgatggttatgattacagccttttagcaatagagcgataa

SEQ ID NO: 1187 - DNA, 250 bp, unidentified
  misc_feature 1..250: note = Ga0310136_005540 JGI
  source 1..250: mol_type = other DNA
gttgactgctaataactgcagttggaggcgtataagcctcagagtcaaccagcctcagccagggccgtaaggctatcgggctacgttatcctggtcacgacaccctggggtgcggggccagctccaggctctgtcgcccgctgttatgaggagctgacttggcaaggctcgaaggcagctggcatgaaaagccaggatgacattggcgaggccaactttacctccgaaaggagagattgcagagatgtat

SEQ ID NO: 1188 - DNA, 1551 bp, unidentified
  misc_feature 1..1551: note = Ga0187878_1000231 JGI
  source 1..1551: mol_type = other DNA
atgaatacgcgagacagaagactaacacccaccaacgcctccctaattgctggatgggatgaagccgtacatcgcgagggtacggagttaaaagctgacacagcttctgctttttatctcgatggcgaagggacgtctaaaaattcgaaagaatcaaaggacattgctaggcttatacccaacaaagatcttaagattttggagaatagtagaataaataagaaaatcaaaatatcaaaaaagaataactatagagtaccggttttatatccagacggaaaaccaggaatgcctacatctaataagagagctaataaatggctaaaagaaggcaaagccgaaaaagtaagaaataaattgaatgtatttgctattaaattgaagttctggcctatctatagaaatttacaacagatagtattgttaatagatcctgggagtacattcacaggaatagctgtgatgtccaagaaatgtattttgatttcatatatgttagaacttccgggatataagaaaggttcgaaaccgttcactgttatcaatagacatagaaagaaaatagagaagtatcacaatactattgtagataggataacagatagaaggaggctaagaagatcaaggagacatagaaattgtagaagaagagatgaaagatggctaaatagaactaagaaaggtaagatagcaccatcgatgttagcaaagaaacaattagaattagaggcggttaatgaactgagtaaattgtatccgattacaatcataggatttgaagatgttgctttcaatcactggggagataaagatggtacaaagggtcaatacttttctcaagtagaaattggtaagaatttgctattagatagactgaaaaagatagctcttatccaaataataaaagggtatgagactgctagaagaagggaacaattgaaactgcctaaagaaggagataagacaaaaaggtcaataaaatctcatgtaactgactgcattgcaatgggttcaataattctgaatactaatcaatcttctagtaataaatttcatttcaatgtaatatcaaggcctaaatattctagaagagtcctatttgcagaacagcctaataaagatggtattacagaaagagctggaggtcatattcctcataccccaatattcaaaggattgagaaaaggagattatgttgaagcaaatgcgccaaatttaaagaagatatatagaggatggatatcaggatatactgatgacagaatctatatatctgatttcgattggaatcaatctccatctttttctgtagataatattagattattggatagaaatcacggattgataaatctgagattgggatggattaaagatactatagatatttgtcaatttggatctaaacaaattgatgcagaaaataagataataaatatgaaagtcataaataatattatagagatgaaaaagaaagctgaaaaggatgcaattaaagaatcaaacaaacaagataagacaatacagagaggaatagatgatgcttggtaa

SEQ ID NO: 1189 - DNA, 233 bp, unidentified
  misc_feature 1..233: note = Ga0187878_1000231 JGI
  source 1..233: mol_type = other DNA
gtcaactactgcccccagcgatcagctttagctgagagcgactgccggcttgccggcactctgaagggggcagcttgtagctcagaatacaacgaaagaattgactagcctgtaggagaaatatctaatctatgaatacgcgagacagaagactaacacccaccaacgcctccctaattgctggatgggatgaagccgtacatcgcgagggtacggagttaaaagctgacaca

SEQ ID NO: 1190 - DNA, 1143 bp, unidentified
  misc_feature 1..1143: note = Ga0268280_1010517 JGI
  source 1..1143: mol_type = other DNA
atgcagaagttacaagcaaagttaaagaacatacctacagatacttctctagtctgtagctctataaattctgtattaaacaaagaccaaagtcttagtgtacagaataaagtactgacttgtaacaattccgaagagaatcttcagaaacataaatctggttcagacttgagagttctgaatattgtttatgtacttaataagaggggtttagctcttatgccttcttgccaatccaaggcaagaaggctcttaaggttagggaaagctcaagtagtaaaaatgtatccttttactatacaattagctaatgctagtggagaagcaaaacaagagatagtattaggagtagatgtaggatataaacatgttgggatttcagctattagtcagaataaagaattatattcagcagaggtagtcctaagaacaaatatttccgaattattatctgagagaaaaatgtatagaaggaatagaagaaataaattatggtatagaaaacctagatttaataatagggaaaaaggtaaaggttggctatctccatctgtacaacataaaatagattctcatattagaataatagataatataaagaaattattaccaataacaaaaattattatagaaactgctaaatttgatattcaaaaaataaataatcctgaaatatgtaatatagaatatcagaatggagtacaaaaagatttttggaatgtaagagaatatgtattatatagagataatcacacttgtcaaaattgtaaaaagaataataaagtattaaatgtacatcatcttgaaactaggaaaactggtggtaatagacctgataatttaattacattatgtgttgaatgtcacaaaaagtatcatttagggaaaatcaaattagatataaagattaagaataattttagtagtgagacatgtatgtctataattaggaatagactaattgataaattaagattaaagtataatatagaagagacatatggatatataacaaagagtaaaagaatggagaataagatagaaaaaagtcatattaatgatgcttttatcatttctggaggtattaatcaatttagagttagtagttatttagtaactcagaagaggaagaataatagaggg

SEQ ID NO: 1191 - DNA, 288 bp, unidentified
  misc_feature 1..288: note = Ga0268280_1010517 JGI
  source 1..288: mol_type = other DNA
gtcaactactccaggctaaagctacggagcttgcagagtaatctgcaacaagcaagtgcgtaagcacttgcaagagttgattaggaagcaaaaaggaaacaaatgcagaagttacaagcaaagttaaagaacatacctacagatacttctctagtctgtagctctataaattctgtattaaacaaagaccaaagtcttagtgtacagaataaagtactgacttgtaacaattccgaagagaatcttcagaaacataaatctggttcagacttgagagttctgaatatt

SEQ ID NO: 1192 - DNA, 1260 bp, unidentified
  misc_feature 1..1260: note = Ga0326511_10041793 JGI
  source 1..1260: mol_type = other DNA
atggtttatgtgcaagacattaatgggaaggcactgatgccaacagagagacacggaaaggttagaaaacttctgcgtgacggcatggctgttgttgttatgcgtgaaccgttcacaattcgcctaacgtatgaaagcacctcatttatacaagaggtttcattgggaatagatgcaggaagccgtcatattggtgtgtcggctaccacagcagacagagaacttttctcggcacaggtggaattgcgtacaaatattcagaaattgctggcaaatcgtatggaactacgcaggacacgcaggagccgcaaaacccgctatcgcaaaccgatgtttgacaataggaggcatgataatggctggcttttcccaagtaccagacagaaggttgatacacatcttagggttatccgcatggtgatggatatactacccattagcaaaacgacaatcgaggttgcaaaattcgatgtccaaaagataaaaaacgatgcaatcgctgggattgaataccagcaaggcgagcaatttggtttttacaatgttagggagtatgttcttacacgcgatggttatcaatgccagcattgcaaaggaaagtcaaaagacccagttcttaatgttcaccacattgagagtagaaagataggaggtaatgcgccaaacaatcttgtaaccttgtgtaaaacatgtcataagaaatatcataagggggagattactctaagatttatgcgcggtgtgagttttcgtgacgcagcagcgatgaatgctatgcgatggtgcgtgtataactcggcaaaggatgagttccgtaatgtgcatctgacttatgggtatatcacaaagcatactcgaatcaggaacggaataaaaaaatcacatacggcagatgcaaggtgcatcagcgggcatccgttagcggtagcacaaacggatgtgtatatctttaaacagcgcaggcgacacaacagacagattcacaagtgtgcaattctaagtggaggatataggaaactcaaccaggctccgtatcttgttaaaggatacaggctattcgacaaagtttcctttaatgggcaggaggcttttattactggtagacggcagagtggttcttttgccataaagaccattgattggaagtctctttcagagggggtctctgccaagaaactttcttttctgaatatcagtagaggttttttaatttctaataaaaagagtttgacgaactataataaatcaacaaatgagtaa

SEQ ID NO: 1193 - DNA, 262 bp, unidentified
  misc_feature 1..262: note = Ga0326511_10041793 JGI
  source 1..262: mol_type = other DNA
ctcctggctaaaaccaaagagttcgcttcggctgctcttaactgattagactaagtgtttagaacactacgttggttgagaatgtataggcactccgagatatatatcccagtttcggacactgcggacggcgattaaaagaccgaaaggagatgtggtcggtgttgtcgttacttgaaacctcttccaactttgtcgaggggtacaccacgggagtaatcccgacttacaacaaagttgtttaaaaaaagcaaaacaaatg

SEQ ID NO: 1194 - DNA, 438 bp, unidentified
  misc_feature 1..438: note = Ga0334886_1000752 JGI
  source 1..438: mol_type = other DNA
atgctagtctatgttcttaacaggcacggaaaaccactgatgccgtgtaaaccacagaaagcacgaagactattgaaagaacagaaggctaaagtagtaaaaagaacaccctttactattcaactgttgtacggttcctctggatacaaacaagatgtaattctcggtgtagatgccggaagcaagacaataggagtatcggcctcaactgagaacaaggaagtgtttgacgaagtagaatatcagggagaaccatgcttcatatttggaagacggaatagcggatactttgacatcagaaagctcgacggaacgaaagtgcatgcttcagcaagctataagaaactaaagttgttaagtaaaacaacatccttactatgtgaaaggaggcaggcggtttcctccccacagctaaagcagggggtctccgccgattaa

SEQ ID NO: 1195 - DNA, 239 bp, unidentified
  misc_feature 1..239: note = Ga0334886_1000752 JGI
  source 1..239: mol_type = other DNA
gtcaaataccccacggctaaagccgggggcttgtaaaagctctgtttgactagcctgagtgcttcgagcactacgttatcggcaaatgtataggcaccgtaggatgcgttcccaagtcttacgctctgcggttggtggttaaacagtcctgatgggtagggacagtgctgctaacgagaaactgtcgaataacattggcgatgggaagattactccgtaaggaggtggactatatgcta

SEQ ID NO: 1196 - DNA, 1245 bp, unidentified
  misc_feature 1..1245: note = Human gut metagenome
  source 1..1245: mol_type = other DNA
atgccctgttcaccggcaaaagcgcggcttctgcttaaagagaagaaagctattgtgaagaggagaacgcctttcactattcagctgacgattgcaacgggtgagaccaaacagccggtgggtctgggcgttgatgccgggtacaaacatgtcggactgtccgcatcaacggacaaggctgaactttatgcatcccaagtcgaactgcgacaggacatcaccgatctgctctccgctcgtcgtgcgttacgacgggctcgcagaaaccgcaaaacgcgctaccgcgcgccaagattcaacaaccgcatccgcaccaagcgcaaaggctggcttgctccgtcggttgaaaaccgaatcaacgcgcatttatcgcgcatcgaaacggttcttcgaatgctgccggtcacgaagatcaccgtggaaacggcgtccttcgacatgcagctgctgaaggatcccgacatttcgggaaaagagtaccaagagggcgaacagctcggcttctggaacgtccgcgagtgtgttcttttcagagatgggcacgtttgtcagcattgtcacggcagattgaaagatccggtactcaatgttcatcacctgaaaagcagacgtaccggcggagattcgcccggcaacctgattacgctttgtgagacgtgccataaggcgcttcatcgcggcgaactcactctaaaggccaagcgcgggcaatcgttccgtgcggaagccttcatgggcattatgcgctgggaggtactgaaccgcctgaaggcgtcgcatcctgagctggaagtgaacaacacttacggctaccggactaagcacgcacggatctcgaacgacatcgccaagtcgcattgtgcagatgctttctgcgtcgccggcaatctcggcgccaaaaggctctgcgaattcttcttccagaagcagacgcgttggaacaaccggcagattcacaaactttccgtcctcaaacacggacttcgaaaacgcaatcaagttccctttgaggtcaatggcttccgtctttttgacaaggttgcctgcaagggagaagaaggcttcattttcggccgtcgatcatccgggtactttgatgttcgaaaacttgacggaacccgcatttcggcaggcatcagctacaagaagctgcatctgctggaaaagagacaaacttatataacagaaattcgaaaggagaaggcgcttcctcccctgcctgaaggcagaggtctccgcgcctaa

SEQ ID NO: 1197 - DNA, 247 bp, unidentified; identical to SEQ ID NO: 779
  misc_feature 1..247: note = human gut metagenome genome assembly, contig:NODE_64_length_112578_cov_13.342685, whole genome shotgunsequence WGS
  source 1..247: mol_type = other DNA

SEQ ID NO: 1198 - DNA, 1014 bp, unidentified
  misc_feature 1..1014: note = Ga0172375_10009941 JGI
  source 1..1014: mol_type = other DNA
atgtttattcctgtagtttctaaaaaaggtaaacctttaatgcctactactccttatagagctagaaagttaattaaggcggggaaggccattaaaaaatttaaaaaaggtttattttatattcttttaactgaaaggatgattggtaaaactcaggatattgctgttggtattgatccgggtattaaaaaagaagcttttacaataaaatctaatagccacacatatttgaatatccaaatagacgcaattaattgggttaaggataatgtaaaaacaagaagtctattaagaagaagtagacgacaaaggaaaacaccttatagaaaatgcagattaaatagaaaaaagtcaaaaaatcttcaaccttctataaaagctagatggcaatggaaattaagaattataaattttttagtttctatttttcctattacttattttatagttgaagatataaaagctaaatctaaaaaaaattgtaaaaaatggaatatgtctttttctccgttagaagatgggaaaaattatttttataccgaacttagaaaacaaggtaatgttgaattaaaaatggggtatgatactgctgaattaaggaataatttaaaacttgaaaaatcttataacaaaaattcaaataaattcgaggctcattgtattgattcttttgtattggctaattggtttgttggcgggcatttgacgcctgataataaaaatattttattaattaaacctatagaactccatagaagacaacttcacaggttacaaccaagtaaaaaggggataagaagaagatacggctccactaattctttaggatttaaaaggggtagtttagtaaaacatgttaaatatggattatgttatgttggtggttatttaaaaaataatataagtttgcataatatagaaaatggaaaaagaattactcaaaaagcagaattaaaagattgtatttgtttaaattttaacgcatggaaaatttcttatctattcaataaatag

SEQ ID NO: 1199 - DNA, 206 bp, unidentified
  misc_feature 1..206: note = Ga0172375_10009941 JGI
  source 1..206: mol_type = other DNA
attcaactacccttccctttaattgttaagggcttaaaagactaacaataccatgttagaaatttaagttaaacaggagaatagagtggctaagatcataagtggtcgtttgaaagcagtaagcaaactgaaggtggtacttcaaaatatgttaaggatgttcccctagtctttatcctctatgtttgcctatctcgaaggggttg

SEQ ID NO: 1200 - DNA, 1272 bp, unidentified
  misc_feature 1..1272: note = Human gut metagenome
  source 1..1272: mol_type = other DNA
atgaaacaagaccagaaatatgcttttgttcaggataatcgaggggtagttttaagccctactaagattgaaaaagcttggtatttaataaggcataataaagcaactttagtaaagacagagcctatggttattagattgaatagaaagcaaaataatacagatatgagtttcatgaaagtaggtttagatccaggtgatactacaggggtagccatagttcaggaaagtcatttgaatatgtctaaaaacaaagcagtttttaaggcaaatatacaacatcgtaatgatattaagtcattagtagagtcaagaagagagtatagacgattacatcgatacaataaacgttatagacaggctcgattcaataacagagcatcttctagaagaaaaggtaaagtagctcctagtattaaaaataaaaaagatgaaatcttgagagtgcttagatacctttcaaaatatgtatgtattgacggtatctatattgaagatgtaagttttgatattagagctttgacagatgagtataagccttacagatggcagtatcaaaagtcaaatcgtcttgatgaaaatatccgcaaagcagtaatacaaagagataagtgtaaatgtaaaatgtgtggagcaaaagatacacaattagaagtacatcatatcactccaaaacgtgaaggtggaaacaatactttgaagaatcttattactctttgtagtgaatgtcataaatcagtaacaggggtagaagatgattataaaagttatctatattcacttatagatggaaaacaaattcctttagctcctgcaatgcatgtaatgataggtaaaaattatttataccagcagttgagacagtttattggaggtgattcctatgtttatttaactacaggaggagatacagcaaatagtaggcttgattggaatattgagaaatctcatagtaatgatgcagcatgtataacagatgtgagatgtttaccagaaaatttaaagacttatgtttatactatcaagccacagcgtaaaaagaaaaagactaagcaaaatacaagtaatctagctataaggcatagagatttagtttggtatactccaaggggtagagaacctattaagtgttatgttacagctattatgcagacaggatgctgtgtaggtaagtataaattaaaatctatagatggtgaaagatttggaccgatagcagagtcaagtctaagaaagatacaacaaggaacaagtagcttgatgttcgtataa

SEQ ID NO: 1201 - DNA, 1371 bp, unidentified
  misc_feature 1..1371: note = Human gut metagenome
  source 1..1371: mol_type = other DNA
atgcagaagttatcagaaaagttaaagaacacaccaaggaatgcttcactagttccttgctctgtaaattctcaattaaacaaagaggaaactcttagtgttgagagtatagtactgactgataacaatcccgaagtgaatctatctcaacatgcagagagacttaaagtcaaagtgtatgtaatctctaaagagggcaatcctataatgccttgtagctgtgcaaaggctaaacatttgttgaaagagggaaaagcaaaagtgattaaaagaagtccgtttgctattcaattaaattttgaatgtgaaaaccaagttcaagacgttactttgggaattgatacaggatttgaattcattggtttttcagcagtctcagaaagagaagagctaattgcagggactttgaaattggatgggaaaacaaaagagagactgaatgataagagaatgtatcgaaggataaaaagaaacaaattatggtatagaaaaccaagattcaacaatagaaagaaagtaaaagattggttgcctccttcaattgaaagaagatatcaaactcatttaactttgattgaaaaaattaagaagatgttgcccataacacaagtgatagttgaagtagcaaaatttgatattcaaaaattagagaattcagagatacaaggagaagaatatcaacaaggtacattgtatggatatcaaaatacagtaagttatctgaaaacagttcagaaaaatatctgtccattttgtaaacgaaagcttgagtcgggtgaatctaaagcaactcatcacagatttatgaggagtgattcacgaagaacagacagaatagaaggattaattttattccataaaaaatgtcatgttcgacttcatgaacaaaaacgagaaaaagaatttcaaaacatcaagatcggtaagtatcaaccatcaattttcatgtctattattaataaaagattttggaaagatattcctgatttgaaagtaacttatggaaatgtcacctttgtggataggaataatttaggattagcaaaaagtcacaccaacgatgcttttgttattgcaaaaggaaactcacaaacaagagttaagtcttttgaaataattcaaaaacatagaaacaacagaatacttcagagacaaaggagaggatacaaaccaagcatcagaaggagtagatcaattatccagcctttagatttgatttggatcaaaggaattaaatatatttctaaaggaatgaatggatatgggagatacgtttatgttgatattggagaaaataaaacatctctcaacatgaaattagttgaaaaatattttagtcaaggcagtttatcatttagtttaaaaaattaa

SEQ ID NO: 1202 - DNA, 266 bp, unidentified
  misc_feature 1..266: note = Ga0114919_10025663JGI
  source 1..266: mol_type = other DNA
gtcaatcatcctaacctaaaggaaaggacttgatccgcgaggaacaagagcaattggttgattagggagcttaaaattacgaaaggagttttatgcagaagttatcagaaaagttaaagaacacaccaaggaatgcttcactagttccttgctctgtaaattctcaattaaacaaagaggaaactcttagtgttgagagtatagtactgactgataacaatcccgaagtgaatctatctcaacatgcagagagacttaaagtcaaa

SEQ ID NO: 1203 - DNA, 1338 bp, unidentified
  misc_feature 1..1338: note = Ga0376445_000045 JGI
  source 1..1338: mol_type = other DNA
atgcaccgcgtgttcgtcctgagcagcaccgcagaaccgctcatgccctgccatccggcacgggcccgggcgctgctgtctgccgggaaggcgaaggtctatcggcgggtgccgttcaccgtcatcctcatggagcgcgccgagggcgagacgcaaccgctcaccgagcagctcgacccgggcagcaagaccacgggcatcgccctggtcgcgctgttccagcgcggccgctgcgtcgtctgggccggtgagatgagccaccgcggccaggcgatcaagtccggcctcgacagccgccgggctctgcgccgcgggcggcgccaccgcaagacccggtaccgcgcaccgcgctttgacaaccgccgccggccgccgggctggctgccgccatcgatccagtcccgcgtcgacaactgtgccgcctgggatgccaagctgcggcgcctagcaccggtgacagccatcgccgtcgagacggtgcgtttcgacacccaactgctggagcacccggacatcgccggcgtcgagtaccaacagggaacgctgctgggctgcgagctgcgcgagtacctgctggcgcgccaccatcacacctgcgcctactgcctggggcagtcgaaggatccgatcctggagcgcgagcacgtcgtgccgcgctgccgcggcggcagcgatcgggtggccaacgcggtgctggcctgccgcacttgcaatgtggccaaagcgaacctgctgccggggacatggatcgagcagctgcgtcgctcgaagaagcccattgacgccacccgcgcccggcagatggagaagatcctcaccggctggcggccgagcctgcgcgatgcggcggcgatgaacgccacccgctacgccatcggtcgcacactcaaggccgccggcctgccggtcagtttcagcagcggcggccgcacccgtttcaaccgcaccgctcagggctacccaaaagcgcactggatcgatgccgcctgcgtcggtgaggaaggcagcaccgtgcgcctggatccggcggccaagccgttgcagatccaggccgtcggccgcggcagccggcagatgacccggcccgaccgctacggcttcccgcgcaccggtgccaagcgcgtcaagcgcgtgctgggcttgcagaccggcgattgggtgcgactctgtcaatcgagcggcaagtacgcgggcacctacgtcggccgcgtagccgtgcgtgagcgtggcgacttcgacatccaggtcgtccgtgacggtcagaagatcaagattaccgcgccggcagcgcggttcaccctactgcaacgaggcgacggctatgcctacaccacctga

SEQ ID NO: 1204 - DNA, 287 bp, unidentified
  misc_feature 1..287: note = Ga0376445_000045 JGI
  source 1..287: mol_type = other DNA
tccatcgccgcgcgtggtcagcgtgaggttcaggcgacagcccggacctgattcaaccagccccagccctttcgggctacgttacgcgggaatgccataggcaccccgggatgcttctccagtcccgggctctgcggtgagtcgttaaacagcacggcactgggacaacgggcagtgcggctcacgaaaaccccgcgataacctgggcgaggagaccttgacccccgcgaggggagaaccggcgggtaaccgccactgatttgagacaggagccgacgatgcaccgc

SEQ ID NO: 1205 - DNA, 1080 bp, unidentified
  misc_feature 1..1080: note = Ga0255344_1006041 JGI
  source 1..1080: mol_type = other DNA
atgctagttccggtcgtagatcaggttggaacaccactccaacctactcaccccgcaaaagcacggcgttggttgaaagaaggacgttgctcgaagcattttcatcgtggcacgttctatattcgtttaaagaaaattgttacagaaccgcacataaatatcattctaggaatagatccgggttcgaaacgaactgcttttacagtggctacaagaaaccgtgtagtattgaattggatgattgattctacaaatttcacaaaaaacaatattgagaaacgacgtatgtatcgtcgacaaaggcgttatcgaaacacaccgtatcgtgaatgtaggtggaatcgctctagtcttcgtaatgatggacgtgttccgccctctactttatctaggtggaaaagacatttaagattgatttatagtttgttaaaaatacttccaatcactaaagttattattgaagatgtagctgctgttactcataattctaaaaagaagagattagttgactcaaagtatgtttcatgttggaatgctgctttttcaccattacaagctggaaagaatttattttataatttcttagaagaccgtgggatagcggtgtataagaaaaaaggttggcagacagcgaagcatcgtaagaaacatgggtataagaaaatttctgataaactttcaaccaaatgggaatatcaatgtatagattctcattcgttgtgtgagatgtattataatcgaaagattagacctgttcggaatttaaatttcatacaatttctcacattttctagacgcgaattatttcggatgtttggtaaaatcagaagaagacatgggtcgacaagaacactaggtcataacagaggcacgttggtttattgtaaatatgttaagcgtggtcgattagaaccaataggattatgttatttagcgggttacatgaaagtgaaagaagaatatcgagtatgtttatattctttacaaggtaaagaattgggccaaagtttcaaattaagtgattgtgtgatgttaacaaatttacgttatttaaataattatattcgaaacgaaaggtag

SEQ ID NO: 1206 - DNA, 211 bp, unidentified
  misc_feature 1..211: note = Ga0255344_1006041 JGI
  source 1..211: mol_type = other DNA
gtcaactacccaccgctgaatcggtgggcttgtgggaaaaccgttagccaggactaaccacaattaaaacaagactagactgtccaaatgggttcttttgaactccgcgtggtcgagcggcaacgcatcggacacgtttgaaggaaactagctacctgtcgtggcagacaacatgtgacgttttgggtgttccgctagcctgattcctctc

SEQ ID NO: 1207 - DNA, 1314 bp, unidentified
  misc_feature 1..1314: note = Bacillus sp. REN51N
  source 1..1314: mol_type = other DNA
atggtatttgtactcaaccaagaaggaaaacccttaatgccaaccaaacggcaccgtaaggtccgtctatggctaaaaaacggacaagctaaagtggtgaaacgaaaaccgtttaccattcaactattatttaaaaccgaagactatgttcaacccatatctttaggggtagacagtggtttttatcatatcggtatctctgctgtgacagagaaagaagaagtgttttcatcagaggtttcgttactaaaaggaatggtggaacgaaatgaagaacgtgcttcctatcgaagaacaagacgggctcgtcttcgttaccgaaaaccgcgttttgataaccgaaagaaagacaaaggatggttagccccatccattcaacataagctagatagtcacctgcgttatattgagtgggtaaagtctatacttcctatctctaacactattattgaagtcgctaattttgatacacagaagatattaaaccctgatattcaagggttagaatatcaagaaggcgtacaaaaagagttttataacttaagagaatacattttacaccgtgaccatcatacatgtcagaacccgaattgtaaaaacaaaagcaaagaaaaagtattggtccttcatcacattatcttccggtccaatggaggaagtgacagtcctaataacctcattactctttgtgataagtgtcataccccacgaaaccacaaagggtttttaagagactggagaccaaaggtgaaacgcctaaggtctgcgacctttatgagcatggtgcgttggaagttagtcaacgctttggagtgtaaccacacatatgggtacttgaccaagtctaaacgcatagaatttgaaatagagaagacacatgccaatgatgcgtttgtcattgcaggaggaacaagcaaacacgtaagagctcaagtccatcaggtggagcaggttcgaagaaacaaccgttctttagataagttctacgacgctaagtacattgacgctagaacgggagaaaaagcagcgggacaagacttatttaatggtcgaaccaagcgaaataaaaatacgaatggagagaacctccgaaagtatcgtcaggaaaaggtatctaaagggagaagagccatacgtactatgcgatatcctttccagccaagggatttagttcgaagtgaaggttacaccgcttttgtggtaggcactcaaaacaaaggcgcttacgttaaactaaaagatagaaaaaaagtagcgaaaaccgctacattaacgttaattaaaagtggaaaaggattctgctttctagactga

SEQ ID NO: 1208 - DNA, 293 bp, unidentified
  misc_feature 1..293: note = Bacillus sp. REN51N
  source 1..293: mol_type = other DNA
gtcaataaccctcgactaaagtcgaaggcttgaaaaagcgtttgagagtcgaaatgcaagaccatcggtcttgtgttgattgattagccctaggctcctcttaggagactacgttaggagtgaaataggtaccctagaatactccactcgttctaggctctacggtttgttgttaaacatctctgagggtaaggagaagtgggacaaatgttaaaccactctataacatgggcaaagtggacctacagccttcggctgcattactcagtgtaaggagttaaaaaaagaaaatg

SEQ ID NO: 1209 - DNA, 1329 bp, unidentified
  misc_feature 1..1329: note = GENOME_ACESSION: mgm4491404.3 MG-RAST
  source 1..1329: mol_type = other DNA
atgggcgaaggattacaaccggacgcgagtccgaggagacaaaacttgagagtatttgttttaaataaacgaggccaaccgctgatgccgtgttcaccggcaaaagcgcggttactgctgaaagagaaaaaagctgtggtgatgcgtcgtacgccattcaccatccagctcacgcaggccacgggtgaaaccgtgcagccagtgaagttgggcgtggacgccggttcgaaattcatcggcttatcggcttcgaccgacaaggctgagttctatgcgtcagaagtcgaacttcgtacggatgtagttgacttattgtcttcacgtcgggaactgcgtagggctcgtcgcaatcgtaagacacgttaccgtgcaccgcggttcaataatcgtgttcacagcaaaaacaagggttggttggcaccgagcgttgaaaacaaaattaacgcccatttatcccgcgttgacgctgtaaggcaacttctcccggtgacgaagatcgttgtggaaacggccagtttcgacatccagaagatcaagaacccggatatcgaaggggcggactatcagtggggagagcaactaggattttggaatgtccgcgaatacgttctctttcgtgatgggcatcggtgctgccattgccacggaaagtccaaagccccgattctgaatgtccaccatcttgaaagccgtaaaacgggtggggacgccccgaataacctgatcacgctatgcgagacgtgccataaggcgtatcacgctggaaagattgttctgaaggcaaagcgcggacaagcattccgagacgctgcctttatgggaatcatgcgatggacatttttcaaccgcctgaaggcacagtgcccggagcttgatgtacgaaatacctacggctatctgacgaaaaacacccgcatccgacacggactggacaaatcccatcatacggacgcgttctgtattgccggcaacctcggggcaaagcggctgggtgagtacttcttccaaaagcagactcgcaagcacaatcggcaaattcacaagatgtccatcctcaaaggcggtgtccgcaaacgacagcaggccccgtacgaggtaaaaggttttcggttgttcgacaaggtgcggtatggcagccgagaggcattcatcttcggaagacgcaattccggctactttgacatccgtttgttgaaaggcgagaaggtttctcctgccatcagttacaagtatcttcagcttttagaaagtcgaaaaacttttttaactcagcttattaagaaggacgcgattcctcccgcgactgaagtcgcgggtttcctcgcgtaa

SEQ ID NO: 1210 - DNA, 252 bp, unidentified
  misc_feature 1..252: note = GENOME_ACESSION: mgm4491404.3 MG-RAST
  source 1..252: mol_type = other DNA
gtcaaccacccctgactaaaggcagaggcttgcgaaagcaagtcttagttgactagccccagtgaggagaaatccggactacgttggttgggaatgtataggcaccgcgggatgtcaatcctagtcccgtgctctgtggcccgtgattaaaagcactgagaggtaggtgcggtgttgcgggtatctgaaaccccttccaacatgggcgaaggattacaaccggacgcgagtccgaggagacaaaacttgaga

SEQ ID NO: 1211 - DNA, 855 bp, unidentified
  misc_feature 1..855: note = Ga0079226_10038291 JGI
  source 1..855: mol_type = other DNA
atggccaccagtggtggccgcgtgacaaccaagccaaccggtgaggttgctggcggggttgtgcccgccccagtgcgtgcaccacagccgcgggtgttcgtgctggataagaataagcggccgttgcagccgatgcgcccggatcgggcgcgcaagctgctggatgcgggccgggcacgtgtgcaccggcgcgccccgtttgtgattcgcagggtcgatgtggatgcccgcaccgaggaggtgattgtcgatggggtcgaggtggggatcgaccccggatccaaggcaacgggtatcgctgctttcatcaccacaccggagggtgcccggcagggcgtctggctgggggagctggtgcatcggggcctgcagatcaaacaaaggatgcaggcacgtgcccagttgcgtcgtgggcgccggtcacggaactcgcgtcaccgggcgcccaggttcgataaccgtacccggcccgccgggtggcgcccaccctcgctggcccaccgggtcgataccaccctctcgtgggtgaacaggctgcgcagatgggcaccagtgatggcgatccacattgagcgggtcaggttcgacacccacgccatggccagccccgaggtcagtgggatcgagtatcagcagggcaccctggccgggtatgaggtccgcgagtacctgttggctaagttcgaccgggcgtgcgtgtactgcggggccagtggggtgccgctgaacatcgaccacgtccacccgcgcagcaagggcggctctgaccgggtctcgaatctggtgctggcctgcatcggctgtaatcaggccaaaggcaacatggctgtcgccgagttcgtgaccgaccctgcc

SEQ ID NO: 1212 - DNA, 337 bp, unidentified
  misc_feature 1..337: note = Ga0079226_10038291 JGI
  source 1..337: mol_type = other DNA
gtcaaccaccccgccctgacggacggggcttgtgagcctcgtactagatgggctggttgaccagaccgagagaccttgaaaggaggaatctacgttgagcgtgcgacaggagaccgaccctgggatgcttcctcagtcccaggctctcgaatcagtgccagcagacacggctggggtagccacgaaacggggcactgaggtcgaagctgattcgacaccgggcgttcaacatggtcgaggggagatggccaccagtggtggccgcgtgacaaccaagccaaccggtgaggttgctggcggggttgtgcccgccccagtgcgtgcaccacagccgcgg

SEQ ID NO: 1213 - DNA, 1401 bp, unidentified
  misc_feature 1..1401: note = Ga0194044_10012301 JGI
  source 1..1401: mol_type = other DNA
atgataaccctggctatagattacggtgcttcaaatgtgggtatagctctggtcagaaataccgaagcggggaatgaaccgctgttcgctggaactgttatcctcgatgctaggaagctgaaggaaaaagtggagacgagggctggcattagagggttgagaaggacgagaaagacgaagaatcgacggctcagagaacttggtgaagccctctcgggcttaggcatggagggagacaaggtcgccagaatagtccggttctcgaataggcgtgggtataagtctctgttttcagacccgaacgaaacggaaaaggtggacgaggctgaatcggcataccgatgcactagagaacagtttttccaccaactggaacaagaactgcaagagattctgagcgaccgtgaggcttgcgacaaagcactctccgtctgtgaaagaatactcaaccgcaagggggaccgatacgctgaaatcagattgataagaattgataatcggggagccagccgctgcgcatggggggattgcaacaaggtgaccccgaggcgggacaacgctactgacgatgcaattgcccagcaactggtcacgtattttcagagtgcaatcaagacggaaccccacaagcttgaaatgctcaaccaaacggtttgtgaactcgattcgatttccaagaatctccgaggggctattgcaaacaacgacgattcttcaaagaagatactgcgcaggagggcaagaaagagtctaagaaatcttagagccgagttaccaagcaccgaacctgaggacgtctcaggcgacgcgtggaagtatgtggaaaagggtattctgaacacccttgagaacagtggcggcaggaaccgttactgcagggaacacagcaagtcctacgtggaaaaagttctggaagggaagccaccagagttcaagtctaccattgcagattctgacattatttccagacgggaacagattgcgttcagcaagctctggagatacatagaggcgcgactgcttcctctcgctccgaagggaattgaccgaattgttgttgaacgaactgcgttcgaccttttagccggtaagcgaaagaaaattagagacgcctccagcgaaggtgtggaaaatatttatcagtacggccccatgtatgggttccccaatgaaaaggagatgctgcgaaaggaattcggagggctatgcgcttactgtggtaatccgtctgatacactcatggaccgagaccacatcctgccgaggcgagatttcttcttcgatagctatctgaacacactacccgcttgcccgacttgtaattcggaaaaatcggcgagtcttccttcccaggtctcacttcgaataagtgaggacgcctattcaatgtacaaacagtac

SEQ ID NO: 1214 - DNA, 292 bp, unidentified
  misc_feature 1..292: note = Ga0194044_10012301 JGI
  source 1..292: mol_type = other DNA
atcagcacgcgccagcttcagatcgaccgaccttattaagtcctgcattcgagatactgcaccgagttcgtacaatgattagatggtctgcataagccatgaaaaccagaccgtttccttctgtataggaaggtcccgcttcttcttgtacggtcttgtaatatcattcaaattaacgactgtccagattcgtgccccaaatacttcctaggcatcttggggcgatgtcgctcggcacgtcctgcttatttatctatccgaatttatacagattctcccacatatcccgctg

SEQ ID NO: 1215 - DNA, 1266 bp, unidentified
  misc_feature 1..1266: note = Ga0310914_10061055 JGI
  source 1..1266: mol_type = other DNA
atgcaacgaaaagttaaatccgatactagactggacaagattcaagactgcgaagttttgggtcgtttgaagtcaactgaacactctgggagtggtatcccgaaagatatgcccgatgcttcccaagtcgggcttccctctgggcgtcagcgtcgatgggattgcagacacctacacagcaagggcttaccgccaaatgctgtgattgttcctgtcctggcactggatggagaaccacttatgccgacgtgcgcgtcgcgtgctagacgttgggttaaacagcacaaagctacgccgttctggctcaatggtgtttggtgtgtgcggttgcgctttgagccgagcgacaggaataagcacgaagtggttgtcgggattgatccaggaagcaaacgcgaggcgtacaccgtggcttccaaagagcacacctatctgaatgtgctcagtgatgccatagattgggttaaggatgccgtgggatcgcgcaagattctgcgacgagcgcgacggaatcgcaagacaccataccgaactaacaagcagaatcgagcacgcggaggcatcccgccatcaaccaaagcacgttggcagctcaagctgcgagtggttaaccaactgcgaaagatgtttccgatcacagggtacgtggtcgaagacgtaaaggcgactacgcacggcaggggcaggcgctggaatagctctttctcaccgttggaagtcggcaagagctggatgtacggagagctgttaaagctcggaacactgactctcaaagccggtcacgagacggctgaactgcgaaaaactttcggcgtggtcaaatgctgcggtgacaagatgtcgatgcgctttgacatacataacgtggacagttgggtgctggcaaaagatgcacttggagcagcaaagggacgcccggagaatatgcaactggtgcacgcaaggccactccgattcaggcggcgcgcacttcacttgcagaatccaaccaaaggcggtgtccgccgtagtcatggtggaacgctgagccaaggatttaagcgcggctcactcgttaagcatccaaagcacgggctgacgagcgttggtggcactaaagacgaccgtatcagcctgcacaaagtttcaggaaaacgcctttgtcagaacgcgaaggctcaagacatcacattgctgcgaagaagctcgatagctttccggccgataccaaagaacggcattcctctgccgcctaaaggcgacagtttcctgcctaagattttatga

SEQ ID NO: 1216 - DNA, 251 bp, unidentified
  misc_feature 1..251: note = Ga0310914_10061055 JGI
  source 1..251: mol_type = other DNA
gtaaacgaccgccagctaaagcaggcggctttttagagcagcaaaccaagcatgcaacgaaaagttaaatccgatactagactggacaagattcaagactgcgaagttttgggtcgtttgaagtcaactgaacactctgggagtggtatcccgaaagatatgcccgatgcttcccaagtcgggcttccctctgggcgtcagcgtcgatgggattgcagacacctacacagcaagggcttaccgccaaatgc

SEQ ID NO: 1217 - DNA, 1386 bp, unidentified
  misc_feature 1..1386: note = Ga0223826_10007721 JGI
  source 1..1386: mol_type = other DNA
atgctgacatacgtattggcaaaagacggtacaccgctgatgccaacttataagatcaacaaggtgcgccgtatgctgaaggagggtaaagcggaaatcgcgggccataagcccgggtttaccatccgcctcctgtatgaaagcgggaagggtgcgcagcctgtagaggtttgtgaagataccggttatgggacaattggcgtatcggtaaagtccgaaaagcacgagttcacccatgaggagtatacgcttcttccggatgaaaagatccgtcacgatgactgccgtaaatacagaaggacaagaaggaaccgcatcaggcacagggctgccaagttcgataaccggaagaaggataagggctggatcgccccgtcactggataataaggtacagcgccatgtggatatcgtaaccatgtataaaaaagtgctgccagtaacggatgtgacgttggaagtaggaactttcgatacgcaggtgttggaagccgtagaggctggcagacccctccccaaggggatcgggtaccagtatggtccgcagtacgggtttgatacgctccgggaagcggtcttttaccgggacggatacaaatgcatctgctgcgggaagtccgctattaaggaccacgcgattcttaagatccatcaccttggatttttaaagggcgaccacagcgacaggatgggaaatttggccacggtttgttcgaagtgccatacaccttccaaccataaaccgggaggaaaactatataaccttaagcccaagctgaaaccgctcgggggcgcagcattcatgaatgccgtcaggtggaaaatatacaacatggttaaagagcggaaccctggtttatacgttcacatgacatatggcgcggttacaaaacgcgaacggttaaggcgccatattgggaagacgcacgccaatgatgcttactgcatagggtttttccacccaaaacataaaacaagggctgtggcctataagaaggtgaagaggaacgaccgtatccttcaaaagttttatgacgcagtatatatagaccgccgggacgggaaaaagaaaaaaggcgcggagctttcctgtaacaggacgaaccgctctgttccgaggaacaacagccggaatgaacgcccgttccgaaaggagaaggcgtcaaagggccatgtaacgacccgaaaggggcgtacacagctgaaaccgggaagccttgtactgtataaagggaaggtaatgactgtccacggcacacatacgaataaagggaaggtcaacgtagaattcacgcaaaaggcttcagatgacaggaaatccgcaaatttaagcaaagtaacaattatcaggcctatgtatcaatccgggtgggtgcgcataagctga

SEQ ID NO: 1218 - DNA, 319 bp, unidentified
  misc_feature 1..319: note = Ga0223826_10007721 JGI
  source 1..319: mol_type = other DNA
ctatgtttccggcaaatatgtttaggagcttcggcatctgcactaaacgtataggcacttcggggtgctccacaagccccgcgcgtgaaaccctttcatcagggggttgagtggtacgaaagtacaaccctgcgcctgtgtgttaaaaacctctgaggtcaggaggcgtgcatacaggatataaaactgccggataaccttggcgatgtggaaccctgcctgtaagggcagagaaccccgcggcgcaacttaccgcgggaagccgtaaggcaaatgttactgtaaaccatacataagaaaaggaggcatcggaatgctg

SEQ ID NO: 1219 - DNA, 1476 bp, unidentified
  misc_feature 1..1476: note = Ga0209656_10018899 JGI
  source 1..1476: mol_type = other DNA
atgcttcctcagtcccaggctcttcgagttgccgccgcagacaagccatggtcagcgcgaaacgggcagcaacagacggctacggttcaacctgttcgaggggaaatcaaaccggcgcctcaaaacgccgagcgcggggtaacccgcacgtttgtgttatcgaaagaggggaatcctttgatgccgtgttcaaatgccagggctaggattctgattcgtaaaggccgagccaaggtttatcggctattcccgttcacgattcagttgatagacaaagcatccggcgacgttcaaccagtcgctataaagttggaccccggagcaaatacgactggtgttgccttggttcgagagcatgcagacccgaccaaacaaaccgtgttgcacctcgcggaaatagcgcaccgaagccgagcgatacggaaacacatgatccagagggcgatgttcaggcgtcgccggcgaactgctaaccttcgataccgcgcaccaaggtttgataaccgaaccagacgcgaagactggctgcctccttcgcttcaaagccgagtcgacaatgtggcttcctggcttaaccggtaccgcaaactcgcaccaattacctcaatctacgttgagtccgtcaggttcgacatgcaggccttggaaaaccccgacatcgagggtttagagtaccagcggggtacgttgttcgggtcagaactctgggaatacctgcttgagaagtgggggcgaagatgcgcttactgcgatgcggaaggcctgccccttgaggcggaacacatcgcgcccaaggcttgcggcggatccaatagggtcagcaacctgacgctcgcctgccacaagtgcaaccaacggaagggatcacagccggttcatttgtttctggcaaacgatccgtccaggctggctcgcattctcagtcatacgaaaaaacccttatcgagtgccgcagcagtaaacgttacccgaaaagccactacccgagtcatgtctgcgacaggcttagaggttcactgctcatcgggcggtcgcacaaagtttaatcgtacccagctcggaattccgaagacccatgcgcttgacgccgcttgtgtcggtgaactctcagaacttgagagttcgaacattcccgtcctttgcatcaaagctaccgggcgcggaagttaccaacgcacccggctagacagtttcgggtttccgcgaggctatctcacgcgccaaaaggcggtgaaaggttttcaaacgggtgacttggtaaaggcaaccatgccaagagggaaattcaaaggcgtgcaccaaggccgattggcagtgcgagtgcgtggagcttttgtgatccagagctcagcaggaaacgtcgaaacgagctggaaacactgcaaacgtctcatgcgaaacgacggttacacctacgaaatcaactcaccggcgattcctccgccacctaaaggaggcggttccctcgcttattaa

SEQ ID NO: 1220 - DNA, 254 bp, unidentified
  misc_feature 1..254: note = Ga0209656_10018899 JGI
  source 1..254: mol_type = other DNA
gtcaacgaccgccagctaaagcaggcggcttgtgagcgattgcaggcctgtgttgaccagaacaagtgaaaactacgttgagccgcaagcaaaagactaaccctgggatgcttcctcagtcccaggctcttcgagttgccgccgcagacaagccatggtcagcgcgaaacgggcagcaacagacggctacggttcaacctgttcgaggggaaatcaaaccggcgcctcaaaacgccgagcgcggggtaacccgc

SEQ ID NO: 1221 - DNA, 1293 bp, unidentified
  misc_feature 1..1293: note = Candidate divison MSBL1 archaeon SCGC-AAA382M17AAA382M17_Contig_8_C, whole genome shotgun sequence
  source 1..1293: mol_type = other DNA
atgagtcaaaaagtctacgttcggatcatgaggggcgaaccgctcatgcccacgaacccagcgaaggccaggcacctcttagatgacgacagagcggaggttgttaagaggaagccgttcacgattcggctgaagtacccaacaggagaaaacgggcaggaggtgaccctcggggtggacgccggctactccaccgtcgggttctccgccgtcacggaggatgaggagctgatccgcggtgagctcgacctgagagacgacgtgtccgataggctgaggcggagggcggactacaggagaaacaggcggagcaggaagaccaggtacagagaacctcgtttcgacaacagggggaaggaggacggctggctcgccccctcaataaagtacaagatgagcgaccacctccagctcgtcgagatgatcggggagctacttcccgttacccgaaccgtggttgaggtggccacgttcgacacggagaagctggcggaccctgagctggacgtgacggagtacgtcccggagacgttcaggggttacgaggtgaaggagtacctgctggcgaagtgggggaggaggtgcgtctactgcggcgcggaggacgtgccccttgaggtcgaccacatagtcccgaagtcgaggggcggttcggaccgggtcgacaacctgacgatcagttgcgtggactgcaaccgggagaagggcgaccggaccgcagaggagtatgggcaccctgaggtacagaggaaggcgggggagtccctgaaggaggccgcgttcgtgaacatcgtccggtggaagatcgtgaacgagctggactgcgaccacacgtacggctacaggacgaagaagggacgcatagacctcggcctggagaagtccgacgacaacgacgccttcgtgatagcgggcggcggggaccaggagcgaactggaccctaccgcgtcacccgtggacgccggaacaaccgcaagctggagatcaacaggaggggtcacggccggagcgtccgtcgggagcgctacgagttccagccgggtgatttggtcagaggggatgacgctctgtaccgcgtcaggggttcctgctcctatggcaggtacgtccgagcctttgacgaagaaaggaacgaggaatacttgagagcggattccctcaaacttgtgaagtacggtaaaggtctctgctggcgggagaaaacaagtcgcaattcctctcccaccgaatccgaagattcgaaaggagtctcctcgcgacaaccagatggaatggcggagagattgtggtaa

SEQ ID NO: 1222 - DNA, 342 bp, unidentified
  misc_feature 1..342: note = Candidate divison MSBL1 archaeon SCGC-AAA382M17AAA382M17_Contig_8_C, whole genome shotgun sequence
  source 1..342: mol_type = other DNA
gttgactactcccacctaagctctgcttaggaaggagcctgaaagggttccgatccgggagcgggagactagccttggcgatgtcccctcgggagtgggggcagatgagctacgttcggggctgagtgttcgaaaagcacttgtggatgcctcccaagtccgcaactctgcaaggcaggtggacgaaacacgccgttatcccgatggtgtgcaacatcacctgttcgagcccaccccaacattggcgatgggaacttactcctctggtgtgcgggaggccgggactcgagagtccccggcatttaacataccatttaggacgtgtacaaaatgagtcaaaaa

SEQ ID NO: 1223 - DNA, 1437 bp, Moorena sp.
  source 1..1437: mol_type = other DNA
atggagaaacatatgaaagagaagcagaagttagataggagagatacatacacacctacggatgctccacaagtccgtggcaactgtgatcatgcattaaacagagaggaaactctcagtgtgcatggtttaaaaaccccttctaacaacccccatgtggacctactctcaccggtaggagggcataaagccgatatgccggtatttattctaaacgatgatggaaaaccattgattccatgcaaacccgccaaggcaagacatcttctaagtgacaagaaagccaaagtaatttcttctaatccgttcacaatacagttgctttggcattgtgagggaaacgtggaaacaataacactgggcatagattctggatacaaacacataggtttttctgctgtaacagacaataaagaactcatatccggggaagtagtaataagaactgacataccgaagctcaatgaagaaaaggcaatgtaccgcagaaaaaagagaaataagctctggtacaggaaaccaagattcatgaatcgtggcaataataaagaaggacggttcgcaccaagcattgaacacaaactggaaactcatataagattgattgagaagttgaagcgaatacttcccgtatcaaacacagtgatagaggttgcatcctttgatacccagaagatgaagaatcctgagataagtggaatagaataccagcagggagaacttcagggatatgagatcagggaatatctccttgagaaattccatcgcacatgtgtgtattgtggcaagacaggtgtgcctcttgaaatagagcatctaacgcccagatcaagagatggtcccgatacggtcaataatctcgcaatctcatgtcatgactgtaaccagaagaagaacaacctcacagcagaagagtttggatatcctgaagtgaggaagagggcattgatcaccatgagagatgcagcattcatgaacactgtaaggtggaagcttacacaacttacaggatcagaacatacattgggattcattacaaagaagaatcgtatttctcttggtctggataaaacccatgccaacgatgcatttgtgattgctggaggaactgttcagatcaggacattgccatttacaatcacacagagaaggaggaacaaccgttccatccagacgaacaggaagggattcaggccatcaataataaggaaaagatatgcattccagcctggagacatggttctgcatgatcatgagagattcagtgttgttggtatgcataactatgggaaatcaatcgtaataaaaggaggagggaagaagatggacataaacacgaagaaggtcaagctggtaaaatatggaaaaggattgcaattcgcaccccaattccttcccaccctttcggatggggtctcattggggggagttagatga

SEQ ID NO: 1224 - DNA, 277 bp, Moorena sp.
  source 1..277: mol_type = other DNA
gtcaactacccctccctgacggaaggggcttgtctcgtgaggaacagcgcaagagttgattagggggctttaaaaacatggagaaacatatgaaagagaagcagaagttagataggagagatacatacacacctacggatgctccacaagtccgtggcaactgtgatcatgcattaaacagagaggaaactctcagtgtgcatggtttaaaaaccccttctaacaacccccatgtggacctactctcaccggtaggagggcataaagccgatatgcc

SEQ ID NO: 1225 - DNA, 1815 bp, Moorena sp.
  misc_feature 949..1668: note = MISC_FEATURE - Any "N" represents any nucleotide
  source 1..1815: mol_type = other DNA
atgttacgagtaccagtattaacaccatcaggcaaaccattgatgccaaccaaagcaagtagggcgcgtcgttggctcaaagaggggaaagcgcgggttgtatataacgacgttggtatcttccagattcagttagtcagatgccccaggacgcaagacatacaacccattgcggttggcatcgacccaggtaaattgtacacaggtattggtgtacagtctgccaagtttactttgtggttggcacatctccaattaccgttcaaaacggtgcgagaacgcatggagcaacgcgccatgatgcggagagggcgtagaggtagacggattaaccgcaagttgccctacaatcaacgcgcacatcgccagaaacgttttgacaatcgtcgtcaatgcaagattccaccaagtattcgtgctaaccgcgaattagagttacgggtgcttgacgaattatcgctgatttacccaattaccacggttgcctacgaaatagtaaaagcgagtggtgataaggggtttagtcctgtgatagttggtcagaaatggcaattagagaatctggcaacctatgccgaagttaaacaggttgagggttggcaaaccgccaatattagacagcagctaggattgcacaaacaaaaacattctaaaggtgacgcaattcctgcaacccacgctgtagacggtgttgctgcttcgtgtagcgcctttgttcggtacggcatcattgaccgtcattcacgaggctggaaaggtgatgttactgtaactcccgcacccttcacagttattcgccgtcccccagtatcgcgccgccaactacaccttatgcttccctccatcggtggggtaaggagaaagtacggtggcactgtaacccggcacgattttagaaagggtgacttagtaaaagtccctagtggtgaaattggttattgcagtggcnnnnnnnnnnnnnnnnnnnnnnnnnnnnnnnnnnnnnnnnnnnnnnnnnnnnnnnnnnnnnnnnnnnnnnnnnnnnnnnnnnnnnnnnnnnnnnnnnnnnnnnnnnnnnnnnnnnnnnnnnnnnnnnnnnnnnnnnnnnnnnnnnnnnnnnnnnnnnnnnnnnnnnnnnnnnnnnnnnnnnnnnnnnnnnnnnnnnnnnnnnnnnnnnnnnnnnnnnnnnnnnnnnnnnnnnnnnnnnnnnnnnnnnnnnnnnnnnnnnnnnnnnnnnnnnnnnnnnnnnnnnnnnnnnnnnnnnnnnnnnnnnnnnnnnnnnnnnnnnnnnnnnnnnnnnnnnnnnnnnnnnnnnnnnnnnnnnnnnnnnnnnnnnnnnnnnnnnnnnnnnnnnnnnnnnnnnnnnnnnnnnnnnnnnnnnnnnnnnnnnnnnnnnnnnnnnnnnnnnnnnnnnnnnnnnnnnnnnnnnnnnnnnnnnnnnnnnnnnnnnnnnnnnnnnnnnnnnnnnnnnnnnnnnnnnnnnnnnnnnnnnnnnnnnnnnnnnnnnnnnnnnnnnnnnnnnnnnnnnnnnnnnnnnnnnnnnnnnnnnnnnnnnnnnnnnnnnnnnnnnnnnnnnnnnnnnnnnnnnnnnnnnnnnnnnnnnnnnnnnnnnnnnnnnnnnnnnnnnnnnnnnnnnnnnnnnnnnnnnnnnnnnnnnnnnnnnnnnnnnnnnnnnnnnnnnnnnnnnnncgccaagttgttcccggtgatcaactaattatgactgtggaactgttgtggatcaaacaacgtcgtttcggtaagatgcaggctcgcgccgaggttgacagtcagttagttgctgaaggcgaattaatgttttccctcgtaagctga

SEQ ID NO: 1226 - DNA, 235 bp, Moorena sp.
  source 1..235: mol_type = other DNA
ttcaactaccccgccctgcctaacggctgaggacggggattgctaaaaacaaatttagcagcgcaagtgttgaatagcccactaagactaatcctgatacgcacttccgaatgcttccccagttcggattatctgcaagactttttgttaagtcgttgggtaaagccaagtcattctggattagttgggcgaggggacttaacactttactcggaggtttatcaccatgttacga

SEQ ID NO: 1227 - DNA, 1194 bp, unidentified
  misc_feature 1..1194: note = Lactococcus sp. 1JSPR-7
  source 1..1194: mol_type = other DNA
atggtacgtcgatggattaaaacaggacaagcacactggattggacgtgacaccattcaattcgaccgtccaataggttcagaaacacaagaactcacattaggcattaatgccggctataaaatcattggtgcatcagtgacaagtgagacacaagagtattatgcctcagaaacgaacctgcgcactgatattgtcaagaacttgagtacaaaacgtcaatatagacggtctcgtagaaatcacaagacacgatatcgtcaggcacgctttgacaatcgtgtgaagtcaaagcataaaggttggcttgcctcaagtattgaagtcaagattgacaatcatgtccagctcattcgcaagcttataaagaagcttccgataactaatattatcgttgaagctggacagtttgacattcaaaatctcaaaaaccctgacatcacaggtaaagaataccaagaaggaaatcaacttggatttgctaatgtcagagagtatgtcttagcaagagaccatcacaaatgtcaacactgcaaggcagatggtttgaaaggtatcaagttacacgtccgtcacctcgtctcacgaaaagtgggaggtaaccgccctgacaatctcatcattttgtgtgaaaactgtcacgcagcttaccaccgtggcgagtttgaattaaagaaagcaccaaaaggctatgcgccagctagtgcaatgtcaatcatgcgttcgaccctgcttgaccgactcattaatgaatttggtgacaaggtggagacaacgtttggctatttggtcaaagaagcacgactcacaattgacttgccaaaaacaagcatgactgatgccttcgtcattgcaggcaatctaatggctgacagattagactttcaagagctgagaaagcatgtgcgctgccataacagacaactccacaaagcaaaatttcttaaaggtggcatccgcaaagccaatcaagctccaagagaagttcatggttttcgactgtttgacaaggttcaggtagaaaacaaaaattggtttgtttttggaagaagaaccagtggctattttgaccttcgtagtctgacaggagaaaagctcaataaggggagctatagtgccaaaaaaattaagctcgtacaccgagcaaattcagtaatcacacaatacgcaacaatcgctccaacgggagcatag

SEQ ID NO: 1228 - DNA, 209 bp, unidentified
  misc_feature 1..209: note = Lactococcus sp. 1JSPR-7
  source 1..209: mol_type = other DNA
atcaaggaggttcaatagctccagtgacacacgggtttgaaaacccatgattgctcgctttgctcagtcgcattgcaagatgtgattcgagcgaaatattgaatagtctaagctagaaatagctacgttatcttggttaacagacccgtggacctttgttctcatctacggctctctggaggcactgtaaacagttctgttggagacgg

SEQ ID NO: 1229 - DNA, 1341 bp, unidentified
  misc_feature 1..1341: note = Wastewater metagenome
  source 1..1341: mol_type = other DNA
atgtttaaacaattaaactttaataaagtgttagtcttggatactaaccgcaaaccactgatgccatgctatccagcacgagccaaaaaattgctttcaagtggtcgtgcttctgtatttcgcagatttccatttactattattttgcatgatcgaactggggaagaaagcaatctacaagacatagaaatcaaaatcgaccagggttctaaaaccactggtgtagccttagttgtacatggtgccacaggccatgctgtggcctttgctgcacacattgagcatagaaccaatattaaatttgctcttgattcaagacgtgctattcgcagaagcaaaagacaacgtaaaacacgttatcgccaagctagatttctcaaccgtactaagcctaaaggatggctgccaccatcgttggtaagcaaagctgagaatattttaaactgggttgtccgctttgctaaattaacaccccttagcaagtttgcacttgagacagctaagtttgacactcaaaagcttgagaaccctagtattaaaggtgttgaatatcaacaaggtaaaatgtttggatatgctgataagaaagcttatctacttgaacgtgaaaactattactgtatttactgtggcatacatgctagtcaagccaaaatggagattgaacacgttatacctagaagtaaaggtggtacagatagtctgaacaatcttgtattatcctgtgaaacctgtaatcaggccaaaggtaatcaagatgttgaaaccttcctaaaaggtaaaccaagtgtattaaaacgtgtgaaaaaacatttagatacaagtcacaaagatgctgcacatatgaacagtattcgttggtatgtgatgaacaatctccgaggcatggcagatgccattggtgcaactctaaaaattggttttggttcaactactaaacaaaatcgtttatcacttggattgcccaaagatcattggattgatgctgcggtttgtacaagtgatggtagtactgtcaaagtagaaccaaatttaaaaccgcttattatcaaagcagtgggtcgaggctcaaggcaattctgtcgtatggacaaatatgggtttccaagaactagtccaaaacctagaagtaaaaacttctttggttttaaaacaggagatatggttaaagccgttatacctgaaggagctaaaaccaaagtacctgcaagtacctatgtaggccgtgtagcggtgcgtagtacaggttactttgatgtaaaaaccagaaataccaagatcactatgtcttataaacattgtaaaccaattcacttaatggacggatatagttatgcgtaa

SEQ ID NO: 1230 - DNA, 266 bp, unidentified
  misc_feature 1..266: note = Wastewater metagenome
  source 1..266: mol_type = other DNA
gtcaacaaccccaccctaaagggtgaggcttgcaaaagcctagttgaccagccttagttttaagctacgttatcttagttatcacactttagagtgcttcaccagctctaaaccctgtgcaggctctgtaaacatctcttgggtaagagaagtcaacctgaatttggcattaaattgcaaagcttagataacattggcgaggtgaacgttacaacagtgatttatcactaggttccgtaaggaaaaaaatatgtttaaacaattaa

SEQ ID NO: 1231 - DNA, 1101 bp, unidentified
  misc_feature 1..1101: note = Ga0099741_1041 JGI
  source 1..1101: mol_type = other DNA
atgcaaaatctaagagttccagtgttgaatccagatggctgccccgctatgccaaccaaacccagccgcgcacgtcgttggctcaaggagggcaaggcacgagttatctataacgatctgagcatcttctctattcagctaatagaggagccatcgggtagaaacactcagcaggtggtgttaggtattgatccaggaaaattatacacaggtatagcagcacagacagctagagccactctatttatggcgcacctgcaattacctttccagacggtcaaagatcggatggagcaacgccgagtgatgcgtcgattgcgacgctatcgtaactgccgtcgtcgtcccgccagattctcgaatcgacgggtcaaaaaagtaccaccatcaatcaaggctaatcgtcaacttgaactacgggtagccaaagaattgtgtgccgtatatcccatcaccttgattgtttacgaggtggtcaaggctgctggttccaagtctttctcccctgtaatggttggacagttttggatgcttagtcaacttgagaaactgcgcccaactgagcagaaatatggttgggaaacttctcaagttcggactcaattggggctggaaaagcagaaaaatcacaaaggcgacactatccctcaaactcatgcagttgacggcattgctctagcagccagtcaattcctaacctatcaacaatggcacactaaaaatgctcatggagctaattgggtgggtttttgtcgggttactcctgctctatttttcgtgattcgcagaccaccaattaaccgccgtcaactgcatctcatggttccggctattggtggaattaggcgcaagtatggcggtacgacaactaggcatggattaagaaaaggagatctagtccaagcagaacaggcaagtcgtgtatctattggttgggtgagtggcgacacgaaaaaccaaatatcagtgtctaatttcggctggaaacgtattgctcagtttacagcctcaaaagtccatttgattcagcgctcaacgggtttactcgttgcgtcagatggcaagttgtcaaggttgacggcattgagtcatcaaccttga

SEQ ID NO: 1232 - DNA, 243 bp, unidentified
  misc_feature 1..243: note = Ga0099741_1041 JGI
  source 1..243: mol_type = other DNA
gtcaactaccccaccctagtcgaaacgaccgaggatggggcttaaaagaaagccaatcttttaacgcaagagttgactagaccacttacaaaacatctagttggcacgcacttccgaatacttctctagttcggactatctgcaaactgattggttttcagtgttgtttaaagacaagacatcttgctagatgtggtcgaagagacaaataactgcaaaggattatctctatgcaaaatctaa

SEQ ID NO: 1233 - DNA, 717 bp, unidentified
  misc_feature 1..717: note = Ga0376514_000350 JGI
  source 1..717: mol_type = other DNA
gtggaaggatggttgccgccttcattaaaaagccgggttcacaatatcgaaacctggaccaaccggttgtgccggttttgcaatattcaggcaatttcaatggagttggtgcggtttgacatgcagaaaatacagaatcccgaaatatccggtgtcgcgtatcagcagggggaactcatgggttatgaggtgcgggaataccttctggaaaaatgggacagaacgtgtgcctattgcggaaaaacagatatcccgttggagattgaacatatcgtgccaaaatcgaaaggtggttccaacagagtcagcaatctgacactggcctgtagggcgtgcaacaggaagaaggggaacaagcccctagaagagttcctttcaaggaaaccgggactgttgaagcgaattcaaaagcagtctaaagtgccgctcaaggatgcgggtgccgtcaacacgacccgatgggacttgttccgtaccttgaaaaaaatcggactgccggttgaaacaggctccggcggtctgacaaaattcaaccggacgaccaggggacttcacaaaacgcattggctcgatgccgcctgtgtcgggaaaagcacacctgaaaagatttttcagatcgacaaaaccgtgttgattgtaaaggcagacggtcatggctcaaggcagatatgcagggtaaacaagttcggattcccggacaacagcaaagtcaactga

SEQ ID NO: 1234 - DNA, 260 bp, unidentified
  misc_feature 1..260: note = Ga0376514_000350 JGI
  source 1..260: mol_type = other DNA
gtcaactacccctcggctgaagaccgaggggcttgaaaaagccccaaagttgaccagtctaagtgcttcgagtactacgttagatcgaaaacaggtatcctggggtgctcgccggctccaggttctacggcaagtggttaaacaggtctaaggggttaaacaggtctaaggggttaaaccggtgctgcttgcgccaaacccggtcataacattgacgcggcaaacattaccttggaaacaagaggattttaaaattgagt

SEQ ID NO: 1235 - DNA, 1281 bp, unidentified
  misc_feature 1..1281: note = Human gut metagenome
  source 1..1281: mol_type = other DNA
ttggcgaaggatcattaccggtcaatagaccgcgaggaaactaacttgagagtatatgttttgaacaaacgaggagaaccgctgatgccgtgttcgtcagccaaggcacggattcttctcaaagaaaagaaggcggtggtgaaacggcgcacacccttcaccattcagctcacgatcgccacgggagaaacgacgcagcccgtgaccctcggcgtcgacgccgggtacaagcacgttggactttcggcctccaccaaaaaggcggaactctatgcgtcggaaatcgaacttcgtcaggacgtttccgagcttcttgcgggtcgcagtgctctgcgtcacgcccgtcgatcccgcaagacccgtcaccgtgctccgcggttcgacaaccgcaagagagataagggatggcttgcgccgtccgtggagaaccgcatcggcgcacatgtctctcgcgttgaggcggtcctgcgcatcctgccggtgacgaagatcatcgtggaaacggcgtcctttgacgtgcagcgtctgaagaatcccgacattcagggtgtcgagtatcaacagggcgaacagctcggcttctggaacgttcgtgaatacgtccttttccgagacggacacgagtgccaacactgccacggaaagtccaaggacaaggttctcaacgtccatcacattgagagccggcgcacgggaggcgacgctcccaacaatctgatcacgctctgcgagacgtgccacaaggcattccaccgcggcgagatcgagttgagagtgaaacgcggccgatcgtttcaggcggaaaccttcatgggcgtcatgcgctggacgttcttcgagcggctgcgggcgaggcactccgaaattgaggttcgaaacacattcggttatctcacgaagaacacccgcatcacacacggaattgagaaaactcactgcgcggacgccttctgcattgcgggcaacctcaaggcgaagcggctcggatactacttctttcagaaacagacccgccgccacaaccgacagatccacaagctcacgatcctcaagggtggcgctcgcaaacgccatcagacgccgtacgaaatcaaaggattccgtctttacgacaaggtcctgttccagggcaaaacggccttcatcttcggccgtcgttcttcgggatacttcgacattcgaacgttggacggggagcggatttccgccagcgtcagctacaagaaactgcgtctcttggaaaaacgtcgcacctatttgattgagctcagacgcaactaa

SEQ ID NO: 1236 - DNA, 259 bp, unidentified
  misc_feature 1..259: note = Human gut metagenome
  source 1..259: mol_type = other DNA
gtcaataacccctgtctaaagacagaggcttgatagccattgtggccttcgagccttgattgactagcctcagtccgccgtaacggactacgttggttgggaatgtataggcaccgcgggatgtagatcctagtcccgcgctctgcggccggcggttaaaagctctgagaggtaggagcggtgccgtcggtgaaaaccccttccaacattggcgaaggatcattaccggtcaatagaccgcgaggaaactaacttgaga

SEQ ID NO: 1237 - DNA, 1197 bp, unidentified
  misc_feature 1..1197: note = Ga0256829_1001599 JGI
  source 1..1197: mol_type = other DNA
atggtaagagttgtaagcatagacggtaaaaatcttatgcctactaatagacatggtaaagtaagaagattgctaaaggataataaagcaaaagttatatgcaaaaatccttttacaattcaattgctttatcagacagatgatgttactcaaaagataacaataggagtagatacaggatataaatttacaggatttgcttttatagcaaataataaagttttacaaaaaggaactattgaactaagacaagatgtttcatcattaattactttaagaagaacattaagaagaggtagaagaaatagaaaaacaagatacagaaaaccaagatttctaaatagaacaagacctgacggatggttagccccatcaacacaaagtaaatacaatcatatcttgaattggatagatagatttactaaatatcttccaaattaccaactaaaagtagaaatagcaaattttgatattgcaaaaattaataatcctgatatagaaaaagagttatatcagcagggaaatatgtatggatatgagaatataaaacagtatttattagcaagagaacatggaacttgtcaatattgcaagaaaaagaagaatgataaatggcatatacaccatatagttccaaaatcaaaaggtggaagtgatagggtagataatttagctttactgcatgaaagttgtcataagaaacttcatgagaaaaatgatactaataaaatatctaagcccaaacagtataaagatgcaacatttatgaatatcataaaatggaaacttgtcaatgatttaaaagccaaatatcaagataaagtatcttttacctttggttatatcactaaaatagacagaaatgatttaggattagaaaaaactcactacaacgatgcaatagcaataacaaaagagatagtcaatgaaaataaaagcaatcctatttatatcaaacaagttagaaagaaaaaaaggtctttacatgaagcaacaccacgaaaaggtagaagaataaaaaatacaactcaaaagagaagctctaaaaatacaaaagggataacagtaaacaataaaaaaatagctttatatgataaagtaaaaataaataatcaaataggttatgtcagtggctttacaggtaaaatggtttatgtgatagatatacaaggcaactatatcaaacagtcaaataaa

SEQ ID NO: 1238 - DNA, 276 bp, unidentified
  misc_feature 1..276: note = Ga0256829_1001599 JGI
  source 1..276: mol_type = other DNA
aatcacctcccctaaatctcagattatagaggaggcttgttagcaatagcaagataatcaatggttgactagactaagttgcctcgcaagaggtcaaactaccttattactgttatcacacctttggatgatacccaagtccaaagctctgtgctgatactgtaaacaaagaggaaactcttagtcagtatcaggtaaaaagcagtaataagattgtcgatgggtaattactccgtaaggagctttacaagattatatataaaggacaaagagatg

SEQ ID NO: 1239 - DNA, 837 bp, unidentified
  misc_feature 1..837: note = GENOME_ACESSION: mgm4799989.3 MG-RAST
  source 1..837: mol_type = other DNA
atgggagaattactccgtaaggaggtgggctatatgttagtctacgttattaacaggcacgggaaaccgctaatgccgtgtaaaccgcagaaggcacggaagctattgaaagaacagaaggctaaagtagttaaaagaacaccattcaccattcagttgttgtacggttcctctggatacagacaagatgtaattctcggtgtagatgccggaagtaagacaatagggctatcggccacaactgagaacagggaagtattttcagcagaagtcgaattgagaacagatattgaggtcgaacttaaagtcaaacgcaactcctcattcagggatgcagactttatgggcataatgcgatgggctttctacgataaactaaaagaactgtattcaaatgtgtctctaacttttgggtacataactaaacacgctcgcattaaacacaatctcgaaaagtcgcaccgtataaatgccaggtgcatctcaggaaacccatcgacaaaagaaagcgattgttggtacttcttcaaacaagtacgcaaacaaaacaggcaattgcacaaaacaaatccgaaaaagggtatccgcagagagaacaaagctcctggatacgtacacggttatcagctgttcgataaggttgaatatcttggtagggaatgttttgtgtttggacgcagatcgtccggatattttgatttgcgtactcttgacggagaagtcgtcagtcgttctgccagtgtaggtaaactaaaacttgtagaaagagcttcatcattattgtgtgaaaggagggaagcgtcatttctcaccgcgctaaagcacggtgtctcctga

SEQ ID NO: 1240 - DNA, 235 bp, unidentified
  misc_feature 1..235: note = GENOME_ACESSION: mgm4799989.3 MG-RAST
  source 1..235: mol_type = other DNA
gtcaacgacccccggcaaaagccgtgagctagtagctcttgttgactagcctaagtgtttcgagcactacgttaccggcaaatgtataggcaccgtaggatgcgttcccaagtcttacgctctgcggttagtggttaaacagttctgatgggtagggacagtgctgctaacgagaaactgtcggataacattggcgatgggagaattactccgtaaggaggtgggctatatgtta

SEQ ID NO: 1241 - DNA, 1668 bp, unidentified
  misc_feature 1..1668: note = Viral metagenome
  source 1..1668: mol_type = other DNA
atgcttcctcagtcccaggctcttgaatccgcgtcagcagacaaccgtaagggcaaggacgaaacgggacacggacgtcgtggaaacatgataactggtatgcaacatggtcgagaggatcgtttcttagagttcacctctctgggagacagtcacactgcaacttcggagcaatccgagggagcagaagcacggggcgttatagccccacccaatagtaccgcatcacgggtgttcgtgcttgacaagcacgggaagccgctcatgccctgtcatccagccagggcacgcaaattacttaagtccggacgagccagagtccaccgactggctccgttcgtgattagagtggtggacagagaaatagagcagtgtgaggttcccggagtcaccataaagattgatccaggttccaagcacaccggcattgtctgtgccagcgtagatgaggccggtataactcatgggctggtgtcgatccagctcgaccatcgcgggcagcttattcacaagaggatggaacagcgggccaactaccgccgtcgcaggcgctcggccaatctacgttatcgtgctccacggtggagaaatcgccacccgcaggcttgccgggcatgcgggaaaaatgcaaagcacaacaaggggtattgcggcccgtgcatacaaaagcgtgatttcgtggataacggatatcgccagtaccgtcttccaccaagcctcttccatcgagtcgcaaccaccacagcgtgggtaaatcgcctgtccagatgggctccggtcacgggtctggcgatggaactggtgcgctttgatactcaggtaatgcagaaccccgaaatttcaggtgttgagtaccagcagggcaccctagcaggttacgaggtacgggaatacttattggaaaaatgggacagaaagtgcgcttattgtggagccagcggtgtgccgcttaacattgatcacgttgttgctcgatccagaggggggactaatcggatatcaaatcttactctgtcctgcagaagctgcaacgaatccaaaggttctgaagacgcagaagtttggtgcaaacgacgcttcggagaacagaacggagagaagattgctcgtaaggtcaccgctcaggcaaaagcatcactcaaggatacagcagcagttaattccacccgttgggcattatggagagaacttctgaaaacgggactgccagttgaaaccggtacaggtgggcaaaccaagtggaacaggaaacgattcggtatccccaagtctcacacccttgatgctctctgcgttggagaggttgataatatcggatcagtgcccaatagcgtgttgatcgttgcctgtacaggacgaggcaagcatcagaggacgacactagacaaatacggttttgtccgttcaaggttgccacgaaccaagactcatcacggcttgcgcaccggggattttgtgcgggcggtggcgtcgaagggcaagcacaagggtgtccatgctggccgcgtaatcgcgcgttcatctggaagcgtctttgtgggtaaggtagatgggatttcttgcaagaactgctcggttttacaacgggcagatggttatggatataatagaaaggaggaagcgcttctcatttccgccctcacggacggggcttccgaggcgcgataa

SEQ ID NO: 1242 - DNA, 223 bp, unidentified
  misc_feature 1..223: note = Viral metagenome
  source 1..223: mol_type = other DNA
gtcaactaccccgtcctgatggacgaggcttgcggaaagtttccggaagcccaggttgaccagaccgagatattagaaagaaggtgagacaaaatatctacgttgtatacgagtaagaggaccaaccctgggatgcttcctcagtcccaggctcttgaatccgcgtcagcagacaaccgtaagggcaaggacgaaacgggacacggacgtcgtggaaacatga

SEQ ID NO: 1243 - DNA, 1680 bp, unidentified
  misc_feature 1..1680: note = Ga0207433_10050431 JGI
  source 1..1680: mol_type = other DNA
atggctacgttgcacacgagcgagaagacccaccgggggatgcttcctcagtcccctgctctggaacccgtgccagcagacaaccccggggtagggacgaaacggggcacggggccggtacccatcccgggcactggtgtgcaccatggtcgaggggagaccggggatgtgtgtgcctgcgcaccccggcgtcacccgtcgaagaccgacgaaccggtcgagacggagagcggggctgttaccggccctgtcgctgtacccttgtccgtcgcgtcccgggtgttcgtgctcggggtcgacggcgctgcgttggacccgtgccatccggctcgtgcccgcaggttgctcgcctgcggccgggcccgggtggcgcaccacaccccgttcgtcatccgcctgatcgacaggagcgccgagcagtccgtcacccacccgctcgccgtcaagatcgacccaggctcccgccacaccggcatggtcgtcgcccgggtcgacccggagggccgcacccacggcttgttcgccgtgcaggtcgatcatcggggccgccagatctccgagcggctgacagcccgggccggctaccggcgtcggcggcgcagcgccaacctgcgctaccgggccccgcgttggcgtaaccgccacccggccgcctgcgacgcctgtggggcgaatgccatccacggccgccggttctgccgtccctgcgcagccgccaagaccccggggatgggagcgagagagtcccggcttgccccgagcctcgcccaccgggtcgacgggacctgctcgatggtggcccgcctggcccgctgggcgccggtcgctgcggcggtgatggaactggtccgcttcgacctccaagccctcgaggaccccggcatcgccgggatcggctaccagcagggcaccctcgccggttacgagatccgcgagtacctgttggagaagtacagccgcacttgcgtgtactgcgacaggaccggcgtgccgctccaagtcgagcacgtccggccccgttcccgctccggctcggaccgggtctcgaacctggtcatcgcctgcgatccgtgcaacaacgcgaaagactcccgctccgtcgaggagttcttggccgccgaccccgaccgcctggccaaggtcctcgccgggctccgcaagcccctgcgggacgcgaccgcggtcaacgccacccggtgggccctgcaccgccgcctccaggccatgttccccgaccgagtgagcgtcggttccggtgggcgcaccaaatacaaccggacccgagccggcctacccaagacccacaccctcgacgccctctgcgtcggaaggacccacgcagtcaactcgtacccggcgcagttggttatagctgtcgccgtcggccgaggcgtgtactcccgcaccgtccccgacgcctacggtttcccccgcctacaacgaccccgcaccaaactcgcccacggctacgccaccggcgacctcgtcagagcggccattccaaccggcaagtacaccggtacccataccggacgagtgatggtccggaccagcggagcgttcgacgtccgcaccctcaccgggcgagtcggcgccaaccggcggcactgcagtctccttcaacgagccgacggctggagatggtcccgccaggaagaaggacattccaatgactcatga

SEQ ID NO: 1244 - DNA, 310 bp, unidentified
  misc_feature 1..310: note = Ga0207433_10050431 JGI
  source 1..310: mol_type = other DNA
gtcaaccaccccgccctagcggatgggggctagtggcgaagcgattcgctgccagtcccgtccgactagggctggttgaccagaccgagccatcgaaaggaggcgaacagatggctacgttgcacacgagcgagaagacccaccgggggatgcttcctcagtcccctgctctggaacccgtgccagcagacaaccccggggtagggacgaaacggggcacggggccggtacccatcccgggcactggtgtgcaccatggtcgaggggagaccggggatgtgtgtgcctgcgcaccccggcgtcacccgtc

SEQ ID NO: 1245 - DNA, 1335 bp, unidentified
  misc_feature 1..1335: note = Ga0207433_10084486 JGI
  source 1..1335: mol_type = other DNA
gtggaagactccaccttgcagccggttcggctcaagctggaccccggcagcaagaccacgggcatggcgctggtgcgggagtcggaggaggtctatcccgacacgggcgaggtgcagcgcacggcgcatgtgctgaagctggccgatcttcagcaccgcggacacgtgatccgcgaagcgctcacgcagcgtgcgtcgtttcgccgccgtcggcgcggtgcgaacctgcgtcaccgcgcaccgcgcttctgcaaccgcacgcgcccggctggctggcttgcgccatccttgcagcaccgcgccgacacgacgctggcctgggtgcgcaggttgcagcgctggtcgccaatcacagcgctgtcgcaggaactggtgcgcttcgacatgcagttgattcagaacccggagatcagcggcgttgaataccagcatggcacgctccagggatacgaggtgcgtgagtacctgctagagaagtggcaccgcacctgcgcgtactgcccagccacaaacgtgcctctacaggtcgaacacatagttcctcgtgcgaagggcggcagccatcgtgtatccaacctcacgctggcgtgcggaccttgcaacacagccaaggggacgcaggatgtgcgcgcgttcctggcgcaagatccgaagcgcctggcgcgcgtgctggcgcaggccaaggctccgcttcgcgatgcggcagcgatgaaattatttacacaagctgagtttgacaacttacctgtcattgacggagtgaagcaatgccctacgggcgactattcttcggttcgtaattttggtgagaggtgcgtcttcggcgcagaatccattttctgtcgggatagccgcttcgccgattcgtgcattttcggcgaaaagagccgatttggcgtgggttgtagcttctgcgatcggtgcgtcttcggtattgggatccgatttgaaatatggtgcaaattcggcttaggatgcatctttggctcagaaacccgcttcggcgattggtgtggattcggagcggagtgcgtattcggcgatcgttgcgctttcggtgtacagaaccgctttggtgagcgttgcatctttgccgggcggcgtgcgcttccggagaatccgctattggttttccccggagctggaacagatgaccgaattgtatatgcgatcaacgtcgagggtggcccctggatcgaaggttggagtttttcaggcggcattgacgagtttcgtgcaaaagttcgagtcaatggcggcggactcaagtcgcgatacctatcggttgcatatgaggtcgctgcgaagtggtgcccggaaaaggtggaatcgtga

SEQ ID NO: 1246 - DNA, 248 bp, unidentified
  misc_feature 1..248: note = Ga0207433_10084486 JGI
  source 1..248: mol_type = other DNA
taccataacgacgcatcaggagagtacgggactgtttgttgacggggctttttctgcgcaaaccctatgtggcgcgtcctctgattgcgaaacgaagtcgcgttggttgatcagttgcgcgaatttcagcatagcgatgtcgcaaagtcgggttagtggagcgatagaggatgcaatgggtcggcgcaggtcttggttctaggcttcggcgaaaacgccttgcaaatactcaaatcatgtcacgccca

SEQ ID NO: 1247 - DNA, 1404 bp, Cupriavidus basilensis
  source 1..1404: mol_type = other DNA
gtggcagtctttgtgttggataagagcggcaagccgctcatgccgtgcagcgagaagcgcgccagattgttgctcgtgcgccgccgcgcgcgcgtgcaccgcgtaatgccgttcacgatccgcctagtggatcgggggcaggcgaacagcgtcttgcaaccggttcgccttaaactcgatccgggcagcaagggaaccggcgtggccatcacgcgcgaggtcaaggccggcggtgacgagacggctcgggatgttgccgtcctgtctctcgcggaactgatccaccgcggcgcgcagatcagcctgagcctgaccgcacggcgggccatgcgacgtggcaggcgtggccgcaagactcggtatcgtgccgctcgtttcaataaccggcgcaagcccgtaggctggttggcgccaagcctacaacaccgtgtgcagaccacgatggcctgggtgcgccgtttccgggcgctcgcgccgattacagccgtcagcaccgaactcgtccgcttcgacatgcaggcgctgcaaaacccggagatctctggcgtcgagtatcaacaaggcgaactggccggctacgagatccgggagtacctgctagagaaatggggccggcagtgcgcgtactgcgatgcccgcgatacgccgctggaaatggagcatatcgatgcccgggcaaacggtggctccaacagggtctccaacctgacgctggcgtgcgtgccttgcaatcggaagaaggacgcgcgtccgctctctgatttcctgcgcaaggacccggagcgtctcagacgcattctggccaaggcaaagacaccgcttcgcgacgcagctgcggtcaattcgacccggtgggctttgtacaacgcgctgaagaccacggggctttcagtggagaccgggtcgggtgcacgaacgaagttcaatcgccgacgattcgatctgccaaagacgcacgcgctggacgccgcgtgcgttggggtgatcgactcagtttcgggatggcaaaagcccacgttggctatgaagtgctcgggccgcggcgcttaccagcgcacgcgactcaccgcatccggctttcctcgcggctacctcatgcgcagcaagcgcgcattcggctttcagaccggtgacatggtgcgggccgttgtgccgtctgggaagaaggctggcaggcatattgggcgggtggcgattcgcgccaccggctccttcaacattcagaccgccgaaggggtcgtccagggtgtctctcaccgctattgcaagatcatgcaacgcggcgacggatatggttattcgctcgtagcgcaatccacgaaggagagcgggcacaggggcgacgcttcgcgtcgcgcgctatccctcaccggcctgaaggccgatgtttcccgcgcgaactga

SEQ ID NO: 1248 - DNA, 290 bp, Cupriavidus basilensis
  source 1..290: mol_type = other DNA
gtcaactaccccgctctgaagggcggagcttgtaaaggcaactgaaaaggctcgggttgaccaggcaaagcggtaaccaacccgctacgttgtgaataggtgcaagaccaacgttgggatgcttcctcagtcccaacctcttgaagccccggttgcagacaagcgacagggtaagcacgaaacggatcggggcggatcgccggttcgcaacattgccgaggggagacctcccgaaagggaggcgtcactaggcccgtaagggcaactttttaggagagattgcagtggca

SEQ ID NO: 1249 - DNA, 720 bp, unidentified
  misc_feature 1..720: note = Archaeon BMS3Bbin15
  source 1..720: mol_type = other DNA
atgcagaagttattgatagagttcaagaacacaccagagaatactcctcaagttctctgctctgtaagtgaggtattaaacagagaggaaactctcaatgtgccctacaaagtactggctgataacagctccgatgaggacttacactctggcaggagtggacaggacttgcgagttcctgtcataaatatgcacaaacaacctttgatgcctacaacaccaagaaaagcaagaatatttttaaaacaaaaaaaagcaaagcaaacactaaaatcagctacatttatgaatatagtaagatggagactggtaaatactctgaagtgtgcatggacttatggctatattacaaaacatgacaggattaagatgaaattggaaaaatctcatgtaaatgatgcttttgtaattgctggtggaacaacccagagcagaagtgtaccatatatgaccacacaaaccagaaggaataataggagtattcagacaaatagaaaaggttttaaacctgctatcagacgacagagatataaattacagcctggcgatttagtaaaatatattaaatatttattcagagtaaaaggagtattcaattatggtaaatgggttagactaatatctttaactaaagcaaataagattattaatgtaaatattaagaaagtggagttggtaaaatatgggaaaggaatccaatttaaaaaagatggaaattag

SEQ ID NO: 1250 - DNA, 250 bp, unidentified
  misc_feature 1..250: note = Archaeon BMS3Bbin15
  source 1..250: mol_type = other DNA
gtcagtcacccacggctaaagcacgtcttgtcccgtgaggggcaggagcaattggttgattaggaggcattatatatgcagaagttattgatagagttcaagaacacaccagagaatactcctcaagttctctgctctgtaagtgaggtattaaacagagaggaaactctcaatgtgccctacaaagtactggctgataacagctccgatgaggacttacactctggcaggagtggacaggacttgcgag

SEQ ID NO: 1251 - DNA, 1173 bp, unidentified
  misc_feature 1..1173: note = Ga0209591_10003844 JGI
  source 1..1173: mol_type = other DNA
atgaaagttttcgtagtcaacaaagatggtcgtcccttgatgcccaccacgccccgcaaagcgcgaatcttactcgaaacagggaaagcaagaattattggtcgcgacccatttacgatccaattaatctacggcagtgctggatatgtccagccgataactctcggtattgatactggttatctcacgattggtttcagcgctgtgagtgtaaaagaagagttgattggtggagaattaagtttgcttccatctgtaagtgaacgcttaactgagcgaagaaaatatcggcttggacgccgaaatcgactacgacatcgcgcttccagattcgataaccggcgccgtccggctggctggttagctccgtcaattcaacacaaacttgatgctcatatcaaactggttgaacggattaaatctcgactacctatcagcaaggtcatcgttgagacggctagttttgatatccagaaaataaataaccctgagattgagaaagcagggtatcagactggagagcagatgggctatcacaacttaacagcatacatacgtcatcgagatggctataaatgccagaatcccgaatgcaatagtaaacccagtaccccaactcaaatccaccatttaggttactggaagtcaaaccctgaccggagtgatcgaccagcaaacctgattactctatgcgttaaatgccatacaccagtcaaccataaacaaggcaaacttctacatggttggaaggctcatgttaaaagcttcaaacccgaaactttcatgaccacaatctatcggcggttgctgaatgttttaggttcaggggaagccttcggttttgaaaccaagttcaaacgagaggaacagaaattagagaagtctcatcacaatgatgctttcgtgattgctggcgggacgaatcagtttcgctccgaaacactggtcttagagcagattcggtgtaacaaacggtcgatggagcaattctacgatgcgaaatatatcgatactcgaacaggcgagaaggtgtcaggtagtcagcttttttctggtcgtcgaactcggaatacgaacctgaatggtgagaacttgcgagtctatcgtggagtgaagatatcactcatgtcagcgtcgaatcaaacgacaacggtatcgattcaatccgaatga

SEQ ID NO: 1252 - DNA, 299 bp, unidentified
  misc_feature 1..299: note = Ga0209591_10003844 JGI
  source 1..299: mol_type = other DNA
gacaactccacacactgaacgggataccgttgcagtgtgggcttcttaagaaatcaagaagcgtgtcaatagtctcagtaattcatcaagccagaattactacgttatttcagaatatataggcactttgggatataggtttggcagccgagttctagtcccagacactgcggttaatcattaaatattcctacggcgagagggaaagtgtgattagcattaaacctggagtaacattggcgaagaacaccactcgcaagagttaagttatttgttaacttacaacttaaatcatgaaa

SEQ ID NO: 1253 - DNA, 438 bp, unidentified
  misc_feature 1..438: note = Ga0307929_1002028 JGI
  source 1..438: mol_type = other DNA
atgccgacccatccgaccaatgccaggattatgctcaagcaggaaaaggcccgggtgattcaaagaaccccatttacgctccagcttttgtatgacaccacagaccatattcaagcggtcaccgtggggattgatgacggagggatcaatatcgggattgcagctatttcccacggcaaggttctatttcaacaagaacttcttttgcgctcggatatcaagccaaaatcaaagggcggaacggacaagctgtcaaatctaatgaccttgtgtaaaaattgccatgatcaacatcactcaagtcaatctacgagaagtgatgttaatatgcagaaaccaaacaaccataagccagtagcgccaattcctcctccactgaatcagagattcagaaggggactccttggcggagagttgaatgaggtggtttggtcataa

SEQ ID NO: 1254 - DNA, 366 bp, unidentified
  misc_feature 1..366: note = Ga0307929_1002028 JGI
  source 1..366: mol_type = other DNA
gtcaactacccctcctgaatcaaagattcataaggggcttgtaaaagcccaagttggctagccgaagtcttaactgactacgttcggcaggatatagatacctttggacgtaatcgccagtccaaagccctatcgtggctctgtaaaagcgctgtgaggtagataaccacattgcgaagcctgctgaacattggcgaggcgaaccttacccctctttacgagggtgataataaccgaaaggtttttttggcatccttcatatgacatccaaagtactttacagtttttttggaaaaagtccctgcaaatggagattgccctaaaaaagtgtaaagtgtttttgaaggatgccgtttttttatgcaa

SEQ ID NO: 1255 - DNA, 1050 bp, unidentified
  misc_feature 1..1050: note = Ga0208461_1018587 JGI
  source 1..1050: mol_type = other DNA
atgttagtatacgttttaaataagcatggtaagcatttaatgccatgtaaaccttcaaaagccagaaaacttttaaagcaaggcaaagcaaaaatagtacaaagagaacctttcacaattcaacttatttatggtagtagtggatacaaacagcctattacattaggtatagatgcaggaagtaagtttattggagtgtctgctacaacagaaaagcaagagctattttcagcagaagtagaattaagaaacgatatagtgcaattattatcagaacgtaggcagtatcgtagaagtaggagatatagaaagacaagatatagaaagtcacgatttctaaatagagtgcgaagtaaaaataaaggttggttagcaccttctattgaaaacaaaatacaagtacatttgaaaatagtagaaaaagttcataagatattgcctataactaaaataattacagaagtagcttcctttgatatacaaaagattaaaaatcctaatatagaaggcgtagaatatcaacaaggtgaacagttaggattttggaatgtaagagaatatgttctttggagagataatcatacttgtcaaatttgtaaaggtaagagcaaagacaaaaggttaaatgttcatcatatagaaagtaggcaaataggtggaaatgcacctaacaacctcataactttgtgtgagacctgccacaacaaatatcacaaaggagaactgaaagttaaattaaaaagagggcaaagttttaaagatactgcatttatgggtattatgagatggacgttctataacaggttaaaaaatatctatccaaatgtagaattgactcatggatatataacaaaaaacaccagaattactcataagttgcccaaatcacacagaatagatgctttgtgtattagcggtaatccaacagcaaaacaattagattattggtattacattaagcaggtaagaaaacataataggcaaatacacaaagctaaaatactaaaaggtggtataagaaaattaaaccaagcaccttatttagtaaaa

SEQ ID NO: 1256 - DNA, 236 bp, unidentified
  misc_feature 1..236: note = Ga0208461_1018587 JGI
  source 1..236: mol_type = other DNA
gtcaactcccccaccctatagagggtggagcttgtaaaagctcaagttgactaccctaagtctttcgaggactacgttatataggtcataacacctacgggcgtttctcctaaccagtagctctgttgcttaactttaaacaatcctgtgaggtagggatagtgagttaaatgtaaaaagcctatataacattggggaaggggacattactccaaaaggaggtatactttatgtta

SEQ ID NO: 1257 - DNA, 1212 bp, Moorena sp.
  misc_feature 920..1100: note = MISC_FEATURE - Any "N" represents any nucleotide
  source 1..1212: mol_type = other DNA
atgctatggaaattttacagattgattggaaggacatctgtccgaccaatcagtctggcttaccgcaaaaaggagttatttatgagaccagtatacgtactggacatgaacggcaaaccgcttatgccaacctgccgcttcggcaaggttcggcggatgttaaaatccggcgaggtaaaggtggtggataccttgccgttcacggtccagttggacagaccaacgaagactcatgtggtgcagtcagtaacactcggctgtgaccctggtagaacaaatatcggattggctgcagtccgttccgacggaacggatttataccgatcccattgtgagacaagaaacaaggaaatcgtcgatctgatggacgctcggcgagcagcaagacgggcatcacgtcgaggagagcgactggcgagaaaacgtctggcagctaagcatgaaacggctacaacttttccggacggtcggaaactccccggatacgagaaacccatcatgctaaaggacatcatcaatacggaagcgcgattcaacaaccgtgttcgcccggcaggatggctgacacctacagcaacgcagcttcttcggacgcacctgaatctgataaaacgcatatctcgcattcttccggtatccgatattgcgttggaaatcaacaagtttgcttttatgcagttggacgaacccgacaaaaacaaatggaatatcgacttccaacatggaccgttatacggtaccggtggactgaaggctgccgttcgacagcttcagaacgatacctgtctgttgtgtcaagaaaatgtcattgagcattttcatcatcttattccgaggagcaagcgcggagacaataccatcaacaatattgctggtttatgccagaagtgccatgaagctgtacataaatccgccgatannnnnnnnnnnnnnnnnnnnnnnnnnnnnnnnnnnnnnnnnnnnnnnnnnnnnnnnnnnnnnnnnnnnnnnnnnnnnnnnnnnnnnnnnnnnnnnnnnnnnnnnnnnnnnnnnnnnnnnnnnnnnnnnnnnnnnnnnnnnnnnnnnnnnnnnnnnnnnnnnnnnnnnnnnnnnnnnnnnnnccgccgatacggcagagaagttgtcgaccttaaagaaaggtcagacaaaacgttatggcggcacggctgtgttgaaccagatcattccgaaactcgtggaagaactgggtaa

SEQ ID NO: 1258 - DNA, 219 bp, Moorena sp.
  source 1..219: mol_type = other DNA
gtcaattacccatgactaaagtcacgggcttgcaatagtctgtgatgatttcagagtaattgagcagagcagtgacacattattcgcccggacggtgttccaagcctccggcaccggttagatgtgcctatgctatggaaattttacagattgattggaaggacatctgtccgaccaatcagtctggcttaccgcaaaaaggagttatttatgagacca

SEQ ID NO: 1259 - DNA, 390 bp, unidentified
  misc_feature 1..390: note = Ga0163147_10029708 JGI
  source 1..390: mol_type = other DNA
atgcaacgtgtattggtgaccgacaaaaacaagcaaccgctcatgccctgtcatccggcatgggcgagagaagtgccccataaggggaaagcggcggtctaccgtacttttcctttcaccatcatcttgaaagaacgtgagggctaccgtcttcgtcagaagcgccatttcggttttcaaacgggcgacatggttaaagccatcgtccctgctggcaaggttgtgggaacgcatagtggtcgcgtggcttgccgtgcgacaggcagtttcgacatcagcacctctttgggaaaagcagccggcgtttcacaccgtcactgccgcgtgctacaccattcggacggttacacttataagaaaggacaaggcgctatccctccccacgcctaa

SEQ ID NO: 1260 - DNA, 479 bp, unidentified
  misc_feature 1..479: note = Ga0163147_10029708 JGI
  source 1..479: mol_type = other DNA
ataagcatccccacgcctaaaggcggggcttttagccctaatgcttacccgactcagcctcttgcgaggctacgttagcggcgaaactataggcacttcgggatgctacgccagtcccgaactctgcggtgaacgattaaagagaatgcttgggagcaaacagtgtcgttcgcgccaaaccgtcgcataactttgtctaggcgtgactacccaggtataaaaacagaataaaataaacagagaggcatgaagacgtgaagaaaaacaggaaaatacccctcgaaacgtggatgtaggggtggattaggcgcttgtcaatcgttcgttaacatgaaggttcgcgtgccgaatatccacccatttgccgccaacggtcatttcttcctttattatcgaccgtttttcagcctgagcagttacgtctgggcaactttaccccccgtaagggaagaaaagttgaggtaactcaaatgcaacgt

SEQ ID NO: 1261 - DNA, 1122 bp, unidentified
  misc_feature 1..1122: note = Ga0137385_10022959 JGI
  source 1..1122: mol_type = other DNA
atggcggtttttgtcctagaccagcgccaccagccgctgatgccttgctcagagaaacgggcacggctcttgcttggtcggcaacgggccgtcgtgcatcggagagcgccttttgttattcgcctgaaagacccgacgcgcgcacagagcacggtgcagccggtcgctttgaaacttgatccaggcagcaagacgaccgggatggccctggtacgtgtccaagagggagaggaaggcgaagtccatcagcgcggcgaactgttcggatgggagattcgctcgtatctgctggagaagtttgggcgccgttgcgtctattgtgggcggggccagatggcctttgagatcgagcatgtggttccaaagagccgaggcggatcagaccgggtgagcaacctcgtgctcagttgccatgagtgcaatgaggccaaagggaacaggaccgccgcagagttcggccacccccaggtgcaagcgcaagccagaactcccctgaaggatgcggcagcgatgaatgcggcacgctttgcgctggtggcaacgctgcggcaggtcggcctacccctcgacacctggagcggcggacgcacgcgctggaatcgggatcgctttgggatcgagaaggatcactgcctcgacgccctatgtgtgggcgagctagcaggggtcgagctccctgccttgtgcatcctgaccatccacacacaaggccggggcagccatcagcgcacgaatgtggacgctgtcggctttccgcgcggctaccgaacgaggcagaagcgcattcgaggtttttcgacgggtgatctggtgcaagctgtggtgcctgctcctctcaagacggcaggggtgcgtgtggggcgggttgcggtgcgcaaaagtggctccttccgtgtaggcaagatcgatgggatcaatgcgaagtacttggccttgatccagaaggaacgcctgcttcctctccgcgaatacattcgggggcatccgcaggcggaggtgggtcaacatgccaacactgctacaacgtatccagcacaggtggcgcgtgaggagccggcgtgtagggacgcgatttatcgagtcctcaaaggtgagcaaggagcccctggaacaggaagatga

SEQ ID NO: 1262 - DNA, 322 bp, unidentified
  misc_feature 1..322: note = Ga0137385_10022959 JGI
  source 1..322: mol_type = other DNA
gtcaacgaccccacgcgtgaacgcgggggcttggagtgtaactgcaagtccgtcgttgtccagccttagcatccaatggctcaggcagccaggtgcggatgctccgttggatgggtcagggcaccggccaatgccacctcagttggccgctctgccgttggtcgttaatagctcgttcggggtatcgagcggtgcggccagcagctcaagcccatttaccattggcgagaggggttgcctgggtcagccggcccgaggcgcgtcaccagccccgtaagggggtctcgcaagagacagcaagaaaggatcgtccaagatggcg

SEQ ID NO: 1263 - DNA, 1317 bp, unidentified
  misc_feature 1..1317: note = Ga0376681_0062128 JGI
  source 1..1317: mol_type = other DNA
atgtcgaacgtttttgtgctcgataccaacaagcagccgctcaacccggttcatccgggccgggcccgtcttttgctcaaagaaggcaaagcggcggtgtaccgcaggttcccgttcacgttgattctcaaccgagccgtcaaggagcctgacctccagctgttgcgggtcaagatcgaccctggcagcaagacgagcgggatggcgctcgtgaacgacacgacagggagggtcgtgtgggccgccgaactgacgcatcggggtgagcggattcagcgcgctctggacaagcgtcgcgcggtgagaaggagcaggaggcagcgcaagaccagataccgcaagccgcgctttcagaaccgccaccagcgcaagggcaccctgcccccgtccttagaaagtcgggtgtgcaacgtgctcacgtgggtgtgccgtctgatgcgactgtcgcccgtgcgtggcattagccaagaactcgtacggttcgatacacaggcgctagaaaacccggatatcgagggcgtcgcataccaacaagggacgctctgcggctacgaagtgcgtgaatatgtcctgctcaagtggaatcaccaatgcgcctactgtgacggacgctcagtcccattggaactggatcatgtccacccagcgagccgacacggctccaaccgcgtgaacaacctggtcgcagcgtgtacatcctgcaatcagcgtaaaagcaatcaggatgtacgcgacttcctcaagcatgagccggagcggcttgcacgcatcctggcgcatctcaaagcgccgctccgagacgcggcagcagtcaacatgacgcgctgggcgctctacgggcggctcaaagggcttggcctgccagttgaatgcggcagcggcggcaggaccaagtacaaccggacggtgcgaggactgcccaaaacccactggtgtgacgcggtgtgcgtgggggcgagcacgccaaagcgtcttgacgtgagaggcgtgaatccgcttcagatcatggcgacggggcatggctcacgacaaatgtgccgcatggacaagtacgggttccctcgtaccggccccaagcaacacaagcgcgtccagggattccagacgggcgacctcgtgcgcgctgtggtaagaagtggcccgaagcagggaacctatgtgggtaaagtggccgtgcgtactcgtggcatcttcaacatcaccacggcgcagggcgtggtcaccgacattcatcatcgtttttgtgtcctcatcgcgcgcagcgatggctatacctatcagcagcgaaaggaggcggcgtttcctccctccgcctga

SEQ ID NO: 1264 - DNA, 305 bp, unidentified
  misc_feature 1..305: note = Ga0376681_0062128 JGI
  source 1..305: mol_type = other DNA
gtcagagacccgtcccgttgaacgggacgggcttgcgtggagacatgcaggccccgctctgaccagtctcagccaccagccttcttcttcggaagaggactgacggggctccgttggaagcgaatgcataggaacgtccgggtacttcaccagcccggaccccttcgggactgcattaaacaggacgagggagtaagccggtgtgtggtccatctgaaaccgcttcacaacattgacgaggtgagcattaccctggcaacaggaggcccatctgggcagaacaaaaggaacgatggatgtcgaac

SEQ ID NO: 1265 - DNA, 1485 bp, unidentified
  misc_feature 1..1485: note = Human gut metagenome
  source 1..1485: mol_type = other DNA
atggatattgcttatgttttggacaatcaaggcaacccgcttatgccaactaaaaggcttggtcgggtgcggcaccttttacaggaggacaaggcagaaattgcttgttataaaccctttaccatccagctgaaatatgaaagcactcactttgtccaagatctatatgtaggtattgatcctggacgaaccaatattggccttgctgtagtcaacggcaaaggtgaagtgttttatgcggctaatgtcactacgcgtaaccaagaaattcctaagctgatgacagaccgtgcgcaacatcgcaaagcctctcgtagaggacagcgattagcacgtaaacgccttgctaagcgaaataatactttaactgagtttcctaatggccgtaagcttccaggatacaaggatggcaatatgccagttaaagacatcatcaacaaggaaagtcgctttaataaccgcaagcgttctgctagatggcttactccaactgcaaaccagtgtgtgcgtactcatataaatttggctaagcacatcaacaagtttatgcctattaagagctggactatggagtacaacaagttcgcttttatgcaactagatgatggctcggttctaggagctgactttcaaaatggtactctcaaaggctatgctagagttgaggattatgtcttcgatatgcaagggggatgttgtgctctttgtggtaagccaatggataaaaataactaccattgccaccatatcgaccctcaaagtaaaggaggcagcgataaggcatataaccgtattggtttatgcgactcttgtcatggacagcttcatcaaaatgaagcatggctagaagagaagggcaaacgcaaaaagtatgcaggaacgtccataattaatattgctatgccttttatatatgaaggtctagtgcagttatttggcgatgataatgtgcatatatgtagcggttttgatacagcccatcttcgcgaatacatgcatatgcctaaagaccattttgcagatgctatttgtatagcctgtattggcgctcatatcgaaccaaagtacgataacgacaagcactttgaaattcatcaattccgttgtcataaccgttcgctcatacactctcaaactgaaagaacttataggtacaaaggggaaatcgttgcaaagaaccgtacccctcgttttgagcaaaagggagactctcttagtcagtggcgcatcaaaatggccaaacaatatggagaggctaaagcccaaaggatggtgtcacagcttgaagtgacaaagtctatgcgccgatacaatagcttaaagagagctatgccagggtctatctttatataccaaggtaagagctttgtattaactggccagctatcaaaaggactatactatcgcgcttttggccaaggcaagaaaaatttccctgctaaggaatgcaaaatcttaggcagacgatcattagtttatgtgtaa

SEQ ID NO: 1266 - DNA, 255 bp, unidentified
  misc_feature 1..255: note = Human gut metagenome
  source 1..255: mol_type = other DNA
gtcaactactccatcctaaaatgagcctagctcattttcaggatggagcttgaaacttcggttttagttgagcagagacaattacgacacagaaggattaagttctcaaccaccttggggtgtttaccaagcccctcgctctgggcgtatctgtgccgagtctatggtacttttacgttatatcttgttaggcattatgtttgacaagatatggcgcattaaatttatttttatagtggatattgaatggatatt

SEQ ID NO: 1267 - DNA, 1251 bp, unidentified
  misc_feature 1..1251: note = Human gut metagenome
  source 1..1251: mol_type = other DNA
atgtgcaacacaggaaggatgtgcattggtattgatactggttcacagcatattggtgttgggattacctgtggagacagagtgattcttaaggatgaacatgcgcttcgttcgtctatggagaaacgttccctgttagcgacaagaacagtaatgcggcgtgggcgtagataccgtaaagtacggtatcgtaagccgaaatggagacatcatacgaaacgcatgtattttgaaaaagcaaaccgcagaggacagcattggagaaaagtaaaaacaaccacacagtcaccaaaactaaaaggatggctgccgccgtcactgcagtcgaagtgtgaccatcatttccgtatcattgaccggtacctgaaataccttccggatcctatcacaagaaatctggtgatcgaggccggtcggtttgatatagcccggatgaatgacccaacgatacatggagagatgtaccagcgtggaccgatgtatgatgcagaaaacctgagagcatatattttcgcaagggataactatcaatgcgcctgctgtaaggcaaaagcggggactacccgtaaggcagatgggacaacagtaaagctggttgctcatcatatcctgttccgcagccgaggggcaacagataatcccaaatacatcatcagtgtatgcgaccactgccatacaacaaaagcacatcaacccggcgggatcctgtattcctggatggaaaacaataaaaaggttgcccgtggattaagggatgctacttttatgaacatcctgagaaagcgtttatttgccagatatccacaggccgcatttacctatgggaatataacggcagctgaccgaaagcagttacgtcttccgaaaagccatgcgaatgatgcggtggctatctcgctgtttgggaaagaggcttctactgtcaagaatatctgtcagactatgcattacaaacagatacggaagtccaaacgctccctgcatgaagcaatcccaaggaaaggaaggaagaacccaaatacgaaggcagtccgtaataagaaaaatacaacacaggcgaatggatttaagttatgggatagtgtacttgctgatggaaagaagctgttcatctgtagttttactggaacaagtgcctacttaattgataaaaatggctgttatatatcacagcccggaaaaacatataaacaatggccattatcaaaactgaagcggttacatcccaatggtaactggctgatggcataa

SEQ ID NO: 1268 - DNA, 326 bp, unidentified
  misc_feature 1..326: note = Human gut metagenome
  source 1..326: mol_type = other DNA
gtcaattacccaccgcttagatctctaaagagatcttgaagcgggggcttgcaagagccatttgactagcctcagtgattttagtaagtctgtgccgggatgccggaggcagatactgccagatgaactacgttatgagtgtcatgataccgccctgtgaaccctagcagggactggtatccgggcaactgatcatggcgtgggaagccatacagacccgaaggatcaagcctcatgacattggcgaagggaccttacgcagacatgcggcagggacggtttcattccctgtattatgtaagaacagaaaggagactcttatgagt

SEQ ID NO: 1269 - DNA, 309 bp, unidentified
  misc_feature 1..309: note = Ga0400264_0001320 JGI
  source 1..309: mol_type = other DNA
atgtcggtcttggtactggatagacgcaagcaaccactgatgccgtgcaccgaaaagcgcgcgcggcttctgcttggccgtggtcgggcggtggtggtgcgtgcgtatccgtttacaatccggctgaaaaaccacctgggcaggctggattgcattctaaaacagtgcaaaaagcccttaagagacgcctctgcggttagttcaacccggtgggcgctgtatcagaccctgaagaaaatgggcctgaaggttgaagtgggtactggcggtcgcaagaccggcagtttcaacattcagacaaacagcggt

SEQ ID NO: 1270 - DNA, 295 bp, unidentified
  misc_feature 1..295: note = Ga0400264_0001320 JGI
  source 1..295: mol_type = other DNA
gtcaactaccccgccttaaatgacggagcttgcagagaacaccctacatgccgggttgaccagggaaagcggacacccacccgcaccgtttatcacaggtcgctaagacccaccgccgaatgcttcctcagttcggcgctctggaagactgggatcacgctggcgaaaggtaaagcgctgaaggttccggtcgccgcgcaagcgggagccggtgatagacattcccgaggggagagaggcttcggcctccgtcacaaggcccgtaagggcattcattgaaaggaaagtaatgtcg

SEQ ID NO: 1271 - DNA, 1332 bp, unidentified
  misc_feature 1..1332: note = TB_FS06_10DRAFT_1000002 JGI
  source 1..1332: mol_type = other DNA
atgtctcagaactacgtcttcgtggttgatgcgaagcgtcaaccactcatgccgtgcacgccagggcgtgcacgtgagttgcttaccaagcaacgtgctgcggtcttacgtcgcacaccgttcacgatcgtcttgaaagatcgagtcggtggcggtattcagccgctagatgttaaactcgatcctggctccaagacgaccggacttgccctggttatccacggcaagaacgggtcgcgagtcatctacgcgcttcatctccatcatcgaggtaacgcgattcaaaaagcactccttcagcgacgtagctatcgtagcaaccgtcgcgcgcgtcacacgcgctatcgcgctcgtcgcttccttaatcgcactcgtcgtgacggttggctcccaccatcggtgcagtcgagggtggatcacatcgtgacgtgggtgaagcgacttcagcgcttcaccccactcaatatggtcttcactgaacatgttcagttcgacctccaaagacttaaacatccagaaacacgccacgtcactccaggcacctcagacaccttcgggatggagatgcgtagttacctacgcatggcacataactacacctgtcaatactgtcatggtgcgagcggcgataaacgtctcacctgggatcatatcgtccctcgctcgcgccacggctccgacagcctcgataatgccacgcttgcatgttacacatgcaaccagtctaaatcgaatttatcgatagaggcttggatcgcgtcgctcacgacttccaacgcacaccataccgcgatccgtcagtatgcacccaaggtgcgtgcacagcgtcgcacgctacgcgatgccgccgctgtcaactcgtccaacaacgcgttgtttaaatcgctctcgacgttcgttccgatagtgcgtacaccctcctgggtgacacacatgaaccgaacgtcgttacgtgctcctaaggagcactgggttgatgccgcctgtgtcgacacgccaccctcttgccctatcgacccaacccttaagccccttaacgcccatgccgtcggtcacgtgtcgagacgcatggtgcgcaccgacagttacggcttcccctcaacacgtccgaagggttcatccacccttcgcggtgtccgtaccggtgacatcgtcacttacaccttgatgtcaggtcgtcgtcaaggtgtcacggacacgtcacgcgtgacttcactcgtacatacgacaaggtctctacgcgtgacatacggtgggatgtcgatcgacatcccgtcatcctctccgatcaccgtctgttcaagaacagacggttaccgttacactcactga

SEQ ID NO: 1272 - DNA, 299 bp, unidentified
  misc_feature 1..299: note = TB_FS06_10DRAFT_1000002 JGI
  source 1..299: mol_type = other DNA
gtcagtgagtgatctatcagtcagggtcttccctgaccctgactgatagatggatccttacggatccttgatgaccagactcagtgcacgcaaatgcactacgttcagcaggtcatgacaccggaggatgtctgatccagtcttccgctctgtcgtgtgtcattaaaagagatgagctcaacgtctcggtgtgacacacacgacaagcctgctgaaccttgtcgaggaccactttacacgcaagtgtgtgaggtaactcacagtgtttttataggaacctctttatgtctcagaactac

SEQ ID NO: 1273 - DNA, 1191 bp, unidentified
  misc_feature 1..1191: note = Ga0206350_10291578 JGI
  source 1..1191: mol_type = other DNA
atgagcaaagtttttgtagtagataccaacaaacagccattaaatcctgtcaatccaggacgagcaagagtactacttgacacagggcgtgcggcaatcttcaaaatgcatcctttcagtataatcctgaaggttgccatagaagatcccattattgcagagttgcgcatcaaacttgatccaggctcaaaaacgacaggcatagccatcatgaacgacgcaaccggagaggttgtttttgctgcagaactctcccacagaggacagcaaatcaaatcagatctagacgatcggcgtggtgtgcgtagaggcagacgaaatagacacacacgctatcgccagcctcgttggcagaatcggaaacgaccagaaggttggttgccaccatctctgcagagccgaatagccaatgtcatcacttgggtacagcggcttgcaagagtctgtcatctcacaaacattagtctagagcgtgtcaagtttgacatgcagtttctagaaaatccagagatctcaggcattgagtatcaacaaggaacactagcaggatacgaagttagggagtacttgctagagaagtggggacacaaatgcacctattgcggaaagcaagatatccaacttcagattgagcatataattccccgtgccaagggtggttcaagccggatctcgaatctctgccttgcctgcgagaagtgtaacagagccaagggaacgaaggacatcaaggacttcctcaaaaagaagccagaactgctcttaaagatcttagctcaggccaaagctccacttcaggatgctgcagcagtcaactcgacacgcaaagaattgcatctgagactagaagctctgggattaccaatcgagtgcggatctggaggactcaccaagtacaaccggactagacgtgagcttcccaaaacacactggatagatgctgcatgtgtgggcaagagtactccagagtgcatcgaaatcaggggtgttgttcccctagcaatcacggcctatgggcacggatcgagacaaatgtgcttgatgaacaaatacggcttccctcgcacagacccaaaggagaaacatcccaaacacggatttaagacgggcgatatggtgaaagctatcgtgccacatcatctcaagcgtgctggtacgcacattgggagaatgtcagctaaggcaagcgga

SEQ ID NO: 1274 - DNA, 280 bp, unidentified
  misc_feature 1..280: note = Ga0206350_10291578 JGI
  source 1..280: mol_type = other DNA
gtcagggacccgatcccctaaaggggatgggcttgcagtaatccttcggggttgctccgagcttcacctgtccagactcagctagataactagctacgttagaggcgaaattaggtaccagagggtgcgaagccagcccgatgctctacggttgcaggttaaacaggattacaagggttagtgccagtgcttgcaacgtcaaaccgctttctaacattgtcgaggctaccatcacctacgaaagtagaggctccttggagcaaacaaaaagatgagcaaa

SEQ ID NO: 1275 - DNA, 1362 bp, Janthinobacterium sp.
  source 1..1362: mol_type = other DNA
atgggtatttttgtactggataagaaaagccggccgctgatgccgtgcagcgagaagcgggcgcgcaagctgctcgattgccgccgtgcgcgggtgcacctgctgttcccgttcagtatcggcctagttgaccgtttgctggaggacggagtcctccagccgctgcgtctgtccgatgatccgggcagcgtcaccagcggcctagccgtttgccgcatcgaagaaggcgatgtcaacgacatgagcgatgccgctggcattaatgccccggtcatgcacatcctgtgtttgatggagttggtgcaccgcggcccagccatcaagaagtcgctgcacgcacgttccagcatgcgccggcgccgccgcggcaatctgcgctaccgcgcgccgcgtttcaataaccgtacccggcgcaaggtatggctggcgccatctctgcagcgccggatcgacaccaccatgtcctgggccgcgcgccggcgccgtttggcgccaatcacgcacctggcgcaagagcgggtgcacttcgatatgaggaagatggaaaatccggagatctgcggcgtaaggtatcagcagggtacgctattgggctatgagatgcgcgaatacctgttggataaatttaaccgcagctgcgccgattgcgatgcaaccggcgtgccgctgcagatggcgcacatcgacgccgaggccgatggcggctcgaatcgcgtcagcgacctgacgctggcctgcgacccatgcaacaagaatgcacgcgatatccgcgagtttcaaaagaaagacccggtgcgcctggcgaagatcctcgccaaagcgaaggcgccgctacgcgacgccgcagcggtcaatgccaccaggtggacccggttcgaggccctcaaaaagaccggccttccggcagaaactggcggcgggcacaccaactggagccgctcgcgtctgggccttccaaaaacgcgcgcccacaatgccgcctgcgtcggcattgtgggcggcataggcggcacgcgtgcgccgaccttgcgcgtcaaatgcaccggctgcggctcgcgctgcaagacgcgcctgaaccaatatggattccggcgtgccgacctaccctccggcaagggtatccacaagggccgcgtggcgctccgaatgacgggtaatttcaacatccagaccggcatcgcccacgcgctgacggttcggggcttctcacaaaagcattgcagtgtcattcagcgcgcagatggttatggctatgtctggcaaaaagcaattcaactatcaaatttaagagctccgagcgcttcgcggtcggctcctgccctccccgccgtgaacgccggggtatctcggagcaacatctga

SEQ ID NO: 1276 - DNA, 288 bp, Janthinobacterium sp.
  source 1..288: mol_type = other DNA
gtcaacgacccgccctaagggcggagcttgaaaggcgcaagcctcgatcgttcaggttgccccggaaaagtgccaagcaagcctggcacttgcaagtaggtacaggagcgacgccggtatgcacgaaacggaccgtaaccaggcagcaaaatagcgttgccatagccggattacaacattttccaagaatggcggcgccgtcctcaagggcggcacccgacatcgggcgcgtaagcccacgccggtcgcagattttgcggccggcaccaaccaaggagtcgcatgggt

SEQ ID NO: 1277 - DNA, 1659 bp, Moorena sp.
  source 1..1659: mol_type = other DNA
atgactacgtttcccgcaggcgagcagacccaccaggctgtgcttcctcagcagcctgctctggaatccgtgggagcagacacccctgggagcagggacgaaacggctcacggacaccccgccgccgcgcggggcgccggcagggaacatgggcgaggggagaccgacgggcagggcaccggagcctgtcggcgtcacgccaagcgcgctgccacggcagcgaaggcggcagagaacgggagcggtgacgctcccccacatgagcagtcgtacgacggtggcgtgggcgaaagcagagtcttcgtactctccaaggaagggcaaccgctcatgccctgccaccccgcccgcgcccgcgaactcctcggcaaaggacgggccgtcgtcgcccgacaagtgcccttcaccatccgcctcaaagaccgcacgctggccgactcggaagtcgacggcgttcagttacgcatcgaccccggctccaaaggcaccggcctcgccctcaccgacgagaagaaagaaaccagcggacaaggcaccacagtcagcatccggcgcggactggtctcagtcgaactccaacatcgcggcgaccagatccacaagtgcatgcaacagcgcgccggctaccgacaccgacgacgctccgccaactgccgctaccgagcccgcagatcgaacaaccggacccaccccgaaaggtggctaccaccctcccagcgccaccgcgtcgacaccaccttctccatggccagccgcctctgccgctacgcacccgtcaccgagatacacgtggaattcgtcgccttcgacacccacagcatgagcgcaggcagacccctcaacggcgtcgagtacgggcagggaccactcgccggaaccaacactcgcgcctacctgcaagcccaatggaacaacgcctgcgcctactgcgacgccaccggcgtccccctcaacatcgagcacctcacaccccgcagccgaggaggctcgaaccgcatctccaacctcgtcctcgcctgcgtcccctgcaaccgggccaagggcagccaacccatcgaggtcttcctcgcccacagacccgaccgcctcacgaaaatccttcagcaggtcaaggcacccctccatgacgccgccgccatgaacgcgacccgatggcagctcatcgaggcactgggcaccctcggcagaccggtgcacacctggacaggcgaaggcaccaaggaaaaccgcaatgccatggggctgaccaagacgcacaccctggacgctctgtgcgtcgggcctctcgatcacgagagcggcgacgcgatcgtacggttccccgagcaggtcctcgtcgccaaagccaccggacgcggctcctacacccgcaccaccccggaccgctacgggtttcccaggctgcggcgcgcccgaaccaagcagcacttcgggtatgtcactggagatctcgtacgtgctgtcatgcccatcggcaagtgggcagggacctggaccggccgcatctcggtgcgagccagcggacagcacagcctcacgacgccgatgggcagattcaatgtctcccactggaatctgcggcttctgcaacggggcgatggctacggctacagcacgcgatcggaatcgccacagtcaacatctcgaaaaacccgttga

SEQ ID NO: 1278 - DNA, 304 bp, Moorena sp.
  source 1..304: mol_type = other DNA
gtcagctgcacatacgagaagggaggccactcgctccccgaccacaaggtcgtcgagtgaccagccccagtcatcacgatccacaggatcagggaggtgccccgatgactacgtttcccgcaggcgagcagacccaccaggctgtgcttcctcagcagcctgctctggaatccgtgggagcagacacccctgggagcagggacgaaacggctcacggacaccccgccgccgcgcggggcgccggcagggaacatgggcgaggggagaccgacgggcagggcaccggagcctgtcggcgtcacgc

SEQ ID NO: 1279 - DNA, 348 bp, Sulfobacillus thermosulfidooxidans
  source 1..348: mol_type = other DNA
atggtttttgtgttagacaaacatcaaaaaccgctgatgccgtgttcggaaaaacgggcgaggttgttattggaacgtggtagagcgcgtattcacaagatgtatctcgcgtgtcatgcgtgcaaccaagaaaagggtccgcgaacggctgaggaattcgggtatcccgatatcccaatccaagcccgacaccccctcaaggatgcggcgatgatgaacgcgactcgctggcggttgtacgaccagctcaaggctacagaactttctgttgaggggagatcgggggcacgcacgaaaatgcaacggattcagcacaacctcccgaaagaacactattatgatgcctga

SEQ ID NO: 1280 - DNA, 268 bp, Sulfobacillus thermosulfidooxidans
  source 1..268: mol_type = other DNA
gtcaaccaccccgccctgaagggcggagcttgtccaagctccatgggttgaccagtctcagccaggaggtctgagacctcatcgggcttcgttcgttgcgtcatgacaccctggggtgcttctccagctccaggctctgtcgcccgcgattaaaagcgagcttagggtagtgcaagcggtgtggcgggctgaacaagcggaatgaacattggcgaggagagacttttttaagcgttacgagtcccgtaagggaggatattatatggtt

SEQ ID NO: 1281 - DNA, 2310 bp, unidentified
  misc_feature 1..2310: note = Ga0209615_100317 JGI
  source 1..2310: mol_type = other DNA
ttgccaccgggcaagcaaaggcccatctgtagtccaacatggtcgaggggagcggcgccgcaaggcgcccgtcacaaggcccgtaagggcatacgccgggaggcgcacagtcgtagccgcgttgactcaagcgcggttgtttgggatagcaaaaggttgagagcgatcatggtttttgttctggatcgaaatggcttggcgctaatgccgtgcagcgaaaaacgggcgcgactgctgcttgcccgtgggcgcgcgcgtgtgcatcgcgtgctgccctttgcgatccggctcgtggatcgcaagcaaagcgactgcgaattgcagccgctgcgcctcaagattgaccccggcagcaagagcaccggcatggcgttggtgcgcgaggttgagcacgttagcgcagccactggagaggttacacgagaagttgcagtgctcaacctgtttgagttggtgcatcgtggtcgccagatcagcgaggcgctgacagcgagacgccagatgcgccgtgcccgcagggggcgcaagacccgttatcgcgctgctcgctttctcaatcgcaccaagccccaaggctggcttgcgcccagcttgcagcatcgagttgacacaacgctggcatgggtcaagcgcctacagcgctgggctcccatcggtggactctctcaggagttggtgcgctttgatatgcaaaagctcgaaacccctgagattgctggggtcgaataccagcaaggcacgcttgcgggctacgaggtgcgcgagtacctgttggagaagtgggggcgcgcttgcgcttactgtggcgccaaagatgtgccactgcaaatcgagcacattcaaccccgagcgcggggcggcagcaatcgggtgagcaacctcacgctggcttgccagtgctgcaaccaagccaagggggccaaggctgctgaggatttcttgtccaaaaagccggatgcgctacggcggattctggctcaagccaagcgcccgctaaaggacgccgcagccgtcaattcgacccgctgggcgctgtttcaggcgctcaaggataccgggctgcccttgagcacgggtagcggtgggcaaacgaagttcaaccgcacgcgcctgcaagtgcccaagacgcacgcgcttgatgccgcatgcgttggacacgttgacgcgctgcgcgactggcgcaagccaacgctgaacatcaaatgcactgggcgcggcagctaccagcgcacgcgcctggacaagtatggcttcccaaggggccacttgaccagagccaagcgcattcacgggtttcaaaccggggatcgggtccaggcagtagtgggttctggcaagaaggctggcacccatgtggggcgcgtggctgtgcgctccagtggcagcttcaacatccaagccggcagcggtttggttcaaggcatctcgtatcggcactgcacgctggttcagcgcagtgatgggtacgggtatttcaatcaaccgatagcacaagacagggataaccagatgaagccttttttgaagtgggcgggcagcaaatataaaataatcgatcgcattctgaaaacacttcctaatggaagacgattgattgagccatttgcgggatcgggggcggtttttttaaacgtcgattttgaagagtatctgatcgccgatgcaaacgaagatttaataaatctttacaagcaagttcagacgaacgggaaggattttgttgcctatgcttcagccctgttcacacctgagaacaacaccgaagccgcattctatgaactacgggcagaattcaatgcatgtacggaacccgccaggaagtcggtgcttttcgtttatttgaacaggcattgctttaacgggctgtgtcggtacaactcaagagggcaattcaatgttccttttgggcggtacaccaaaccagtcttcccaaatgttgcgatgcttaacttccatgaaaagagcaagcgcgctgtttttgaggttgcagacttcaaggtcataatggaaaaggccgacatcggctcggtggtttattgcgatccgccttatgcaccattaaccgcaaccgcgagttttagcagctacgccaaagacgggttcacactgaccgaccaacaggcgttagctgattgcgccaagaaactcattgctcgcggtgttcctgtagtcattagcaatcacgatacggagtttacacggtcaatttactcggaggctaaaatcacatcttttgatgtacagcgctttatttcaagtgatgcaagcaacaggaataaagcagccgaactactcgcactctatggttaa

SEQ ID NO: 1282 - DNA, 304 bp, unidentified
  misc_feature 1..304: note = Ga0209615_100317 JGI
  source 1..304: mol_type = other DNA
gtcaatcacccctccctaaaggaaggggcttgagggagcaatcctgatggcccgaggttgaccagaccgcgaaaggagattttctctaatcaccgttggattaaagaccgcagactcacccagggatgcttcctcagtccctggctctgaaagtggcaactgcagacacgcttcgggtaagcacgaaacgggttgccaccgggcaagcaaaggcccatctgtagtccaacatggtcgaggggagcggcgccgcaaggcgcccgtcacaaggcccgtaagggcatacgccgggaggcgcacagtc

SEQ ID NO: 1283 - DNA, 459 bp, unidentified
  misc_feature 1..459: note = Ga0394881_0001061 JGI
  source 1..459: mol_type = other DNA
gtgcaactagcccaacaagctcttaaaccattggcgaagcgaacattacgagaaatcagaagagacgcaacaatgtctaattttgtctttgttcttgataccgaaaaacgaccgctgacatcctgtaccgcaggtgtggcaaggtcactcttgaaagctggaaaagcggcgatttatcgtcgttatccattcacactcattttgagcaaaacggtagcggcaagtcctaaaccgctagaactcaaattagatccaggttcaaaggtgacagggattgccatcaaacaaggcaacaaagttatctttggagccgaattgcagcaccgaggacaccagatggttctctgccgcgcatcaggcagttttgacatcgccacaaccaatggaagagtggcaggaattagccacaaatattgcaaaccaatccacaaaaaggacggttattcgtatggattctga

SEQ ID NO: 1284 - DNA, 262 bp, unidentified
  misc_feature 1..262: note = Ga0394881_0001061 JGI
  source 1..262: mol_type = other DNA
gtaaactgcccggttctatgcctgacggcaggctagcgccaaccagcgggatacaagccacaacatgaccagcctcagtctttcgaggactacgttttttgagtcatgacacccaagagtgcgtcgctagttcttggctctgtcgctagttgttaaacatctgtagtgggttaaggaagtgcaactagcccaacaagctcttaaaccattggcgaagcgaacattacgagaaatcagaagagacgcaacaatgtctaatttt

SEQ ID NO: 1285 - DNA, 1668 bp, Desulfovibrio sp.
  source 1..1668: mol_type = other DNA
atgcttcctcagtcccggacaatcgaagcccggatggcagacacggcgggtcggccacgaaacgcgtccgggcagacagcggctagaacatgcgggaggcataacgccgatcaccgcatagcccaacatgcccgaggggagcgttccggaaaagccagcccggagccgtcacgggagaaggcgcaagccgactcccagcagggaagcgtaagctcccaaatcaccaactatcccaagcaccgcgaagccgccgtgctcgtcctcgacaggcacggcaagcctttgatgcccacccatccggccagggccaggaagctcatgaaagtcgggagggcgcgcattcacaaacagtatccgttcaccatcaggctgatcgaccgtatccttgaagagtccgccgtccagccgatccgcctcaagatagatcccggctcgaagaccaccgggatgtgtctagtccgcgaggaagtcaaaacggacggcactaccatcgtccaccatgtattattccatctcgaactcactcaccgcggccagaagatccgcaaatccatactccagcggaaaggctatcgccgccgtcggcggtcagtgaacctgcgctaccgggggcctacgttcgacaatcgcaccaagccggaaggttggctgccgccgtcgctgcgttcccttgtcgacaacgtcatgtcctggaaagggcggctgtccgggttggctcctgtgtccgccgcgactgtcgagcgggtccgcttcgacactcaggccatgcagaacccggagatctccgggatcgagtaccagcagggcgagttggccggatacgagatccgcgaatatttgctcgaaaagtggggccgcaagtgcgcgtactgcggggcagtgcatttgcctttgcaagtcgagcatatccaccctaaggccaagggcggctcgaaccgcgtgtcgaacctgactctggcctgccaaccgtgcaacgaagcgaagggatcgatgcccgttggggagttcctggccgaccgcccggacgtgctggagcgtgtgctggcccaggccaagaccccgcttgcgcgacgacgcggcggtgaacgccacgcgcaacgccatcttcttcgcgctgcgggagaccggattgccagtggagtccgccactggcggcaggaccaaatacaaccgctctcggcttggcatccccaaggcgcactgtctggacgcggcctgcgccggacaagtcgaccaggtgatcggctgggacatgcctgtgctgtcgatcaaagcaactggacggggcgcatatcaacgcaccaatgtttacgccaatggcttcccacgcggctatctgacacgggagaagatggcgcggggcttccgcaccggggacatggtagttgccgatgttccgaacggcaagaaaatgggccgccatatcgggcgtgtagcggtgcgggccagtgggtcgttcaacatccagaccaagcacgctgtcgtccagggcatcaacgccaggcattgccgcctgctgtcgcgggccgacggctacggttacgcccggcatgcctcgcccatcctccaggaggccgcatgacaacgctggccaaatattcccgcggactcgccgtccgcattcctccccgccgtgaacgacggggcctcctgcggaggtttggttga

SEQ ID NO: 1286 - DNA, 289 bp, Desulfovibrio sp.
  source 1..289: mol_type = other DNA
gtcaatgatccctcccttcagggaggggcttgctgagggagaccttggcaggcccgtgttgaccagggcaagttgtttgagtttggcaaacgttagaggacaactacgttgaaattggcgctaaacaccgactccgggatgcttcctcagtcccggacaatcgaagcccggatggcagacacggcgggtcggccacgaaacgcgtccgggcagacagcggctagaacatgcgggaggcataacgccgatcaccgcatagcccaacatgcccgaggggagcgttccggaa

SEQ ID NO: 1287 - DNA, 1098 bp, unidentified
  misc_feature 1..1098: note = Ga0394874_0001047 JGI
  source 1..1098: mol_type = other DNA
atgttacgagtaccagttttatcaccatcaggcaaaccattaatgccaacgaaagctagtcgtgctagacgttggttgaaagagggaaaagcacgggttgtgtacaacgaccttggtatttttcaaatccaactacttagatgccccagaactcagaacacgcaacctattgcagttgggattgaccccggtaaacattacacgggcgttggcgtgcagtctgccaaatttactttgtggttggctcatttacaactgccattcaagacggtgcgggaacggatggagcaacgtgccatgatgcggagagggcgtagaggcagacgaattaaccgcaagctaccttacaatcaacgcgctcatcgtcaaaaacgatttgacaatcgtagaagtaaaaagttgcctcccagcattcgagccaaccgcgaattagagttgcgagtagtagacgaattatcgctgatttacccaatcactacaatcgcctacgaaatcattaaagcgcgtggtgataaaggatttagtcctgtgatggttggtcagaaatggcagttcgagaacttagaaatttattgccaagtgcagcaagttgaaggctggcagaccgcaaacatcagacagcaattaggattgcacaaacaaaaacattctaagggtgatgcaattcctgctactcatgctgcagatggtgttgctttaggtgcaagcgcgtttattcgatatggcatcacttctacccattcaatgggttggaaagggagcgtaactataactcctgcaccctttaccgtaattcgccgtcccccggtatcgcgtcgtcaactccacctcatggttccaactaaaggtggaacgaggagaaaatatggcggaactgtgacgcggcatggattcaggaagggtgatttggtcaaaacacctaacggtgaaattgggtattgcagtggtgataccgaaaaagctttgtcagtcagtgacgctgactggcgtagattggggcggtttagccctaaaaaatctcagttggtacagcgaaacacgggattaatcgtgttgccaactaagagattgtctaatctactggcatcgagccagtag

SEQ ID NO: 1288 - DNA, 222 bp, unidentified
  misc_feature 1..222: note = Ga0394874_0001047 JGI
  source 1..222: mol_type = other DNA
gtcaataaccccgccctgaagagggacggggcttgtaagaaccaaatcttacgtgtttgactagcccgttgagtctaatcctggcacgcacttctgaatacttccccagttcggacacattgcaaggctgtttggtcagtcgttggttaaagccaagtcatcttggattaggtgggcgaggggacttaatactttactcggaggtttatcaccatgttacga

SEQ ID NO: 1289 - DNA, 816 bp, unidentified
  misc_feature 1..816: note = Ga0376669_0038378 JGI
  source 1..816: mol_type = other DNA
atgccatgtacacccgccaaagcacgccacttgttcaaaagtggtaaagcaaaaccaaagcgtaacaaacttggattgttctctgtgcagctctgctacgaacaggagcccgacaaccagcccttagttgccggtgtcgatccaggctcaaagtttgaagggtatagtgtcgttggctctcaagacaccgtgctcaatctgatggtggaagcgcctgatcatgtcaaagacgctgttaagacccgtaggactatgcgacgggctagacggcatcgcaaatggagaagacccaagcggtttgacaatcgcctcaaccgcaagaagaggatcccaccatcgacccgaagtcggtgggaagcaaaagcacgcgtgattgctcaactcaaaaagatcatgccactgactgatgtggtggtagaagatgtttgtgcagaaacacgcaaagggaatggtggaaagtggaacggctcgtttagtccgatacaagtgggcaaagagcatctctatcgccttctcgtcgagatgggattacatgttcacttgaaaggaggatatcaaacaaaagagttgcgagaaaagtacaagctcaagaagacgaagagcaaatcgaagcagtcctttgactcacatgccattgacgcttgggttatggcagcatcagtgagtggtgctcctcaaccgacttgcacacgactctcctacatcgttggtgctcagctccacaggcgtcagatccatcgtttgcaagcctcaaagggtggcgagagaaagccctgtcagggacccgatcccctaaaggggatgggcttgcagtga

SEQ ID NO: 1290 - DNA, 252 bp, unidentified
  misc_feature 1..252: note = Ga0376669_0038378 JGI
  source 1..252: mol_type = other DNA
gtcaggaacctcatggctaaagccaggggcttgagaaacggctagctcaacgtaagttcctgtctagcgggctctcttttcggagggagcagtagcgtatccggctaaggaaagcatgtccgagcgccaccctaactcggaccactgcctgccacgccgaagcagacgaccggaggggtctatgccggataggccatcgcgaagggtcatcttaaccctagcagtgactaggagaagggaaatcccttgaga

SEQ ID NO: 1291 - DNA, 969 bp, unidentified
  misc_feature 1..969: note = Ga0334819_000080 JGI
  source 1..969: mol_type = other DNA
atgcccaccaccaattggcgggcgaacgagctaatccgtaagggcaacgcgttacgacgtttcagcaagggcgtcttctacatccgcctgacgcaacggtctgacggggtcatacaggaagttgcgtgcgggatagaccccggctcgaagaaggaagcgttcacggtaaagtcggatgcccacactttcatcaatattcaggcggacgctgtgacttgggtcaagaaagcggtggaaacccgcaggttgctgagaaggtcaaggcgcagccggaatacaccttgccgtcagaaccggtccaaccggacaatcggcggaattccgccgagtaccagggctcgattcgggtggaaggtgaggattagcacctggctctctaagctctatccgatttcccgctttgtggtcgaggacattaaggcgacgacccacaagggacgccgttggaataagagttttagcccactcgaagttggcaagaagtggttcaaggtagagcttgagaagctcgctccgatcacactcaagcaagggtgggagacattccagatgcggaacgcagcggggttgaaaaagacgaaggcgaagatgtcggagaggtttgacgcccactgtgtggacagttggatcttggcgaacagttgggtcggcgggaacatcaagcctgacaacgaaaagatgtggctggtaacgccgcttcaattcagccgtagacagcttcatgttcagaatcccgccgcaggcggtatccgaaagccctacggcggaacgcggagcctgggcttcaagcggggaagctgggtacagcatcctaagtttgggacgtgctttgttggcgggtcgtcaaaaggcagagtcagcctgcacagcctttcgaccggaaaacgcttaacccagagtgccaaatctcaagatatggaatttctgcattatgcaagctggagggcgtccaattcctccgctggctaa

SEQ ID NO: 1292 - DNA, 205 bp, unidentified
  misc_feature 1..205: note = Ga0334819_000080 JGI
  source 1..205: mol_type = other DNA
gtcaatgaccgtcgcctaaaggcgacggcttgtgcccaaggccaagccaaggttgaaagcacaacgtaagcggagactagggatgtagtaactgagcttcctgggcgtggcagcccgaaagcacaccgagaatgctccccaagttttcggtccctgcggaagccagtcccgaagggggaaattgagaaagagagaggtaactctt

SEQ ID NO: 1293 - DNA, 1419 bp, unidentified
  misc_feature 1..1419: note = Ga0172381_10002433 JGI
  source 1..1419: mol_type = other DNA
atgaaaaaagtattcgtacttaacaaaaacggagaaccgcttatgccaaccgaaaaatacggtaaagttaggcgattaattaaagatggtaaagctgaaattttttcgcatgaaccatttactattaaattactatatgatacaccagaattcatacaaccaattacacttggtattgataccggttattcattcattggaatttcagctttaacaattaaagaagaattgtttggttgtgaattggaacttcgtaatgatatcaaatcattgatatctgataaacaacgatgtcgtagcttacgaaggagtagacttagatatcgtgcaaagcgattcgattttagaactagaaaagataattggttaccaccatcaactcaacacaaatttgatactcatatcaaacagattgataaactaattactagattgccaataactaaaattatattagaaacggctaattttgatattcagaaaattaataacccattaattactagtgttgaatatcaacaaggtgaacaattaggatattggaatattagagaatatattctccatagagatgaccataaatgtcaaaatccagattgtaaacataaagacgataaaaactataaaccggtattaaacgtacatcatattatatatagacgtaatggtggttcagataaaccaagtaatttaataacactttgtgaaaaatgtcatacagctaaaaaccatgaaaaaggattcttagtagattggcaaaaaaacggttttaaagttaaaggttttaaagattctacatttatgaatattattaaaactagaattcttaatcaattacgagaattatatcccaatatagaaattactaatacacacggttatattactaaagctaatagaattcataataaaattgagaaatctcaccataacgatgcttttattatagctggtggtactgacaaagataaaatatctgaaactattaatcttaagtgtgaacgtagaaacaatagagcattacaaacatttagagatgctaaatatattgattcaagagatggtgaaataaaaaccggatatgtattaaattctggtagaacaaaacgaaataaatcgactaatggtgaaaatttgagacaatatagaacaccaatattaaatccagatggaaccagaaaacaagttaccaaaggtaataatagtattagaaaaactcgttataatttctcgaaaggtgctaaaattaaaataactgaaaattggtctggtaaacatttaagtgttaataaaaaccaaattcttattagtggtggcacagctaaccaaggtacatatatctatataggcaaaaatcttataccagcaaaagtatgtaaagaaataactaatagaaaaggtataatagaaaaattataa

SEQ ID NO: 1294 - DNA, 262 bp, unidentified
  misc_feature 1..262: note = Ga0172381_10002433 JGI
  source 1..262: mol_type = other DNA
attaaaaacataccttatttttaaaattgagaatgaagttctcgatgattacaattatgactcagggaaacctacgttatttaagtcatcacacctacggtgctccactagcctgtagcaatgtgttacccgactaaacatctctaaccctatacggagaagtggaaggtaaattacaagcttttataacattgtcaaagtggaccacagggtttcgaccctgatttatttattaatttaaattaaaaacaaaatgaaaaaa

SEQ ID NO: 1295 - DNA, 693 bp, unidentified
  misc_feature 1..693: note = Archaeon IPdc08 DNA, NODE_102_48, whole genome shotgun sequence;GENOME_ACESSION: GCA_006538205.1_ASM653820v1_genomic
  source 1..693: mol_type = other DNA
atgcagaagttattggtagagttaaagaacacatcaggagatgctcctcaagttccctgctctgtaagtgaggtattaaacagagataaaagtctcagtgtgccttacaaagtactggccaataacagctccgatgaggacaaacactctggcaagagtaggcaggacttgagagttcctgtgttaaatatgcatggaaaacctttaatgcccatgagacctagaaaggcaagagttttccagaaacaagaaaaggcagcagtagttcagcgaagtccttttaccatacagttaagacacccttcaggcgaaacaaaacaagctttaaaattgggtatagatgctggatattcaacaataggctttagtgttataagtgacaagagtgaattactctacagtgagttaaccttgagaaaaagaatttctaaactcattgagcagaaaagaaattacagaaaaacacgaagaagtagattatggtatagaaaaaggcataagccctctgtaagaagaaagaggtataggttacaacccaatgatttagtgaaatatattaagtctctatgtaaagtgaaaggtgtccctaattatggggaatatgtaacattggtgaataaaatagggaaaatatgtggtattaatgttagaaaaatagagatggtcaaatatggtaaaggaatacaattctaa

SEQ ID NO: 1296 - DNA, 253 bp, unidentified
  misc_feature 1..253: note = Archaeon IPdc08 DNA, NODE_102_48, whole genome shotgun sequence;GENOME_ACESSION: GCA_006538205.1_ASM653820v1_genomic
  source 1..253: mol_type = other DNA
gtcaatcaccacccattaaaatgggtggcctgcctcgtgagagaccagggtaacaggttgattaggaggcattgaagaatgcagaagttattggtagagttaaagaacacatcaggagatgctcctcaagttccctgctctgtaagtgaggtattaaacagagataaaagtctcagtgtgccttacaaagtactggccaataacagctccgatgaggacaaacactctggcaagagtaggcaggacttgagag

SEQ ID NO: 1297 - DNA, 819 bp, unidentified
  misc_feature 1..819: note = Ga0376652_0002900 JGI
  source 1..819: mol_type = other DNA
atgagcaacgtctttgttttagataccgatctcagacaactcaatccagttcatcccggggaagccagaatattgctctcatcaggaaaagcagcagtttacaggcgttacccctttaccattgtgctcaaaaaggctgtagagacacccattgagcctttacgcatcaagatcgatccagggagtaagaccaccggcatagccatcatcaacgatcagactggtgaagtcgtcacggcttttgagctttctcaccgtggggaaacaatcaaagcacgcctggacaaacggcgtacggtgcgaggaagcagacgcaaccgccataccagatatcgcaaaccaaggtggcagaaggtaactggtgtctacccgctgctcatcacggccaatgggcacggtcgcagaagaatgtgttctgtcgacgagtatggcttcacgtatggcaatcccaagcaatctggacgcaagtacggcttcaaaacgggcgatatcgtccgtgccgttgtgacagagggcaagcctattgggacctatgtgggacgtctcactgcacgagcgactggatcattcaatatcacaaccaaaaaggggacaacgcaaggaattggataccagtattgccgtgctcttcatcgctcggatggctacagttaccagaaaggagctgccattgttcttgcccaatcagaatcagaggcggtttctgcttcctcccaaccatccgttcagatagaagagtgccccggtgtaagagccccaagaaaggaaggcctctttcctccccttagcggcgccgcaaggagtatccagaggccataa

SEQ ID NO: 1298 - DNA, 272 bp, unidentified
  misc_feature 1..272: note = Ga0376652_0002900 JGI
  source 1..272: mol_type = other DNA
gtcagggaccctatggcttttgccaagggcttacaggaatccgaaaggattcttgtggcttcacctgaccagactcagcgcggaggcccgtcctccgaagctacgttaggagcgaaataggtacgttgggatgcgtgggccagtccccaccgctacggtgaagggttaaacaggattacaagggttagtgccagtgctcttcacgttaaaccgctctataaccttgtcgaggcccccattacctacgaaagtagaggctcacgatgagcaac

SEQ ID NO: 1299 - DNA, 1338 bp, unidentified
  misc_feature 1..1338: note = MLSBCLC_10010460 JGI
  source 1..1338: mol_type = other DNA
atggcagtatttgtattaggtaaagatggcaaaccattgatgccttgcaatgagaaaagagcacgattgttgttagcaaaaaatcgtgcagttgtaaaacgcgttaaaccgtttgtaattcaactaaaagacagggatcagaccaactgtgaattacaagacctagaagtcaagattgacccaggtagtaaatttacaggaatctgtctttctagaacagagaatagagtagtcaacgttttaaatctatttgaattagaacacagaggacgactaatttctcgcaagctaaaagccagagcagcaatgcgtagaaatagacgtaatagaaacacacgctatcgcaaagctagatttctaaatcgtgctaaacctaaaggttggttagcgccttctctgatgcaccgtgttgaaactacgatgagttggattaaccgacttattcggtggtcacctgttgaatctttagctttagagcgtgttaagtttgatatgcagaaaatgcaaaatgctgatattcagggaacagaatatcaacaagggacattgttcgagaaagaggtaatggaataccttttagaaaaatggaaccataaatgcatgtattgcggtattgaggatgtttcatttgaaaaagaacatcttatccctcgcagtagaggcggtagtaaccgcatatctaatttaggtttatcttgcaggaaatgtaatcaggctaaaagcaatttaactttgaaagaattcttggttaacaaacctgaattactaaagaaaataaaagctggtttaaagcgacctttaaaagatgctgctgctgtaaatgcgactaggaataagcttttggttgaaatgttgaaaaccggtttatctgtagaaaccggaactggtgctcagacaaaatacaatagaaaattgtattccatacctaagacacacgcgctagacgcggcatgcgtaggtgatatttgtggtgttaagaattggactgttccacacttaggaataaaatgtaccggtagaggaagctacgcaagaacaatattagacaaatatggttttcctaaagcatactttccaaaagaaaaacgagtatttggttttcaaacaggagatgttgtaaaagctataatcaaaactaaaaatacgtttaaaatagtcattggaaaaattgttataagaacttctggttatttttccttagtaaaagaaaaagaaagttttaccgtaaaatggtctaaatgtaaacttgcccaaagagcagacgggtaccattactataataaacaatacggtttctatagtgttggtaataatattttaacaactggacaattatga

SEQ ID NO: 1300 - DNA, 243 bp, unidentified
  misc_feature 1..243: note = MLSBCLC_10010460 JGI
  source 1..243: mol_type = other DNA
gtcaactacccctccctaaaggaaggagctttgctctaagttgaccagcctcagtctttaactagactacgttatctgagaatatataggtactccgggatgctcactcagtcccggactctacgcttgcatattaaacaatcctgagggtaagggatagtgtatgtgagatacaaaacctcagaataaccttggcgagggtgtttttacaagtcgcgtaagcgaaaggacaaaatcatggca

SEQ ID NO: 1301 - DNA, 1044 bp, unidentified
  misc_feature 1..1044: note = Ga0335055_0000121 JGI
  source 1..1044: mol_type = other DNA
atggtagcagtattagatgaaaacaagaaacctttaatgccttgttcagaaaaaagagcaagaaaattattggaaaaaggagaagcaaaaccttattggtttaaaggagacttttgtattattttacagagaaaacctaaatcagattacaaacaagatatttgtataggtattgacccaggtagtaaaatgtcagccttaacgattaagtcagaagctcagacaattaaaaacgttcaatattctgccccaaatttcgtaaagaaaaaggtagaaataaggtcagcttcaagaggtggtagaagaaagagaaacacaccttatagaaaatgtagatttaacagaaagggtaataaaagaataccaccctcaacaaaatcaagatggttgcaacatttaaacttaattaagcatttttctaaaatttatcctatcaatcttgtagcttttgaagacgtaaaagctaaaaaaattaaaggagctaaaagatggaataaaaactttagtcctttagaagtaggtaaaaattggttttacgatgaagttgaaaaaagttatgcactttacttatatcgaggatttgaaacttacacttttagaaacagtttaggtttacacaaaggtaaagataaaatgaaagttgcttttgaaagtcattgtgtagacagttgggttttagctaatcaagtagttggaggacatatagaaccagataataaaaaattaacatttttaaaacctttaaacttttacagaagacagctacatgaacattgtcctgctaaaaaaggaattaggagaaattatggaggtactttatccttaggaataaaaagaggtactttagtaaagcacaataagtggggtttttgtttagttggaggaacaagtaaaggtagaattagtttacattgcttacaaactaataaaagattgacacaattagcaaaaaaagaagatttaaaaataataactaatttaaaatggaacagctcaattcccacttttatagaagaaaagagtaactttgagcagaaattatga

SEQ ID NO: 1302 - DNA, 241 bp, unidentified
  misc_feature 1..241: note = Ga0335055_0000121 JGI
  source 1..241: mol_type = other DNA
gccaactacccacttctgaagagagtgggattgaaggaaaaccttaacgaggactaactttaagttaaacaggagaatagcttagacaagttcagaaatggacgtttgaagtcaactaaggagtgtagtgcatcgaaaggcacgagttatgttacaagatgcttcccaagtcagtaaccaataactatccgagtagcgaagggaaattaaaacaaggtgcctacgcacattaaacagttaa

SEQ ID NO: 1303 - DNA, 1404 bp, unidentified
  misc_feature 1..1404: note = Ga0265338_10013913 JGI
  source 1..1404: mol_type = other DNA
atgtccaaggtgctggtggtggatacaaacaggcagccgcttgatcccgtgcatccagggcgggcgcgccagttgctcacccagggcaaagcggcggtgctgcgcgctgtgccctttacgttgatcttgaaaactgcctgcccggaggcgcaaccccaaccactgcgtctcaaactggacccagggagcaaaacgaccgggctggtgctgctgaatgacgcgaccggtgaggtggtcttcgccgcggaactccagcatcggagtcaggcaatcaaatcggcgctggttgagcggcgcgcgtctcgacggttccggcgtcagcgtcagacgcggtatcggcagccacgctggcgcaatcggcgccgggcagcgggctggttgtctccctctcgtgagagccggctggccaatatccagacctgggtccggcgtttgcggcaattcgccccggttgccgcgcttgcgttggaactgctgcaattcgatccctctcgcatagaacaggccgtgtgcagtggcgaggagtaccagccagggacgctggcaggttctgagatccgtgcgtatctgctggaaaagtggcagcatacctgtgcgttctgcggcgtgcggcatctcccgctccggatcacccctattcagctctccgccagtagtgggacaacccaggtagagaatctcaccctggtctgtggcgcgtgccagggagccagaggcacgcaggatctgcctgtttttctggcgaccaggccagatctgctcaagcgactccttgccgttgccagggttccgtgcaaagatattccagcagtcaatgtcatgcgcagggtgttgtatgagcgtctccaatcctctggtttgcctctcgaatgtggcagcggaggacgcaccgcgtggaatagcaccacgcgccagcttcccaaaacgccctggcttgacgcggccaatgttggcgcaagtaccccggctgtgttgctgttcaagcaggttcgggtgctccagatcaaagcgacggggcatgggagccgtcagatgtgcagtcagttagcgtatgggtttcccgtcgggcaccacctgccacgcgagcaagggaagccagtgcgagggcaccgccagcgccagaagcgctactttggatttcaaaccggggatatggtccgcatcgttattccagtcggtcggagtaaatacgcaggcacctatgtgacgcgcatcacggtccgggcgaatggcaactttaagtttcggctggcaggaggtcagtatgttgcgtgcaaatatgggtattgccagatgatccagcgcagcgatggctatcagtatacttccagaacagagagcctgtcgaattcagggatgccagtggtgctgatagagtcgctctgtcagcaccagagcagatag

SEQ ID NO: 1304 - DNA, 285 bp, unidentified
  misc_feature 1..285: note = Ga0265338_10013913 JGI
  source 1..285: mol_type = other DNA
gttgtgcacctgccgacaggcggtgggaccaggcgtctcaccgtctgccaacaggtgaagttcatgaaaccagaccaggttctgcggaactccgttagaaacgaatagataggtacctacaggtgcgaggccagccggtagcactacggtggatgattaaacaggtgaaacggcacgacgaagccagtgtcatccacaacaaaccgtttctaaccttgtcgaggccaccattacccgcgcaagcggaggcttcttcggaagcagaaggtataatccatgtccaag

SEQ ID NO: 1305 - DNA, 1329 bp, unidentified
  misc_feature 1..1329: note = Ga0063011_10003046 JGI
  source 1..1329: mol_type = other DNA
atgatcaggaaattgtttaaacgaaagcaggtaaggattacaggtggtggaccatcaggaaaacctgtagtggtaatttttctatacaaggagtttgaccctgacaggacagtcaatcgcaggtttatcactgttgttgaccctggctataacaggatagggtttgcagtatgtgagattaaggataacagactggtagttttctgtaaaggtgatatggagacatttatatctgacataaagaaaaggatgacagaaagaagggcctatcggagactaagaagatatatcagtcgctataaaaagagaaggctatcagtaagacagggcagaccacttacaaagttcaagaaaccaaggaacgtaaagtcaacacacaggatttcagctacactcagacatgcagtagatattcacctgaacatgtatgcactgcttcaaaagctatgtcctttgcctgtatatcagactgaaagggtcatagaagataatacatttgacataagggcaatgacatggggatctgcatatggtagagagtatcaaaaaatccccaggcagactaatacagaaaaaagatgccttatctgtggtgaaaccagcgatttacagaggcaccacttaatcccgaggaaacagaacggcacggatgtaagggaaaaccttatctatctatgtcgcaactgtcatgaagacattcatgctggcagggtatatctgcctgttaagggggtaaccatgtggagagcattaggaacaatgaatgcagtagcaggcatactgaatcaggttagcggactccgacatgttcctgcctctgacatggccttagcaagaaaaacactggggatagagaaattgcatggtaacgatgcagcagcagcaggcgtggcatacagtcactgccatgaggtagttgacactggcagttatctatccttgaagaagacccgcaggcataacagggcaagggtgcatgcagtcagggacagactttataagataggtggcagggtagtagctaaaaatagaagaaaaaggacagaccagaaggagaagtcatttgcagagctatcgctggatgaaagaaagagagtaacagtctatcctggggtaaagatactgaacccattaagggagaatatgcctgcaatagctggagacatctgggtacacaaacaaactggtaaaagatttgtagcaaacggcgttattgcaaggaactatatctactcgcctgacctgaaaggaataacagggaacccctacattagccctgatcagtgcaggagattgttgagaaacgaggggatagtaatatatgggtaa

SEQ ID NO: 1306 - DNA, 276 bp, unidentified
  misc_feature 1..276: note = Ga0063011_10003046 JGI
  source 1..276: mol_type = other DNA
gtcaaccaccccgccctgacgggcaggggcttgcattagggggtgaacctggtgcaggtattccgggctaaccggatagtggttgaacgagggctgtgctgatgcagaaactggcgtttcagggttacactccaggctctgagagacagaggtgcactcctcttgcaggagtaacccctcaacctcacacagggtgcatcagcatcccccatggagacgaaccatcctcatggatgcccggatcacagggcaccgtaaggtggtagaaaggagcag

SEQ ID NO: 1307 - DNA, 1449 bp, unidentified
  misc_feature 1..1449: note = Human gut metagenome
  source 1..1449: mol_type = other DNA
ttggcgatgtggaccacggggatgtcatccaaaataaaccgaaaaaccggtttttataggatttcagaaccgatttattcattcaatatgaattataacagaaagaagagaacacttatgacgatttttgtattaagtaaagacgggaagcgactaatgcctaccataagacccggtaaagtccgtcacctgttaaaagatggaaaagctaaaattataagtcaccagccattcacgatacagcttttatatgatacgaccggctatacacagccgattgaattctgtgaagatactggtgaccgctatattggaattagtatcaaaagtgagaagcaggaatatgtcagtcaggaagtgttgccacttgccgacgaaaaacagaaacatgacgcacagaggaaaaatcgccgcaaccggagaggacgcaggcgttaccgaaaaaacaggtttgataatcgccaaagagaagagggttggattgctccatccatagagcataaaaaggaagtcaacttagcatggtatcgaaaatatttaaacgtatgcccgatcactaatgcaacctttgaaactgggcagtttgacacccagaaacttcaggctatcgaaggtggcagtattcttccagaaggaaaagactaccagcaggggccacgttataatacggcaacgctccgcgaagtcgtgttcgtgcgtgatcactatacctgcgtattctgtggacgttccgtaaaagacaaagcagttcttcatgtacatcatgcattttactggaaaggcaggcatggcagtcaggtaaacgagctggcaacggcctgtgaaaggtgccatacaccggcaaaccatgcaaaagacggactattgtggggttataccccgggaacattcgttgcaatgggcggagctgctacaatgaatatcctccgccaccggatcgtgaaggaagcgaaagcgctggatgagcatgtacaggtatccgttacctacggagcagataccaaagcaatgagacagttcatgggtcttgaaaagagtcatgtgaatgatgcctatgttatgggaaatctacatccggaagaacgtgcagtttatatacgatacaagaaaaaacgacgtaacaaccgtatcctggaagatttctatgatgccagctatgtagattcgcgtgacggcagtatcaaaaacggcaaggaactttataatggccgtaccaaacgtaacaaaaacaggaacactgagaacctgcataaataccgtagacggaaggttacaaacggtcgtcgcgcaatgaagcgcaaaacagtttcattaagacctggagacatcgtatccctgaatggggaaactcttgttgttcacggcacacacaccagtaagaagggtgctgtaaatgtacagttcacaaagcctgccagaaacggacgaaaatctgccgatctgaagaag

SEQ ID NO: 1308 - DNA, 362 bp, unidentified
  misc_feature 1..362: note = Human gut metagenome
  source 1..362: mol_type = other DNA
gtcaataaccccgtctgatttccttcgggaaatcagacgaggcttgtgaaaagaagagaatagtaacattcttcattgtttcataggcctgattgattagcctaagcagcaatgctacgttatccaggaatatactgtaggcaccgtcagatgctccacaagtgcgacgctctgcggcttatgattaaacatctctgagggtaggagaagtgttgtaagctttaaaccctggagtaacattggcgatgtggaccacggggatgtcatccaaaataaaccgaaaaaccggtttttataggatttcagaaccgatttattcattcaatatgaattataacagaaagaagagaacacttatgacg

SEQ ID NO: 1309 - DNA, 1125 bp, unidentified
  misc_feature 1..1125: note = Ga0315284_10064466 JGI
  source 1..1125: mol_type = other DNA
atgatgccttgctctccggcaagagctaggaagttactgcatctgaaaaaggctaaagtagttaaaaaatgtccctttacgattcagttatcctatggatcttcaggctataagcaagaaatggtcggatctatcgtgcctagctcttccactataggaatagccgcaaagtcaaatgagaagtgcctatattcttcagaaatagtagtaaggcaagacatttctaaaaagatggatggaaggaaaacatatagaaacaggcgtagaaatagaaagaccagatatcgaaaagccagatttttaaatagaaaatcagaccgaaggcatactcctacggttaatagcaaaatagaatcccatattagggagattaatagagttcaaaaacttttgcctgtttctaaatggttggttgtaaaggcatccaaagtagaagggcattttaaaaatggttctctcgatgaacagtggttaaaccttcaaagacaaacttttgagagagatggtttcaaatgtagacattgtaaaaaaagaggaaaagagcttcatgcccaccacattatacaccgacaagacggtggtgaagattctatagacaacttagttactttagataaagattgtcatgtcaagtatcatcaaggtaaattggaattgaaaataggagaacataaattcagggggaaaatagatactgagttagctatactgagaaaaaatttagatttggcgaatagtgaaaatgtatatggatttcaagccaaagttaaaagaaaactattagggttggaatactctccgagtaatgatgcttgcgctattttggaagtcacgcctcaaaacacttttttagttaaaaatgtccctaaaggagattaccaaaggactagaggggtgagaagtcagcaaaaagtacctaagaataaaattgttggttttaatcgttatgataaaatagagtatgaaaataatatctattttatcaaaatgagaatgtctataggatattttaagttgacggatatttataaccgagaggttccgaaggtaatagcagggcgcaaactaaaattattaggcaggagaaaatcatgtctcatagtgaacaaaacatttcatccctaa

SEQ ID NO: 1310 - DNA, 265 bp, unidentified
  misc_feature 1..265: note = Ga0315284_10064466 JGI
  source 1..265: mol_type = other DNA
gtggattacccgcccctttaggggcgggcttcgagggtaaccttggggagtaattatttcaccatgactcggttttaggaaactaaaactccgttatttagcatgtagaaaccctagaatgccgcctcagttctaggctctttcgtggctctgtaaacaaggacgacagtcctagtcaaccacgttgcgaaggctgaataacattgtcgagaggaagtggttcaatgaacccacaacttaggaataggagataaactacttgtta

SEQ ID NO: 1311 - DNA, 1677 bp, unidentified
  misc_feature 1..1677: note = Ga0194138_10000001 JGI
  source 1..1677: mol_type = other DNA
ctgaccagccttagtcccgttagggactacgttatcttagttatcataccccggtgtggccggtccagcaccgggcgctatgcaggctctgtaaacatacctagaggtagggtaagtcaacctggagagccgattacggtaagctttgataacattgacgaggaccacgtaactgccctacgggcacgtaaagggaacgatattatgtctaattccgtattcgtcttaaatgacgataaaacgccattaatgccgtgtaaaccggcacgggcgagattattattaaaacaaggtagggcagcagttttcagaaagcagccctttactatcattatgaaagaacagatagaaaaccctgttcttgagaacattgaggtaaagatagaccccggtagtaaaaccaccgggatagcgctagtaatgaatactaaacgtggagctagatgtatctggggtgccaaccttaagcaccgaggtcagcagatacgtgatgccttattgtcccgcgctcaaacgcgacgggggcgacgcagtcgtaaactgcgctaccgtaagcctcgatttttaaaccgagttaaatctaaagggtggttggcgcccagtatttacactcgagtagataataccctcacttgggttaaccgtcttatgcgctattcgccagtgacgtcggcagtggttgaactcgttaagtttgatatgcaaaagatggaaaacccggagattgcaggtaaggcgtatcagcgaggaagtctctttaactatgaagttaaagagtatttactgtatcgatataaccacacctgtcagtattgttctggtgcatctaaagaccccattttggagattgaacatattgttcctagagcatcaggtggtagcaatcgactgagtaacctgacactctcctgtgcgacatgtaaccgagagaaagggaaactgtctttggctgactggaaggataaatgtacccaccgaaaaaaccctattgacatgaagcgattaaaaggtattgttcgagtgggacagaacattaagcccgcactgaaagatgcggctgccgtgaacgctactcgatatcgtctagtagctgagctggactatctgggactacatacggaaacctcaggaggacacattaccaaatataatcgtaagcaacagggttatccgaaggaccattggatagatgctgctttagtcggagaaaggggttctcacgttcatatccctccggagttacatcctttaatcattaaaaaggtaaaagttaataaccgccagatgacaaagcctgacaaatatggcttccctcgaacgaaagctaaaggtccttcccgagctttcggttttaagacaggagatatcgcggcttccccgtttggcgtggggagggtggtcatccggacctcgggtacttttaacgtattaggaagagatgttagctggaagcgtttagtccatctctcctttactgacggttacgaatatgtggaccaacgcatcgtcaagatgattgttgataagcatactgtaattaaagaggtgtttgagagagtcatatcaaaaacattaattgacgccgattcccttctcatagaaggtacattgaatcgtaaagtagttcatggtatccgtagggacagtaaaactagagaccatactaaactatattaa

SEQ ID NO: 1312 - DNA, 246 bp, unidentified
  misc_feature 1..246: note = Ga0194138_10000001 JGI
  source 1..246: mol_type = other DNA
gtcaataacctccccctaaaggggtaggcttgtaaaagcctaattgaccagccttagttcttaacagaactacgttatcttagttatcataccctggggtggccggtccagccccaggctctatgcaggctctgtaaacagttctagaggtaagaaccgtcaacctggtgagccgattacggtaagctttgataacattggcgaggaccacttaactgcttaaatgcacgtaaacaggaacgatat

SEQ ID NO: 1313 - DNA, 855 bp, unidentified
  misc_feature 1..855: note = Ga0070706_100065069 JGI
  source 1..855: mol_type = other DNA
atgaaggtgtttgtcctatcacacaccggaaagccgttgatgcccaccacgccgaggcgtgcgcggatctttctcaaaacgtggcgcgcacgcatggtgactcgtgagccattcaccattcagcttcgtttcgagacgactacctatacccagccggtcaccgtaggagtggataccggttcccaaacggtcggcatagctgcaatcacgaaccaggaggtggtcgttcaggcggagatgtgcctacgcacagacatcagcaagcacctcctccagcgcaggcagtatcgcagaaaccgccgctcccgcaaaacgcgctaccgtgcggcgcgtggggccaatcgtcgcagaccctttggctggctgcctccgtctctgcgctcgaaagctgaagcgaccgtcaaagcggtacgttttgtcgcgaggatcctgcccattagtcaaatcaacgtggaaattggcagctttgatacccagcaaatgcagaacccggaggtctccggtgtttcctaccagcagggccaccttcagggctatctgctgcgcgagtatctgcttcaaaaatggcagagacagtgtgcctattgtcaagcgagcggagttccattacagatagaacacctcattcccaaatcacgaggaggcagtgatcgcgccagcaatctcgtgatcgcgtgcgatgcctgtaacaagcggaaaggaacccggacggcagaagagtttggctatcccgaaatccaggcccaggctcgtgtgccactcaaagatgctgcccacgtctcgtccatcaagactgccgttgtagatgctcttgcccagcagttcggactagagcgggtagcggtgagatatggg

SEQ ID NO: 1314 - DNA, 298 bp, unidentified
  misc_feature 1..298: note = Ga0070706_100065069 JGI
  source 1..298: mol_type = other DNA
gttaatgacctccccattcgatggggaggcttgtgagagctggtctcttgcaagccggattgaccagactcagtctcagagccagccaggccgaggaagcgagcgtcttgactggcagtgaagaggctacgatacaactgagtgttcacgttcggaccctggtgtgctgccccagcaccaggcactccaactcctggcctaaccagtggtgcggttagccgccgtggccaggggaaagtaccgcgttgtatctgtgtcgaggggatcgacttctactccgaaaggagccttacccgat

SEQ ID NO: 1315 - DNA, 705 bp, unidentified
  misc_feature 1..705: note = metagenome
  source 1..705: mol_type = other DNA
ttgagagtatttgtattaaaccaacgaggtgaacccctcatgccttgctccccggcaaaggcacgcaagcttctaaaagccggtcatgcgaaaatcaaaagggtcaatccctttcaaattcaattgacccgagccacaggagagagcgtgcaaccggtgacattgggtgtggatgccggcagtaaaacgatcggtttaagcgccagtagcgccaagaccgaactctatgtgagcgaagtggctcttcgcacggatgtgagcgatttactgtccacgcgacgtgaatttcgtcgcgcccgtcgaaatcgaaaaacacggtaccgtgccgctcgattcgataaccgggttcgctctaaaaataaaggctggttagcccctagcgtggaaaataagatccaagcgcacatctcgcgcgtgcaaaacgtgtgccgtcttatacccgtgaacaaaatccgagtggaaacggcggcttttgacatccaaaagattaaaaatcccgacattgcagggatagattatcaaaagggtgatcaattggggttttggaacgtgcgtgagtatgtgttaaaccgtgacggtcatgtctgccaacactgcaaaggtaaatcgaaagataggatacttaatgtccatcatctcgagagccgaaaaacagggggtgacagtcccggcaacttgatcacgctttgtgaaacgtgccacaag

SEQ ID NO: 1316 - DNA, 252 bp, unidentified
  misc_feature 1..252: note = metagenome
  source 1..252: mol_type = other DNA
gtcaataaacccccgcttaaaagcggaggcttgaaaagccttgattgactagccccagtctgaagcattgtttcagactccgttcattgggaatacataggcactccgtggtgtcaatcctagctgcggaccctgcgaccatcgattaaaagcactgagggtaaggtgcggtgttgatggtacttaaacccctttgaacatggtcgaaggatttttaccgaccggcaacggtcgtggaaacaaaacttgaga

SEQ ID NO: 1317 - DNA, 1356 bp, unidentified
  misc_feature 1..1356: note = Firmicutes bacterium
  source 1..1356: mol_type = other DNA
atgtcagttgcggttatgagcaagacaggtatgcgattgatgccaacaagcgaatatcgggcacgtaagctgctcaagtcaaagaaggcaacggtatatagatacaatccatttacgattcagctgacagaaagagagacgggtgatgttcagacggtagaactttgcatggataccgggtatcttcatattggaacgtctgtaaaatcggagaagcacgaatatcttggcgtgcagattgatacgttaacagacgagaagcagaagcacgatgcgtgcaggatgtaccgcagacagagacgcagtaggaagagataccgccagtcacgattcaataacagaaaacgtagtgacggatggattgcaccgtctctggagcataagaaagatatccatatccagacgatttcacgcatctgcaatgcaatgccgattaccaacattacattggaaatgggaaattttgatacacaggtattgaaggcactggaagaaaatagaccactgccacagggaacggattatcagcatggagagagatacggtattgcaacgctccgtgaagcagtgtttgcacgtgacaagtatacgtgtcagtgctgtagaaaaacgatagcagacggtgcaattctgcacgtgcatcatataatataccgaagtcgaggtggcacaaatcgtatgtccaacctcgctacagtatgcgatagatgtcatactcctgcaaatcataagccaggtggtaggctgtacaactggaaaccaaagattgcgtcgttcaaaggtgcaacattcatgaccgccgtgcgatggaagatgtacaacgaggtaaaatctaagttttcagatatcaatatccatatcacgtatggagctgagacaaaggaacagcgcagggcttttgatatcaccaaatcgcacgtcaatgatgctcttgtaatgggacagtttcatccgaagcatcgttcaagaccagtatgctataagaagaaacgcaggaacaatcggtgtctggagaaattctacgatgcgaagtatatcgacagtcgtgacggtaagaagagaagcggtcaggaactgttcaatggcagaatcaaccgtaatcataagaaagattccgagaatctacatcaatacagacaacagaaagtatccgctggcagaagaacaataaggaaacaacattattcgatccagcctcacgatattattgtgtttaacaggcaacaattcgagacatccggatgtcactgtaatggggcaagagcaatcctgctgccacagaaaaaatctgttgctatcaaaaaacttagcatccacaaatatgctggtggatatttcaaatcagattttacgtaa

SEQ ID NO: 1318 - DNA, 457 bp, unidentified
  misc_feature 1..457: note = Firmicutes bacterium
  source 1..457: mol_type = other DNA
gtcaataacccacgcccgagataaatctcggacggggcttgtgaaaacagatatgtttttataagtcacgtttttatttatcgaaggcgttgaccgtaaggtcagattgattagcctcagtgtgcagcggagccagtcgactgtttcatatagccaggaacacttccagcacactacgttaccggtaaaataggcactctgtggatgctcctcaagtcccagactctgcggcatgcgattaaacatctctgagggtaggagaagtgtggtatgcgttaaactaccggataacattggcgatgaggacaaccgactctgattcggtactggcttgccagtgccgaaaggatagagaatctgtgcgagttgctttgaggtttcaaagtggccggcacagaaggcgtaagccatccggttctgccggaaatatttcatgtaaggagggcagcttatgtca

SEQ ID NO: 1319 - DNA, 798 bp, unidentified
  misc_feature 1..798: note = Ga0370526_00122 JGI
  source 1..798: mol_type = other DNA
atgtctaactttgtattcgtgcttgataccaacaaacaaccgttaagtccagtccatccagggcaagcaaggcgactattaaatttacaacaagctgcggtgtatcggcgctacccattcacaatcatattaaaatatgcagttcccgaccgcacaatacagccctgtaaactaaagattgatccaggctctaaaactactggcttggcgattgtgcaagatgataaagttatctggggtgctgagttgacgcaccgaggacagcaaatcaaggatgacttagaatcgcgtcgcgctattcgtcgcaaccgtcgcaatcgcaaaactcgttaccgcaaaccgcgttttttgaaccgtactcgaagagaaggatggttgccaccaagcctagaatctaggattgaaaatatccttacttgggttaggcgaataactcgatatgtcccgattacagggatatctcaagaactggtcaaattcgatcttcaagcaatgcaaaatccacaagtttcggggaaagagtaccagcaaggcgaacttgcagggtatgaagtcagagagtacttactagagaagtggggtaggaagtgcgcttactgtggtgctgaaaacgtgccttttgaaatagaacacattcacccgaaatcaaagggaggtagcgatcgcgtttctaacctcactcttgcttgccatttatgcaaccaagccaagggtaatagagatattaaagattttctagccaaaaagcctgacgtgctatcccatgttttaagacaattgacatcctccccggtctga

SEQ ID NO: 1320 - DNA, 273 bp, unidentified
  misc_feature 1..273: note = Ga0370526_00122 JGI
  source 1..273: mol_type = other DNA
gctatccgctaaacggtgaacagggctggacaaccagcccttttgctggacagatagccagttcctaagccttaaatggctacgttaagaaggtcaagacacctaaaagtgctttccagcttttagctctgtcgattaactttaaacatccgtatttagctaaggaagtgagttaatcccaacaagcctttttaacattggcgttcgcgaagcgtctccctttgggagaggaaaacataacctgagaaatcagaggacaaaatgtctaacttt

SEQ ID NO: 1321 - DNA, 1284 bp, Moorena sp.
  source 1..1284: mol_type = other DNA
atgtccaaagtatttgtaattgatactgaaaaaagaccattagacccaatccattcagcccaagctagacaactattaagaaacggtaaagcagcagtttaccgccgttttccgttcaccattattctcaaaaaatcacattcagatttatcagtaacaccactgcgattaaagcttgatcctggagctaaaacaacagggattatattggtcaacgatactactggggaagttatatttgcagccgaactaaaacatagaggctttgcaattagagatgctttaacttataggagacagttgagaagtagcagaagaagccgtaaaactagataccgtaaaccaagattcttaaacagaatacgtccaaaagggtggttagcaccgagcttacaaagtcgtgttgaaaatatcaaaacatgggttaataagctacgtaaaattgcacaaattgaagcaattagccaggaattagtacgctttgatatgcaattaatgcgtaatccagatatccaaggaaaggagtatcaacaaggtactttgactggttacgaaatcagagaatatttacttgaaaaatggagtagacaatgcgcttactgtgatgctaaagacgttccactacagatagaacatattcacccaagagccaaaggaggcagtaattcgattactaacctgactctaagttgtgaaaaatgcaacacaaagaaagaaattaaggatatcaaagagttcctaaaaaaagacaaaacaaggctagcaaaaatattggctcaaacaaaaaaaacattaactgatgcagcagcagtaaacacaactcgttttgcattgctagaggctctaaaagcaactggattaacaatagaaacaggttctggtggattaacaaagtttaatcgtagccaacagaatctagaaaaaactcattggttagatgctgcttgtgttggtaaatcaacgcccaaattgattattaaaggtgttaaaccattgttgattatagctaacggtcatggtactaggcaattatgtcgcacagataaatacggttttccaaatcgtcattgttcaagagctaaatttcactttggttttcagactggagacattgttaaagctgttgttaaaactggtaagaaagttggtgaatatattgggagaattgcaactcgtgcaacagggagtttcaacatctctactaaaaacggattagttcaaggaattagtcacaaatattgttcagtaattcacaaaaaagatggctactcatatacacaataa

SEQ ID NO: 1322 - DNA, 252 bp, Moorena sp.
  source 1..252: mol_type = other DNA
gtcaaccacccaccactaatcggagtaccgatatagtgggagcttgaaagagcctagttgtccagtctaagtgttaaatcactacgtttaaggtaagtgttcaagacctaccagagaatgcgtagctagttctttgctctagaacttaagagttaaacaggtttaagggttaagccagtacttttgagatagttaccgacctgaaacattgacgaagctaacattacccgaaaggagggacttatgtccaaa

SEQ ID NO: 1323 - DNA, 1374 bp, Streptomyces lincolnensis
  source 1..1374: mol_type = other DNA
gtgggagcagacacccccgggagcagggacgaaacggctcacggacatcccgccaccgcgcgggacaccggccgggaacatgggcgaggggagaccgacgggcgcggtgacgctcccccgcacaacccgccgtacaccggcggcatcggcgcgagcagagtcttcgtcctgtccaaggacggacacccgctcatgccctgccaccccgcccgcgcccgggaactcctcggcaagggacgggccgtggtcgcccgacaagtacccttcgccattcggctgcgtcgaccccggctccaagggcacgggtctcgccctcaccgacgagaagaaggaagtcgacgcgcacggcgccgtcgtcaccgtcagacgcgggctcacagcactggaactccagcaccgcggcgaccagaaccaccgatccatgcagcagcgtgccggttaccgacaccggcggcgctccgccaactgccgctaccgagcccctcgcccagacaaccgaccgcgccccgcaggatggctcccaccctccctgcgccaccgcgtcgacaccacctattcccaggcagcacgcctctgccgctacgcccccgccaccgagatccacatcgaacgcgtcgccttcgacacccacgccatgagcgcgggcagacccctcacccaagccgagtaccagcaaggcacactcgccggaaccgaagcccgcgcctacctccacgccaagtggaaccactcctgcgcctactgcgacgccaccggcgtacccctgaacatcgaccacctcaggccccgcagccaaggagggtcgaaccgcatctccagcaggtgagaacgcccctccatgacgccgccgccatgaacgcgacccgttggcagctcacggaaaccctcagcgacctcggcaagccggtacacgcctggtcaggcggccgtacgaagtggaaccgcagcgccatgggactggagaagacccacaccctggacgcgctgtcggtcgggcgcctgaatcatcagagcggcgacgccatcgtgcggttcccggggcaggtgctcaacgtcaaagccaccggtcgcggatcgtacgcccgcaccactccggaccgcttcgggttcccacggctccgccgggcccgcaccaagcagcacttcgggtacgtcaccggggatcttgtccgggcccatgtaccgaccggcaagtgggcaggcacatggaccgggcgcatctccgtccgcgccagggggcaacacagcctcaccacaccgaggggtcgtatcaacgtctcccaccggaatctgagactgctgcaacggggcgacggatacggctacagcacccggcaggaactctcagagtcaacttctcaaaaaaccggttga

SEQ ID NO: 1324 - DNA, 330 bp, Streptomyces lincolnensis
  source 1..330: mol_type = other DNA
gttgcttgcacccttcggaaaggaggtcactcgctccccaacgcaggttgccgagtgaccagccccagtcatcacgatccccaagatcagggaggtgccccgatgactacgttccccgcaggtgagtagacccaccaggctgtgcttcctcagcagcctgctctggaatccgtgggagcagacacccccgggagcagggacgaaacggctcacggacatcccgccaccgcgcgggacaccggccgggaacatgggcgaggggagaccgacgggcgcggtgacgctcccccgcacaacccgccgtacaccggcggcatcggcgcgagcaga

SEQ ID NO: 1325 - DNA, 861 bp, Moorena sp.
  source 1..861: mol_type = other DNA
atgtaccgtaggaacaggagagacaaactctggtacaggaaaccaagatttatgaaccgtggaaacaaaaagaaaggatggcttgcacccagcatagatcacaaactacagactcacataagactgattgagaaactgaaaaaaatacttacaatatccgatattattattgaggttgcttcattcgatcagcagaagatgaagaaccctgagataagtggaatagagtaccagcagggagaacttcagggatatgagatcagagaatatctccttgagaagttccatcatatctgtgtgtattgcagcaagaccggtgtgcctcttgaaatagagcatctcacacccagatcaaggggcggctctaatacagtagacaaccttgccatctcatgccatgaatgcaaccagaagaagaacaaccttaccgcagaagagttcggatatcccgatctgagaaagagtgcattgatgccgttaagagatgcggctttcatgaacactgtaaggtggaaactcactcagctaactggagcagatcatacattcggttacatcacaaagaggaatcgtatttctttggggttggataagagccatgccaacgatgcatttgtgattgctggaggaaccaaccaggccagggtattgccatttacaatcacacagagaaggagggacaaccgttctatccagacaaacaggaagggattcaggccatcaataagaaggaaaagataccccttacaacccggtgatgtagtggaattcggggagagcagatacgacgttgttggggttcatagttatggaaattatgtaataataaggaatggtgaaaagaagatgaatataagcacg

SEQ ID NO: 1326 - DNA, 520 bp, Moorena sp.
  source 1..520: mol_type = other DNA
gtcaactacccctccctgacggaaggggcttgttccgtgaggaacagcgcaagagttgattagggggctttgaaagacatggtgaaaaacatgaaagagaagcagaagttagattggagaaatacatacacacctacggatgctccacaagtccgtggcaactgtgatcatgcattaaacagagaggaaactctcagtgtgcatggtttaaaaaccccttctaacaaccccaatgtggacctacagtcaggcatggctggacaggacctgagggttcccgttataaacatgcgcaacgaaccattaatgccgacaacaccaggaaaggcacgaacactattgaaatctggaaaagcaagggtgatcagttcaaatccattcactattcagctcctctatgcaaccggagagacaaagcagccagtaatattgggtatagatgccggatacaagcacattggattctctgcagtaacagaaaagaaggaactgatatacccaaactcaataaagagaaatc

SEQ ID NO: 1327 - DNA, 942 bp, unidentified
  misc_feature 1..942: note = Microcoleus chthonoplastes PCC 7420
  source 1..942: mol_type = other DNA
ttgagcaaagttttcgttttagataccaacaagcaaaccctcaatccaattcatccgggtagagccaggttactgttgtctcaagggaaagccgccgtattccggcagtatccctttaccataatcttaaaaaaggaggtaagtaatccagttgttcaaccattgcgagtaaagattgacccaggggcgaaaaccactggactagcaatagtcaacgacaacactggcgaggtagtttgggtagccgagttacagcaccgagggtttcaacttcgggatgctttgacttcacgtcgtcaactacgacggtcgcgacgcaaccggaaaacccgttaccgtaaacctcattttttaaaccgcacccgtccgccatcatggttgccgccatctctaaatagtcgagtggctaatatactgacctgggttaagcgtttgtcggcactgtgtcaaatcactgccatttctcaagaattggtcaggtttgacacgcaaaagatgcaacaagcagatattagcggagttggctaccagcaaggcaccctagcaggctacgagatacgagagtttctactcgaaaaatggcataggacttgtgcttactgtagcgctcgcggaaccaagcttgagattgagcatatcaagcttaaacccctactgattgctgccaagggacatgggactcgccaagcgtgccgtaccgataagtggggttttccacagcgttattgctcccgaaataaagtccacaaaggctttcaaactggagatattgtgaaagcgatagttaccaagggcaaaaaagtcgggacttatgtggggcgtgtagctactcgtgcctctggcagcttcaatatttcagcgaggaacggattagttcagggcattaatcacaagtattgtaaatttatgcacaaaaaggatgggtattcatacgcaaattaa

SEQ ID NO: 1328 - DNA, 241 bp, unidentified
  misc_feature 1..241: note = Microcoleus chthonoplastes PCC 7420
  source 1..241: mol_type = other DNA
gtcaacaacccaccactgaccctaggggtacagtgggggcttgaaagaaagccctagttgaccagtctaagtacttttgtactccgttttttgagtcaagacacctacaaatacgacgccagtttgttgctctgtcatctaacgttaaacaaccatttgggaggtagtgcgttaggtctaacaagctcaaaaaacattgactaggcgaacattacccgcaaggaggctcactttgagcaaa

SEQ ID NO: 1329 - DNA, 1077 bp, Moorena sp.
  source 1..1077: mol_type = other DNA
atgttacgagttccagttatttcgcctgatggcaaaccattgatgcctacaaaagcttctcgcgctcgtcgttggcttaatcaaggtcttgctatcgtttacccaaatgatctaaatgtttttgctgttcagttagttaatcaaccatctagttatcagactcaggatatcgctattggtattgaccccggaaaatctttttctggtatcgctgttcagtcaaataaagccactctttggacagggcatttagtgttgccgtacaaaaaagtccgcgtaggcatggatactaggcgaatgatgcgaagaactcgcagaagtcgtcgaataaatcgcaagattccttattctcaaaggtctcatagacaaaagcgattctcgaacaggaggaacaaaaaggttcccccttcgattcgggcaaaccgtcaactagaaaatcgggtagtaagagaacttagtcttttgtacccagtaagtgccattgtttgcgaaatagtcaaggctaatggcaacaaaggtttttctcctgtgatggtaggacaatactgggcaatatctcagttagaaaaaatagccccagtgactcagaaacaaggctgggagacagccttgaagagagaagcgctagggctgatcaaagacaaaatagacaaaagtcggcaaacagttaatactcatgcagtagatgggattgcgttagctgctactcatttttaccgacgcaaaaattattatcaccgcaatggaaaattgagtgtccccaaaaactgtgaagtaactaacgctgtgttttccgtaattagacgtgcccccataagtcgccgtcagttacacctattgcagttttctaaaggtgcaaaacgtcgcaaatacggaggaacaaccactagtcatggttttcgcaaaggagactacgttgaagcggtcaaagccgggaaagcctaccgaggttgggtaagcggtgagacagcaagacaagtttccgtcagcgatatcaattggaaaagaatcggacaatttaccgcccgaaaagtccgacttttaaaacgttcgaccggcttaattgtaaaccactaa

SEQ ID NO: 1330 - DNA, 217 bp, Moorena sp.
  source 1..217: mol_type = other DNA
gtcaataaccccaacctcaacgcagtaggttggggcttggtagacaaccaactaccatgattgactagaccatttgagccgaattttgggacgaacgcttggatacttccccagtccaagcctcttcaaaactgtgttgtcagttgctgttagacaggaaatcttcaattcggtggtcgaggggacgagttattaactcaaatacttttctcgtgag

SEQ ID NO: 1331 - DNA, 1473 bp, unidentified
  misc_feature 1..1473: note = Human gut metagenome
  source 1..1473: mol_type = other DNA
atgaactacgtttatgtattagataagaaagggaagccattaatgccgactacccgttacgggaaagtccgccggatgctaaagtctggacaggcaaaaccggttcagaaccttccatttacaatccaattaacttatataccaaaaacaacggtctgtcagccagtgattgtcggatttgatccagggcggactaatatcggcatttctgctgtccgagaagatggaacctgtctcaatcttacacattgtgagacacggaacagagaaattccaaagctgatgcagaagcggaaagaacaccggcagacatccagaagaggagaacgtcttgtccggaagagactggcaaaacgtcatgggacagtaagttcaaaaccactggaacggatactcccaggttgtgaaaagccgcttaaagtcaaagacatcattaacacagagagtcgttttaacaaccgtctgcgttcggaaggatggctgacaccaacggcgacacaactgttacgaacccatgtgaacttattaaaacgcatgtgtcagatacttcctgccacggatgttgttatggaagttaaccggtttgcttttatgcagctggatcaaccaaatgtaaaaaagtgtgggattgattttcagcatggtccgctgttcgggacagacgggataaaagaggctgtctctatccagcaggatggacgctgcctcctttgtgaaaaacggactattgaacattaccatcacatcgtaccaagagcataccgtggaagtgatactgccgaaaacatcgcaggactttgtgccggctgccacaaattagtacatacttcacgggaagcctcgaataaactaaagcacaagaaggatgggatcaacaagaaatacggcggaatttctgtcttaaatcaggtaattccatttctgtttatggagtttgagcagatgttcccaggacatacttatgcaacaaatggatggaatacaaaacagttccgtgaaaaatacaggcttgcaaaagatcatagtgtagatgcttattgtatcgctgcaagtattctgccagaacccaaagtggagcttccagaagatacgcatgagattgtccagtaccgcaggcatgaccgtgctcgtatcaaacggcagacggaacggacatattgccttggaaagaagggggtctgtaagaatcgacataagcgtttcgaacagaaaacggattctctggaagagtatgtagagaaatacccgaattttttatccaatctaactgtaaagaaatcgcagcgttcttataacgacttaaagagagttcttccaggggcagtgatactttatcagggaaaacgatatatactaagtgggcgatcttctggtgggaaacagtaccgtatgctcggatatggaaatcaaaattttactgcatcgaagtgtacgattgtacaacagaacactggacttgtgtatgtaagttag

SEQ ID NO: 1332 - DNA, 235 bp, unidentified
  misc_feature 1..235: note = Human gut metagenome
  source 1..235: mol_type = other DNA
gtcatgaacaccgagcgacttcgtcggtctggggcttggatgggcttacgccctgaaaagctttaagacggaagctgcaaagagtttatgagcagagcagtgacataccgatcgccttcaggtgattccaagcctgaagctccggctataggtgtgcctatgctatggaaacacaacaggatggaggaaagatccaaagtcctgacttaccgtaaaggagtaacttatgaactac

SEQ ID NO: 1333 - DNA, 1419 bp, unidentified
  misc_feature 1..1419: note = Ga0119967_10003500 JGI
  source 1..1419: mol_type = other DNA
ttgccgacatccccgaggggagcgaagccggaaggcttccgttacaaggcccctaagggcagaagttgggagaaaacaatggctgtttttgtattggacagaaggaaaagaccgttgatgccgtgctctgagaagcgggcaagattgctgcttgcacggggacgggcaaggatccatcggttgacgccgttcaccattcgattggtcaaccgcacggttgagcaatccgtgttgcagcctgtacgcatcaagttggaccctggaagcaggacaaccggaattgcgctggtaagagacggtgaaacgggtaggacagcgcatgtgctgtttctcgccgaactgcaccatcgtgggcaggtgatcagggatgcgctcacacagcgcagggctttcagacgcaggcgacgcacggcaaacctgcggtatcgagcaaagcgattttataaccgcacgagacctgaaggctggattgcgccatctttgcggcatcgtatcgagacgactgtttcttgggtgaaccggctgcggcgctggacaccggttgcagcgatcagccaggagctggttcgcttcgatacccaaaagcttcagaacccggaaatctccggagttgaataccagaaggggacgcttttcggcctcgaggtgcgcgaatacctgttggagaagtggaaccgagcctgcgcgtattgtggtgctcggaatgttcctctggaaatagagcatatccagcccaggagccgaggcgggtcggatcgggtatcgaacctaacgcttgcctgtgacaggtgcaacaagcggaaagggaataaatccatcgaggagttcctggcccacgatccgaagcgcctggctcaggtcaaggcgcaggccaaatcaccactcaaggacgcagcggcggtcaacagcacacggtggaccttgtggcgacagcttcgggatatggacctggaaatagaggtcggcacaggcggtcggacgaagtggaaccggacccgtttggggctacctaaaacccatgcccttgatgcggtttgtgtgggggatgtgaaagcggtgcaaggatgggccgtgccggtgttacaagttaaagctgctggccatgggagctatcagcgcacacgtcttgaccgttttggttttccaagaggctgcctgatacgtcaaaaacgtgttcaggggtttcagatcggagacctggtcaaggctgcgatatcaaagggtataaaggcaggaatttatgttggccgtgttgctgtgcgggcttcgggaagtttcaacgtgcaaacggcacacggcgttgttgaggggatttcataccgctattgccgattgctccaacgcgcagacggctatggctactttgtgcaactttgtggaatagcccttggaaaggaagaattgcgagaggccgcctga

SEQ ID NO: 1334 - DNA, 287 bp, unidentified
  misc_feature 1..287: note = Ga0119967_10003500 JGI
  source 1..287: mol_type = other DNA
gtcaactaccccgtcctgaagggcggagcttggggaaacctgagccaggttgaccagggggagcggggaatccgctacgttggcaacaggtcgttaagacccactccgggatgcttcctcagtcccggacactggaaggctcggatcatgctggcgaaaggtaaagcgccgaaggttcaagtcgccgcgaaagcgggagccggttgccgacatccccgaggggagcgaagccggaaggcttccgttacaaggcccctaagggcagaagttgggagaaaacaatggct

SEQ ID NO: 1335 - DNA, 900 bp, Moorena sp.
  source 1..900: mol_type = other DNA
atgccgtgcaccgagaagcgggccaggctgctgctggcacgcggccgggcgcgcgtgcatcggctggtgccactggtgatccggcttgttgaccgtcaggccgccgcctgcgactttcagccgctacggatcaagctcgatccgggcagcaagaccaccggcgtcgcgctggtgagggatgtggaatcggttgacgcgtccacgggtgaaattcatagtggggtagccgtcatcaacctgctggatctggtccaccggggccggcagatatccgaagccttgacggctcgtcgtcagatgcgccggcgccgcaggagcaatttgcgctgtcgcgcacccaggttcctgaaccgcggcaacaagaagtccggctggatcgcgccctccctgcagcaccgggtggacacggccatggcctgggtcaggcgcattcaacgttgggcgccggtgagggccatcagctccgagctggtgcgctttgacatgcaggcactgcaaaacccagaaatttccggcgtggagtaccagcaaggcaccttgttcggctatgagctgcgcgagtacctgatgcgcggcaagcgtgtgcagggctttggcaccggcgatatggtgcgcgccgaagtgcccaagggcgtcaaggccggggttcacgttggccgagtggcggtacgcgccagcggcagtttcaacatccagacccatcagggcggaatctccggcgtggttcagggcatcagccataagcattgccgggtgacgcagcgcaacgacgggtatgggtatttcttcaaccgggccgatcacacagggcgtgagcaggtatggcccaaggcatcggatgctgcgcatccggcgctctacctccccgccatgaatggcagggtttcacgcgcaatctga

SEQ ID NO: 1336 - DNA, 361 bp, Moorena sp.
  source 1..361: mol_type = other DNA
gtcaatcaccccaccctaaaggatggggcttggaactgaaaggagccaagccaggttgaccagggaaagcggtaatcaacccgctacgttagcaacaggtcgttcagacacaccagcgaatgcttcctcagttcgctgctctgtaaggtcttgatcatgctggacaaaggtaaaggtccgaaggtcttgatcgcagctcgcaagggctggagccggttgctgacattcccgaggggagcgttctggagcgtcgtgaggcgcaccagagccgtcaccaggcccgtaagggctgaccgctggaaagacggcctggctgcacagtttgcagtgtgaattattgatgtcaggagttggtgtggca

SEQ ID NO: 1337 - DNA, 930 bp, Fervidicola ferrireducens
  source 1..930: mol_type = other DNA
gtgcccggatcacagggctcctgcaagaggaggaaaaagatggtattgttcactgccgacaaatacggtaggcccggccacccgacgaaaaggttcgacatgataaggaaactgaggaagaagggtaaagtaagaatcgttggtggagggacctccggcaagccaccggtagcagtgttcctggacagggaatttgattgctccaaaacagtaccaaggaaactcatcatagcgctcgacccgggatataactacatagggtttgttgtgtgcgaaacaaaaaatgggaaactgatcgcatactgccagggtgttttacaaaccagaattcccgagattaaggagttgatgacagaaagaagaagacaccgaaggaacagaagatactattcgcggtgcaaaaagagacatttatccgccagacatggtagggttttaacaaaatttaaggcgccaagaatagtaagggctagagacaagtcgaacgccaccctcaaacatggtgtggaaacgcacttcaatctttacaaaaagcttttaaggctcttcccctttccagcagagcaggttgtatttgtcatggaggataacgtcttcgatgtcagggcaatgacatggggcaaaacatacggcacgggttaccagagatcacccagaacgccagcagagaggaaatgcatcctttgcgggacaaaagagaatttgcaaaaacaccacctgatacagcggaagagcggtggtacggacgttcaggagaacctggtatacctatgcaaagactgccatgaagatgtacatgccgggagggtatatatccccataaaaggcatcaagcagtggcgtgcattggggacgatgaacgcaataatggggaaactgcggaaaatgccgcggctggagtttgtacctgcatcggacgtggcacaggcg

SEQ ID NO: 1338 - DNA, 251 bp, Fervidicola ferrireducens
  source 1..251: mol_type = other DNA
gtcaactacccccgcttgtagaagtgggggcttgtcggtaggggtgaactgctgacaggtctgctgacaggcaggtagttgaacgcgggtgtgcggcagcagaacctgacgttctgggacgacactcccagtcccgggagacagcggtgaaatcccgcggccttacacggggtgctgccgcacacctcagggagacccaccacctttcaaaaaggtgcccggatcacagggctcctgcaagaggaggaaaa

SEQ ID NO: 1339 - DNA, 852 bp, unidentified
  misc_feature 1..852: note = Uncultured Lachnospiraceae bacterium
  source 1..852: mol_type = other DNA
atgatgcagagtgttgctgttttatcacgcaccggcagaaaactgatgccgacaaatgcgtacagggcgcggaagcttttaaaaagcggacgcgccggaattgagtgttataaaccgatgttcacgatccggcttgcagaccgggaggaaggagatgtgcagcctgtcgaatatgcctgcgatacaggctatcagcatgtcggtgtatctgtcaaatcagaaaagcatgagtacgtgcacaatcagtacgacatgctcaaagatgagacagaacgccacaatgactgctgtaaataccgcagggcaagaagaaaccgcaagcggtaccgcaaaccaaggtttgacagccgctctaagaaaaacaaggaaatggcaccttccctgcgtcaccgcataatgtatcagcgactggtcaaagcacacccggaaatcgacatacatatccagtacggtacaaagacctgtcttacccgacgtcttacccgacaggaacgtcatatcgcaaagacacacgcaaatgatgcttattgtatcgggcagtttcatccgaaacaccgtaccagaggacagatattccagaaacagcgccgcaataatcgtgtcttagcgaaattctacgatgcgaagtacattgacatgcgtgacggctccaagaaatcaggttcgcagctttcatgcggcagaacaaaacgacgtgaaagcagacgtactgacaaaaatgagcgtatttatcgtggcatcaaatgtcaggcaggcagtctgcatacaagaaaacagcgttatgacattcaggcaggcgatgtggtcatatttcacgacaggatacgtgttgtaaaaggcacacaatgttga

SEQ ID NO: 1340 - DNA, 320 bp, unidentified
  misc_feature 1..320: note = Uncultured Lachnospiraceae bacterium
  source 1..320: mol_type = other DNA
gtcaactacccgcgactaaagtcgtaggcttgtagagctacaagtctggttgattagcctgagtgcctcgtgcactacgttaccgtgagctgcgtccggatgctccacaagtccggaccaactgggaactgtcgttaaaaattgctgagggcaggcaacgtgcggcagctgtttttaacccacggataacattggcgatgtggaccaccgtggctacggattttatccgcaagtacgagcatccgctggtctctacgactgcggaaaacgtaagttattgacttaagcaggaaggaggcatcagcgatgatgcagagtgt

SEQ ID NO: 1341 - DNA, 1203 bp, Moorena sp.
  source 1..1203: mol_type = other DNA
atgggtgttcctaaatatcatatggtgcttgtggtagatgcaaaaggcaggtcgttattgccaacacatccagcaagggcaagaaaactattgaaacaaggtaaagcaaaggtatacaagatggtacctttcactattcagttgaggtacgaagtcaaagaaccaaaaggagaatttactattggaatagacgatggagcagagttcgtaggtattgctgttaaaggtaaagataaaattatatttgcaactgatgtgagattgagacaggatgtcaaacgcaagattgacgaacgtaggatgtatagaagaaacagacgaaacagaaaactacgttacaggcctgcgaggtttttgaacagacgtcgtcctaaaggatggatgccaccaagtgtcaaatatagaaaagatgtaattttaagagcggtagatgatttacgaaaatacatgaatatgaccagagtcgtagtcgaattaggttggtttgatacgtcaagcatggcatgtggaagaaaacttaaaagcatagagtatcagcaaccagactttgaaggcagaaacagacgtgaacaggtgttgtggagagatggttataaatgtcaacattgtggtacaactatcaaattgcagatacaccacattattccaagaaacaaaggtggtacggacacattaaacaatctgataacgttgtgcgctaagtgtcacaaggaactacacgaaggcaaatgggtattaaaaaagaaacctaaacaatacaagtatcctgctatattgcaacaagggaaatggtatttgtacgagcaattagtggatagattcggcaaagaaaatgttaaagtaacatttggatggataacatcaaagaaacgaaaagaattaggattggagaaagatcattggttggatgcatgttctatattgaatacaaacaaaatagagacaagaccttttttgattatccctaaacgtcgtagaaaagaaataaacaatccaacgaagaaacacgaaactttcaaagggttcaaacattgggatcttgttaaagctgttcgtagtggtaagaaaatggtaggtgtaattaggagtttaaagaaacgaactttaaccttacgtacatcttttgatgataattttgaggttagttattcgaagacaaaattgttgtggagaccacaaggtttggtttacatattgatgtaa

SEQ ID NO: 1342 - DNA, 311 bp, Moorena sp.
  source 1..311: mol_type = other DNA
tataacaattagtgtttttaggggtctgagcccgaggtggtccttggaagtgggataagctcccctgaggaaatgaactcagggtgtgaaagaggtggaaatctcaccacctacgttccgtggttgtccgtgaggacaggtaccttaaggtgttgctccagctctaagctctaccggccatcgggaacgaaacgtagactgagatgtcggtatacatttcgatggctatcagagaccatgggacatgggcgaggggcaccataaccccacaagggaggtacccttaaatgggtgttcctaaatatcatatg

SEQ ID NO: 1343 - DNA, 969 bp, unidentified
  misc_feature 1..969: note = Ga0307376_10002476 JGI
  source 1..969: mol_type = other DNA
ttggcggcaacccggcgttccggtagagtgcggcaccttctcaaagaaggaaaagcccgcattttctgctacgaaccgtttactatccaattaacttacgagaacacggaatttgtgccggtagaaatgacgttggggattgatcctggttccagcgatactccagtagcagtcgaggtgcatgagcctgacgcggaaatgtgcagtatcgtttatgcgaaagagattctgcttcgcacagacatctctgcacagttgaagcgcagatccgatgcccggggtaatcgcagaaaccggactacccgttatcgtaagtgtcgttttcagaaccgcgttaaatctgtatgttcggtgtgcggcaaaaatcacacgccgaagtcttggaagaaagagaaacgcaaaaacagtaagggccacaaaaacgtttctaatggtcgtgcagcggtttgcaggaaatgtcagcatgaacgtccgagcgaaaagggtaatcatgataccgacaagatccttaaccccacgctgcagaacaaagttgataccatcgtagctgaggtcaagaaattggtcgagataatgcctgtgacgaagatccgagtggagttgaccgcctttgacactcagaaaatggccaaacccgagattcagggtatggagtatcaacaggggaccctgttcggttatgaagtaaaagaatatttgcttcataaatatggtcataattgtgtgtactgcaaagggaaaagcaaggaccttgttttggagatcgagcatgttataccgaagtcccggggtggcactgataagatatcaaacttggtgatctcctgcgagacgtgcaaccgggagaagggatcccggactgccgaggaatacgggttccccaatattcagaaagaggcggcgaagttcagggcttttcgctacagcgctcttactcaagctataaatgggcgttatggcaggagttaa

SEQ ID NO: 1344 - DNA, 368 bp, unidentified
  misc_feature 1..368: note = Ga0307376_10002476 JGI
  source 1..368: mol_type = other DNA
gtcaattaccccaggctaaagccgggggcttgagggagaaatcctgacagtcttccgctttagtcaggaacgaaagttccataagcgacagcctaagtcctaatcgactacgttctttcgaatatcagacagccggatgaaacgcggcccttctccgggtcagctagtccggcacaactttctggaggctctgtaaagtccttttggggatggggcggtcaacctcgggacgacctgtcgttacaggcaactcggaagaacattggctgggaaatgaacgggcgaaagcctgtattattccccgcgaggggaaccatggagatgtatttgcagtgacacaggccgaaagaaggcccgaacaagaaccg

SEQ ID NO: 1345 - DNA, 750 bp, unidentified
  misc_feature 1..750: note = Human gut metagenome
  source 1..750: mol_type = other DNA
ctgggcgtggatgccggcagcaagcatgtcggcctgtcagccacgactgaaaaggaggagctttatgccgcagaggtcgaattaaggaccgatatcgtggacctgctgtccacccgcaggcagaacaggcggacccgcaggaacaggctgcgttaccgtctcgcaaggttcgacaaccgtgtccactccaagaacaagggatggctggcaccatcgattgaacagaagattcagagccatctgaaagcggtaaaggatgtacataaactgctccctatatcaaagatcattgtcgaaactgccagctttgacatccaaaagatcaagaacccggatattgccgggaaagactaccaggaaggcgaacagctaggcttttggaatgtccgagaatacgtcttatggcgggacggacatgtatgccagaactgcaaaggcagatccggggacaagatcctcaatgtccaccacatagaaagccgaaaaacgggaggagacgccccgaataacctgatcaccctatgcgacacttgtcacgataaataccataagggagagatagagcttcacattaaacgggggcagtccttcagggatgccgcgtttatgggagtcatgcgatgggcgttctatgccaggcttcaggaacaatatagtaatgtccatatgacctacgggtatatcacaaagcacgtccggatcagcaaccatctggaaaaggatcactgcgtagacgccaggtgcataagt

SEQ ID NO: 1346 - DNA, 245 bp, unidentified
  misc_feature 1..245: note = Human gut metagenome
  source 1..245: mol_type = other DNA
tggatgtcaataactcgccacttgtagaagtgggggcttcaagcctttattgatcagactaagcgcttcgagcgctacgttaccctctaatatatagttaccggtggatgttcagcctagtctgccgctctaaggacagtgattaaacagttctgacgggtaggaacagtgttgctgttaaaaaccgagggataacattgtcgaaggctgcctaactctagcatacaggaggttttaaaaacatg

SEQ ID NO: 1347 - DNA, 1527 bp, unidentified
  misc_feature 1..1527: note = Erysipelotrichaceae bacterium sp.
  source 1..1527: mol_type = other DNA
atgcatcaagcgctgcagacattggcgatgggtgctacgtgcggtggacacggacagaacagtgttgtatctgtcgcaaatcaccaacttatagaaaaggaggcgtcagtcatgaaggtttttgtcatagggcggaatggtctcgggctgatgcccaccaaaccacgccttgcccgtatccttctttccaaaggaaaggcaatcgttgttaagaagagaccattcacaatcaaactgttatataagaccggcagtgccacacagcactgtgaggtcgggatcgacaccggttctcaacacatcggtgtagccattgttgcggacgatgttgtacttacaaaagaagagtgggaacttcgctcctcaatggagaaacgctctcttatggaaacgcgcaaggagtatcgaagtggaagacgttatcgtaaaaccagataccgtcaccctaagttcatgcctcacacaaaacgagtctattatgaaaaagctgtaactcggcacggccataagacacactggatcaaagtgaagaatgaattcacttcctacagagaagacggatggttagcacccagccttcaatcaaaggtggatcatcatcaccggattatagactcatatctttccgcattgccaaaagatacacatctgaatatcgagctcgcacggtttgatacacacaaagctgtagatcctgatgttactggagaaggatatcagtatggtccgctttatcaacaggaaaacctgaaggcttatgtgtttgcaagagacaactacacctgtcagatctgcggagctaaagccggccgggtcagaaaagacggcagtaccgtcaagctgatcgggcatcatatcaattatcgatccaacggcaccaccaataatccttcagggatcttgtctgtttgcgacaaatgccatacacaggctgatcatcaaccaggcggaaagctctatcaactgatgatatccaataagaagatcgcccgtggattaagagatatgacaacagttaatatcgttgtgtctcaattacgaaagatgtatccttcggcattcttcacatacggcaactataccaaggctaatcgcgatctgatgggattgcttaagtcgcacgccaatgacgctgtggctatcgcgaaatgccaggacatcctgtttacgggaaatctgaccatctgcgattgtaatggaaccgtatattacaagcaggttcgtcgcaaaaagcgttctttgcatgaagcgaacccccggaaaggccgtaagactcttaaccgcacagcaaagcgttattccaagaatacgaagcgtgtgaagggctatgacctatatgccaaagtgacatatgatggacaactcggttacatatccggctttaccggtacaagcgcctatatccaggattgggaagggcgttacatcagaatgcagaacaaaacatatttgaacatttcgctatctaaattacacaaactggataacggccacaattggctgtcccgattcatcccctccctatag

SEQ ID NO: 1348 - DNA, 299 bp, unidentified
  misc_feature 1..299: note = Erysipelotrichaceae bacterium sp.
  source 1..299: mol_type = other DNA
gtcaattacccaccacttagaacctgatggttcctgaagtgggggcttgtgaaaacaagtcggttgactagcctgagatcttcgagatctacgtttgcagagttatgactctacccgatggtacccaagtcggtatgagtccgagcaacgaatgaaggagatgggttccctgaatcgactcgatgcatcaagcgctgcagacattggcgatgggtgctacgtgcggtggacacggacagaacagtgttgtatctgtcgcaaatcaccaacttatagaaaaggaggcgtcagtcatgaag

SEQ ID NO: 1349 - DNA, 708 bp, unidentified
  misc_feature 1..708: note = Ga0265594_1010503 JGI
  source 1..708: mol_type = other DNA
atggtagtttttgtactcaacaaacatggtaaacctttgatgccttgcactccttgcaaagcaaagaagttgttaagaaacaaaagagcaaaagtagtaagaaagactccattcactattaaattacttggttggtctagtggttatgttcaaaaagtaacagtaggaatggatactggcagtaagaaggtaggagtagcagcaatatctaataacaaagttttgtatcaatcagagataactttgagaaacgatattgtaaagaagatgaaacaaagagcatcttatcgtagaacaagaagagctagaaaacttaggtatcgagaaccaagattttcaaacagaggtaaaaaaggttttcttgcaccttcaatgctttctaagattaattctcatttaaaagagaagaaatttgttgaaagtattttaccagtatttgaatggatattagaaacagcaagttttgatattcataaaattacaagtccaactgtaaaaagtaaaggttattgtaaaggaattttaaaggattattataatgtaaagcaatatattttgcatcgagacaattacaaatgtcaaaaatgtaaaaaaggtaatttaaaattacatgttcatcatattatttttcgttctgaaggaggtacaaacgaatcaaaaaatcttatatgtttatgtgatgaatgtcatgataaattacataaagga

SEQ ID NO: 1350 - DNA, 242 bp, unidentified
  misc_feature 1..242: note = Ga0265594_1010503 JGI
  source 1..242: mol_type = other DNA
gtgaactacccccaccttaaaggtggaggcttctaattatcattaaggagtctggttcaccagaacactaacaggagaaaagtaatacaatgttagtaaacgataggaaagaaattaggtaccttggaatgtcacctcagtttcaagctctacggatacagattaaacaactttatagggtaataagtagtgtttgtatcgtaaaacctttccatatctgttcgagaggaagtcggattcta

SEQ ID NO: 1351 - DNA, 1515 bp, unidentified
  misc_feature 1..1515: note = Ga0310786_10003093 JGI
  source 1..1515: mol_type = other DNA
gtgctgcgcgttaaaaccttgtataacatcggcgatgtggaccacagagcgttaggctctgcattatccgttaaatcggatcaaaaagacgaaaggggacgcagaatcatgacaatattcatcatcggcaaaaacggtgaacggttgatgcctactgtcagatgcggacgtgtccgccatctgttacaggatggcaaagcaatcatcgtaaagcatgacccgttcaccgtacaattaacgtacggaagcaatgaatacgtgcaggatattgagctgtgcatagactccggttacgaacacgcaggtgtgagcatgaagtccgacgcacgggaatacgtttccgcacagtacgatatgctttcggacgaaaaacagcggcacgacgatcaacgtcgctaccgcagaacaagaagaaaccgcaaacgctatcgcaaaccccgtttcgataaccgcaacaaaccgaaaggctggctcgcaccctctatacaacacaagaaagaaacgcaggtaaggttgatagaacgtttcgtatcagtcgcacccgtaacatccataattgttgaggtggggcagttcgatcctgccgtactaaaagcgatagaggaaggtacttctatcccggagggtacggattaccagcggggcgaaagatacaggttcgctacgctgagagaagccgtatttcaaagagacggatacaaatgctgtttctgcggaagagggatcaaagagaacgcgatcctgtacgcgcaccatgcactctactggaaaggcagacatgctgatcgtgtgagagagctggccgcttgttgtgagagatgtcatacggccgctaaccaccatcgaggcggaaagctttggggatacgagccaaaggtttccaaacttgagggtgcatcttttatgaacgcggtacgatgggcaatcatcaatgagttgaaagccaagttttctggatacgtacactttacatacggagtaacgactaagctgaaacgccagaccctgaggatagaaaagtctcacatcaacgacgcttatgctatggggaataaacatccagaaaaaagggcgagtttcgagcattacgtcaaaagacgcagaaacaatcgttgtttggagttgttctacgacgccaaatacattgatttgcgcgacgggaaaactaaagcaggcaaatccctcggatgcgaacgtactaaccgaagagagccgagaaacaacgaaaagagccttcgcaagtacagaggtcaaaagatatccaagggaagaagaagtatacgcaaaacccattacacgatacaaccgggaacactcttgtcgattaacaacgagcagtatgtagcaaaaggttgtcactgtaacgggaaaagcgtaatgcttacgaatggcaaaagtgtcactgtttctaaagccagagtattaaaatacgcatctgggtggatgcaaaaaaacataacgaaaggatgcgccattcctcccaccttttacgaagtgggcttactggcgcagtag

SEQ ID NO: 1352 - DNA, 282 bp, unidentified
  misc_feature 1..282: note = Ga0310786_10003093 JGI
  source 1..282: mol_type = other DNA
gtcatgaaccaaccactcacgtagtgggcttgtatgggactacgagcgcatgattagcccaagtgctacgagcactacgttatacaagaatatatagtcactccgggatgctccacaagtcccggactctgaggtacagtattaaacatctctgagggtaggagaagtgtgctgcgcgttaaaaccttgtataacatcggcgatgtggaccacagagcgttaggctctgcattatccgttaaatcggatcaaaaagacgaaaggggacgcagaatcatgaca

SEQ ID NO: 1353 - DNA, 1296 bp, unidentified
  misc_feature 1..1296: note = Human gut metagenome
  source 1..1296: mol_type = other DNA
atgccgaacaaagtgtatgtcatcaataaacacgggcgtccgctgattccctgctccccagcaaaagcccgtcatcttctggatgacggaaaagctaaagtcaagaagagaacgccgtttaccattcagttgatttacgggagcagcggatatactgaggatgtcatcctcggcgtagatgcaggaagtaaaactattggattatcggcaagtacagagcaagaagaactctttgcagcgaatgtaaccccacgcaatgatgtggtagatttactttctactcgcagagaattccgaagaaccagaagaagccgtaaaacgcggcatcgtaaagcacggttcaacaaccgtgttcacagcaagcataaagggtggttagcgccatctgtagaggtcaaaatccaagaacatattacctgcattaagagagtctgtaacattcttcccatcagcaaagtggtcgtagagaccgctgagtttgatttgcaactgctgaaagccgttgaagaaggtaagcctgtcccgcaaggagaggactaccagaagggagaaatgtacggacactacaatgtacggcagtatgtgctctggagagacggctatacctgccagtgctgcggtgctcattctaccaagaagaaagatgtcaaacttcacgttcatcatcttgagactcgtaaaactggaggagatgctccatccaaccaaattaccctctgtgaagactgccaccagaagctgcacaaaggattgattcctgcggcagacttcaaaaagaggaagcgtaagtctaccagagatgctgcttttatgggaatcatgagaaataccttgatgcagaggcttcgcagcgaactaccgattcccgttgctgaaaccagaggttatattaccaaggcaacacgagaaaagctgctggtactttctaaaagccataccaatgacgcactggcaatcgcccaagggagacatggcttcaatgtaggatatctccagagcatcccacaaaataacaggatttatacgattcgtcctgtaagacaccacaatcgtcaattacacaaagcaaccgttttgaagggcggcatacgacgggtaaaccaagcagtaaagtacgtctacggattccgcctatacgacaaagtgcgatataacggtgttgaatgctttgtctgggcaagacgagttatgggctatttccgactgaggcatcttggaggagaaaatgtcaaatgcggtgctaattataagaacctcgaactattagaacgcagtcaaaactatttgatcgcgtaa

SEQ ID NO: 1354 - DNA, 314 bp, unidentified
  misc_feature 1..314: note = Human gut metagenome
  source 1..314: mol_type = other DNA
gtcaattaacccaccgcttaaacgctgaaacgttttgaagcgggggcttgcggtaaaagtcgtaagcctgattgactaccctaaacacttcgggtgctacgttactcaagaatgtatgtataggcaccggtaggcgttcatccgaacctgccgctctgcggtgtatgattaaaagctctgagggtaaggagcggtgttgcgcacgaaaaccttgagataacattggggacggatacctgacagtcgaaagactgcgtggttttctattaaccacaataatctacaaaaaggaggaaggcatcatgccgaacaaa

SEQ ID NO: 1355 - DNA, 750 bp, unidentified
  misc_feature 1..750: note = Ga0302213_1000513 JGI
  source 1..750: mol_type = other DNA
atgacaaattattgttatgtaattgataaaaacaaaaagccacttgagccaactaattataataatggttggagattggttagaaagaagaaagcgacattagtttcaatgtatccgtttgtgattaaattagaacgagaagttgaaacatcggaagtaaattttaatatatgtggtattgataccggaagtaaatttactggaattgctatcatttctgaatgtaaaaccataaataaagttttgtttaagggaaccatagcccatagacgagacgtaaacaagttaatggaattacgcaaaggacaaagaaaatatattggatatgctcaacattgtatgcaaggcaaaacttatctcagagaaaatttgctaaagatatatccaattgaattaacgattggttcagaaactgcgaataaacgcattgattggtgcattgagaaatcacatagtaatgatgcgattgttattgctggaataaaaccgtacaagtgtgatattcaagattgggttataaaaccaatgcgaaggcagagcaaagccaaaacggacaatgtattgggaattaaacacaaagatttggttttatacacatataaaaatggtgaaacacatattggatatgtgacagcaatttatccagaactaaatgctttgaatcttcagtcatcatcaaaacattgtaaaaaggttaacgctaaaaagtgtaaatttatatggagatttaataaaatttattggatgtag

SEQ ID NO: 1356 - DNA, 286 bp, unidentified
  misc_feature 1..286: note = Ga0302213_1000513 JGI
  source 1..286: mol_type = other DNA
tagataaacgtgtacaatagtggacaaacatctattactcgcggacagctgatgaggtttcacgcctaagtgaatgctatcaatgaaaattgcttgcatgatgagctacgatcgtataaatgccaaagacacaccctcggatgtaatcttcagtccgttgctctgtgagtataaaggatgaccgacttctaatgtcctgaagtcaaacaccgaactacatgtgcattatattgtcattggcaagaagaaaatactgcgaaagcgagagtagtcagagatgacaaat

SEQ ID NO: 1357 - DNA, 1350 bp, unidentified
  misc_feature 1..1350: note = LO132_10002610JGI
  source 1..1350: mol_type = other DNA
gtggcgcgtgcccggccgggcaatccccggcgtctcacgcgcaagggaaaacgccagatgtcacaattggtatacgttctgcaccaagacggcacaccgctgatgccgacccgtcctgcaaaggcccgccacctgttggacgcgggaaaggcggtcgtggtacagcgcgacccgttcaccatccaattgaaggtgctctccggcaagcacgtccggccggtcacggtgggtgtggacatgggagcaaaggtggtgggagtagccgccgcaggctccgggcgggtgctgtaccagggagaggtgatcctgcgggacgacatccgtcggcggatggacagacgacgggcttaccgtcgcgcgcgccggagtcgcaagtgccgctaccgtgcccctcggttcaacaaccgccgccggccggcgggatggctgccaccctccatccgctcgaaggtggacacgacggtcaaggtcgtgcggcgagtagcctctttcctgcccgtctccctcatccgggtggaaatcgtcaacttcgacacacgagcgatgcaggccgggggaagcagattgccgggatgggcttatcagcgcggggagcagtacgggtgggaaaacgtcaagatgtacgtgcgtgcccgcgacgagtacacctgccggtattgcggtgcggtgatgccgcccgacctggaggtagaccacgtcgtaccgaggagtcggggtgggacagaccggcccaacaacctggtggcggcgtgtcacgagtgcaaccggcgcaaggggaatcagacggcgacggaattcagttacccccaggtggcagaacggagcgggcaatcgtttcgcgtggcggctcacacccaggtgggcaagatggctacgctggatgggctgaccgaaatcgccccggtcgagaccacctacggctacgtgacgaaggtagatcgggaagcgatgggtttgccgaaggcgcactactacgatgcggtagccatcgcgtcggcggggaagccggtcgaggtgctgggggtctacgaggcgctgcgggcggtggcacggggggcataccggcaacgcaagggagaccgttcccacctcgttgccagcctgccctacgaggtgtttggttttcggcagtgggacagggtggcgctaccagacggaggagtgggattcgtcgagggacggcggtcgagtgggtactttgccatctccgatctggaggggcaactgattgcaccgtcggtcaattgcaggaggctgcggcttgtcggccgagccggtgcacttctgacgggaaggaggagggcggcttcccttcgggctgagcctcagggcgaagcctcccccgactga

SEQ ID NO: 1358 - DNA, 360 bp, unidentified
  misc_feature 1..360: note = LO132_10002610JGI
  source 1..360: mol_type = other DNA
gtcaaccacccccgactgaaagtcgggggcttgtaggggagaccttgcaagccccggttgaccggcctcagcccgtttcggctcaggccgatatagtcgagggctacgttgtcggcaaggctaagacccttaccaacgccttttggccgcgataggggacgtaccctgggatgctccctcagttccaggctctacaactaccggttgcagacaggctgaaggggtaggcgcgaaacgggccggtagatatgcggaccgacaacattggcgagggggacctgacgggtggcgcgtgcccggccgggcaatccccggcgtctcacgcgcaagggaaaacgccagatgtcacaattggtatac

SEQ ID NO: 1359 - DNA, 1227 bp, unidentified
  misc_feature 1..1227: note = Human gut metagenome
  source 1..1227: mol_type = other DNA
atggtatatgtgttaaatataaacggtgaacctttaatgccaaccgaacggtacggtaaagtcagacgaattttaaagtccggcagagcaaaggtagtaaaaaggacaccgtttacaattcagttgttgtatgaagcaacaaactgcacccagcctgttacattaggcgtggatgcagggtataaacatatcggcttgtcggctacgacagaaagtaaagaaatatattcaagtgaagttgttgaacgctgtgatatagtcaatttacttaaaaccaaaagggaatgtcgtagaacaagacgaaataacaaaacacggtatagaaaaccaaggtttaataaccgtgttcgcagtaagcataagggttggttagcaccttcagtagaacataaaatacaaacacatattaaggttatacaaaatgtgtgcagtatcgttcctgtaaccaaaattcgtattgaaacagctgagtttgatgttcataaaatcaaaaaccctgaagtacagggaatagggtatcaacaaggcgaaaagtacggctttgttaatacaagaaattatgttttgtggagagataaccacacttgccgatgctgtggtaagtcgaaaggcgtactttttgtggtaaatgctaaaggtataataacagtagcacctgaagatttgtatacggtgtgtaaagaatgtcttgataatcatattaaaggtattaaacctttaaagttcaagaaaaaaagacattttgcaccacctacacaaatgggtattatgagaaacactcttcttgacagactgaaaaattcagtaaatgttcctgttgaaaatacatacggttatgtaacaaaaggcataagggaagagtatggtattaataaatctcatacaaacgatgcctattgtattgcaggcaatttacaagcaaaaagattaaacgaatattacctacaaaagaaggttcgttgtcataacaggcaaatacataagatgaacactctcaaaggtggtaagaaaaaacttaaccaagcaccgtatattgtaaaaggttacaagctaaatgataaagttttatatgataatcaaatttgttttatatccggcaggcgtacttcaggatattttgcaataaaggatatattcggcaaaactttatcaagttctgtaagctacaaaaaattaaggctgttggaaacagctaaacactatactttagaaaggattgcaaggtaa

SEQ ID NO: 1360 - DNA, 289 bp, unidentified
  misc_feature 1..289: note = Human gut metagenome
  source 1..289: mol_type = other DNA
gtcaacgacccacgactgaagtcacggacttgtaaatttaacaagtcactttagttggctgcaaaagcagcttgttgattagcctaagtcttaattgactacgttatacaagaatatatagacacctacggattttacgccaagtctgtggctctgtggagtacgattaaagagttctgaagggtaggaacagtgtcgtgcatatgtaaaaaccttgtaataacattggcgatggcgttttacagcacttatgtgctgacttacagtaaatgaaaggagtaccgtgatg

SEQ ID NO: 1361 - DNA, 1230 bp, unidentified
  misc_feature 1..1230: note = NODE_1723_length_10022_cov_2.7427 MG-RAST
  source 1..1230: mol_type = other DNA
ttgcgtaaaggcaagacacgctggctgtgttgcggtaagggacttaaaccatttgcgggattatatccaatgcaaaatcaacgaattccggtcctatctccaagtggtaaaccattaatgcccactactcccgcaagggctaggaaatgggtagaaagtggcaaagccataggcaagtggtctgacttaaatgtttggcacgttcagctagtttctgagccttctggacatgaaactcagcctattgctatcggtgtagaccctggcaaatcctactcaggaatttcagcccagtctaagcacttcaccctatttcgttcccatgttgttctgccttttaacagagttagggcaaggatggatcagcgtcgaatgcttagacgtggacgtagggggcgaagagtaaaccgaaaggtggcatacaaccttcgagcccatcgtcaggttcggttcaacaaccgcagaagctccaaagttgcgccatcaattaaggcgtctcgggatactgagtttcgcgttgtttctgagctggttagcctttatccaatctctcagattgtttatgagaaagtgagagccgacgtagacctcacttcaggtcgcaagtctgcccgctctgggaaaggttttagcccagtgatggttgggcaacgttaccagctcgctcaacttgccactatcgccccggttgtcactcgcgagggttggcagaaagacggtaatggcacgtctcaacttagatctcgcttagggttgtttaaggacaaagaaaacaaaggcaaggcttctcctgaaactcacgcagtagatggagtcgctttggcctgctctgcctttgttcggtacggcaaaaagtcgctaaccgaatgtgggtgggctgggtctgtttctattactgattcagtcttcagggtcattactcgctttggagctgtaaagcgtggaaagcaatatggcttctatcgccgtcagctccatgtagaagtgcctgctaaggctgctgttcgcaagcgcaaaggaggaaccatcactccgtttggcgtgagggtcggcgactttgttcaagccaccaaggcaggagaaaccattactggctggattggcggcttcaccaatacagaaaagtctcaaaagctttctgtctacgactggacttggaagcgtattgggcaattctcaatctcaaaagtaaaactactcaaaaggtccacaggattatgtgttgtctag

SEQ ID NO: 1362 - DNA, 319 bp, unidentified
  misc_feature 1..319: note = NODE_1723_length_10022_cov_2.7427 MG-RAST
  source 1..319: mol_type = other DNA
attatgccctttcatccgctcgagcgccgagcttcggtgaccttctaaaatgctttcctcactcactttcgcgttatcccacagacgatacgccgctttcgtccttccccaatctccgctcgcctggggcacactcgcctccggctgctgagctaggtcctcttcaatctacaatttccatcaagcggcgattcagccgcgcatctcctaaatctgagcttctcagctcttgcttggcccaattctgcatgattcctgcctgctcctggctggcgctactcctttcagaataactcatgccttggatctctcaaagtca

SEQ ID NO: 1363 - DNA, 1191 bp, unidentified
  misc_feature 1..1191: note = Ga0194137_10001287 JGI
  source 1..1191: mol_type = other DNA
atgacgtacaataagcaaggccagtgtaaggaaaggtggataccggtggtgtcctccacgggtaaagcattgatgccttgtcaccctagtagagcgcgtaagctagtagctaagggtaaagcagttaagaagtggctcaaaggcttcttctacatccagttgctggatcgtgaggacggcgacacgcaggagatctgcgtaggcgtagatccagggagtaagcgagaagggttcacagtgctctcaggcacacgcaccttcctcaacatcaacgcccacgccagagatggaaaggctgtcaagaaggcgatagaaaaacgcgctaatgcacgtaaaactaggcgtagtaggaataccccgtaccggtctcctaggtttaacaaccgttctcgtgaagactggataccccctagcactaaagcccggtggcagctaaaactcaacatcgtgaagcacttgatgaggctttacccgatcacgcgtgtagcggtggaagacgtggccgcagtcagtatgaaaggtggttatcgttggaacaatagcttctcgcccatccagacgggaaagaactatttctacaaggagttagagggtctaggtttaacactcacacagttcaagggcactgaaaccgcctctctacgcgctgcgctagggttgcgtaagacctcgtctaagctagctgaagtgttttcagcccactgtgtggactcctgggtgctcgccaaccaggtgttaggtcaacgaatcaccgtagacctaactgaactggttaccttgatcccgctggtctacgcccgtagacagctccatgtcttcaactgggctaagggaggtgtacggaagcggtggggtagtacgctgtctttaggacttcaaaagggtacgctatgttatcaccctaagtggggtaaatgctacctcggtggtagtgacggtgataagagagtgtcgcttcatgcttacagtaacaccaagcggctagcacggaacgttaagctggaagacacccaggtagtagcccactcaccctggcgactgttagacactcccgcgatgacgacacatcacgaaaagaggatcaggaggctaaacacactgtgcattagactcgcaacactaggcacgtcagactccagagtgtttcgcgcactcaagtcgggcacacccactcaccaaagggcagcatag

SEQ ID NO: 1364 - DNA, 258 bp, unidentified
  misc_feature 1..258: note = Ga0194137_10001287 JGI
  source 1..258: mol_type = other DNA
gtcaactaccccttcctaaccgaaggggcttgtaacgagtgaccacatcgctctaacaggactaaacagttgactagcctatgaccctagaggtcaaactgaacgaccttcgggtggaaccgagacgcacctacggatgcttccctagtctgtagctctgtggtcgtcagtggcgaagggaccttaacatgacatcattgatcctgtagaggactgaacatgacgtacaataagcaaggccagtgtaaggaaaggtgg

SEQ ID NO: 1365 - DNA, 1350 bp, unidentified
  misc_feature 1..1350: note = GENOME_ACESSION: mgm4547164.3 MG-RAST
  source 1..1350: mol_type = other DNA
gtgttaaaacagcagttacaagtaaagaaaaagaacatacctacggattcttcacaagttcatagctctataattcctacattaaacgagtctaaagacacagtgtgtaggaaagatactctggcttgtaacaactccgatgtgaatctacctgagtctaacaggattgagagaaatacaaaagtatttgtcctcaatgtaaaaggacaaccactaatacctacaactccttgtaaagctaaatatttgattaaaaaaggattagctaaagtagttaaagcatatccattttttgttattaaaatgttagtaaaaacaaggaattgtaagcaaaatgtagtattaggagtagatagtgattatcaaaatattggatttagtgcagtaagcaataagaaagagttaattagtggaactttggttttagataataaaactaaagatagattaacagaaagaagaatgtatagaagaagaagaagaaataaactttggtatagagaagtaagatttaataatagaagaagaaaagaaggatggttacctccatcagtagaaaaaagatatcaaactcatttaggacttattaataagattaaaactttgttacctattagtgatgtagtaatagaaacagctaactttgatatacagaaaatagaaaatcctaatattcaaggaaaaggataccaacaaggagaacagttaggatttgaaaatgtgaaacaatatgtattaacaagagataaaagaacttgtcaacattgtggtaaagataatactaaattagaagtccatcatattaaatttagaagtcaaggtggaactgataaaccatctaatttgataacattatgtagtaaatgtcataaagatttacataaaaataaatttagtataaaaagtattaaaagagattataaaccaaatacatttatgtctattattcataaaagattttggaaggatataccaacaatgtatgaaacatatggttatataactaaagctactagattaagtttaggattagataaaactcattataatgatgcattttgtatagctggtggaaatactcaagaaagagtaaaatcaatagaattaaagcaaaaacataggaataatagagtattacaactaaatagaaaaggatttaaaccttctattagaatacaaagatataagatacaacctaaagatttagttaaaattaataataaatggtatataacgaacggattacattgtaaaggaacaagaattatgataaataaaaagtcagtaaatataagtaatattagcaaatattttaatatgggaggtatgttcttttcctcccaaagttaa

SEQ ID NO: 1366 - DNA, 259 bp, unidentified
  misc_feature 1..259: note = GENOME_ACESSION: mgm4547164.3 MG-RAST
  source 1..259: mol_type = other DNA
gtcagctacctaaaactaaagcattgggcttgtagtgagaactacaacgtaagagttgattaggaggttttagaaggtgttaaaacagcagttacaagtaaagaaaaagaacatacctacggattcttcacaagttcatagctctataattcctacattaaacgagtctaaagacacagtgtgtaggaaagatactctggcttgtaacaactccgatgtgaatctacctgagtctaacaggattgagagaaatacaaaa

SEQ ID NO: 1367 - DNA, 1293 bp, unidentified
  misc_feature 1..1293: note = Ga0373632_0083918 JGI
  source 1..1293: mol_type = other DNA
atggcagtttttgtatgggacaagcgtaaacaaccgctaatgccttgctcagaaaaacgggcaaggttgttgctgatgcgtggacatgccgtagtggttacacactatccgtttaccattcgtttgaaaaaccgtattggcggcgaaatccagccgttgcgggtaaaacttgaccctggcagtcgccatacaggcatggcgttagttcgggaggataaagaaaaactcacggtcttgaatttgttccagctcaatcatcgtggtttgtcgatcagtgaaaacttaacctcacgccgtgttatgcgtaaccgtagacgcggtaacttgcgttatcgtccgacgcgtttcaacaaccgcactaagccgcaaggctggttagcgccctcgttacaacaccgtgttgatacaagcataagttgggtgaacaaacttcaacgccttgcccctgtgacagcgctttcccaagaactggtgcgctttgatatgcaactgattaacaaccctgaaatcagcggcactgaatatcaacaaggcgagttgcaaggctatgaggtacgcgagtacctgttggaaaaatggggcaggcaatgcgcgtattgtggtgcggaacacataccattggaaattgaacatatcgtgccaaaatccatctgtggcagtgatcgggtgtctaatctgaccttggcttgccgcgcttgcaaccaatgcaaaagcagccaacccattgaaactttcttggctaaaaagcctgtattattgcagaaaatcaaagcacaagcccaacgcccattgagggatgccgcagcagtcaatatcacccgctgggtcttagctaagcaacttaaagcaacaggtttacccgtagaattagccagtggtggcaggacgaaattcaaccgcataacccacggcattcccaaatcccatgccttggatgcggtgtgtgttggcgaaatagtcgcggttgcccattggaacattcctaccttggaaatcaaatgtactgggcgcggcagctatcaacgcacccgtttggacaaatatggtttcccgcgtgggtatttactgcgtcaaaaagcggtttatggcttccagactggcgaccaagtgaccgccaatgtgaccaaaggtaaaaagacaggcacgtataagggacgtgttgcaatacgtgccagtggttttttcaatatcaccaccgcaacaggtatcgtgcaaggcattagccacaaacattgccaactaatcgctcgtaacgacggttatgggtatatttttcaactaaaggtagcttaa

SEQ ID NO: 1368 - DNA, 293 bp, unidentified
  misc_feature 1..293: note = Ga0373632_0083918 JGI
  source 1..293: mol_type = other DNA
gtcaactaccccgccctaaagggcggagcttgcaagagctaggttgaccagactcagtgctgcaaggcactacgcagataagaggtcgttaagacttaccaagggatgcttccttagtcccttgctctaaaaggtcgtgatcacgctggcgcaaggtaaaacgccgcaggttgccgccgacactgagcgtagctgaagtgtgagccgcttatctgcattgtcgaagggagattacgggaaaccgtagcgttactagacccgtaagggtaactatttgaggcacaacaatggca

SEQ ID NO: 1369 - DNA, 1392 bp, unidentified
  misc_feature 1..1392: note = Ga0172378_10001289 JGI
  source 1..1392: mol_type = other DNA
atggtatttgttattggatataatgatatggcacttatgccatgtaaagaaagtaaagcccgtaagctcttatcaaatggcagagctacggttatacataaaatgccatttactataaaacttttatacaaaacaggttgtgctacacagcccatagaacttggaatagatactggtacaggcaatatagggattggaattacttcttgtaaaaaggttttacacaaagctgaagtgtctcttagaagtaaggatatagtcaagttgcttactactcgccgtatatatcgtagaagcagacgttctcgtaaaacggaatatagacatccaaaattccattatcagacaatctataaatatgttggtttgcttgtaaaacgtcaacataagattggtaaatcaacaaagagcttgtggtctaaggtgtccataaatcttatgtccaaacgccctgaaggatggctgccgccgagtacacaatcgaaggttaatgcacagattaagtggattgataaatatctttctatattaccacatccgtcattaacaatagaagttggtcgttttgatatggcacgaatgaaaaacccaactgtacataatgaactttatcaatatggggatatgtatgattatgacaatatcaatgtttatgtatttgcacgtgataattatacatgtcaatgctgtcatacaaagtcaacaccgcaaaacaatttaaagcttgttaatcaccatatcatttatcactcaaaaggcggtagtgatagaccgagtaaccgtatcacgatatgtgaaaggtgtcatacttctcaaaatcatcagccgggcggtatcttatatgattggatggtaaataaacgtaaggttgctaaaacttatagtgatgcaacacaaatgaatattatacgtagacgtatgttcaaagcatttccgcaagcaacttttacatacggaaatatcactaatcctgatcgtaagaaattgatactttcaaaaagccattgtaatgatgccatagctattgctcagcaaggacaggtaacaaatattcatgatatacctactgtattgtatataaaacaatcacgtaaaaagaaacgctcattgcatgaaggaattccacgtaaagggcgtaaaacacctaaccgtgcacagattcgcaacagtaagaatacaaaaactgttggtaccttccatctaaacgactgtgttaagtttaacaatcaaatcgggtggataagcggattttctggtaaatctgcttatgtaaaaggtttacaaggaacatatattcaagaagtaggaaaggcttataagcttatatcactatcaaagcttagtaagataggaaatgcgggcaattggctatatcaatacaagatagcctaa

SEQ ID NO: 1370 - DNA, 291 bp, unidentified
  misc_feature 1..291: note = Ga0172378_10001289 JGI
  source 1..291: mol_type = other DNA
atgaattaccgagcatgaaaatgcaaagtatttattacagctaataacttggatgactagcctcagtcctatattggactaagttatgaatgtcaatacatattggtacgataccctaatacctctaaatgtttaggctctgtaaacagttttgtcgagacgaaacagtcaacctaaagcacgaaacattcataaccttggcgaagggtacttacgtgaaataacacacgggcagatcagttttgtatctgccgtaaagttataacttgtagaaagggcaggtgttatatg

SEQ ID NO: 1371 - DNA, 1254 bp, unidentified
  misc_feature 1..1254: note = Human gut metagenome
  source 1..1254: mol_type = other DNA
atggtatatgttttagatattaacggacatccacttatgcctacagaacggcatggaaaagtaaaacatcttttaaaaaacggaaaagcaaaagtagtcaaaagatgtccgtttacaatacaattattgtataaaagtttgacttatacacagtctattatattaggtgttgatgcaggaagtaaacatatcggtctttcagcaacaacgaacgataaggagttttatgcttcagatgtagaacttagaactgatatagtaaaacttatatctaaacgtagagagttaagacggagcagacggaatagaaagacacgttacaggcaagcacgctttgacaacaggaaacgaaaagacggatggttagctccgtctataagtcaaaaaatcaaatgccatataaaagtagttgagaacgtacacaagatacttccgattacaaatattgttgtagaaacagcatcatttgatattcaaaaaattaaaaatcctaatattaaagatactgaatatcagcaaggcgaacaacttgatttttggaatgtcagagaatatgtcttatttcgtgacgaacatatatgtcagtgttgtaaaggtaaaactaaagataaaatccttaatgttcatcacatagaaagtcgtaaaaccggtggtaatgctcctaacaatttaatcactttatgtgagacttgccacaaaggttatcacaatgggactgttagattacctaaaactattaaacgtggaataatttttagagatgctgcttttatggggattatgcgttgggcattttataataagctaagagaaaaatataaaaatgtttcaatgacttatggttacataacaaagaatacaaggattgaaaataaattaccaaaaaagcattatgttgatgccagatgtattagtggacaccctttagcaaaaccatctgaaatgatttactatcaaaaaaagataagatgtcataataggcagttgttcaaaataaatactttgaagggtggcacacgtaaaagaaaccaatctgaacgagtcataaaaggatatatactttttgataaagttaaatatcagggtaaagaatattttgtctttggtagacgtataagtggattttttgatataagagaacttaatggcaacaaggttaacaaaggaagtataaattgcaaaaaactcaagctaattgaaagatgcagtggttatttaatagaattaagaaaggagacggtgctcctctcatga

SEQ ID NO: 1372 - DNA, 280 bp, unidentified
  misc_feature 1..280: note = Human gut metagenome
  source 1..280: mol_type = other DNA
atgtcaataactcatgactaaagtcacgagcttgtaaaagcccgatattgaccagcctaagtgtttagtacactacgttaaaagagaatatatagttacctgtgaatgtttatccagttcgcagctctaaggtcagtggttaaacagttctgtggagtaggaacagtgctgctgatataaaaccttttattaactttggcgagggtaacttaacttctttaattttaaaggagcattatgtattaatttacatcatttgagaaaggagtgccgtgaaatg

SEQ ID NO: 1373 - DNA, 384 bp, unidentified
  misc_feature 1..384: note = Ga0395718_011872 JGI
  source 1..384: mol_type = other DNA
ctgcttcaagtcagattccccggctaccgacagccccgcttcgacaaccgcaggcggatggagggctggctgcctcccagcctggaaagccgggtggccaacctgcagacctgggaaagaagactggcctggtttgctcccgtggaaagcatctcgatggagctggtgaagtttgacacccaggccctgcagaacccagagatctccggggtggaataccagcagggtgagctgatgggatacgagatccgggaatacttgctcgaaaaatggggccggaagtgcgcctactgcggcaggacagaagtccccctggaagtggaacacattgtcccgaaaagccggggcggctcgaaccgggtcagcaacctgaccctgtcctgc

SEQ ID NO: 1374 - DNA, 293 bp, unidentified
  misc_feature 1..293: note = Ga0395718_011872 JGI
  source 1..293: mol_type = other DNA
gtgtactcgtggtcctgcgctcgcacttcatgcttttctgggtccagtttcatgtagatgcggaagaccttttccagtttggccttgccgaagatctcataccagctggcatccacgatcttccattcagccaccaggtccacaccttcgggttgtccatccacaatgtggaatggcgcactgtcacggttcaggcccatcaggcgcgtcttggtttcatcggcgctaagcgcggcggtatttccggcgggtttctttccaaataacggcatgtcacacctctctctatatta

SEQ ID NO: 1375 - DNA, 1305 bp, unidentified
  misc_feature 1..1305: note = Ga0208461_1004216 JGI
  source 1..1305: mol_type = other DNA
atgattagtaatagaaattcaatacgagtatttgtattgaacaaatataaacaaccactaatgccttgccatccggcaagagcacgtaaactacttagtaaaaaagaagcagcagtatatcgtagatatccatttacaattatacttcgtaaagaaactactaatttcactcaaccgattgaatttaaagttgatcctggtagtaaagtatctggtatcgctttagttagtaacaacgtccttttatggggcgctaatcttgagcatcgtggacatcaaattaaatctgatttagattcacgtagaagtattcgtagatgtagacgtaataaattacgttatcgtcaaccaagatggtctaatcgtaaacgtgaaaacggttggcttccgccatccttaatgtctagagtagataatataactaatttatgttatagattaagtaaacgagtaccacttacaaatatcgtaatagaaactgttaaatttgacatgcattctatgcagaatggatgtcaattatatggtactgagtatcaacaaggtactttacaaggatataatgtacgagaatacttacttgagaaatttcaaagagcttgtgtttactgtggcgaaactggtatacctttagaagtagaacatattataccgaaatcacgaggaggtactaatcagattagtaacttaactctagcttgtaatagttgtaatacaaataaaggcagtagcactgcaagtgaatttggttatccgaatgtacataaactagctcaaatgccactaaaagatgcagcagcagttaatgctactcgtaatcgtattggtaaagatcttaatttaagtggattgccagtagaattaactactggtgctcaaactaaaatgaatcgtattaaactcggtttaagtaaagaccattggattgatgctgcatgtactggaaatactggaagtaatatagttttcccaagtactaatatgagtatactcaatattaaagcaatgggtagagggaatcgtcaagtacaattaatggacaagtatggatttcctcgtaaaactaaaactaggttaatacaacctaaaactgttaaaagagttcatggattctctactggagatatagttaagttaacacaacctaatcatagtatttatgctggagtttacgttgaaagaattactgcaattcgatctagaggtcagctaagtattaaatttgacggtatgagtattgattctaattggcgtaactttaagttacttcaatacaacgatgggtactcatattcaacaatataa

SEQ ID NO: 1376 - DNA, 294 bp, unidentified
  misc_feature 1..294: note = Ga0208461_1004216 JGI
  source 1..294: mol_type = other DNA
gttgtccatcaactgcccctaattaatttcatgctcatccagcttaagtaatacttctgtattactacgttaattacgaatgagaatttattctcaaataggtactccaggatgcatctccagtccgggactctacggtaacgtattaaacaacacagaccgcgacaatgggtagtgtacattacaataaaccgtaattaacattagcgaggagaccttgacccttcgagaagactaatcccttacgggattatcataggaagtaatatgattagtaatagaaattcaatacga

SEQ ID NO: 1377 - DNA, 324 bp, unidentified
  misc_feature 1..324: note = Human gut metagenome
  source 1..324: mol_type = other DNA
atgtccgtttccgtttttgttttggacaggaagcaccggcctctgatgccgtaccgacccgctcggacgcgaagttatctgacgcgtcaaaagcgcgttcacgggttcgccacgggtgacatggtgcgggccgaggtcccctcggggaaggaggtcggaacctatccggttcgcgtgactgttctaaatagcggctctttcaacattcagacgcccgaaggcatcatccagggtattggttggcgtcattgtcaacagctttcttacaacgacggatacgggtatgcgtggcttcgccccgcaccccattcctcccccgtttga

SEQ ID NO: 1378 - DNA, 278 bp, unidentified
  misc_feature 1..278: note = Human gut metagenome
  source 1..278: mol_type = other DNA
gtcaaccacccctccttgaaaggagagacttgagcaatcaagccggttgaccggcctcagtgatccgaaaggagaactacgttgtcgtcgggttacaagacccgctccggggggcttcctcagctccgaactccggaaacggcagaagcagacaagcttcgggcaagtacgaagcggtctgtcgttgcaatgccggacgacaccattggcgaagggaattccgtcttttcggcggcccctccgattaaccgtaaggtttaccaaacatgtccgtttcc

SEQ ID NO: 1379 - DNA, 1293 bp, unidentified
  misc_feature 1..1293: note = Ga0137392_10005405 JGI
  source 1..1293: mol_type = other DNA
atggagcaatccatcatttatgttctcgcacagtcgggcaagcctctgatgccgaccagaaaccgcaacaaagtgtggtattggctccgcagaggactggcccgagtggtcagccgtgagccattcacgattcaactgcgctttgagaccaccggctacgcccaaccggtcacggttggggtagataccggctcgcagacggtggggatcgctgccatcacccagagcgaggcagtctaccaggccgaggtccatctgcgcgacgacattcataacaagctcatacaacgacgaaagtcacggcggaaccgccggagccgcaaaacgcgctaccgcgcggttcggttcgccaatcgtcgtcgcaagccaggctggcttgcgccttcgctgcgctccaaggcagaggccacagtgaaggctgtgctctttgtggcacggctgcttccggtgtgccagatcaacgtcgaagtagggagtttcgacacgcagaagatgcaagatcccgcagtaacgggtctggagtatcaacaaggccagatgcaaggttacctggtgcgagagtatcttttacggaagtggaagcgcacgtgttcgtattgtggcgcaactggccttcctctacaggtggaacatctcagtcctaaaaccagaggtggttcagatcgcatctcgaacctggtgctggcatgtgatccttgtaacaaaaagaagggaacacagacggctcttgagtttggatttccgcaccttcaggcgcaggcccgtgtgccactgagagatgctgcccacgtgtcttctatcaagactgccgtggttcatcagctcgttcagcagttcggaccagatcaggttgctgtgacctatgggtatgaaaccaaatacaagcgtcttcagatcttccaccttcccaagtcgcacaccaacgacgcgattgctattgcttgtgcagtgggagaggtggtgcaacccgctgcaagcatttttcaccaccgctgtgttcctcgcgggaactatcagttgtacaacggtgtgcggagcgagcacaaggtgtgggcgccgaagaagctgcatgggtggaagctgtatgaactggttgaggccaaaggggtagttgggtatattggcggtagacgcatccaaggggcctttgtcatgaaagatgtggcaacaggcaagggtatcctcgaagtaaccccgcgcaaactgcggcggctggctcgcccctggcacagctggatcgttgcccggcagtcgcttgtaagaaaggaggagcgcgcttcctcccccgcctag

SEQ ID NO: 1380 - DNA, 301 bp, unidentified
  misc_feature 1..301: note = Ga0137392_10005405 JGI
  source 1..301: mol_type = other DNA
gacctccaggctttgcctggaggcatgctccgaaagacccttggggtttgaggagcatgccgggttgaccagattgtgccttggagacaggcaggccgagcaagcgtgcgtcttgcctgtcgcagaaaaggctccgatagcaggaagtggtcaagcacctaccgagaagtgctgccccagcttctcgctctagaacggctttcttaaccagtggtgcggtcagccaccgtggagagccgacatcccgcctgctatcagtatcggggggaacgcttcactccgaaaggaaggcttatggagc

SEQ ID NO: 1381 - DNA, 780 bp, unidentified
  misc_feature 1..780: note = metagenome
  source 1..780: mol_type = other DNA
atggtgtatgtattgaatagaaacggaagtcctttgatgccatgtaaagaggcaaaggctagaagactgttaaagtatcataaagcaaaagtatataaaagggagccatttacgattcaattactatttgaatgtgaaaaccatatacaggatattacgcttggtattgatgccggtagtaagcatattggattgtcagcaacaacagggcaaaaggaattatatgccgctgatgttgaactgagatgtgatgttgtggaactgttatcaacccgcagacaatacaggcaagcccgtagaaacagattgagataccgggctccgagatttcataaccggatccattctaaaaacaaaggctggcttgctccgtcggtagaacagaaaatcaagactcacttacgggttccaaaagagcatattacagatgctcgctgtatatcagggaatccacaggcagaaccgctggggtattattttagtcaaaagaaggtgcgctgtcataacaggcagatccataaagcaaatattcaaaaaggcgggagcaggaaacgcaatcagatggagtatttagtaaaaggatttcgattattcgataaagtcagatatgataatcaggctggctttatctttggcagaagggcaagtggatattttgatataaggaagttgaatggcgaagtaatccatcgctctgcatcatataaaaaattagaattattggatacaagaaaaacattgttaacagaaaggagacaagcagtatctctcatggcttaa

SEQ ID NO: 1382 - DNA, 246 bp, unidentified
  misc_feature 1..246: note = metagenome
  source 1..246: mol_type = other DNA
ttccaggtcaataacccaccattaaaatggcgggcttgtaaaagcccttattgactagacttggtgttttaagcactccgttatgtaagaatatatagttaccagtggacgtacagcctaatccactgctctaagaatggtaattaaacagttctgacgggcaggaaccgtgttgccgttagtaaaccttatataacattgtctaaggctgcatgacttcagcatacaggaggatttaaaatcatg

SEQ ID NO: 1383 - DNA, 1257 bp, unidentified
  misc_feature 1..1257: note = Ga0131092_10008720 JGI
  source 1..1257: mol_type = other DNA
atggtttatgtaattaacaaacaaggacaagcacttatgccaaccgaaaggtttggtaaagtaagaagactattgaagaatagccttgcccatgttgtgtgccgtatcccattcacaatccaattagattatgacacaactaactttacgcagcccgtaagtttgggcattgatgctggtagtaaacatatcggcatttcagcaacgacgagtgagaaagaattgtacgcagcagacgtagaacttagaaacgatattgtagagaaattatctacccgtcgagaacaaagaagaactcgtagaaacaggttacgctatcgcaaggcacgtttcagcaatagagtggcatctaagcataagggatggttagcaccatctgttgaaaacaagattcaaactcacttaaccgttgtagagaaaatatacaagtttctacctataactaatatcacagtcgaaactgcttcttttgatatacaaaaaattaagaaccctaccatatctaacgaagagtaccagcaaggtgaccaacttaatttcttcaatgtgcgtgagtttgtgctgtttagagataatcacacttgccaacattgtaaaggtaagagtaaggataatatcctaaatgtacaccacattgaaagtagaaaagttggtggagattcgccaaataatcttataacactttgtgaaacctgccacaaggcataccataaaggagaaatagaactcaaggtaaaacgaggtgcatcatttagggatgctgcttttatgggaattatgaggtggaatttctacgaaagattgaaaaacacttacgctaatgtgagtatgactttcgggtatatcacgaagaatactcgtattactaatggtttgccaaaaaaccattatgtggatgcgaggtgtataagtgggcatcctacggctaaacctcttggttattatttctaccagaagaaagtgcgttgccaaaacaggcaaatacataaggtcaattttcttaaaggcggtagaaagaaactcaatcaagcaccgttcttggttaaaggttttaggctgtttgatttggttgagtatcaaaaagagttgtattatatctttggtagaagagatagtggtttcttcgatattagaaaacttgacgggacaaaagtaaacaaaggctctattagttgtaaacaaatacgattgatagatacgagaagaagtataataacagaaagaaggaatagtggttcaattcctcccacaaactaa

SEQ ID NO: 1384 - DNA, 283 bp, unidentified
  misc_feature 1..283: note = Ga0131092_10008720 JGI
  source 1..283: mol_type = other DNA
aaaaaaaatagatatgtcaactacccagaggctaaagacctcttggcttgaaaaagcccaagttgattagactaagtgatacccgaaagggttgaactacgttaggagagaatatatagttaccaagtgggtgtttgctcaagcctcttgctctaaggttggtgattaaacagttctgtgaggtaggaacagtgttgctaacgaaaaacctctccataacattgtcgatgagcatttaacggagaaatccgacttataataattattaaagtaagaccgaatg

SEQ ID NO: 1385 - DNA, 480 bp, Moorena sp.
  source 1..480: mol_type = other DNA
atgtctaattacgtctttgtaattgatccgaataaacagcctcaaaacccagtacatcccgcccaagctcgattgttattgaatcaaggtcaagctgctgtttatcgccgttatccgtttactattatcttaaaggagtcaaaaccagcaccagaaatacaacaaataaccctcaaaattgaccccggttcaaaaaccaaatttaaccgcactcgattaaacctacctaaaacccattggttagatgcagcttgtgttggaaaacttgaaactttaaaggtgttaaccaataaacctttattgattcaggcaacgggacgtggtactcgtcaaatgtgtggtacagacaaatacggatttccaaccttcccatgtttttcttgtgattatgctgaaaaactctatgctgagtcagttaggatagggatctgttcttcaggtcttatcgattcagataggttaaagtcaaagaatcattga

SEQ ID NO: 1386 - DNA, 249 bp, Moorena sp.
  source 1..249: mol_type = other DNA
gtcagcaccccgctctctttgtgacggggcttcatgcctccaactttagatagctcgtacccgcctcagcctaacggctacgttttctggatcataatacccacgaatgcgacgctagtttgtggctctattgttaacaattaaacagttttacgaggggtaagacagtgttgttaacgccaaaagttcagaaaacattggcgaagcgaacattaccctagaaataggagttatttcatgtctaattac

SEQ ID NO: 1387 - DNA, 402 bp, unidentified
  misc_feature 1..402: note = Human gut metagenome
  source 1..402: mol_type = other DNA
atgccgtgccagccgcgcaaggcaagaatcttgctccgtgacggaaaggcaaaggtcatcaagcgcgagcctttcacaatccagttgaaattcggctccagtgaatataagcagaagattctcaagggcggaaaacgcaagctgaatcaggctgcctattccattcatggatttcatctgttcgacaaagtacggtttgctggacaagaatgcttcgtgtttggtcgccgtaccagcggatacttcgatcttcggaagctggacggaacagttgttcaccgttctgcttcttggaggcagttgcagaaaacctgcaatcgtaaatctatcttgattagtaaggaggtgatcggcgctcctcccacgactgaagtcgcgggtgtccgcgccgaaatatcatga

SEQ ID NO: 1388 - DNA, 291 bp, unidentified
  misc_feature 1..291: note = Human gut metagenome
  source 1..291: mol_type = other DNA
gtcaattacccccgactgaagtcggaggcttgcaggaacgcgcaagcgtaactgacaagccctgattgactagactaagttctccgagaactatgttgccttggttatctcacccgtgggtgtttatcctagcctgcggctctgaggcggctctgtaaaagtcctaatgggtagggacggtcaaccgcgggacggccggacatttccggcaagccttggcaacattgtcgaagggtactttactcgttttgagccgctccggcggcgagaaaggaggtagacgtcttgttc

SEQ ID NO: 1389 - DNA, 1395 bp, unidentified
  misc_feature 1..1395: note = Ga0209200_1016766 JGI
  source 1..1395: mol_type = other DNA
atgaaagcttatgtattgaacaagaataaagaacctttgatgcctactactccggctatagcccgcattctgcttaaagagggcaaagctaaagtggttaagaaaacaccgtttactattcaactactgaacgattctacggggttcaaacaaccgatcgccggaggattggatatcggtgccgtgcatttagggtgtgcggccgtgtctgataaagaggttttgtatatgtccgaaacacttcttgaagacgattataccgtaaaacaaaagattcaacgaagaaagggattccggcggttaagaaggagccgaatcagataccggaagccgccatattcaagggcgatgatggtaagacttgctctgcaaaacagagttgcagaactaaagaaatcggaagtcgccgaactgtatccgaatttctcaaagaaaagaaaagtggcttttggcgatcaaagctcttttgtcgcaccatctgtacaaacaaaggtcaaccaccacctgcaggaaatgagaagggttgaaaaaatactacctgtatcgaggtgggtaatcgaaaccgcgaatttcgaccttcacaaaataacgaacccggaggttgccggggttggttatcaatatggcccacaatacaatttctacaatgtcaaatcatatgtcctcgacagagatggctacaagtgccaagtttgcggggcatccggtatcaaaaaagatggaaccgttttgaacgttcaccacatcgttccgaggagattatccaacagcacagatgatccctctaatctcatcactctatgtagctcctgccacaagaaagtacacaacaatgaagccaccttaaacgctaagccgatcaagaaagggaaacgccacgctacgttagctaacaccgttcgagcccgtttgattaaagctcttgactgtaagaacgttttgactacgtttggatatcaaacaaaattcaaaaggcaggcaatcttgggcttgccgaaagaacattacttcgacgcggtctctattgcgtttgacggaaccaaaaaaccaaaattgagcgatacggtttatcgtattcggagagtacccaaaaacgagtaccgaagagagcgtaggcgaaagaaaactgcaacgtccggaaaaacgtatcctgaggtaaaaatccgcggcaggtataacgggtataggaaatgggacttggttcgatatggtgatgtaactggttttgtaagatatttggcaacaaacaaaagtttagtgattacagaccttgacgggaacaaactactatcaatcagttctaacaaaaagcctgtaattcttcaagcgggcagccgttatccgacggtgataaaaaaagcacaagcccattgtataccacaacaaattcattga

SEQ ID NO: 1390 - DNA, 433 bp, unidentified
  misc_feature 1..433: note = Ga0209200_1016766 JGI
  source 1..433: mol_type = other DNA
tcaaaggatacggatacgtttacctcgccgcttcccccacacacgtgtggacagtacatttgaaactctttttggaaaaagggaaatagtgcttcccccacacacgtgtggacagtacactacgttccaagcgggtttgagggtaatcagtactgcctatgtgtccacccacacgtgtctcttgcaaaagagatgggattccagactctgactggagaaatccagtctccgttagtaatgtcatgatatccgtgtatgccgcctcagtacacgttagtatcgcttagtgtctcaaaaaggcctgaagtggagggcccggccgctaagtgtaaaaagcattattaacattgtcgagaggacgtcgaatgttttatctggtaacaggataaaactacgcacaaccctttttataaggaggatttagcttatgaaa

SEQ ID NO: 1391 - DNA, 1090 bp, unidentified
  misc_feature 1..1090: note = Oscillatoriales cyanobacterium
  source 1..1090: mol_type = other DNA
atattaactcaaggtaaagcagcagtttacagacgttatccgttcacaataatcctaaagtattcctgtgaaaaaccgcttaccaaatcgcacgaaattaagctcgatcccggctcgaaaaccacaggattagccgtattggaaggtgacaaagttatctgggcagccgagttagttcatcggggaaatcacatcactggtgacttagcatcccgagccgcaatccgtcgcaaccgcaggaatcgcaagactagataccgtcaacctaggtttctcaatcgtactcgcactcccggatggttgccaccgagtttagcttcaagagtatcgaatattgtgacttgggttcctgtaacagctatatctcaagaattagttaaattcgacacccaagcaatgcaatttcctgaaatatcaggaattgaatatactcaaggcgaactagcaggttatgaaatccgacaatatttgttagaaaaatggggcaggaaatgtgcttactgcggcatcaagaatacgcctttagaagtcgaacacattcacaaaggaggaagttcgcgggtgtcgaatctgactctggcctgtagaaactgcaatctggctaaaggtaatagagacatcacagattttctctcggaaaaatccgacattttatcaagggttttaaaatttgcttgcttgccattgaaggatgcagcagccgtgaattctactcgacgggcgctgtttgagaaactccaacacgggagggcaaactcagtacaatcgaactcgaatgggattgccaaaaactcactggctggatgctgcctgtgtaggtaaagtagaacaactggcggtactaagtaggcaaccactactgataactgccaaaggatggggcaaccgtcagatgtgtacgcccaataaatatgggtttcccagcaaacacagaaccaggtgcaagactttttttgggttccagactggagatatggtgaaagcaggtgatagcagttttgccgatcgggaaatttgcaggtactcacgttggtaggctggcagttagagagagtggagtctttgatttgaggacagcttggggaaaaat

SEQ ID NO: 1392 - DNA, 201 bp, unidentified
  misc_feature 1..201: note = Oscillatoriales cyanobacterium
  source 1..201: mol_type = other DNA
gctatccaccaatcaccggacataacaggacaaccagtacctaaaggtgaagagatagccagcctcagttacaactacgttttcagggtgatgacacctacaggtactttccagcctgtggctctgtcgtcaatcgttaaacatctgtatttggttaaagaagtgcggttgactcaacaagccgatattaactcaaggtaa

SEQ ID NO: 1393 - DNA, 1092 bp, unidentified
  misc_feature 1..1092: note = Ga0376086_0019836 JGI
  source 1..1092: mol_type = other DNA
atgattcgtgtcccagtagtaagtcaaaatggaaaacctttaatgcccaccaaaagctcaagagcaagaaagtgggtaaagcaaggaaaggctgctggtaaatggtcagatgtaggcatttactatgtccaacttatcaacccagcagacgaagaaacacaacctgttatagccggagtagatccaggtaaatcgtatgcaggaatcggtgtacaatctggcaaattcacccttgctagatttcatctaatcctaccttttgggcgagtaaaacaacgaatggatcaacgaaggatgcttcggcgttcaagacgctctagaaggattaaccgcaaggttgcctttaatctcagaaaccatcgacaggttcggttcaataaccgcaagcaatccaaggttccaccatcaattaaagcgtctcgccaactagaactaagagttgttaaggaactatccaagatatttccgttaacagctattggctacgagcgagtcagagctgacgtagatagaaccaaacgaaaaacagccaagtcgggtaaaagcttctctcctgtaatgaatggtcaactttgggctatttcccaaatggagactattgcacctgtctttgttcgtgaaggttggcaaaaaaatgggaatggaacgtctcaaatcaggcagcatttaggactgattaaggacaaagaaaacaaaggtgaagccaaacctgaaactcatgctgttgatgctgtggctctagcctgcggttactttgttcaatacagccgccaccttacctcaaatacccaaggatacctctggaaagatgaagtccaagtcacggattcagtattcagaattatcacccgttctggtgctgtcaaacgaggtaaagaatatggattctttcggcgtcaactgcatttcgaggttcccgataaatttggaacaagaaaacgtaaagggggcacggttacaccctttagatttcgagtgggtgacttggttaaagccaataaagcccaagaaacatttgttggttacattggtggatttacttctaccaataaatctcaaaatgtttctatctacgactacacctggaagcga

SEQ ID NO: 1394 - DNA, 233 bp, unidentified
  misc_feature 1..233: note = Ga0376086_0019836 JGI
  source 1..233: mol_type = other DNA
ttcactgaccccgccttacttcgttgaaggcggggattgagggagataacccctcatgaaacagtgaatagtggcatgagttagtacgagataaacacctccgaacacttccctaattcggaaaaactgtaagattctggaatctcagaaagtggggtaatgcccagcaacaatcgtgctaatgccgtaagggacttttaaacttcacactcctaggattatctccatgattc

SEQ ID NO: 1395 - DNA, 2241 bp, unidentified
  misc_feature 1..2241: note = Chloroflexi bacterium
  misc_feature 1034..1049: note = MISC_FEATURE - Any "N" represents any nucleotide
  source 1..2241: mol_type = other DNA
atgtcacaggtctttgtcctagacacgaccaagcgagcgctcaacccggtgcatccggggcgtgcccgcttgctcttgaagcagggccaagcggcggtgtatcgccgctatccgttcacgatcatcctgaagcgtgcggtcgagcaaccttctcttgaagcgcttcgagtcaaagtcgacccagggagccaaaccaccggactggcagtggtcaacgatgccagtggcgaagtcgtgtgggccgctgaactgaggcaccggggcaagcaaatcaagcgcgacctgcagagccgccgcgccctcagaaggagtcgcaggcaacgcaagaccaggtaccgccagccacgcttcgacaaccggcgcaaaaagcaaggcacgctgccgccatcgttagagagccgagtctgcaacgtggtcacctgggtgcggcgtctgcggcggctgtgtccgatcgcggccatcagtcaagaacttgtccggttcgatacgcaagcgctagagaacccagctatcgagggtgtcgaataccagcaaggccagctttcaggctatgaggtcagggagtatctcctgctcaagtggaaccatcggtgcgcctactgtgacgcaagctcagtgcccttggaactcgatcacgtgcatcctagagccaagcacggctccaaccgggtgagtaatctcgtggcggcctgcacgccttgtaatcggcgcaagggcaaccaggagattggcgtcttcctcgccgatgatcctgagcgactggcgcgcatcctggctcaggtcaagacgccgctcatggatgcggcggcggtcagtgcgacgcgctgggcattacacgaccgactcgtgcggctagggctgcccgtggaatgcggcagtggcgggaggacgaagtacaaccgcgtgaggcgagggctgcccaagtcccattggctcgatgcggcgtgcgtgggggtcagcacgccggagcatctggacgtgcatggcgtggtgcccctgcacatcagggcaacagggcatggctcgcggcagannnnnnnnnnnnnnnnggctccttcaatctcacgacagagcacaggaccgtccaagggatcagccatcgcttttgtacgctcatcgcgcgtagcgatgggtatagctaccaacaaggaaaggagcgggtgcttcctcccgtcgcctgaaggcagacaggtctccgcacccaggtttttgatgaaagccatacgcctggtcgaggttcatcgtcccctacagatgcaagaaatcccagtgcccacgatcggcgatgacgatgtgctggtgcgcgttcgggctgccggcatttgtcacaccgacgtccactatcgagcgggaaaatcgcctgtgcgaccattgcccaggacgctggggcacgaggtcgcgggtgtggttgaacaggtgggcaagcaggtaacatctgtcaaggtgggcgaccgcgtctgcgtgcattacgtcttgagctgcggcaactgcttctattgcagtgccggcaacgaacaattctgcgtgcggggctctatggtggggcgttatgccgatggcggctatgccgaatacgtcgccgtgccggaacgtaatgccctgcacctacccggcgaaatcccctttgaacatggcgctatcctgatgtgttcgtcgtccaccgctttccacgccctgcgcaagtcgagactcaagagtggcgagaccgttgccatctttggcgtgggcggactaggcatatcggcagttcagcttgcgtatgcctttggcgcgctcgatgtctacgctgtagatatcaacgcagacaagctagggctggccgaaaaatacggagcgattccggtgaatggcaggtcgaacgatgcggttgccgagatacgcaggctcaccaaaggcaaaggggtggacgttgcgctcgagatgatcggacttccacagacgatgatgcaagccgtgcaatcgttggcggtcatgggccgcgcggtcgtggcgggtatcagcgataagccgcttgagatcgatacctaccgggaactggttgccagggaagccgaagtcattggcacgagcgaccatctgcttcacgagttgccactcctgctcgaactgacccggcggggaaagctcgacctttcagaagccgttacaagaactgtgcccttggatgccggtgcgatcaaccaggtgctggataatctcgaacacttccgcggagatgttcgcaccgtgattgtgccatga

SEQ ID NO: 1396 - DNA, 303 bp, unidentified
  misc_feature 1..303: note = Chloroflexi bacterium
  source 1..303: mol_type = other DNA
gtcagagacccgtcccgtcgaacgggacgggcttgcgtggtgagacgcaggcccccctctgaccagtctcagccaccggtctcgcttcggcgaggctgacggggctccgttggaagcgaatgcataggaacgtccgggtgcttcaccagcccggaccgcttcggggcagcattaagcaagctgacgggtaaagccagtgtgctgtccaccggaaaccgcttcgcaacgttgacgaggtgagcattacctgggcaaccagaggcccatgcgggcacatcacataaggagtcctgtatgtcacag

SEQ ID NO: 1397 - DNA, 1038 bp, unidentified
  misc_feature 1..1038: note = Ga0370494_000001 JGI
  source 1..1038: mol_type = other DNA
ttgtttgtatttgtcgttaatcaattaaatcaaccaatcatgccaacaacacccagtcgcgccaaacgctggattcgtgacggcaaagccacaccattctggaagcgtggcttcttttgcattcgattaaatttcgatccatctgataaagagtcagaacttgtcgccgtaggtatcgatcctggcagcaagaaggaaggtatcaccgtcaaatctcaagcccatacctatctcaacctacaagcagatgccgtcacttgggtcaaagatgccgtctcaactcgcagagatatgcgcaaagcacgcagatttcgcaaaacaccttgcaggaaaaatcgcatgaatcgcaaacgtggtggtcttccgccttcgaccaaagcccgctggcaatggaaattgcggatcattcgtcatctggtaaaaatcatccccattgccgagtttgtggtggaagacatcaaagccaaaactaaaggacagcgcaaatgggatgtatctttctcacctttacaagtcggcaaacaatggttctatgaccaattagaacaaattggctttgttcatttgttggaaggctggcaaaccaagaacttgcgcgatagttcagggctatccaagactaaaaacaaaatggctgaggtatttgaggcgcattgtgttgatagttgggtgttggcgaattggttggtcggcggtcacatcaaaccggataatactgcgatgatgtatttgacgccattacgatttcatcggcgtcaattgcatgttttgcagccgatgagtggtggaattcgtaaatcctatggcagtacgcaaagtcatcaatttgaacgcggtagtttgattaagcatatcaaatttggaatttgttatattggtggttatatgaaggatagaattagtttacatcatgttaagatcgggacacgtttgacacaaaccgccaaaccagttgagtgcaagtttttaacttataacacatggcgaggcttcctccccgccctgaaggacggggtctccgcctcgcaaaaaagatga

SEQ ID NO: 1398 - DNA, 255 bp, unidentified
  misc_feature 1..255: note = Ga0370494_000001 JGI
  source 1..255: mol_type = other DNA
gtcaattaccccgccctgaagggcggggcttgttcgaataatgttcaccacatcttgaaggacaagattaaaagcaatcgactagccgaatatgtggtaagacccacatgacgaactgaattgactacccatggtagggtgaaatacgtgttagatgtcattctagtccgacacctctatgtcagtcagtggcgaagaatagtatatacctcgaaagaggacttatcgtaactttataaagaactcattttgttt

SEQ ID NO: 1399 - DNA, 444 bp, unidentified
  misc_feature 1..444: note = Gammaproteobacteria bacterium
  source 1..444: mol_type = other DNA
atggccgttttggtattggacaaaagaacaaagccgctgatgccctgtgcggagaaacgggcacggttgctattggagcggggccgggctgtggttcacaggatgcgtccgtttacgatccggctcaaagatcgtacgctggaggaatcgaacctgcaaccgctccagataaagatcgatcccggcagcaagaccaccggggtcacggtgatccgcgccgacgacgctgatccagagcagcagcaggtcgtgatgctgatcgacatcgaacatcgcggccaatcgatcgatgcggcctgtgtcggacccgtcacggcgatcacccactggaacgtgcccaccctgaccgttcgggccacggggcggggcagttatcagcgcacccggctcaaccggtttggcttcccgcgtggctacctgatgcggcaaaaacaagtgaagggc

SEQ ID NO: 1400 - DNA, 290 bp, unidentified
  misc_feature 1..290: note = Gammaproteobacteria bacterium
  source 1..290: mol_type = other DNA
gtcaactacccccgcctaaaggcgggagcttgtgaaagcaagctgggttgaccagggagagcggccaatacgccgctacgttggcaacaggtcgtcaagacccaccagcgaatgctgcctcagttcgctgctctggaagacggggatcatgcaggcgaaaggtaaagcgccgaaggttcccgtcgccgcgcaagcgggagccggttgccgaccttcccgaggggagccggggcgcaagccccgcgtcactggatctgtaagggtggtatgtttggagcattgagatggcc

SEQ ID NO: 1401 - DNA, 1335 bp, Trichococcus palustris
  source 1..1335: mol_type = other DNA
atggtattcgtgttaagcaaacaaaaacaaccaatggacaactgtacgcctgcaaaagcacggatacttcttcgtgacggctcggcaaccatacataagcagtacccctttaccatccggttgaaggacaatgcggcgcacaccgccgacaaaacgtatcagattaagttggacccgggcgccaaaataacaggcgttgccttagtagacagtgaagcccatgcggttttctttgccgaactggaacaccgcggagagcgcatcgttgctttattgcagacgcggtaccgtaaacccaagtggggaaatagctttaaaaagaaggattctaaattcaacgcggatacccgcagaccggagggatggctaccgccgtccgttgtgtcgattgagcaggatatcgtacatttcgtcaagaaaatgcgaaatctctgcatgattcagttggcggcggtggaatccgtcaaattcgacatgcagaagatggagaatgcttccattacggacgtggtctaccagcaaggcacgttgatgggttacgaaatccgccattacctgttggaaaagaaaggccatgcctgtcaatattgcggtggcctctcccaagacaaacatctggaagtggagcatatgcatcccaagtcccgcggcggttccgaccgcctgagcaacttgaatgtagcctgtcatacgtgcaatcaggataaggacaatcgcacgctggccgaatacgtggagcggctaaaaagctccaaaaccaaactcgaccagacgcgcattaaacggatagagcaaatcctaaggacaaacaaaacgttcatcggtctgcgctatgcggcttgggccaacagcatgcgacaccatttggtggctgacttagaaaagttgttgccacacataagccaaggcaccggcggacagacgcaatacaaccgcacgaccggcatggggttgccgaaagaacactattatgacgctttatgcgttggcagaatcccttccagcggctatcgtttggtaacagacaaggttttgtgcatcaagtcctatggacgaggcagccggttccgcggccggacgaacagttgcggcatcatcaccaagcaactgacacgccaaaagcagtttttcagctttcagacgggcgacgtcgtccgagcaaccgtgccaaacggcaagaagaaaggcattcacctcggacgagtggctgttcgcaaaagcggttatttcaacatccaaagcaccggattagttgtgcaaggggttagttacaaacattgccgcatcatccaaaggaatgacggatacggctatactttaaaacaaaggagttga

SEQ ID NO: 1402 - DNA, 312 bp, Trichococcus palustris
  source 1..312: mol_type = other DNA
gtcaactacccacgactgaagtcgtaggcttgtaaaagccttagttgagcagactcagtttccgctttgcgggagctacgttaaattagccatcatggtctcttgtgcttctccagcaggaacagtcatggtcagcagtctaaacagtccgaagggttagggccgtgctgctgatgtaaaaaacttttttaactttgtcgaggagagagaggccgaacggcctccgttacctgtctgccagcttcattcgacagatagagatagttttatttttgattgtaaaataaatgcaaaaaggagctgaacgaaatg

SEQ ID NO: 1403 - DNA, 855 bp, unidentified
  misc_feature 1..855: note = Ga0209167_10018693 JGI
  source 1..855: mol_type = other DNA
atgtcggtccttgttctggataggcacaagcggccactcatgccgtgttcggagaaacgagcacggctgctgctcgtccgtaaacgcgccgtggtccatcgctttgtcccttttaccatccggctgaaagagcgcacggtccaggagagcctggggcagccaatcgtgctcaagattgagccaggctcccgaaccaccgggatggcactggcccgcattgagcagactgaggagggcgaagtgcatcacgcgctgagtctttccgaactcacccaccgcggcgaagcagtccatcacgcccttttgcaacgagcaggctatcggcgacggaggagatccgccaacttgcgctacaggccagcccgcttcgccaatcgtaaacgccagagcggctggcttcccccttcccttttgagcagggtcgggaacgtgcttagctggacgcgacgctatcgccgatgggttcacttgatgcggatcgaggtggagcgcgtgaagttcgatctgacgctccttcaaaacccagaggtcgcgggcgtcgagtatcaaagaggcgaactgttcgggtgggagatcaggagctatctgctggagaaattccagcatcggtgcgtctactgcgggcgcgcaaacaccgcctttgaactggaccatatccggcctcgttcgcgcggcggatccaatcgtgtctcgaatcttgcgctcagttgccaccactgcaacaccatcaaaggggatcggacagccagcgaattcggccacccggaagtggaagcccgggccaggaagccacttcaagacgccgctgcggtcaatgcgactcgtttcgccctggtcgaggcgctgcgtctcctc

SEQ ID NO: 1404 - DNA, 325 bp, unidentified
  misc_feature 1..325: note = Ga0209167_10018693 JGI
  source 1..325: mol_type = other DNA
gtcaacgaccccacacgtaaacgtgggggcatgctcccgcagtttacgcggtcctcgttgtccagcctgagttcctgatcctagaggcagggagctgagggaactacgttggtcaggtcatggcacctctggatgccacctcagtccagagcactgccgctggtcgttaaaaggccttcggggtaggggtcggtgcggccagccgaacaagcctgtggccaacattggcgagaggggttgcccgggcaagccgacccaggcgcgtcactagcccagtaatggggcctcatcacgaggcaaaacggaaaggagtgcttccatgtcg

SEQ ID NO: 1405 - DNA, 1413 bp, unidentified
  misc_feature 1..1413: note = Ga0222637_1000159 JGI
  source 1..1413: mol_type = other DNA
atgcagaagttagaaaagagaaatacatatacacctacgggtgctccacaagcccgtagcaactgtgaccctgtaattaaacagagctgtggggtaggctcggtgttgcggggtttaaaaaccttttctaacggctccgatgtggaccaacttcagcatacaggagggcttaaagctaatgtgtatgtatatgtaataaaccatgatggtttaccgttgatgccatgcaagcctgccaaagctcgtcacttattgagagacgggaaagcattggtagtgaaaagaaaaccttttattatcatgttgttgtgggattgtgaagattatagacaaccggttgtattaggcttagaccctggttatcgatatactggattttctgcgaggtcaggtaagaaagaattgatttcggggacagttgtggggagaaccgatatccctaaaaagatggagcaaagacgaaattatcgtagaactcgaaggggtaaattatggtatcgggaaccgagatttgataacagaacaaaggaaaagggttggttggctccttcgattcggcacaaacttgattcgtttgtaagattggtttggggtatatcaaatattttaccgataacgaagataatagttgaggtagcaagtttcgatatacagaagataaagaatcctggtatcagtgtcaagggatatcagcgtggggtgttgaaaggattttggaatattcgagaatacgttttgcatagagacaatcatttatgccagaagtgtaagggaaagtccaaagataaaatactccaggtacatcatgtacacggtaaaaaggaaggtgctactgatagacctgaggagttgttaactgtttgcaaaacatgtcataaaaaccatcataaaggaatagatttgattcctgataaagagataaagagatttaaagctgaaacatttatgacgatggttagatggaagtttgtgaataaattgatagatatatttggtgacattgtttctcatacttatgggtatatcacgaagtccaatagaattggattgggattggaaaaaagtcatgtgagcgatgcactgtcaattagcatgggtagaagttataaaggaataccattaccgatattttataatggaccgcaattattcgacaggtgtaaatcttttgatgtgaaacaggtcaggagaaataatcgttcgatacagattaatcgaacgggattcaggccctcgatacggagagagcgatatccgttccagcctcatgacctggttagatataacggtaaggaacatcgagtgaaaggcagtcattgttatggagcgagattggtattagataataagaaatcagtggatgtgaaccgagtggagttgataacttatggtaaaggattatgttacgcttaa

SEQ ID NO: 1406 - DNA, 249 bp, unidentified
  misc_feature 1..249: note = Ga0222637_1000159 JGI
  source 1..249: mol_type = other DNA
gtcagatacccaccgctaaagcgggttggcttagcctactgtctgattaggaggcattaaacatgcagaagttagaaaagagaaatacatatacacctacgggtgctccacaagcccgtagcaactgtgaccctgtaattaaacagagctgtggggtaggctcggtgttgcggggtttaaaaaccttttctaacggctccgatgtggaccaacttcagcatacaggagggcttaaagctaatgtgtatg

SEQ ID NO: 1407 - DNA, 1035 bp, unidentified
  misc_feature 1..1035: note = Ga0070698_100047374 JGI
  source 1..1035: mol_type = other DNA
atgtcgcacatctttgtccctgtggtcgatcaggaacacaccccgctgatgcccaccaggccatcgcgggcacggcgctggatcaagagcggcaaggcgacccacttctggaaagggggggtgttctgcgtgcgcctcaacaggcagccatccgcgcgcgagcagcaacctatcgcggtgggcatcgatcctggttccaaacgcgagggcctcgtggtggccggagcttcccacacctatctgaatatccaggctgaggccagagacggcgtcaaggaagcggagagggacagcacgcgcatgcgccgcacccgtagagggcgcaagaccccttaccgcaagccgcgccagaaccgcaagcagagcaagaagaagctgccgccctccaccagggcacgttggcactggaaactgcgcctggcagcctggctctgccagctcttcccggtgagcgtcttcgtggtcgaggacatcaaagccatgacccgtggcaaaaagcgctgggatcagtccttttccccgttagaagtgggcaagcactggttctatgcggaactctcgaagttggctcctgtccagatcaaacagggctaccagaccagggaactgcgcgagcggttgggactgaagaagacgcacaagaagttggcagaggtgtgggaagcgcactgtgtcgatgcctggatactggcccacagcgcagtaggagggcggaagtccccagacaatcggcggttggtctgcgtcgcgccactgaattggcaccatcgccaactccatcgcttcgagccagagaagagaggcaagcgcaagccctacgggggcacacgctcgctggggatcaagcgtggcaccctggtcaagcacccgaagtggggcaaaacctatgtaggtggcacgatggacgggaaactgagcctgcacgacccacaaacgggcaagcggctcacccaatcggccaacgtcgccgattgtcggctgatcaagctgttacggtggaagacgcggctggtgcctctcttccccactaaataa

SEQ ID NO: 1408 - DNA, 243 bp, unidentified
  misc_feature 1..243: note = Ga0070698_100047374 JGI
  source 1..243: mol_type = other DNA
gtcaagcacccatccccttgaaggggatgggcttatgaagggatccggcttgtcaccggggaaccaacgagggcaactgcgagactagcttgcccaagctctcgcaagagggcgtttgaaggagactgaacgatctgggcgtgacagcccaccggatggtgtgagcgcctccctaacttgcacccgctccgatcgtcagtagcgaagggaccatagcacacccgaaaggggcttatcgcacat

SEQ ID NO: 1409 - DNA, 936 bp, unidentified
  misc_feature 1..936: note = Ga0070739_10029292 JGI
  source 1..936: mol_type = other DNA
gtgctcacgctcctacctgcacgtgcgcggccagcgtgctgctctagaacttctggcttaaacagaggtaaggggttaactcagtgctcagaagatacgccgcctgagaaccttgtcgaggccaactttaccctggcaacaggaggctctgaaaggagcaaaccaagcatgtcgaacgtctttgtcgttgatgccaataggacaccgctagacccggtgcatccaggctacgcacgcctcttgctcacccaaaggaaggcagcggtgctgcgccgcttcccgttcacacttattctcaaagccgtggtggagcaaccacaggcagagcggctgcgcgtcaaactcgatccaggaagcaagaccacggggctggcgatcgtgaacgagaccacgggggaagtcgtcttcgccgcagagctctgccatcggggagcggcgagcaccaagaccctcgctgagcggcgtagggtacggcacagtcgaaggagtcgccatacgcgctacagaaagccgcgcttcgccaatcgcaagcgaaggcccggctggctgcccccgtctctggagagtcgagtatgcaacgtggtgacctgggtcaagcgattgctgcgcatctgtcccatctccagcatttcccaggagctcgtccggttcgatatgcaggcgctccaacagccagaaatcagcggcattgagtaccaacaagggacgaaggtcaaggggtttcagaccggggatatggtgcgtgccgtggtgaggacggggaccaaagtcgggacctataccggccgggtggctatccgcactcgtggctccttcaatattgccacagcatgtgggacggtcaaagatatcagtcatcgtttttgcagggtcttgcatcactgtgatgggtatagctatcagaaaggagagcgggcaatgcctcccgccccctag

SEQ ID NO: 1410 - DNA, 270 bp, unidentified
  misc_feature 1..270: note = Ga0070739_10029292 JGI
  source 1..270: mol_type = other DNA
gtcaggaacccctcccgtagaacgggataggcttgtataatcaagtctggacctgaccagactcagcctggcaacgggctacgttctcagggagtgctcacgctcctacctgcacgtgcgcggccagcgtgctgctctagaacttctggcttaaacagaggtaaggggttaactcagtgctcagaagatacgccgcctgagaaccttgtcgaggccaactttaccctggcaacaggaggctctgaaaggagcaaaccaagcatgtcgaac

SEQ ID NO: 1411 - DNA, 909 bp, unidentified
  misc_feature 1..909: note = Sutterellaceae bacterium Marseille-P2968
  source 1..909: mol_type = other DNA
gtgcttcagacaacaaaccccttccaacattggcgaaggatcaccaccgaccgcaaggtcgagcagacggagcccgtgaggtatccgtcaatggagaacactttgaaagtttttgtgttgaatatgcgcgggcaaccgctcatgccgtgctccccgcccaaggcgcgtaagctgcttcgggccgggaaggccgtgcctgtgcgccgaacgcccttcgtgattcaactgacggtgccgatgggcgaaaccaagcagccgatcaccttgggtgtggatgcgggctacaagcacgtcggcatgagtgcaacgaccgccaaggaagagttgttggcttccgaggtcgaactgcggcaggacgtgacgggcttgctctcgaatcgcttggcacttcgccgcgcccgacgcaaccgcaagacccgctgccgtgcgccgcgttttgataatcgcgttcgatcaaagcacaagggttggcttgcgccgtccgtggagaaccgcattcaggcgcacatatcgcgcatcgtcgagggcttgccgaagacgcattgcgcggacgctttctgcattgctggcgtcctcgacgcaaaacgtcggggcgagtacctgtttcagaaacagacgcgccgccacaatcgccagatccacaagctgacgactctcaaaggccgtgtgcgcaagcgccatcaggctccgtacctagtgcacggcttcaggctctttgacaaggtgctgtgcaaaggggaagtcggctttatttttggcagacgctcctcgggtgcattcgatgtgcgccgtctggacagtacaaagatttctgccggtatttcctacaagaaactttcgcttcttgagaagcgaaagatgtttttaactgaactgagaaaggagggccgcgattcctcccgcgtctga

SEQ ID NO: 1412 - DNA, 301 bp, unidentified
  misc_feature 1..301: note = Sutterellaceae bacterium Marseille-P2968
  source 1..301: mol_type = other DNA
gtctactacccctgactgaagtcagaggcttggcaacaagtcttggttgactagcctcagtccgttttcggacggactccgttggttgggaatccgttccgtcgcaagacgggacgcaaacaggcaccgcgggatgtcgatcctagtcccgcgctctgcggtctgcggttaaaagctctgagaggtaggagcggtgcttcagacaacaaaccccttccaacattggcgaaggatcaccaccgaccgcaaggtcgagcagacggagcccgtgaggtatccgtcaatggagaacactttgaaa

SEQ ID NO: 1413 - DNA, 1233 bp, unidentified
  misc_feature 1..1233: note = Fermentation metagenome
  source 1..1233: mol_type = other DNA
atgcctacaactcaaagaaaagcaagactattgttaaaacaaggaaaagctaaaatacactcatatagtccttttaccatccaactattaacggcaacagggcaaacaaaacaagacataactctaggtatagatactggctctaaaactataggaatttcagcaagtaccaaaaaagtagaattatattctgctgaattggaattaagaactaatatagtcgaattattatcaactaaaaagcaatatcgaaggagtaggcgaaataggaagacaagatatagaaaagtaagattttttaatagggcaaaatcaaaacataaaggatggttaactccgtctattgaaaataaaattcagggccattttagaattgtagaaaaagttaatcaacttctaccaataaatgaaaccatagtagaggtagcaagctttgatatacaaaaaataaacaacccagctatacaaggaaaagaatatcaggaaggaaatcaattaggtttctggaatgttagagaatatgtgttatttagagatggttataaatgtcaaggtaagaaaaattgtaagggcaagatactaaacgtacatcacatagagtcaagaaaaacaggcggtaatgcacccaataatttgataactctttgtgaagattgccataaagattaccattcaggaaagctaaaaaaggcctttaagcgagggaaaagcttcaaggattcgacattcatggggataatgcgttggactttttacaatagattgaaagaaatatatcctaatgtaaaaatgacatatggatatataactaaaaatacaagaataataaataaactggaaaaggcacatagaatagatgcaagatgtataagcggaaatccattggctgaagaatcacatgtttggtatcgtattaaacaagttagaaagaagaaaagaagccttcatgaagcagttgctaggaaaggcaaaaaaatgccaaatagagaatctaaaagaaatagcaaaaacactaaggaaataatatacaaaggaaagaagtggtgcctgtatgatgaagttagactaaatggagatatcgggtttatatcaggatttagtggcaacatggtatatatacaagatatatatgggaaatatattcaaatatctccaaaatataagcaaataagcacaaacaacatagaattaataaaaagaaacaacaattatatatgtagaggtatcgcctaa

SEQ ID NO: 1414 - DNA, 246 bp, unidentified
  misc_feature 1..246: note = Fermentation metagenome
  source 1..246: mol_type = other DNA
gtcaactaaccccctcttgcagaagaggagacttataggagcaattttatgaagtcttagttgtctagcttaagtgttcgttcactacgttggattgcatgcagaaacctgcaaatgatactctagtttgtagctctttcgtggctctgtaaaagttctgagggcaaggaacggtcaaccacattgtgaaggctttccaacattggcgaagggtaaataactctgaaaggagaacgtaacttgaga

SEQ ID NO: 1415 - DNA, 1311 bp, unidentified
  misc_feature 1..1311: note = Ga0373625_0031164 JGI
  source 1..1311: mol_type = other DNA
atgttagtatacattctcgataaaaacaataaaccacttatgccttgctgtcctagaatagccaagttgttattgaaggcaggcaaagctgaggtggtacagagaacgccgtttactattaaactggtatttggtagtagcgggtataaacaggatataacgctaggcgttgatgctggctctaaaacgattggattatctgctattgatcaaactccgtttgaatacggatcaaaaacaacggacaagaaagaactattttcggcagaagtgcaactcagaactgatatagtagatttattatctactcggagacagaatcgtagaacaagacgaagccataagacaaggtatcgtaaggtaagatttctaaatcgcagaatagataaaggttggttagcacctagtataaggcacaaaatagatactcatttgactatggttgacaagatacataagatattaccgataacaaatatcatagttgaggtagcacagttcgatatacagaagataaagaatccggatatatcaggtatagaatatcaacaaggtgcgcaactagattttttcaatgtaagagagtacgtcttatatcgtgacgatcataagtgccaactatgcaatggcaaaagtaaagaccagatattaaacgttcatcatatagaaagcagaaagataggtggtaacgctccaaataatctgattactttgtgtgaaacgtgccataaaaagcatcacgatggtaatataatattaaaggtaaaaaggggtcagttgttcaaagacgcttcttttatgggtattatgcggtgggctttttacaatacactgaaagataaatatcctaatattagtttgacttatgggtatctaactaaaaacacaaggataactaacaagctaccgaagaatcatagaacagacgctttatgtatcacaggtaatccaacagttaaaggtcttgatacatggtatttctataaaaaggttagatgtcaaaatagacaaatacacaagacaactattaataaaggtgggtcaagaaagttaaaccaactgccttttatcgtatttgatatacgattatttgataaggtaaaatacaacaatcaagagtgttttgtttttggtaggcgtttaagtggtagttttgatatacggttacttgacggaacaacggtcaacgcaggtattagctataaaaaggtaaaagtgttagagcaacgtaaaacagttttaatcgaaaggagaaggcaattcctccccatgcctgaaggcagggggtatccttgccgaaacgagagatga

SEQ ID NO: 1416 - DNA, 248 bp, unidentified
  misc_feature 1..248: note = Ga0373625_0031164 JGI
  source 1..248: mol_type = other DNA
gtcaataaccccacgcataaatgcgggggcttgtaaaagcctttgttgactagcctaagtagtgatcgggtaacccgatcttctactacgttgttttggtcataacacctgcgaatattcagtctagtttgtagctctgttgtctaatattaaaaactctgagaggtaggggcggtgtgttaggcgtgacaagccattacaacattggcgaagactgctaaccctgaaagggggtatactttatgtta

SEQ ID NO: 1417 - DNA, 2019 bp, unidentified
  misc_feature 1..2019: note = Ga0114939_10003065 JGI
  source 1..2019: mol_type = other DNA
atgcagacgttagaagaaagaaatacatacacacagatagatgctccacaagtccgtcgcatctgtgatcaagtattaaacaaagatttaagtggccaggaaactggttgcggtcttagtgtacttgatttaaaaacttcttctaactctccgaagtggacctactcagaaatgagagaacagaactcgagagtctctgttaaatctaaaactatgagatcactttatcagctaaagctgaaaagtgttaggtctactaaagacaaaaaatcagacccaattcaagatttcaacaaatatacacaaggaatgaccttcgctcaaaaaattgaatatcttaacatgtctgatgcagaaagaggaaaaatcatagaaaaggtattaattcaagaaagaaaggagaaaaagcagaaagaaaaagagcaagcaaaagatagaaaaccaaaagaacctacaaagtataagaaacaaaaagtctatgtattcgtattgaatatgagaggacaacctctgatgcctacatcaccaagaaaggcaagacttctattgaaaaataagaaagctaaggtagtcaaaagatgtccatatacgatacagttaaattatccgaccggagaaaacaaacaacctattaagttaggaatcgattcaggatatgaacatgtaggtttatctgcgacaacagataaaaaagaattattttctgcagatgtcacattaaggactgatattcctgataagatgactgaaaaggctatgtatcgaaaaggaagaagaaataggaatactaggtatagagaaccgagatggttgaatagagggattccagaaggatggttggccccatcaatccaacataaattggacagtcatgttagattaatagataatataaaacagatattacctatcaataataatgatataactattgaagtggctacatttgatacacagaagatgaacaatccggagataagtggaatagaataccaacagggaactcttcagggatatgaagttagagaatatctattagaaaaatggggcagaaagtgtgcatactgtaaagtagagaatgtaccatttgagattgaacatatcattcccccttcgagatttggattatgtggaaataatagaatatccaatctaacgatagcttgtcatgattgtaatcaaaagaaatgtaatatgacagcagcagaatttggtcatccagaagtacaagtattggcacagaaatctctaaaagatgcggcattcatgaatattgttagatggagattagtcaattcaattcctgaatgtcatcatacatatggatatgttactaaatataatagaattagattaggacttgaaaagtctcatattaatgatgcattcgtaatcgccaatagaaacaatcaacttaatcaagaaagatgtaaatcgttcgaggtaaaacagattagacgcaacaatagatcattacaattaaatagaaaaggcttcgaaccatcaataagaaagaaaagatataaatattctcctggagatctagtcctattcaaagataataatacagaggctcacgtctgcgttgtaaaaggagttttcaattatggtgaatggataagattagtaaatcctattcctggagagaaagacattagcacaaatattaagaatgtaagaatagtcaaatatggaaaaggatttcggttctcatatccagatttttcgattaatcctgatattgttaatgttaagacaaaggaaatagaaaagactattattgaggacattgagaaacatgagacgacgatacaatatgacgtatttggagaagaagttataagacaatcaaagaaaatagaaaagaaacaagttatcaaaaatatcaaaactcaatatgatctgtttggaaagatcattaaacagaacaaatcaaagaaaataactaagaaaaagacggagactgttgaatcaattgattcgacaacacaggtaggaattgataatgcatggaattga

SEQ ID NO: 1418 - DNA, 281 bp, unidentified
  misc_feature 1..281: note = Ga0114939_10003065 JGI
  source 1..281: mol_type = other DNA
gtcaactaccgccccctgaagggggtggcttgcacagtaatgagcaaggttaaaaagagttgattaggaggcatttaaaatatgcagacgttagaagaaagaaatacatacacacagatagatgctccacaagtccgtcgcatctgtgatcaagtattaaacaaagatttaagtggccaggaaactggttgcggtcttagtgtacttgatttaaaaacttcttctaactctccgaagtggacctactcagaaatgagagaacagaactcgagagtctctgt

SEQ ID NO: 1419 - DNA, 1197 bp, unidentified
  misc_feature 1..1197: note = uncultured Erysipelotrichaceae bacterium
  source 1..1197: mol_type = other DNA
atgctgaaaaacggcaaggctaaaattatcggccatgacccgtttaccattcagcttcagtatgagtcggaaacaaacacgcaacctgtagaactcacagaagatacaggctatcagaacatcggactttcaattaagtccgaaaaacacgaatttgtaagccgggagtataaactgcttccggacgaaaagaacaggcatcaggcacagaagcgtattcgtaccgcaagacgtaaccggaagcgttaccgcaaacctatgtcaaagcgggcgaaatgttcccgcaggaaacagaaagactggctcgcgcctggtctcagaaacaaagcggatcgacacgttgatcttgtgaaacggtttatgaaactgttccccataacatccgttgtgctggaaatgggacagttcgataatgcagtgctttccgctgtaaatcagggattgccggtcccggaagggcttgcttatcaacatggacctaaatacggattcgacacgttgagagaagcggtatttgcccgcgatcattatcgctgcgtatgctgtggacgctctgcgatgaaagaccatgtgacgcttgtgattcatcacagaggttatcgcaaaggtgacagatcaaaccgtctttcaaaccttgcgactgtatgtgcagagcaccatacctcagcggaacacaagaaaggcggtaaactctggaatcttccaaaagacggagggtctctggcgccatccgcattcatgaatgcggtcaaatggtacatctgggactgtgtaagcaggcttgggatggagacaaagattacatatggcgctgttacaaaacgggaacgtctggacaggaacattatcaagtcacatgccaatgatgcgtattgtattggcgtatttcatccaaaacatcgtactcatacggagtattacagcaaacgcagaaggaatgatcgctgcttgcaaaagttctatgatgcgaagtataaagatgcacgtacgggtgcgatcaaaaaggcgtctgaacttggatgtaatcgcacgaagagaaatatgccgcgcaataacgaacgcaatctgcgtcccagtcgcggcgaaaaagtaaagtctggatacaacagtattcgtaaagaaaggcattcactgcaggcaggcgatattgttcagtacaagggacgcaggtatgaagtgaagacggtacgatttaaa

SEQ ID NO: 1420 - DNA, 286 bp, unidentified
  misc_feature 1..286: note = uncultured Erysipelotrichaceae bacterium
  source 1..286: mol_type = other DNA
acatctaccgtgataactggtcctttcataggaacctcccttcatgcataaatcctggcaagacttccccgcaccctgtatcagaccatttttctggattacatacggcatcgcgatgtgttgcctgtgcgtgctcatttcgataaaacggaatgcgatacaagagggaagcagaacgtttttaatgactgactcgcggcattgccgggtctaaaaagtaacacgtccttactttacccaggccagtctgactgtatgcctacagcagaaaggtcagaaactgctg

SEQ ID NO: 1421 - DNA, 1470 bp, unidentified
  misc_feature 1..1470: note = Ga0307376_10002158 JGI
  source 1..1470: mol_type = other DNA
atggtttatgtactcgacaagcgcaagaaacccttaatgccctgttccgagaagcgggcccggctgctcctggagcgcggtcgggcggtggtccacaagctggcgccgttcacgatccggctcagggaccgcctggttgaggacagtgttttgcaacccctcgatctgaagctggatcccgggtcgaaggtaaccgggggcgcggtggtccgggacggcaaggaaaccatcggctgctgtgagtgctctcaccggacggatatcaaggcgaacctagacgcccggcgcagccagcgtcgttcccgtcggaaccggaagactcggtatcggaagccgcggttcgataaccgacatccggagaagtgcgcggcctgcggcgggaacgccaaacacgggagccggtactgccggccctgcggcgagacccggaacttcgttaacaacggccatcgggaggcctggctgccgccgtcgctccgggcccgggtggaggaaactatgtcctgggtggcaaagatgcgcaagctcctgcccattaccggggtcgcgatggagctggtccggttcgacacccaatggatggagaacccgaagatctccggggtggagtatcagcagggtagtctggccggctacgaggtccgagagtatctcctgcagaagttcggccacctatgtgcttactgtcggggtgcctccggagacccggttctgaatgtagaacatgtggtcccaaggaacccggaccacgggccgaagggtacggaccggatcagcaacctggtcatcgcatgcaagacgtgcaacgaagccaagggcaacctgcagccggaagaatggctggaagagttgcgggcgtccgggaaggctctggaccggatccgggcggagaacctgccgaagacgctccaacagttgaagcagcctctgaaggatgcggcgatgatgaacgccaccaggtgggcgctgtatcaccgtcttaaagcgctcggccttcccctggaaacaggcagcggcggtctgacgaagttcaaccggacccaggttatgaagctacccaagacccacttctatgacgccgtttgcgtagggaaaagcctcccggaaacggtggatgtgccgttcgtcgaggtctacacggcaaccgggcggggtaaccggcagatggccgggatcgacaagtacggttttccgtaccggtggcgggagcggaagaaggcccaccttggcttccagaccggagacctggtggccgtcgacatcccgaagggcaaatacaaaggcaagtggcgcggccgggtggccgtcagaaagaccgggtactttgatatcaaggacggcactgggaaacgcaattgccaggggatccgggcggagtattgccggctattacaaaaggccaatggctggcagtacgaaaaggtttccttgcgggctgacgcccgtgccgcgcttcctccccatggataa

SEQ ID NO: 1422 - DNA, 400 bp, unidentified
  misc_feature 1..400: note = Ga0307376_10002158 JGI
  source 1..400: mol_type = other DNA
gtcatagaccccacggctaaagccggggcttgaggaggccctcctccgacagtctctggatttaggcgagaaagcccgcaagggcgctatgaccagcccaagtctgccgggatccccgagcgagcagactacgttattccggttagggcaccctgggatgcttctccagtcccaggagctgccgccggcggttaaacagcgagcaggggtggatgtaacaatgcacgcagcacattcgtggtaatccccgtactttatgcgagcagtgccgtcggcgcaaagccgggataacatcggcgaggagagatgacccacctgcggtgggtgccccggtgccgaacccggcgcggaaccggtcccgtaagggatctccgcaaggagagaaagggatgaaatcatg

SEQ ID NO: 1423 - DNA, 663 bp, unidentified
  misc_feature 1..663: note = Synechococcales cyanobacterium S06
  source 1..663: mol_type = other DNA
atgagcaattatgtttttgttttagatgccaacaaaacacctttacaacccactcaccctagtgtagctcgaaagctattaaaacaaaggaaagcatcggtttttagacgttatccatttacaattattctcaaggaagtaaaactcaatgttgttagtcaacctatagaattaaaactcgaccctggttcaaaaactacaggagttgctttagtttctaataatcaagtaatttggggagcagaattaaaacatcgtggtcatttcagttatcagttatcagttatcagttatcagttattaactattaattatctgttcactggtaactgttcactggtaactgaaagaggtgaattacaaggttatgaaattcgagaatatttattagaaaaatggggtagaaattgcgtttattgtggtaaaaaagatgttcctttagaaattgaacatattaaacccaaatcccttggaggtagtaatcgcatttctaatttaacccttgcttgtaaaggttgtaatcagaaaaaaggtagtcaattaattgatcactttttaagtgatcaaccacaattactacaacaaattaaaacacaagcaaaacaaccattaaaagacgctactgcggttaatacaactcgttggcaactgtttaattcttga

SEQ ID NO: 1424 - DNA, 240 bp, unidentified
  misc_feature 1..240: note = Synechococcales cyanobacterium S06
  source 1..240: mol_type = other DNA
taaaaaagtagggatcaccaagaaacggagtaattcgtaatcaattggtgtgaaccagaccccccaaaaaaggggagcagttatcgctcgtcaagacaccttaaagttttgccagctttaagctctgtcgtcactgattaaacagtccgcaaggatagtgtctttgacctaacaagcttcgataacatggttgaggccaactttaccctattttaggagttcttagaaatgagcaattat

SEQ ID NO: 1425 - DNA, 1470 bp, unidentified
  misc_feature 1..1470: note = Marine metagenome
  source 1..1470: mol_type = other DNA
gtgggggcgcaatgccgggtcgtaacattctcgaggagagcgcgggcctggcccgccgtcacagggccccgtaaggggaattatcaccgccctcccgagggcagaaaggaacccgccatgtgcgtcttcgtactggacaaacggaaaaatccgttaatgccatgttcgcagcggcgcgcccggctcctgctggagcggggtcgtgcggttgtgcaccgacaccatcccttcacgatccgtcttaaagatcgtgtcggcggaaaaacccagccggtcgaaatccgggttgatccaggctcaaaaggaaccgggctcgcagtcgttcggatcgcagaagatacctgcccggaaacgggagaggtcacgacaattgttcatgtgctcgagcgtatcgaactccggcaccgtggggctgcgatccgcaaagcgcttcttcagcggtcgcagcgtcgtcgtcgccgccggagcaaaaatcttcgctaccgcgcgccccggtttaacaaccgccgccgcccgaagggctggctccctccatcccttcagcatcgggtagacacaaccgcatcctgggtccggcgcctatcgcgtatggctccggtcctgcgtgcccgggtcgagacggtacggttcgacacccaggcacttgagacgccggagatctccgggatcgagtaccagcagggaactctcgccggctacgaggttcgggaatacctgctcgaaaaatggggccggtgctgcgcctactgtgacgcgaccggtgttccgcttcagatcgatcatatccatccacgcgcccgaggcggatcgaaccgggtctcgaacctgaccctcgcttgcggcccttgcaatcagacgaaaggatcgacccctgtcgaggcgttcctcgctcacgcgccaaagcggctggcacgtattctcgcgcaagcacggcggccactgcaggacgcagctgcggtgaacgcaacccgctttgccgtctgcagcgcgatctcagatcagacaggtctccctatcacccggttcagcgggggccagacgaaatggaaccggacgcgggcggggctggcaaagacgcatgccaatgacgcagtctgtgttggcccgacggatcaggtcgtaggggcggcagggccgaccctcctcgtcacctgcaccggccgcggaacccgtcagagaataatgccaaatgcgcatggtttcgcacgcggccatcgcccccgcaccaagtctgtacaggggttccggaccggagatctcgtgcgtgcagagatcccgtccggcgtgaatgccggggtctggactggccggatcgcggtacggagcactggttggttccttctgacagcgaccggacagggtgcggacggagagcgcggtcaccgcaagatcggcggcgttgcagcgcgttattgcgccctcgttgcatcaggggatgggtatggctacgcgcgggaggtgcaaccgtga

SEQ ID NO: 1426 - DNA, 309 bp, unidentified
  misc_feature 1..309: note = Marine metagenome
  source 1..309: mol_type = other DNA
gtcaacttctcccccttgaaagagggagcttatgccgaaaggaggaaagctcacggttgaccagagttagcggcgtctgacgccgctccgttacgatcaggttcaagaccgacgtcggggtgcttctccagctccgacctctcgaagcccccgcagcagacacgcgtagggagacgtccgaaacgggtgggggcgcaatgccgggtcgtaacattctcgaggagagcgcgggcctggcccgccgtcacagggccccgtaaggggaattatcaccgccctcccgagggcagaaaggaacccgccatgtgc

SEQ ID NO: 1427 - DNA, 777 bp, unidentified
  misc_feature 1..777: note = Uncultured Lachnospiraceae bacterium
  source 1..777: mol_type = other DNA
atgctgacatatgtattggctgcagacggctcaccgctgatgccgacatataacatcagtaaggtgagacgcatgctcaaagacggcagagccgtcattgcgggccacaagccgggatttaccatccggctgacctacgctctgccggatcagaaaacgccgcatacgcagaagattgaactctgcgaagataccggctatcagcatatcggagtttctgtaaagagcaaaaagcatgagtatgttcatctgcaagtcgatacgttggcagatgagaaaaaccatcacgatgcgcagagacggtaccgtcgcaacagacgaaaccgtctccggtatcgtgcaccaagatttgacaaccgcacacattccaagaagcccggatggattgccccatcacttcaacataaggcggatattcatgtgcgtcttgtatccacgttccaaaaggtactgccgatttgtgacgtataccttgaagtggggacattcgatacacaggtacttgaggcaaaggaaaagggtcttccaattccggaaggatcagactatcagcatggaacccgttacggtattgcaacactacgtgaagcggtcttttatcgtgatggatacaaatgccagtgctgcggcaagggaatcaaagatggccggattctgcgtgtacaccacatcggttactggaaaacaccgtctgaccacacagaccggatgggcaacctgatcacggtatgcacgaaatgccatacagcggcaaaccacaaaaaaggcgggaagtga

SEQ ID NO: 1428 - DNA, 405 bp, unidentified
  misc_feature 1..405: note = Uncultured Lachnospiraceae bacterium
  source 1..405: mol_type = other DNA
ggcaacacagccccattggcgtaacgtgaggactgcagcactatcgcaatcctgagtgagtagccagggcctgtccaaaaacctttggattgcggataggctacgttatcagcaaattcggcagatcagtttcggcttgtctgttcgtgaacacaggcaccagtgtatgctccacaagtccactgctctgcggtgtgccattaaacatctctgagggaaaggagaagtgtggtacacaacaaactgctgacacacattggcgaaggggacccgctgaacggggcttctaggagcctccagtaggcagaaccccatgtatgccttccttgaggagacacagcatgggaagccgtaaggcacgtaacaatggttgaattttgaaaggaggcatcagttatgctgaca

SEQ ID NO: 1429 - DNA, 1227 bp, unidentified
  misc_feature 1..1227: note = Ga0233412_10000063 JGI
  source 1..1227: mol_type = other DNA
atgttagtatacgttaaaaactgtaaagatgaacctttgatgccttgttctccgcgtattgctagaagaatgttaaaaagtggtaaagctaaaattgttagtcgtactccttttactattaaattgttatttggtagtagttcttataaacaggaggttgtagctggtatggatactggttctaaatttattgggtgtgcagtagtttcaaatgaaaaggttttgtatcagtcagaggtacaactaagacaagacgtttctaaaaagatgaaacaaagatttatgtatcgcaggactagaagatgcagaaagcttagatatcgtaaaatgagatggcagaacagagcttctttaagaagaaaagggagactagcaccaagcattagaagtaaaattaattctcatcttagagaaaagaagtttgttgaatctattttacctataacaaaatggatagtagaattagcttcttttgatattcataaaataactgatcctaacgtaaaaggaactgattatcagttaggcagtcagaaggatttttacaatgtaaaagcttatgttttatatagagataattatatttgtcaacattgtaaaggaaaatcaaaagataaaaagcttactgttcatcatgttatatttaggagtcgaggcggcacagattctcctaataatttaataactttgtgtgaaacgtgtcatgaacaattacatgatggaaaatttaaattagaaggaaaacgttctaaaaccaaacatgctacagaaataggtatagttaagtcacaattaaaaaagaagtggatagcctttgaagagactttcggtttcgaaactaaatatactagagaaaaaatgttaggtttacctaaaagtcatgctaatgatgcagtggctatttgttgtaaaaatagtagaattgaattgaataatgataatgtttatttgaaaagacatgtttcgtcaggcgattatcaacaaaccaaaggtaaacgcagcgaaactaggattcctacaggcaagttatttggattaagaaaatttgatcgaatcaaaacgactaaaggcgttggtttcgtaaaaggaaaaagatcttctggacactttgccttgtttactctagataaaaaaaagttcattccatcagttagtgtaaaaacaaattgtagtaaaatttcagctagaaaaactactttgatggaaagaattgcaaataatgaatag

SEQ ID NO: 1430 - DNA, 294 bp, unidentified
  misc_feature 1..294: note = Ga0233412_10000063 JGI
  source 1..294: mol_type = other DNA
gttagtcgcattccttcttaattgaagagtctcgtaagagattaggctaaccagaccattaacaggagaaaaataaaagttgttaataaacgataagaaagaaattagaaacgttggaatgccgtcccagttccaacctctttggttgcagattaaacagttctgtgaggcaggaacagtgtttgtaacgttaaaccttttattatccggtcgagggaaagtcgaattctataattactccaaaattatagatacgcactactctgtttacggtcagaggtatattttatgtta

SEQ ID NO: 1431 - DNA, 1323 bp, unidentified
  misc_feature 1..1323: note = Gammaproteobacteria bacterium
  source 1..1323: mol_type = other DNA
atgcaacgagttttagttttgagtagtaagaagcaaccgcttatgccttgccatccggcaagggcgcgggagctactcaaagaaaagaaagcggctgtctttcgccggttcccgttcacgataatcctgaaagagcgggaaggtggggaactacaaaggaccgagttgaagttagaccccgggagcaagacaacggggatggctctgactgttcacggggataacggcatccgccttgtttgggctggcaacctatctcatcgcggccatgcgattagcgaaagcttgtcatcgagagcagcccagcgcagagcgaggcgcaaccgaaagactcgctatcgcccggcgcgattcgacaatagagcgaagcccaaaggctggcttgctcccagcttgatgagccgggttcacaactgcgagacatgggcttatcggctaatccgactctgcccggtaactgacattgccattgagaccgttcgctttgatatgcaactcatggctaacccgaagattgccggtgtcgagtatcagcaaggcagcttgcatggctatgaactccgtgagtatttgttgcagcgggacgggcacacttgccgatattgcggcggcgcttccggtgaccctgttctgaacatcgaccatgtgcaacccagagctaaaggcggcagcgatagcgctaagaacctagtcacctcatgccgaacctgcaatgaggataaaggggccacactgctatccgattggttgaaagctgtcagcaagtcacgctccaaactcaacaaggcaagggcaaccagaataccaaaggtcatagctggccggagcccttcaatgcgagatgcggcggcagttaatgctacccggtatcggattggcgatgtgatgaaggcgaccggcctacccactactttctggagtggcggacgaaccaagttcaatcggtcgcagcaaggttatcaaaaagaccactggttggatgctgcttgcgtgggtgagactggccagcaagtgtttatcccttctagtgctgtgccgctggcaattaaagcaaccggtcacggctcccggcaaatgacgctgcctgataagtacggtttcccaagaaccaaagcgaaaggttgcagtcgggttaaagggttcaggactggggatgtagttaaagctgtcgtgcctgttggtaagtatgcaggcaaatacctaggccgaatctccgtgagaaaaacaggtacgtttagcctgcaagattcagcagggaaaagagatgtgagtcataggtattgcacgaaggttcactcgtgcgatgggtattcgtatgcctga

SEQ ID NO: 1432 - DNA, 255 bp, unidentified
  misc_feature 1..255: note = Gammaproteobacteria bacterium
  source 1..255: mol_type = other DNA
gtcaactacccggccctaaaggaccgggcttgtaaaagcccatgttgaccagactaagccttaactggctacgttaggaaagaatccataggcaccgtgggatgaccttcgcaagtcccacgctctgcgggtaacagctaaacaggtgtaagaggttaagccagtgctgttgccatcaaacctttccataacattgtcgatgcgatttttaccggggaaacccgagactgcattagaggtaacacgatgcaacga

SEQ ID NO: 1433 - DNA, 2262 bp, unidentified
  misc_feature 1..2262: note = Sutterellaceae bacterium Marseille-P2968
  misc_feature 1310: note = MISC_FEATURE - Any "n" represents any nucleotide
  source 1..2262: mol_type = other DNA
gtgcttcagacaacaaaccccttccaacattggcgaaggatcaccaccgaccgcaaggtcgagcagacggagcccgcgaggtatccgtcaatggagaacactttgaaagtttttgtgttgaatatgcgcgggcaaccgctcatgccgtgctccccgcccaaggcgcgtaagctccttcgggccgggaaggccgtgcctgtgcgccgaacgccctttgtgattcaactgacggtgccgacgggcgaaaccaagcagccgatcaccttgggtgtggatgcgggctacaagcacgtcggcctgagcgcaacgaccgccaaggaagagttgttggcttccgaggtcgaactgcggcaggacgtgacgggcttgctctcggatcgcttggcacttcgccgcgcccgacgcaatcgcaagacccgctaccgcgcaccacgcttcgacaaccgcgttcgatcaaagcacaagggctggcttgcgccgtccgtggagaaccgcattcaggcgcacatatcgcgcattgaagcggtttgccgagtgcttccgatcaccaaaatcgtgattgaaaccgcatccttcgacattcagaagatcaagaatcccgaagtcgaaggcacggactatcagcagggcgagcagcttggcttttggaacgtgcgcgaatatgtgctgttccgcgacggtcacgtttgccaagcctgcaaaggcagatcgaaagatctgattctcaacgtgcatcacattgagagtcggaaaacgggaggcgacgcgccgggcaacctcatcacgctgtgcgaggcgtgccacaaggcgtatcacgcaggcaagttgaagcagttcagtccccggcgcggcgcttctttcagggcagagactttcatgggcatcatgcgttggacggtgctcaaccgcctgcgcgagcgccatcccgaattgcctgtcacgaatacctacgggtatctgaccaaacacaagcgcattgtcgagggcttgccgaagacgcattgcgcggacgctttctgcattgctggcgtcctcgacgcaaaacgtcggggcgaatacctgtttcagaaacagacgcgccgccacaatcgccagatccacaagctgacgattctcaaaggcggtgtgcgcaagcgccatcaggctccgtacctagtgcacggcttcaggctctttgacaaggtgctgtgcaaaggggaagtcggctttatttttggcagacgctcctcgggtgcattcgatgtgcgccgtctggacggtacaaagatttctgccggtatttcctacaagaaactttcgcttcttgaganccgctaccgcgcaccacgcttcgacaaccgcgttcgatcaaagcacaagggctggcttgcgccgtccgtggagaaccgcattcaggcgcacatatcgcgcattgaagcggtttgccgagtgcttccgatcaccaaaatcgtgattgaaaccgcatccttcgacattcagaagatcaagaatcccgaagtcgaaggcacggactatcagcagggcgagcagcttggcttttggaacgtgcgcgaatatgtgctgttccgcgacggtcacgtttgccaagcctgcaaaggcagatcgaaagatctgattctcaacgtgcatcacattgagagtcggaaaacgggaggcgacgcgccgggcaacctcatcacgctgtgcgaggcgtgccacaaggcgtatcacgcaggcaagttgaagcagttcagtccccggcgcggcgcttctttcagggcagagactttcatgggcatcatgcgttggacggtgctcaaccgcctgcgcgagcgccatcccgaattgcctgtcacgaatacctacgggtatctgaccaaacacaagcgcatcgtcgcgggcttgccgaagacgcattgcgcggacgctttctgcattgctggcgtcctcgacgcaaaacgtcggggcgaatacctgtttcagaaacagacgcgccgccacaatcgccagatccacaagctgacgattctcaaaggcggtgtgcgcaagcgccatcaggctccgtacctagtgcacggcttcaggctctttgacaaggtgctgtgcaaaggggaagtcggctttatttttggcagacgctcctcgggtgcattcgatgtgcgccgtctggacggtacaaagatttctgccggtatttcctacaagaaactttcgcttcttgagaagcgaaagatgtttttaactgaactgagaaaggagggccgcgattcctcccgcgtctga

SEQ ID NO: 1434 - DNA, 301 bp, unidentified
  misc_feature 1..301: note = Sutterellaceae bacterium Marseille-P2968
  source 1..301: mol_type = other DNA
gtcaactacccctgactgaagtcagaggcttggcaacaagtcttggttgactagcctcagtccgttttcggacggactccgttggttgggaatccgttccgtcgcaagacgggacgcaaacaggcaccgcgggatgtcgatcctagtcccgcgctctgcggtctgcggttaaaagctctgagaggtaggagcagtgcttcagacaacaaaccccttccaacattggcgaaggatcaccaccgaccgcaaggtcgagcagacggagcccgcgaggtatccgtcaatggagaacactttgaaa

SEQ ID NO: 1435 - DNA, 1290 bp, unidentified
  misc_feature 1..1290: note = Candidatus Acidulodesulfobacterium acidiphilum
  source 1..1290: mol_type = other DNA
atggtaaaagtaattagcaagaacggaaaacagcttatgccgaccaaaagatacggcaaggtaaggcgtatgctaaaagaaggcaaggcggtaataatatcgaaaaagccgtttactatccggttattgttcgatactcccgaaattgtccagcacgcaaccgtaggcgttgaccccggcgatactaccggatacgcagtagcgttggataacggtaaaatagtagaaaaaggcgaaatcaggttaagaaccgacgttaaatctttacttgcggcaagaaaagtattgagacgtagtagaagaaacagaaatacccgttaccgcaaggcaagatttttaaaccgctgcaataaaaaagcaggacggttaccgtcgagcatagaacaaaaagcaaggcatatagttaataaaattaacgaactcgtaagctattatcccgattatacgttaaaaatagaaattaataaattcgatatgcaaaaacttattaatcccgacatatccggcgttgaatatcagcagggctctttatacggctatgaaaacgccaagcagtttttactcgtaagagaaagcggcaaatgccagctttgtcataaaggttacaaagaaaatgacggctggcatattcaccatataataccgagagcggacggcgggactaataaacccgataatcttgcgttattacataaaagctgtcatataaaaggacataagacaggagctttatcaaaactcaaaaaagcaaagcagtttatatccgccgcaatgtataacgccgtaagatataaacttatggacgaatttaaggctatttatggagataaggttgcatttacctacggctatcttacttctataaacaggcgcagtcttgaattagaaaaagagcattataacgacgccatagctattacaggcataacggaagtaaaagataacgttattcttataactgttattaagcaggcaagaaaaaagaaacgttccctgcacgaagctacggcgaggaaaggcagaaaagagcctaacgtccattcggtcaggaacgctaaaaataccaaagaaattaccgtaaacggcaggaagtttgcattatgggataaagttaaggtatgcggtaaaaagggatatatttcgggatttaccggaaacgcctgctacgttcaggatattaacggtgactatataaaagcggacggcaaatcctataagcaggttgccgcagataaaatagagcatataaggaggaataacaattggataacggaaagaatactggcgtaa

SEQ ID NO: 1436 - DNA, 269 bp, unidentified
  misc_feature 1..269: note = Candidatus Acidulodesulfobacterium acidiphilum
  source 1..269: mol_type = other DNA
gtcaatcaccccgccctttcggacggggtttgaaccgtaaggttcaagagtaattggttgtctaggctaagtatcggagacataaccgatactacgttatttgcgtgatgataccctgacgtaatgcccaagcgtcaagctctatcgaggctctgtaaacaaagaggaaactcttagtcaacctcatttaacaaagcgcttataacattgccgatgggcaataacttccaaaaggaagacttacagtaactttttagaggtaagaaatg

SEQ ID NO: 1437 - DNA, 1338 bp, unidentified
  misc_feature 1..1338: note = Ga0209647_1000722 JGI
  source 1..1338: mol_type = other DNA
ttgagtaaagtttttgtcttagacacgaacaagcaacaactcaatccggtgcatcctgggagggcgagattactgctcactcagggcaaagctgccatattcaaacgctatcctttcacaatcattctcaaggttgccattgagcaaccagaggtacaccctctcagaatcaagatcgatccagggagcaaaaccactggcatagccatcgtaaacgacgcgacaggcgaagtcgttttcgcggcggaacttgcgcatcgagggcaagcgatcaagaaagcgttagacgagagacgtgctgtgagacggtcacgacgccagagaaaaacccgctatcgcaaggcgcgatggcagaacaggcgacggggaaagggttggcttgcgccctctttggagagcagaatagcccatgttctgacgtgggttcaacgcttacgccgtcttgctttcatcgtggcaatcagtcaagaactggtcaagtttgacttgcaagcgatggataatcctgaaatcagcggcgtcaagtatcagcaaggaacgctggctggctatgaggtcagggagtatctgcttgagaagtggaagcgcatgtgcgcctactgtggcaaaaagaatattcccttgcagatagagcacatccagccgcgcgcgaaagacgggacccatcgggtaagcaacctctgtttagcctgtgagcaatgcaatctcgccaaagggatacaggatatcagggtgtttctcgcgaagaagccagaggacttgaagcgcattcttgctcaggccaaagcaccgctcaaggatgcagcggcggtgaataccacgcgatgggcgctctccgagcgattgaaggagggcgggctgccagtcgaatatggaagcggtggcttgaccaaattcaatcggagcacgcgcaacctcccgaagatgcactggctcgatgcggccaatgtcgggaagagcacgccagagaagctccagattcgggggatcatgcccttgcgcatcacggccaatggccacggctgccgccagatgtgcttgatggatgagacaggctttccccgcaccaaacccaaacagaagcattttacgcatgggtttcgcactggcgatatcgtgcgcgccatcattcctgctcagctcaaccatgcaggggtgcatgtgggaagactgtccgccaaggccaaaggcgggtttaccatcgccaccgccaaaggcaaaattaccggtgtgggaaagaagtattgccgcgtgctccaacgagctgacggttacgggtacgcgcagcaatatgcgcctacgggcgtctttctttcctccctcagcctgaaggcatga

SEQ ID NO: 1438 - DNA, 271 bp, unidentified
  misc_feature 1..271: note = Ga0209647_1000722 JGI
  source 1..271: mol_type = other DNA
gtcaggaacccaatcccccttttaggggatgggcttgtgtgaacaggctcacctgaccagactcagctcgcaagagctacgttacgggagaaattaggtacgttgcggtgcgaggccagccgcagcctctacggcaaacaattaaacagaggtacaagggttaactcagtgttgtttgcactaaaccttccagtaaccttgtcgaggccaccattacctacgcaagtagaggcttggcaacaagcaaaaaggaaccaagcatttgagtaaa

SEQ ID NO: 1439 - DNA, 813 bp, Chroococcidiopsis thermalis
  source 1..813: mol_type = other DNA
atgcaaaattacgtttttgttgttgacacaaataaacagcctctcaacccaatttctccagcaagagctagagaattgttgactaaacaaaaagccgctgtatttagaatgtatccctttacaattattctgaaacacgctgttttaaaccctgcaccaaagccattaactattaagctagacccaggcagcaaagttacgggactggcgattttagaaggagaaaatgttatttgggttgccgaacttgagcatagaggaggaataatcaaaaacgctctctctgctaggcgttctttacgccgcagtcgcaggaatcgtaaaactcgctatcgtccagcacgttttgataacagaaaacgtaaagaaggatggctacctccatcattgatgcatcgggttttgactactgagacttgggttaaacggctttgccgctacgcaccaattgctcaagttgtcatggagttggttaaatttgacactcaaaaaatgcaaaatcccgaaatagatggtgttgaataccagcaaggggaattagtagggtatgaggtacgcgaatacttgctcgaaaaatggggacgcaaatgcgcttattgcgatacatcaggcgtgccactccaaattgagcatattcacccacgcgccaaaggcggcagtaatcgagtttcaaacttatgtttgagttgccaacggtgcaatatcaaaaaaggagtcaaattgattgaagaatttctgaaaaaggataactctagactagaaaaaatcaagcaactagccaggaagcctctaaaagatgcctttctctgttag

SEQ ID NO: 1440 - DNA, 243 bp, Chroococcidiopsis thermalis
  source 1..243: mol_type = other DNA
gtcagcaacccccgacttgaagtcgggggcttcaggcagataacctgaagccctagttgaccagactatcgtttgaggcaagtgttaaagacctactttaggatgcttgctagtcctgaaccctagaaccagacgattaaacagacttattgggttaagtcagtgtcgtttggatagttaccgacctcaaacaatgtcgaagcaaacattacctgtaaaaaggatgcagcaatgcaaaattac

SEQ ID NO: 1441 - DNA, 1287 bp, unidentified
  misc_feature 1..1287: note = Ga0310694_10002417 JGI
  source 1..1287: mol_type = other DNA
atggtctatgtactgaaccgatacggcaaacctctgatgcctaccacccggtacggcagggtccgccgtctgctcaggaaagggatcgcggtcgttgtcgattaccgtccatttataatccagctcacttatgacacgcctaacggcgtgcaggaggtcagtctaggcgtagacgcgggtacgaagcacgtaggcttctccgcgacgacaaagaagaaggtacttttcgaagcagaattattgctgaggtcggatatcgtggagaaactctccacacgaagggagttccgtcgggccagaaggaacaggaaaactcgctaccgtaagtcaagattcctgaacaggacccgctccaagaagccgggatggcttgcaccttcggtaaggcagaaggtggattcccatatccactggatttcaaagatatgcaagttcttgcctatcaagaagataacggtggaggccacgcaatttgatacccagctgttgaaggctcaggaacagggtcttccgttgccgcaggacaccgactaccagaagggtgagcagctcggattctggaatgtgcgtgagtacgttttattccgggatggtcacaaatgccagtgctgcaaggggaagtccaaggacagtaagctgcatgtccatcatatcgaaagtagaaagacaggcggcgatgcaccgaacaacctcatcaccctgtgctcggaatgtcatgccaagtaccatcggggagaaattgatctgtcgaagattgcaaggcgtggcacctcgctacgtgatgccacacagatgggtatcatgcggacggctctatttaaccggctgaagaaagaaatcggtgagggaattacttgcttcaagacttacggctacatcaccaagagtactcgtagtaaatatggactgccgaaggaacatgtcatagatgcgcggtgcatcagcggcaatccgtgtgcatgttcagatggcaagtacttgataatccgcaagttgcgtgcgaacaacaggcaactgcacagggcaactataaataagggtggaaagcggaggaacaaccaggcaccccgtgaagtaaggggtttccggctgatggattccgtcgagtatgcatacagggattgcttcctgagcgcacgtagagtgtcgggctccttttccgttgcggatatcaccggaaaagttctatcagattcggccagttacaagaaactgaccttaaaacatcacaacaacacttatattatggaggaagcagcgctcctctcacccactaaagatgggtga

SEQ ID NO: 1442 - DNA, 297 bp, unidentified
  misc_feature 1..297: note = Ga0310694_10002417 JGI
  source 1..297: mol_type = other DNA
atcaactacccacgggctaaatacccgtgagtttggggtgacccggactcatagttgattagactcagtgaagcggagaaatccgctgaactacgttaggaaggtcatggcaccccgggatgtacggtcaagtcccccgctctgccgcttgtggttaaacagtcctgatgggtagggacagtgctgcaggcacgacaagccttcctaacattgtcgatgaccacccacagggagcaatccctgcattacctattaagttaggtcaaaaaacaacaaataacggataacgagcacatg

SEQ ID NO: 1443 - DNA, 1290 bp, unidentified
  misc_feature 1..1290: note = Ga0070697_100040654 JGI
  source 1..1290: mol_type = other DNA
atgaaggtgtttgtgctatcaaaagaaggaaagtgcttgatgcccacgacgccacggcgtgcaagggtgtggttgaaggcaaaacgtgcccgtgtcgtgcgccacgaccctttcaccattcgattgcgctttgccacccagcaacatgtgcaaccggccaaggtgggcgttgataccggctccaaagacgtgggcatcgctgcactcgccaatggcaaggtggtcttccaggccgaggtccatctgcgtgatgacatcactaagaaaatgacccaacgacggacgtttcggcgcaatcggcgtgcgcgcaagacgcgctatcgtgaagcgcgctatgacaatcgacgccgacctgatgggtggttgcccccttcgctgcactccaaagcagaggcgaccgtcaaggccgtgcgcttcattacttcgtttttgtcggttggtcgggtcacagtcgaggttggccgttttgacacccaaaagaggcaaaacccagacatcgctcacctggaataccaacaaggcgaactgcaaggatacttcctgcgtgagtatgtcttagacaagtggcagaggaaatgcgcgtactgtgatgctcacggggtccccttggaaatcgagcatattgtccctacgtcaaggggaggaagcaatcgggccagcaatctcaccctggcctgccatgcctgcaaccggcgcaaagggcagcacacagcagcggagtttggcttcccagaggtgcaggcaaaggctcgtgtgccgttgaaggatgcagcgcatgtgtcttcactgaaaagcagggtggtccatgacctgcaagcagtcttcggagagagccaggtgagcatcacatatggttaccagaccaaatataaacgcatccaggtgcttgacctgcccaagtcccacacgaacgacgctatggcgattgcctgcgagatcggcgaggtggtcaagccattggagatggtccatcagatccgatgtctagcacggggccactatcagcgtttcaatggcctgcacagtgagcacaagtgttgggccccgcgcaaagtgcgcgggttcaagctctacgaactggtcaaggccaaaggaggggtgggctacatcgcgggacggcgggagaagggagcgttcgtcatcaaagacgtcatcagtgggaagaacctgttggaggtcacgccgcgcaaattggtacgagtagcgcgtcccacccaggggtggatgattacgcgacagccgatgctggagagcatcagaaaggaaggcggcgcttcctcccccaattga

SEQ ID NO: 1444 - DNA, 298 bp, unidentified
  misc_feature 1..298: note = Ga0070697_100040654 JGI
  source 1..298: mol_type = other DNA
gtcaatgacctccccactctgtggggaggctcgtgaggggttcgccccttgcaagccggattgaccagacgacacctccgagccagtcgcgccgagaaaacgagcgtcgtggctggcgctgaagaggtgagcgatagtaccaagcgttgcagttcgcacccagggatgctgccccagttcctggctctgcaacttctgacttaaagaactgcggtccaggaacggtggtcagaggaaagtaccgggtgctatcaccgtcgaggggatcgtttttactccgaaaggagccttacctgat

SEQ ID NO: 1445 - DNA, 1254 bp, unidentified
  misc_feature 1..1254: note = Bioreactor metagenome
  source 1..1254: mol_type = other DNA
gtggtcagtagcgaagtgggacgaactataagacggagggtaacctctactgtagtaactagtaatcaaggagcatcgatcatgtcagaacctcaacctaagtctaatccaactggacagacttacaaagtaccagctcaacactgtaaacatccaccagctaactacgtaccagttgtcagtagtacaggtaaacctctgatgccttgtcatcctcaacgtgcaagagaactgatggaaaaaggtaaagccaaaccaagatggcacttcggtagcatcttctacatccagcttactgaacgtgaagatggtgtaactgatcctaacgtagccttaggagtagatccaggatctaagttcgaaggctactctatccgatctactaaacgtaccttacttaaccttcagtcagttgcacctactcatgtaaaagatcgagtagctgatagacggaatatgcgacgatctagacgcttccgtaatactccatgtcgtaagaacagaagtagtcgtagtaacttaactagtcaaggtaggatacctccatcaactagagctagatgtgatgctaagatcaacatagttaagcatctacttaagttataccctatcgttacgatcgtaatcgaagacataaaagcttatactaagaagaacaaaagtgccgatggcggtcctagtaacaaactgtggaacaagaacttctcgcccatccagatcgggaagaagtacttatatactaaattacaagagttagtatctaagctcatacttgttgagggcttcgtaacttatcaactccgtagtctactacaaaccgtcaagaaagctaagcttaagggagctaagatcttcgaagctcactgtctagatgcgtgggtactagctggtatcggagtaggtcatgaagctattgaagaacctgataatatgagcatgtggtgtgtagaaccgatactactgcatcgtagacagttacatgttaccaagcccgctaaggatgggttcagaagatcttatggtggtactagaagcatgggctggaagcgtggtagtctagtacatcatcctaagtacggtcacacttacgtaggtggtactagtaataatcggatcagcttacatagtatccgagatggacaacgactagctcagaacgtctatccagaagagtgtaagttccgtaccttcaacgccatgaagatcaagttcatccagcgagttgagatggtctgcaagatctgtaaaactact

SEQ ID NO: 1446 - DNA, 224 bp, unidentified
  misc_feature 1..224: note = Bioreactor metagenome
  source 1..224: mol_type = other DNA
gtcaagtacccctccctaaaggaaggggcttgtagtctaggctacaaggtacctaggtaactctaggtagaaaagactagcttaaccaagtaacctagcctagtaatagtgttctaggggacgactgaaggtaactgaaccacataacaactgatgtacgggtgctccactagctcgtaacctctcaggtggtcagtagcgaagtgggacgaactataagacgg

SEQ ID NO: 1447 - DNA, 1374 bp, unidentified
  misc_feature 1..1374: note = Ga0209511_1005681 JGI
  source 1..1374: mol_type = other DNA
atggtatttgtattgtcaaaacaaaagaaacatttagacatgtgctctaatgctaaagcaagagtattgcttaaaaaaggttatgcagtagtgcataaggtatttccttttacaattagacttaaaaaagacgtgtcaataataaaaccaaaagaatataaaataaaaatagacccaggttctaaatatactggattatctattatagataataatgccaacgttgtttttcttgccaatatagagcatagaggagaaaaggttgtaagcaatcttataacaagacaacaatcacgtagaaatagacgccaaagagaaacccgttacagaagctgtaaatttataaatcgaaaactcaaaaaagatgctaagtatagggttgcaactaatagaccagaaggatggttgccaccatctgtaatatctatagaacaaaatataattaacttattaaagaagttaaaaaaggtttgtaatataacttcaagttcaatagaatatgttaaatttgacactcaactaatggaaaattctaaaatcaatggaatacaatatcaacaaggtactctttttggttatgaaataagagaatatctttatcataaatatggacatacatgtcaatattgtggtggggctacaaaagataatcatttagaagtggaacatatgatttcaaaaaaaaatagtgggtctaattcaattagaaatttaagtttagcatgtcatacttgcaataaagataaagactctttaaatttagaccaatggttaactaaccttaaatcattaaagactactaacttaaatgatacaagaataaaaagaattgaacatatattaagtaaaggtactatttatagaacaacaagatatagtgcatgggtaaatggttataaagaaaaattagtcaaagatactaaaaaactaattccagatatagaactaggtacaggagggcaaacaagtcataataggaatgtattaaaactatcaaaacaacactattatgatgcattgtgtgttggagctataccaagtagttttaaatttaagactactgatgtgttaactattaaagcgtatggaagaggttctcattttagaggaagaactaatagctgtggcattataatttcaaagttaccaagacaaaaacaattctatggctttcaaactggagatataattagtgcaaccgtaattaaaggtaaaaaaataggtagttattttggaagagtggctacaagaagtagtggatactttaacattcaaactaaagaagctacaatacaaggtataaaccataaaaattgtaaaatagtgcaacgaaatgatggatactcttataacatagaaaaaagggttatttaa

SEQ ID NO: 1448 - DNA, 307 bp, unidentified
  misc_feature 1..307: note = Ga0209511_1005681 JGI
  source 1..307: mol_type = other DNA
ataaatatgtcaattacccacgactgaagtcgagggcatgttaggcgactaacatatctttaacctaagttaattgagcagatttaagttaccttagtcatcataacctattatgcttctccagtaatagtcgttatgggatacaatctaaacatggctttgtgggaacgtgtattccgaaaggaatacattctaaaaccaagtgatgtattcataaagctatggtaacagtatcgaggagagacagtcgaaaggctgcgttacgcccgtaagggtggtttcttacaatgtaggaggttttaatatg

SEQ ID NO: 1449 - DNA, 1182 bp, unidentified
  misc_feature 1..1182: note = Ga0118733_100051634 JGI
  source 1..1182: mol_type = other DNA
ttgaaagtattagttttaaataatcatgaagaagcactaatgccttgctctgcgagaaaggcaagaattcttctcaagaataacaaagcaaaagtcgttagacgtttgccttttgttattcaattaaatgattattcttctactggatatctacagggtttaacactaggagttgactccggtcactctacaataggtttgtctgttacttcagaaacaaaagaatttattgctttagaactccaattaagaaatgatatatcaagtaagctagaaacaagaagtatgtatagaaggacaagaagaggtaggttaaggtatagaaaacctagatttaacaatagaactagaaaagaaggatggctacctccatcagttcaacataaagtggatagtcatgttaaaattattaagttatatcagagatacttaccaataagtaaattaataatagaaactggaagttttgatatggctaggattaataatcctagcatagagaatagtgattatcagaagggtaatcaatatggctttaacaacgttaaagcatatattctttcaagggataagtatacttgtcaatcaggtaagaagggctgttcaaaagagctccatgtacatcacttggtattcagatcaaaaggtggaagtgacaatcctaaaaacttaataacgttatgtaagaagcatcacagacaattacatgatggtaagttgaatattaactttaaaaagcataaagttttaaggtcagcaacggtgatgaatataataagagtttatatattaaaagagttaccaggagcgatagagacgtttggatatattactaaaagtattaggttggaaaacaatatagagaaaacgcatagtaatgatgcttttgtaatatctggaggggttaatcaagaaaggattgatgtaattgattataaattgagaagaaggaataaccgtagtttacaaaagaacagaaatggattttctaggagtattaggagagaaagatattattatcaaccacatgacgtagtggagtatgaaggaaagagatatgtagttacagggactatgaataaaggtaagagtatccaattaatgattgatggtaaaaagaagacaaagcctccagttaagttaacgagtatatataggtcaaggagtatggtattgtgttaa

SEQ ID NO: 1450 - DNA, 291 bp, unidentified
  misc_feature 1..291: note = Ga0118733_100051634 JGI
  source 1..291: mol_type = other DNA
gtcaaccacccatgaatgaattcatgggcatgctccgtgaggagcatgatattaataatgggtgattagattaagcttgagaacatcaagctacgttgtttaagttataataccttagagtgcctccctagctctaagctctattgcttaatattaaaagagtttaacgactcggtgtgttaagtgtgaaaagcttttacaactttatcgaagggaatctactcctgtagaggagggtagtttagcaattaagctatagctatctttaaactaaaaggaaagaaattgaaa

SEQ ID NO: 1451 - DNA, 819 bp, Clostridioides difficile
  source 1..819: mol_type = other DNA
ttggtgtttgtaattaataaaaacaaaaaaccattgactccttgtcactttgctgtagcaagaaaattacttaaacaaggaaaggctgttgttcataaacaatttcccttcactattagattaaaagaattaaaagaagctaatcctaaaggtttaattattaaattagacccaggagctaaacaaacaggcgtagcccttcacaaacctaatggtgaagttatacttcttgcaaccatagaacatagagcatttagaaggacaagaagaaatagaaaaacaaggtatagagcaccaagatttttgaatcgcaaacgacttgaaggatggttaccaccatcaattcaaagtatagtggataatatcaaaaattttataataaaacttaaaaagttatgctatataaagacaatctatatagaaacagtaaggtttgatactcaattaatgctaaatccttcaattgaaggagtagattatcaacaaggcactctcttagggtatgagattcgtgagtatctattatatacttatggccatacatgtcaatattgtaaaggactcacgaatgaccatcaattagaaattgagcataagtatcctaaatcaagaggaggttcaaattctattagaaatttaaccttagcttgtagaacttgtaaccaagaaaaaggaaataatacacttgatgaatggttacaatctctaagtaaatcaaagttagataaagaaagagtaaaaaatataaactcaatcttaaaaactaataaaccagtaaatctaaaagatattgccaaagtaaatagtagtagaaatgct

SEQ ID NO: 1452 - DNA, 279 bp, Clostridioides difficile
  source 1..279: mol_type = other DNA
gtcaataacccacctctaaagaggtaggcttgaagttatctacaagtcatattgaccagattaagttttaaactacattattaaggtcataacacctacaaatgcttctccagtttgtagcctctgttgcatattattaaacagtttgtgggtacaaacagtgtaatatgctatcaagccttaataatattatcgaggagagcagtttctaactgcgttacctatgaagttaatttcttaacttcatagagtttactcttaaaggaggttttttatttg

SEQ ID NO: 1453 - DNA, 1380 bp, unidentified
  misc_feature 1..1380: note = Ga0307994_1018066 JGI
  source 1..1380: mol_type = other DNA
ttggctgtatttgttttagataaacagaaaaatccacttatgccatgttctgagaaaagagcaagactgctcttatctagaaaaaaggcagttgtgcacttaatgtatccgtttaccattcgtttgaaagaacgagttggtggatgtttacagtctgtacatctaaagcttgatccaggtgctaaaacaactggagtggctgttttagtagagctacaagaaacgttcaaagtggcgatgtttgcgcacttagagcataacggttttgcaataagtgaaaaactaactcagcggagagcatttcgtcgcagacgtagaaatcagctttggtatcgtcaagctagatttgacaatagaaccaagccgaaaggctggcttgcgccatcgattcagcaccgagttgactcaacactttcatgggtaaaaaagatttctaacctttgccccgttagtgatattggatttgagcgtgttaagtttgacattcagaagatgcaaaatcctgaaatttcagggtttgattatcaacagggcactttatttgggcttgagttgaaagagtatttgctttacaaacataaccaccaatgcgcttattgctcaggtattagtaaagatccaatacttgaggttgaacacgttcaaccaaggtctaagggtggttcgaattcagtgaagaatttggtaattgcttgtagagcttgtaacgaggcaaaaggcgctttgcttttaacccagtggaaaaacaaattgagcagaagtgctttggccataactagaattaagggtattgaccgagttttatcaggtaaatggcgtggatttagagataccgcagctgtgaatgccaccagaaacgccttgttagctgatattttaaccttctccatcgaaataaaaaacaaagagcaaattagcgtctacacaggcacaggtgctatgacgaagcttaatcgaaagcttcaaggtttaccaaaagaccacgccatagatgcagcggttgtgggtgaaaacccaaaacacttgcagaactggcaagtacccgttctcagcatcaagagtacaggcagaggcgcttacaagcgcacaagacttgataaatttggttttcctcgcggttacttaatgcgtcagaaatcggtacaaggttttcaaacgggcgacatggtaaaagcattggttttaaagggcaaaaaacaaggtgaataccttggtcgtatcgctgttagagccagtggaagttttaatattcaatctaaagatgggttgatacaagggattagtcataagtgctgtacgttattgcaacgcaataatggttatggtttttgtttaacaaagatagctttaaccaacggagaagagagaaaagctgcctaa

SEQ ID NO: 1454 - DNA, 287 bp, unidentified
  misc_feature 1..287: note = Ga0307994_1018066 JGI
  source 1..287: mol_type = other DNA
gtcaactaccccgccctaaaggacggagcttgtaaaagctttggttgaccagagggcttaactttagttaagcagaagatcgtaacaggtcgttaagacttaccttgggatgcttccttagtcccaagctctaaaaggtttaaagaatgcaggcataaggtaagtgccgaatctttaagtcgctgtagaaatacaggagccggttactgtcaatctcgaagggagatgttggtttctccaacacgttactagacccgtaagggtaattattggagttagttttggct

SEQ ID NO: 1455 - DNA, 1179 bp, unidentified
  misc_feature 1..1179: note = Ga0114919_10027729 JGI
  source 1..1179: mol_type = other DNA
atgcccacaactcctagaaaagcacgcctactcttgaaaacaaataaagccaagatcaaaacacacaacccgttcaccattcaactaacaacagcaacaggagaaacaaaacaacccattgaactaggcactgacccaggtttcaaatttattgggtttagcgctacaacaaaaaaggaagaactaatcagcggtgtggttaagataagacaaaatatcaaaaaactaatggatccgcgtagaggtttcagaaaagcacgccgcaatcgcaaatggcatagaaaatctagatttaataaccgcaaaagaaaagcaggttggttaccaccaagtacacaacataaagttcaaacacataaaaacttaatcaagaaacttcagagtattcttccaatcaccaatatctatatagaaacaaacaagttcgacactcaaaaaatggagaacccagatatcaaaggtgtagaatatcaacatggaactttacaaggctacgaagtcaaggagtatttattagagaagtttgaaagaaaatgcgtctactgtaagaaatcaaacacacctttagaagtagaacatgtcataccgagatcaagaggaggtagtgatcgcatctcgaatctcactatatcatgtcatgattgcaatcaaaagaaaggcagtcaaacagctgaagaattcggatacccagacatccaaaaacaaacaaaaagatcattaaaagcagcgacacaaatgaatataatagtcaagaggctattggaagacccagatctgaacactatcccaatacctgcttatgaaaccaagtttaggagaaaacaactgaacttagagaaatcgcatgtcaacgatgcttttgtcatagcaggaggcacaacacaaacaagatcacaaccttatcagattaaacagacaagaagaaataatagaaaacttcaacaaaacagaaaaagatatggtatttcaattagaaaacaaagatatccaataagcgctaatgacttaattgagtatcgagtgagaggcgagagtaaatttagattgtttcgagttaaatcaacacaaggtttgagaggtttaattgttcgagataataagtttgatcaaaatcgttttccaaacgtttcaaaagttaaatttatctgttcaggtaaaggcctttgttttattggatga

SEQ ID NO: 1456 - DNA, 265 bp, unidentified
  misc_feature 1..265: note = Ga0114919_10027729 JGI
  source 1..265: mol_type = other DNA
aaggaggtcagtcataaacctcagggtggttagagggcttgacaaaccactcagtctaagttgcaacacgcccgggcacaacttaactgaacagtcaagcagcagttggtcaggtcatgataccttgggatgctccaatagtcccctgccctatcgcctagtattaaaagtcccgttgggcaaggacggtgtactaggccaaaaaagcctccccaacaatctcgaagtggaccaactccaagacgaagaggagggtagaacttga

SEQ ID NO: 1457 - DNA, 1464 bp, unidentified
  misc_feature 1..1464: note = Ga0256404_1000183 JGI
  source 1..1464: mol_type = other DNA
atgacatacgtatatgtgctgagcaggagcggcaggccgcttatgccgacagcaagatgcggccatgtgcgcatcctgctgaaggaaaagaaagccagggtcgtatgcggcaggccgttcacagtgcagcttctgtacgatacagacgaagcagagccatatctctacggaggaacagacccgggcaggacgaacatcggcaatgccgtcgtgacggaagacggcgagtgcgtttaccgcgacaaggtcgagacaagaaatgatgaagtggcgaaaggcgtgtccgacaggaagaagaatcgtcaggctcggcgcagaggtgaaaggctcgtaaggaagcgccgggcgaaaagatgcggcaccctgtcgacaaagctcggaagcggcagacttatcccggggacgaaaaagcctacgctcgtgaaggatatcatcaatcaggaggcgcggttccggaaccggaagaagaggcagctcataacaccgagtgttaaacagcttgtcgacacgcatctgaaccacgtcgatcagataagaaagatacttccggtcaaaggctggtgcctggaagctaaccgcttcgcgttcatgaagctggaggacggatcggtcagaggtatcgacttccagaacggcagactgaaaggctacgcctcggtcgatgatttcgtgtacgagcgtcagaaaggcaagtgcttctgctgcggagccccgatcgaacactaccatcatgtgaaggagcagaacgacaacggctttgacggaccggagaacaaggtgggtctgtgcaatagctgccacactaagatacatatcggtgagctcgagctcgatgtcgagggcttcggcaagaagtatcaggcgctgagcgtgctgaaccaggcaataccgtacatttatctgggccttgtcgaacgcttcgatgaagagaatgtcttcatctgcgccggatacgacacgaaggagatacgcgaagcagccggccttgacaaggaccacgatatcgatgctctgtgcatcgcgtcgatggcgacaggcgtgataccaaagcagcctgaggaacaggccttcagtgtgaagcagtacaggcgccacgacagagcgaagatcaacaatcagcctgaacgcacatacaagcttgacggcaagaccgttgcgaggaaccgaaagccgcgcatcgaccagaaaggcctcgcattgtcacagtggtacgaaaagcaggtcagactttgcggcaggaaagaagctgaccgcatgctgtcgaggctgaaggtaaggaagtcctacagacgctacaacaacctgtaccgcgtcatgccgggtgcgatcgttcgccatgacggcaggatcgaagttatggagagacagcagaacaacggctattacttcaaccttcgatgcgggagaataaaggcttcagaatgcgagatcctgcaccataacgcagggcttgtatatatttag

SEQ ID NO: 1458 - DNA, 223 bp, unidentified
  misc_feature 1..223: note = Ga0256404_1000183 JGI
  source 1..223: mol_type = other DNA
gtcaactacccgccgcttaactcgctgacgcttcgttagaagcgggggcttgtaaggcgagagtagttgagcaagagcgtgatgtatctcacactgcgggattttcccagtcccgcacatactggtctgatgcaccaagctcagggaaacatcacccgcccatcgaggcggagactaacagttataactcaactagaaggaaaggaggacgcacatgacatac

SEQ ID NO: 1459 - DNA, 1140 bp, unidentified
  misc_feature 1..1140: note = Ga0272443_10006725 JGI
  source 1..1140: mol_type = other DNA
atgccaacaacacaaggaaaagcaaggaagttgttaaaacaaaataaagcaaaagtatataaaagatacccttttactatacaattaaattatgctactggtgaagctaaacaaaatattacactcggtattgatactggatataacaacataggatttagtgctattacagaaaaagaagagatatattcaggaactttagaattagattcaaaaactacaaaaagacttacagggaaaagaatgtatagaaggacacgaagaaacagattgcgctatagaaaaccaagattcaataacagggtaaaaacaaaacataaaggctggttaccaccctcaataaaacgaaggtatgaaacacatatcaacttaataagaaaaataaagaatatattgccaataagtagactaatactggagatcgcaaagtttgacatccaaaagatagaaaatccaggaatagaaggttctggttatcaacaaggtaatatgtatggttatcagaacttaagaagttacttaatgtcacgtgaaaaagggaagtgccaattatgtggcaaagagtttagtaaaacagaccctgcacatatacaccatgttatttcaaggaatgatggtggtacaaataaacctaaaaatttggctttattgcataagagttgtcatcagagactacataaaaagaatctaaatcataagctaaaaaagaataaagaatataaaggttctacattcatgtcaataatacataagaagttttataaagatttaccaagtctggaagtaacttatggtaatataacatttgtaaatagaaatagtttaggtttagaaaaatcacatagtaatgatgcctttgtaatagcgggtggtaatatacagaaaagaataaatccaatagtaataaaacaaaaacatcgtaataacaggtctttaggtaaacagaggaaaggatttgccccatcaagtagaaaaaaaagatataagattcaaccaatggacttagtaaagatagctggtaaatggttaagaactaatggagtacattgtaaaggtaaaaggttaatggtaaataaaaaaagtataaatataaataaagtagagtcaatctatagtttcggaagttttatatttaactaa

SEQ ID NO: 1460 - DNA, 243 bp, unidentified
  misc_feature 1..243: note = Ga0272443_10006725 JGI
  source 1..243: mol_type = other DNA
gtcaataaccctcgactaaagtcgagggcttgcttggtgacaagtgagggtaacttgttgattagactaagtaccttgtagggtactacgttctttaagttataatacctgtgggtactccactagcctgcagctctattacttggtattaaaagagttaaaagactcggtgtattaagtgtaaaaagcttttagaacattgtcgaagtggattaactctgaaaggaggacgaaacttgagag

SEQ ID NO: 1461 - DNA, 1083 bp, unidentified
  misc_feature 1..1083: note = Ga0118725_1014359 JGI
  source 1..1083: mol_type = other DNA
atgagagttccagtagtatcaaaagatggtaaaccgctcatgcctaccaagccagccaaagcaagaaagatgatagaaggaggagtagctaaaaaatgctggtcaaaaactggcgtattctatatacaaatgttaatacctgtgggcaaacaagttcagtctgtggcactagcaatagacccaggcagcaaatacgatggctacgctgtgtctggtgagaaggatgtagcgctcaaggctatggcaataatgccacagaaggtacaaaagaaagtaactgagcgccgtcaattaagacgtagtagacgttatcgtaatacgagacataggaaggcacggtttgacaacagaaaacgcaaatctgggtggatagcaccatcgcaattggctaaagtacaattccgtatcaagatagtacgagatttagccaagatattccctctcaactatatcgcagtagaggatgtaagattcaatcattacaaaaagcgatggggtaagtatttctctacagtggagataggaaagacgatgttgtacgaagaactggaacgacatgttcaggtaataaagtacgccggttggcaaacagcagaagcacgtaagtattggggcattaagaagtcaaatgttaaggatgctttaacgcccgaatctcatgctaatgatgctcttgcgatgcttaatgagatgttcggaaataatgttgatgattcgtgcacttttcttgtttggcgtaggctggaattcgccagacgttcattacatcggcagaattataagaaaggtggtgtacgtctacgatttggcggaactaccaacggacattatatgcgtaaaggagatcttgtctctggtgagcaaaaagatagacaattcatcggttgggtctgtggcttacccacagacaagacaagggctattgctgtggctgatgcaacaggtaagcgtttagcacaatgtacagaacgaaaagtcggactaatgcgccggtttactggcgtaacatgggagagtcagtacataccaaagccaccaatagcacctatagcgcaggagccaacccaactacaatttttctaa

SEQ ID NO: 1462 - DNA, 277 bp, unidentified
  misc_feature 1..277: note = Ga0118725_1014359 JGI
  source 1..277: mol_type = other DNA
tggttcgtcaataaccccctcctgattctccgaatcagaaggggcttgggggacacaggatctccgacgcaagtattgactagagggtcccgaaagttttcgggacagccgcactgcgatggtacatacgtcatggtgtttcgctagctctgacctctataaactgtctcttgtgggcagtggggataaagacctgacatctttcgcagttgcaatctcgaagcgacctttactttagtcccgaatatcgggactccgagaggagaaaatcatgaga

SEQ ID NO: 1463 - DNA, 1308 bp, unidentified
  misc_feature 1..1308: note = Ga0335001_0013376 JGI
  source 1..1308: mol_type = other DNA
atgcctaggagaagttttatgactaaaaatgttgtgtttgtcttagacaacaccaagaaaccactaactccttgctcaccagcaagagctagaatgttgttacgggatggaaaagctgcagtttggcgaactgtcccgtttacaatcataatgcaaagtactataattgaaccaataatcaaaccgcttaaagtgaagatagaccccggttctaaaactactggcatagttctcgtgaatgaaaaaaatcgagttatatacgcagtcgaattagttcatcatggcgatatgataaaaagtgatttagaatcacggaagcataatcgaaaacttagaagatctcgtaaggtacgatatagaaaagctaggtggttaaatcgtggacgcaaaaaaggatggttaccaccatcaattttacatagggtgattacaaccgtaacgtgggttgataggtttatgaagtggtctgttattaatggcttatcagtagaacaaaataaatttgacacacagaagatggtcgattcgagtatatatggtgtaaaataccaacaaggaacgcttgctggatataacgtacgagagtatctacttgagaaatggaaaaggaaatgtgcatattgtgggacatctaacgtaccattacaggttgagcatgtacatccgaaatccaagggtggttcaaatcgcattagtaatttagttatggcgtgcgccaaatgtaatgatgctaaaaaatcattggatattgctgattttttgagaaacaaaccaaatacacttaaaactataatgtcacaattacagaaaccgttggtagatacagcggtaatgaattctacacggataaagttaataacggtattgggtgaatatggtttaccaattgaacttggtaatggtgcacaaacaaaatataatcgtgttaaactaggatatgtaaaagaacattggattgatgctgcgtgtgttggtgattctggtgagtcagttatcattcacccacaacaaaaaccgttacgcataatatctatgggttatggtaatagacagatgactcgtattaatagatttggttttccatgtgctagtgcaaaacgcggtaaagttgtattaggaataaaaactggcgatttggtttgtattaaccaaccaaaagggaaatacaccggaatatacacatcgagagtttctgcaattaggtataaagatgattatattgcaataacagtttccggtagaaaactatggtttccggctaaactagccagagttaaacaattagccgatggttatttgtatatgtaa

SEQ ID NO: 1464 - DNA, 311 bp, unidentified
  misc_feature 1..311: note = Ga0335001_0013376 JGI
  source 1..311: mol_type = other DNA
gacaatgaattatatattttaaacgtgccggactttccagttgagcgaccagattaacaatagttagtattttatcaatgtagtttattgataaagctcaaccagcttacttgagaattcaagtagacgatacgaattgaagcgaaagcgacacaccatagggtgcttcaccagctctatgcaactgtggtcgaaatgtatgactgggacatctggttgttccataagcatgtgactgaacgacattcgtcttccgagcgaggtaaacattacaggctatgcctaggagaagttttatgactaaaaatgtt

SEQ ID NO: 1465 - DNA, 1341 bp, unidentified
  misc_feature 1..1341: note = Ga0311301_10014764 JGI
  source 1..1341: mol_type = other DNA
atgtcacgtgtattggttgttgatgccaagcggcaaccgctgatgccctgcacgcctgctcgtgcccgtatcctactggcacagcgcaaggcagcggtcttgcgtcgctttcctttcactttaatcttgcgcgagacaaagccacaggccactgtggcaccgctgcgcctcaaaattgatccaggcgcgaaaacgactggcatggctgtcctgcatgctgagacgtctgaggtgctctgggcggcagagctcacgcatcgcggcgagcaggtgctcgccgagctgatgaggcgacggggcgtcagacgttctcgccgcgcccgacatacccgctacagagccgctcgcttccgcaatcgccgccgcgctcctggctggctgcccccctctctactttcacgtgtacacaatgtcgagacttgggtaatgcgtctgctccgcttttgtcccataagcgcgctctcctatgaactcgtgcgcttcgacacgcaactgctccaaaacccagatattgagaacctcgactaccagaaagggcctctcttcggcatcgaactgcggcactatctgcttgcaaagtgggagtaccagtgtgcgtactgtctgaccacaggggtcccgctcgaaatggaccatgtggagccgcgagctcggggaggcagcgatcgcgtggccaatgtggtgcctgcctgccacgcctgtaaccaggcgaaagcagacaaactcctggaagaattcctggcagaccgcccagaggttctggcacgagtgcaagccaaacgccaagcaccgctcaaggacgcagccgctgtgaataccacccgacttgccttgtatcgaaagttacaggcgacagggcttgcggtggagacgggaacaggttcgctgaccaaatggaaccggcaacagcagggggtgccaaaagcgcactgggtcgatgccgcatgttgcggcgtctcaactccggcgcacgtgcgactccagacggtgcgcccctggctgatcactgcgacaggccgacagaacaggcacatgcgcaatgttgacaaacacggtttccccgttggccgggccaaaggtccgagccgggtgcgcggctttcgcacgggagatatagtcaaagctgtctgtcctgcccatctgaaggcggcggggactcacgttgggcgtgtcttagtgcgcacacgtggaattttcgatgtgcaaacgaggcacggtcgggtcaaagatatccctgcacgctactgccagaggttccaagccggagatgggtatcgctatactcttggtgcggcgcttccccttactcccgaatgtggaggctcccgcgcggccgtttag

SEQ ID NO: 1466 - DNA, 306 bp, unidentified
  misc_feature 1..306: note = Ga0311301_10014764 JGI
  source 1..306: mol_type = other DNA
gtcagcgaccccaccgctaaagcggagggcatgtgcagagcatgtcctgatgctgaccagccccctgtgcctgggcacaggagccgttagttggaagcggcccaagttcggactctcgaatggcctttccagttcgagaccctccaatcccgatgttaaacaggcagacggggaagcagagccagtgcatcgggaagatggccgccagctaactgggcgaggaaaacattacctgtttggtgcctcaaggaccaggcagcgctgcccctttacggggtctccacaaggagttgcatgatgtcacgt

SEQ ID NO: 1467 - DNA, 1302 bp, unidentified
  misc_feature 1..1302: note = Human gut metagenome
  source 1..1302: mol_type = other DNA
atgaaacaaaaaaagtatgcatttgtagtagataaaactggaaaaagattatctcctacagatatcaataatgcatggagattaattcgcacaaaaaaagcaagatgcattaaatataatccaatgactattaagttaaataaaatcgtaaaagaagaagaaattgatccatctgtttttgaaattggaattgatgatggttcttctcatgttggattctcagtgattcaatattgtataaaaaataatcaaattacaagaataaaagttattcaaaaagcaaccatgattcaacggcaagatgtaaaacatcttatggatattagacgtagttatcagcataatcaccgttctgagaaaagaagcagagcatgtagatttaataatcgagtaacatctaaaagaaaaggacggattgtaccaaccattaaacaaaaaagagatgcagttgtaagagttgtaaaagcttatcaaaaacttgtcaatgtgacacaaattgcattagaagatgtaagcattgatattagagttttaactgaaggtgaaaaattagaaggaaaagattatcaaaaatcaaatagacaagatgacaatattcgtagagctgtttatcttcgagacaagggaatttgtcaaatgtgtggagaacataaacaaaaaatggaagttcatcacattcatcctcaaagattgggtggaccagatagtatttataatgaaattttattatgccatgactgtcatgcatctattaatggaaaagaattgcaatacaaagatactttttataaaaaaattaatggcaaattaatcagaactgattgtgcacaacatgttatgcaaggaaaatattatttaagaaaggaactttccttacttggagaattacatttaacatatggtggtacaacagcaaataaacgaaatgtttggaacattgaaaaatcacatagtaatgatgcaatctgtattggttgtaaagatattcatatgaaacctgatacggtgaatgtacaagaatatacaataaaaccaatcagacataaaaagaaatcaaatacaacatctatgggatttgagttgggtgattatgtggaacttgaaataagaagtaataaattaaaaaagaaaatcaaagtaaagggttacattactgcatttataaaatgtcagaatggaaaagataaaggaaaattaacttatataaatttaactgcagatgatggaactatttacaaaagatattctttaaaaaaatgtaaattactagaaaaacaaaaacatttacgttttatggaataa

SEQ ID NO: 1468 - DNA, 305 bp, unidentified
  misc_feature 1..305: note = Human gut metagenome
  source 1..305: mol_type = other DNA
ttgctttcaagccttagtgagtgtagacttcggttagcacaatgaactacgttatgcccactgcttaaaactaacctttagattttctcagtctgaagctcttagagttatacatttgtataacatgtgcaacacatagcattggcaagaggaaaaacattaacttgttactttcattgagattacatcaatttgaaagaagatagaaatatcaatttttattatggattatgagtttcatttttcataatccataactatttattttttaagaaaggagatatcctatgaaacaaaaaaagtat

SEQ ID NO: 1469 - DNA, 816 bp, unidentified
  misc_feature 1..816: note = Human gut metagenome
  source 1..816: mol_type = other DNA
atggtgtacgtacaagacataaatggtaaacctatgatgcccacaacaaggcatggaaaggttaggagactgcttaaagacaagaaggcagtcgttgtgaacctatgtccgtttaccatcaaattaatgtacgtaacatctgattacaaacaggaaattgtgttaggcgttgatgctggtactaaacatgttggtttatcggctacaacgaaaagcaaagaactttacagtagtgaagtaatccttagaaatgatattgtagatcttttgtctaccagaagggagctacgaagatcaagacgaaatagattgagatatagaaaacctcgttttgataatagaataaaaagtaagcgtccgggatgggtagcaccttcggtgaaatacaaagtagacgcccatattcgtgttattgacaatatatgttctatactaccaatatctcgtattgttattgaagtagctcaatttgatactcaaaagattaacaatcctgaaatatcaggtaaagaatatcaggaaggtgatcaacttggattttggaacgttagggaaagacataatcgtcagatccataaacaaaagattccaaaaggagggataaaaagaccaaatcaatctccttttgaagtttttggtttccgattgtttgatagggttatgtttgaaaacagttattattttatattcgcaaggcgtaaaaccggtagttttaatattcgagatattgatggtaaaaaccaaagagatattacatacaagaaattgaaattatcaaggtgtaaacgctttatggtacaaaaggaaatggattga

SEQ ID NO: 1470 - DNA, 269 bp, unidentified
  misc_feature 1..269: note = Human gut metagenome
  source 1..269: mol_type = other DNA
ataaccaatttgtattgtattatgcataatagccaaaagctattccgattattagcctaagtgttgaaacaaacactacgttatttaagaatagatagttacctacggatgtttacccaagttcgtagctctaaggtaagtgattaaacagttctggtatttgaggaacagtgttgcttacgaaaactttaaataacattggcgatgggtactaacagagtttcactctgacttatgttgaataaacattaaaaacgtttgtagatatg

SEQ ID NO: 1471 - DNA, 1335 bp, unidentified
  misc_feature 1..1335: note = Ga0394881_0018228 JGI
  source 1..1335: mol_type = other DNA
atgcaaaaagtattcgtattagacacaaacaaacaagccttagatatgtgccaccctggacaagctcgaaggttgttaaaagcaggattgggggcagtctatcgacgttttccattcacaataattctcaagagagaagttactgctcaagaactacaaaactatttcttaaaactagatccaggaagtaaaacaacaggagtggcaatagtaaatcaagaaacaggagaagtggtatttgcagcagaaatagaacatcgaggagaaactattaaagctagcttagatagtcgcaggggtgtaaggagggcaagacgctcaagaaaaactcgttatcgcaagccaagattcaataacagaaccaggaaaaaagggtggttacctccatcactactaagcagagtagcaaatgtagaaacttgggttaagcgacttatacacttatgtccaatagccggaattagcttagaactagtcaagtttgatactcagcttatgcaaaatgctgaaattgaaggtgtcgagtaccaacaagggcaattagctggatatgagttacgcgagtaccttttagagaagtataagcgaaaatgtgcctattgcgaaaaacaaaacttgcctttgcagatagaacacatagtgccaaaaagcagaggtggaagtaatagtgtaacaaacctaacattggcttgtgaaaagtgtaacctaaagaaaagcaacaaaacagctttggagtttggttatcctcaagtgcaagcacaaggtaaattgccattaaaagacgctgctagcgtaaatagtacaaggtgggaaattttcaatagactaaaagttacaggattgccaatagaaataggaagtgggggattaactaagtacaatcgcagtaggcaaaacctacctaaagcacattggatagatgctgcttgcgttggattaactactccccaaaaactagatgttgataaaattaacctattgcaaataaaagctacaggacatggaagcaggcaaatgtgcagtatggataagtttgggtttcctcgtacctcaaagaaagctggtaaaaagttttttggttttcaaacaggcgatattgcaagggctgttgtcacaaagggcaaaaaagttggtacttatattggtaaagttgccgttagggctactggctcttttgacatttttacctcttctggcagagtctcaggtattggctataagtattttactcttttgcattcttgcgatggctattcttgtttttacttaattcaaaacaagaccgcaattcctcccacgcctgaagtcgtgggcttccttgcgggtgatctgtga

SEQ ID NO: 1472 - DNA, 260 bp, unidentified
  misc_feature 1..260: note = Ga0394881_0018228 JGI
  source 1..260: mol_type = other DNA
gtcacttacccacggctcaagccgtgggcttgttgggtagataactaacaagtccgagtgaccggactaagttctaagaactacgttattaggagagttaaagaagacaccttggaatacgtgccagttccaagcactgtaaccagtaagttaaacaattgcaagggtatagcgatagtgcttattggatgaactgattaataacattgttgaggcaaacattacttccgaaaggaaaggtttaacaaactatgcaaaaa

SEQ ID NO: 1473 - DNA, 459 bp, unidentified
  misc_feature 1..459: note = Ga0070717_10057385 JGI
  source 1..459: mol_type = other DNA
ctgaacatccaggccgaagccagggatggggtcaaaaaagcggaggaacacagcacgcgacagcgccgaacgcgccgggggcgcaagaccccttgccgcaagccacggcagaatcggcagcagagcaagaagaaattgccgccctcgacgaaagcgcgagggcctcggaaactccggctggcacggttcctctgtcagctcttcccggtgcgtgtcttcgtggtcgaagacatcaaggcccgcacccagggaaaaaggcgctgggatcagcagttttcgccgttggaggtggggaaacactggttttatgcagaactcggcaagcttgcccccgtggtgaccaggcagggctatgacacatcaaccttgcgtgaccaattggggttcaaaaagatcagcaagaagctggccgaagtgtgggaggcgcattgcgttgatgcctgggtgctggcgtatagc

SEQ ID NO: 1474 - DNA, 240 bp, unidentified
  misc_feature 1..240: note = Ga0070717_10057385 JGI
  source 1..240: mol_type = other DNA
gtcaagcacccccgcatagaatgcgggggcttgtgaagcgaaccgacttgccatcggggaaccagcgagggtaactgcgaaacgagcttatccaagctcgagcctcgggcgagtgatcggaagctgaacgatctgggcgtggcagcccacagcaacgagcgagacgcctccctaatctcgctccgcttgggtgggaagcctcgaagggaacagtttactcgaaagaggcttatcgcacat

SEQ ID NO: 1475 - DNA, 1452 bp, unidentified
  misc_feature 1..1452: note = Ga0224423_10003602 JGI
  source 1..1452: mol_type = other DNA
atggaagccggacagggcatacacagcaatgtatatgttcttccgggagtctgtagagacagtaaacactcaatttcagaaaggaggcgtcagttaatgtacgcatttgttctcgcaaaagacggttcccggctgatgccgacaaacatcaggaaagccagaaagcttcttgataaagggaaagccgtcatttacaaacatcacccgttcacgattcagttaaccggtgaatccaggcactgtactcaatcgatcgagttctgtaaagatacaggatcagaacatatcggtgtgagtatcaaatcagaaacgcatgagtatgttcatgcacaatacgatcatctcagtgatgagaaacagagacatgaggcacaggcatcgtatcgaagaagcaggcgcggaagaaagcgttatcgcaagccccgcttcgacaacaggagaagaaacgataagtggttagctccaacagtagaacacaagaaggacaaccatatacgtatctttgatatgtatgcagaggtatgtccaatcacaagagcagtcttcgaagtcggacagtttgatccggctgctatgcaggcacttgaggagacaggagaagtgctccaggggactgattatcagcatggtaagaagtttcaacttgccaatctgagagaagctgtattcacaagagaccgctacacctgtcaggtgtgcggtaagtcagtgaaagacggagtaattcttcatgcgcatcacattatttaccgttctaatggcggaacagaccgtatcaacaacttgatgactgtctgtgacaagtgtcacactccgaagaatcataagccgggaggcaagctctatggtctcaaaccactgaccggtatatatagagacgtaacattcatgaatattgtcagatggtacatcaaaaatgatattcagaatcgttatccggatattactgtcgaacacacctatggttcatataccaaggcgtcacgccgtgatctcggtcagctgcctaagactcatgcgaatgatgcatatgcgatgggtgagttccacccaaagcacagatgcaaagaaacgcattatgtgaaacgtcgcaggaacaatcgtgttctctcgaagttctacgatgcggtgtatatcgacatgcgtgatggaactgttaagaagggttccgagattggatgtaaccgcacagatcgcaatattccccgcagcaacccaagcaacgagaggatgtatcgcgggcataaagtgtcaaagggaagagtatctgtcagaagacagagatacagcatccagcccggagatacggttcggtatagaggaagtattgcccatgccaaaggtgtgcactgtaacggtacaagggtgatgctggatacaggcaagtctgtaaagatcacagatgttgccgtaattaaaagaacaggaggatggcaattcctccccgcctga

SEQ ID NO: 1476 - DNA, 245 bp, unidentified
  misc_feature 1..245: note = Ga0224423_10003602 JGI
  source 1..245: mol_type = other DNA
gtcaataaccccacctgattcaaagaatcagatggggcttgtgaaagaaaagcaattttcttacataagcccgattgactagcctaagtgcttcgagcactacgttatgcagtgacgcataagcgacttacctgtgaatgctccacaagttcacagctctaagggtatgcattaaacatttcagtgggtaaagagaagtgtgtataccttctaaacctgcataacattggcgatgtggacccgtc

SEQ ID NO: 1477 - DNA, 744 bp, unidentified
  misc_feature 1..744: note = Ga0395631_0033223 JGI
  source 1..744: mol_type = other DNA
gtgacagtgaatcacgtcttcgttctcaatcaaaatcgtgagcctctcgatccggtccaccctgcggtggcccggatgctcatcgatggcggccaagccgccatcctgcgacactcccccttcacgataatcatgaaaatgaccgtggacggaccaacccacacctaccgcatcggagtcgatccgggcagccggaagacgggaatggtcgtggtggacaatgagacgaacgaggtcgtcttcgcgatggagatcaagcatcggggaagtgagatcaagaagtccttggatcagcggaggggagtccgccgttctcgaaggtcccggaagtgccgacatcgggaaccacgattcctgaatcgagcgagaccgaaagggtggcttccgccctccatccagagtcggatcgaaaatgtggtgacctggattgggcgattttcccgatcagttccggtcgttcagatcaatctggaagatgtgaaattcgacacgcagctcctacagaatcctgacattcgtgggtttttatatcaacaaggagagttgtggggctacgaggtcaaagaattcctcctctccgtgtggagacacgagtgtgcctactgcgggaagaaagatgttcccctcgaggtggagcacatcattcctaagagccggaacggatcagatcgaatctccaacctgaccatcgcctgcgtctcctgcaatcggaagaagggaaagatgacggctgcggagttcgga

SEQ ID NO: 1478 - DNA, 317 bp, unidentified
  misc_feature 1..317: note = Ga0395631_0033223 JGI
  source 1..317: mol_type = other DNA
tccaagtcttccactgaaagtcggaagcctgtggcgaaaccctggcttggttgaccagactctgtgaagtgagaccgagaggcctcgccgaactccgtgcgattggtcacgacaccttgggatgcaacgccagtcccaagctctgtcgtccggtttcatgaggattgaagaggatagctccgaaggagccggaccgaacaagcctttcgcacattgtcgaggcgaacgtggctcatgagaatgagcctgacacccgtgagggataacacccaagcggagacactcaattttcttttcggagagtgacagtgaatcac

SEQ ID NO: 1479 - DNA, 1296 bp, unidentified
  misc_feature 1..1296: note = Ga0137383_10023908 JGI
  source 1..1296: mol_type = other DNA
atgtcacacgtgttggtcattgatcaggacaaacggccacttgatccgatccatccgggctacgcccgcaaactgctctcgtccggcaaggcggctgtgtatcgacgctttccgtttgtgctgatcctcaaacgccaggttcccgaagctcacccccagcccctgcgtctcaaaattgatccggggagccaaaccaccggcctggcggtgctcaacgatgcgaccggacaagtggtatgggctgcggagctcatccaccggggggagcaagtacacgcgggacttcagaaacgcgcaggggtgcgccgtggacgccgttcccgccatacacgttaccgacccgctcgctggcgcaatcgccgtcgccccaaaggctggcttcctccttccttgtgctcgcgggtgcagaatgtggagacctggacgaggcggttgatccgttggtgcccgctcggtgccatctcctacgaggccgtgcgcttcgacacccaggcactccaaaacccagagatcgagggggtagcctaccaacacgggacccttgccggcttggaggtcaaagaatacctgttgctcaaatggggatatagatgtgtctattgccagaagacgggtcttcccttagaaattgaacatattgtgccgaaaattcgtggaggaagcaaccggatcaccaatttgaccctggcctgtgaggtgtgtaatcagaggaaaagccatcaaactgcccaggaattcgggtttcctcaggtccaggcgcaggcgcggcagccgctaaaggatgccgcggcggtcaacgcgacgcgttgggtgctcttcgcgcgcctgcaagcgacgggattgtccatcgaaacaagcacggggggccggaccaaatggaatagaaagcaacgcagcattccgaaaacccattggttggatgctgtgtgcgttggtccatcgactccggaacgagtggactggcagcaggtgaccccgctgctcatcagagccagggggcgacaatgccggcgcatgtgtaatgttgacgagttggggttcccaaggagccgtcccagagggccgagcaaggtctacggctttcaaacgggggatatgattcgtgcacgggtcaccaaagggaaaaagatggggacctatgttgggcgagtcgccatcaaaacagatgggtatttcaagattaccggcaggcatggcatggtcgagggcattcatgctcggtattgcgcgcccattcatcgcgatgatggctatgggtatacccaaggcaaagcggcgcttcctccccaggtgtga

SEQ ID NO: 1480 - DNA, 291 bp, unidentified
  misc_feature 1..291: note = Ga0137383_10023908 JGI
  source 1..291: mol_type = other DNA
gtcagcgaccccacgcccaagggcgggggcttgcttcggcagccccgatgctgagcagtccccaggcatcgcgcctggtagtccttcgcgaagaatgtataggcactccggggtggccttccagctccggactctgcggcgatccgttaaacagcgagatggggtttcaatcgcagtgcggctcgcaactcaaggaaaccttcgctgaagttggacgaggaaaaccttacctgggcaaccagaggcccggcaacgggcaaacgaccaaaggagccaatcgtcatgtcacac

SEQ ID NO: 1481 - DNA, 1044 bp, unidentified
  misc_feature 1..1044: note = Ga0208478_1004398 JGI
  source 1..1044: mol_type = other DNA
gtgaatcaggtgtctacgtttccgataggtgagcggatccaccaggccgtgcttcctcagcggcttgctctggaactcgcgtcagcagacacggctggggtagctccgaaacggggcgcgagcgctgaactttctagttcggcagccagtcgggaacatgatcaaggggagacccgccagccgcacccggccggcgggcgtcacgaaaccacagccagtcaagtggttgtggcaacagatggtgggagtgattccaccgccaaatcacatggacctgcagtgccggcagcaacagcagtacaagacaaccgggcaaccccctcgatggtggcggtgctcgacaaacacggcaagccgctgatgccgtgccacccagcccgcgcccgggagctattgcgcaaaggccgggcggtagtggcgcatttcagcccgttcgtgatccgcctgaaggaccgcaccctggaacagtccgaagtcgagagcgtgcaggtcggcatcgaccccggctccaaacacaccggcatcgccgtattcgggttcggcctcacgaccggggacgcccgcaagggaatgttctcggcccagttggaccaccgcggtcagaagatcagcaaagccatgacctctcggtcgcagatgcgccgcggtcgccgatcccgaacgatgcggtaccgggcgccgcggttcgccaaccgcaggaggccgaacgggtggttggcgccgtcgttgcgtcaccgcgtcgagggtgtcatgtcctgggcatccaagctgcagcggtggtacccgatcaccgggtggcatatggagctggtccggttcgacctgcagctgcttgaaaccccggagatcagcggggttgagtatcagaacggcaccctggccgggtacgagttgcgggagtacctgctggagaagtggcaccgcacctgcgcatattgcgacgccacaggggtgcccctcaatatggaccatatccatccgaagtcaaagggcggctcgaaccgggcgacgaacttcacgttggcgtgcatcccgtgcaaccaa

SEQ ID NO: 1482 - DNA, 314 bp, unidentified
  misc_feature 1..314: note = Ga0208478_1004398 JGI
  source 1..314: mol_type = other DNA
gtcaatcaccccgcgctggcgtgcggggcttgttcttcgctgtgagcagcggtgggcttgccccgttcgcgagggttcgtttgaccagatcaagacaccacgtatgggattgaggtgaatcaggtgtctacgtttccgataggtgagcggatccaccaggccgtgcttcctcagcggcttgctctggaactcgcgtcagcagacacggctggggtagctccgaaacggggcgcgagcgctgaactttctagttcggcagccagtcgggaacatgatcaaggggagacccgccagccgcacccggccggcgggcg

SEQ ID NO: 1483 - DNA, 303 bp, unidentified
  misc_feature 1..303: note = Human gut metagenome
  source 1..303: mol_type = other DNA
gtgtcagaaatgacaaattatgcttttgtgttagatgcgaatggaaaacaattggcaccaacaaaagagcagaaagcttggtttcttattcgtaaaaaacgtgcgacattggttaataaatatccaatggtaatacaacttaatataacaattccaaatggtggagatacagctaataaacgaattgattggaatattgaaaaatcacatagcaatgctgctatttgtattaccgacttgcaaccagatgtatatgaaattaaagagtggataataaaaccaatgcgtagacaaagtaaagct

SEQ ID NO: 1484 - DNA, 286 bp, unidentified
  misc_feature 1..286: note = Human gut metagenome
  source 1..286: mol_type = other DNA
tattaaatataaataaaagtggacatataactttttgtttgtggcttaatagtaggtttcaagcctgagtgactgctactatcgaaagatatgttgtcgatatgaactatgttagatagtaaggtaaaaacacacctttagatgtaatcttcagtctaaagctctgtgagtgccaaccaagaaacaatgctaatgtcctgcattgataacagggaaacacatattctctatctgacattggcaagaagagaaatgctccgaaagaaaggtgtcagaaatgacaaat

SEQ ID NO: 1485 - DNA, 879 bp, unidentified
  misc_feature 1..879: note = Ga0066650_10013185 JGI
  source 1..879: mol_type = other DNA
atgaaaaatacacaacagaagttaggaaagagaaatacatacacacctacaaatacttcacaagtttgtagctctgtggttgtgtctttaaacagagaggaaactctcagtgagcatggcttaaaaacctttccaaacagcctcgatgtgaacaaacagtctggcaagactggacaggatttgagaattcctgttttaaatatacgtggaaaacctttgatgccaacaacaccagcaaaagcaaggcatttgttagaacaaagaaaagcaaaagtaatcaaaagaaaaccatttgttatacaattgacaatagcaacgggagagactaagcaaaagattacattaggaatagatagcggatatagtcaagtaggattcagcgcaaagacagaaaaagaagaattgatattaggagaactaactttaagaaaagatgtatccaaaaagttagaagaaagaaaaaggtatagaaaacagaagagaaataagttatggtacagagaagcaagatttgataaccgagtaatttcaaaagaattgttagcaccaagcatacagcacaaattggatacacatgttagattgattgaaaaaatcaaaagtttacttccaatcacaaaaacaataattgaaatagccaactttgatacacagaagatgcagaatccagaaatatcaggaataaaatatcaacaaggtgaattacaagggtatcatatacgagaatatcttttagacaagtttggcaggaaatgtgcttattgcaatcaaaagggtgttcctttagaggttgaacatattattccaaaatcaaaaggaggaagtaacagagcatctaaccttacaatctcatgcagtaaatgcaatttagaaaaaggt

SEQ ID NO: 1486 - DNA, 279 bp, unidentified
  misc_feature 1..279: note = Ga0066650_10013185 JGI
  source 1..279: mol_type = other DNA
gtcaatcaccacaccctaaataatagattttaggatgtggcttgagccgtgaggtttgagagcgattggttgattagagggttgaaaaagtatgaaaaatacacaacagaagttaggaaagagaaatacatacacacctacaaatacttcacaagtttgtagctctgtggttgtgtctttaaacagagaggaaactctcagtgagcatggcttaaaaacctttccaaacagcctcgatgtgaacaaacagtctggcaagactggacaggatttgagaat

SEQ ID NO: 1487 - DNA, 1284 bp, Microcoleus chthonoplastes
  source 1..1284: mol_type = other DNA
atgcgcgttttcgttctagacaaaaacttacagcctcttgacccttgccatccagcacgggcaagagaattactgaacaaagggagggctaaagcattcaagcgctatccatttactattgtcctgcaagacagaaccgttgaagagtcagtcacgcacccacatcgggtcaaaatagaccctggcagcaaaacaaccgggattgctgttgtccaggaagaaacagggcgagtaacaagcgccattgaaatctcacaccgagggcaacaaattaaagattccctcttagctcgcaggtcattaagaaggggacgccgtaaccgtaaaacccgttaccgccagcctcgtttcttaaacagaacccgtaaaaccggatggctaccaccatcgctggagagtcggattgccaacattgaaacttgggtacgacggattaaaaaactctgtccgatttcagccatctctcaagagctagtcaggtttgacttgcagcaaatgcaaaaccctgaaattagcggagttgagtaccaaagaggtgaactgtttggttttgaggtcaaagagtatttacttgccaaatggaacagaaaatgcgcttactgcgaggttgaaaacgttccgttcgagattgaacacattctggcaaaaagtaagggtggttcaaaccgagttagtaatctttgccttagttgtcattcttgtaaccaagttaaagggaacagacctgttgaagaattcctaaaaaagaagccaggagtccttaaacgggtattagctcaagccaaagcacctcttaaagatgccgcagccgtcaatgctacccgatgggaactgtatcgaaggcttcagtcaactggtttacctgtagaggtaggttctggaggtcgcactaagttcaaccgtaaaaccagagggattgaaaaagctcacgctttcgatgcagcctgtgtcggagcatctactcctgaacgattattaattcgaggaatcaaacctctaaaaattgccgcaaaaggacgcggaaccagacaacgttgtcgccctgataagtacggatttcctaaagctcatgctcctaaagccaagtatttccagggtttccaaactggcgacattgttaaagctgatgttcaaaaaggtaagttcgcaggtcaatatattggtcgaattgcgattcgatttagacctagttttgtcttgcagttaccaacacaaaagtttgatgtacatcccaaatacttgagaaccattcataaagcagacggctatgaataccaatcctaa

SEQ ID NO: 1488 - DNA, 250 bp, Microcoleus chthonoplastes
  source 1..250: mol_type = other DNA
gtcaacaactcaccgctaagttctatcgaactatagcgggagcttgtaaaaacaggctctagttgaccagactaagttctacgagaactacgttatttagctcatgacaccctaagatgcgtgccagttttaggctctgtcgtacagttttaaacaggtgtagagagttaagccagtgagctgtacctaacaaggctagataacattgtcgaggctaactttaccagtaatgagaggtgcagtaatgcgc

SEQ ID NO: 1489 - DNA, 1155 bp, unidentified
  misc_feature 1..1155: note = Ga0302349_1003924 JGI
  source 1..1155: mol_type = other DNA
gtgactacgttgcacacacgcgagaagacccaccaggccgtgcttcctcagcggcctgctctggaatcgacgtcagcagacaaccccggggcagggacgaaacggggcgtcgagcctgggaccacccaggacacgggtgtgcaccgtgggcgaggggagaccgcggctccggccgcggcgtcaccggggaagggctcgttcccgcccccggacggcgggagtgatcccgtcacgcacgagcatccggcatccgagggtgggacctcgggtgcgcctcgccgcgccgaggcgcgggtgctcgtcctggatcggcgcgggaagccgctcatgcccacgactccccgtcgtgcgcgccagctgcttcgttccggccgtgcccgagtgcatcgggtgcagcccttcgtcctccggatcgtcgaccgcagggtcgaggactcggaggtccagcccctcgtcctgggcatcgacccgggattccgacataccggcgtcgccctggcgcgcgagcaggaggtccccgacccccgcaccggccgggcgacgacgatccgacacggcctcttcctcctgcgggtggaccatcgcggcgccgtgatccgcgaccgcctctcggcacgctccgccctgcgccgcggccggcgctcgcgcaagctccgctaccgtgcgccgcgcttcgacaaccgcgcccgtgccgcgggatggctcgccccgtcgatccgccatcgggcggagaccaccgtgacctgggcacgccgcctggccgcctgggcacccgtgacgcggatcgacctcgaggtcccgcgcttcgacgcccgtgccctgcatcggcccgatgtcgccctgggcgaccgcggccagggcaccctgcacggcaccgaggtgcgcgagtacgtcctggagcgcgacggccgggcctgcgtgtactgcggtgcgagcggcctgggcgccgcctccgtcccgctcacgctggaccatgtgagtccccgggcgcacggcgggccggacgtgccggcgaacctcgtcgccgcctgcgtcccctgcaaccgcgacaagggcgaccgcgaggtggaggagttcctcgcccgccggcccgccgtgctcgcgcgggtgcgccgcagcctcgcctccgtcatgcaggaggacctctcggtctcc

SEQ ID NO: 1490 - DNA, 289 bp, unidentified
  misc_feature 1..289: note = Ga0302349_1003924 JGI
  source 1..289: mol_type = other DNA
gtcaggcgccccaccacagacatcgacgggccccagggcacatcggtggatgtcgagtctgaccagctcgagacaccgctcagagggaggtgactacgttgcacacacgcgagaagacccaccaggccgtgcttcctcagcggcctgctctggaatcgacgtcagcagacaaccccggggcagggacgaaacggggcgtcgagcctgggaccacccaggacacgggtgtgcaccgtgggcgaggggagaccgcggctccggccgcggcgtcaccggggaagggctcgtt

SEQ ID NO: 1491 - DNA, 612 bp, Leptolyngbya sp. IPPAS B-1204
  source 1..612: mol_type = other DNA
atgcgaattccagttgtttcacgcgataatcaaccactcatgccaaccactccagcgagagtcaggaggtggattgcatcaggtaaagccatcaagaagtggtctgacctgggagctgttgatggattagctctggcatgttctgaattcgttaactacgagtcgttccatatcgcgaacactcgcggtcatgcttggactggttcagttcagttaacgcctgctattttcagggtgattcgcagacctcccatttctcgcaggcaactacacttaatggttccctccattggtggagtacgcaggaagtatggcggaactacaacacggcatggagtcagaaagggggatgttgtcaaagctgaaatggcgggtcgggtctctgtcggctgggtcagtggtgacactcaaagacagatttccgtgtctgatagcaattggaaacgcttagggcagtttacggcatctaaagtgttgttgattgcccgaaatactgggttggtggtttcgggggcatcgttggcgcagcctgcgcggagcgcataccccactcaaccaccgctcctatccctccccatgcctaaaggcaggggtatctcggaggaagtttga

SEQ ID NO: 1492 - DNA, 227 bp, Leptolyngbya sp. IPPAS B-1204
  source 1..227: mol_type = other DNA
gtcaggaaccccatagctagaagctaggggcttgtccaaaccaatttgggcaacgcaagttctgactagcccgtagagccttcacctggtacagacttccgaatacttccctagttcggatttactctaagcctgattggttcagacgttggttaatgccaagacatcctggttgaggtgggcgaagggacttaaacaaagcaatttgggttataccaatcatgcga

SEQ ID NO: 1493 - DNA, 1140 bp, unidentified
  misc_feature 1..1140: note = Ga0114918_10006480 JGI
  source 1..1140: mol_type = other DNA
atgccttgtagttcaagaaaagctagactgctacttaaaaatggtaaagctaaggtagcccgtaggtgtccttttactattaagatactatatggctccagtggctataagcaggaagtaagagcttctttaattccaagtagttctaaagtaggtatagcttgttcttcaaatgggacttgtctatactcttctgaagtagagttaagacatgatatttcaaagaaaatgaaaagaagatcttcttacagaagaactcgtagaaatagaaaaactcgttatagagaatgcagattcctaaatagaaaatcagatagaaagtttactccaactatgatgtctaaatttgaaagtcatgcaagagaaattcaaagattatctaagctacttcctattagtaattggatagttgttaaaaattctgttaagaaagattatcaaggacctaaagatttagagtggttaaatctacaaaggcaaacttttgaaagagatagatttaaatgtacttattgtaaaggtaaatctaaatgttatgaactacatgctcaccacctaatatttaggagtgaagggggagaagatgttttagacaatcttattactctatgtaaaaaatgtcatgtatcttatcataaaggagagatagagcttaaaaagattaaaagtaaaggaaaaattgatactgagtcagccatcattagaaagaacttaaaaattcatgataatatccaagaaatctatggttttgaagttaaagctaagagaaaactattaaacttaaagcctacacctattaacaatgcttgtagtattttagaaatattatcagataatagttattatattaaaaatgtttctaaaggagattatcaaatgacaaaaggtgttagaagccagatgataattcctaaaggtaaaatatttggatttaataagtttgacaaagttaaattcaaaaataatatttacttcattaaaggtagaatgagtactggttattttatagggatggatattttaggaaataccttaaaaggtaaaactctaaaagctaaagaatgcaaactaatttcaaggagatcttcatgccttataacagagacggtagaagaaaatacatgttacaatgccatctaa

SEQ ID NO: 1494 - DNA, 304 bp, unidentified
  misc_feature 1..304: note = Ga0114918_10006480 JGI
  source 1..304: mol_type = other DNA
gtgaatcacccatagtgccttcgacaactatgggcttctttgtgaggaggagttaaactgttcaccagactctgattagagaaatctaatctacgttattttagttagtacacctaagaataccgcctcagttcttagctctgtagaggctctgtaaacagggactaaagttccagtcaacttcaggacagccagacatttctggtaagctattataacattgttgagaggaagttaggattctttaattggtaatagattaaagatactcaatactcaggaataggagatatacttaatgtta

SEQ ID NO: 1495 - DNA, 1299 bp, unidentified
  misc_feature 1..1299: note = GENOME_ACESSION: mgm4799983.3 MG-RAST
  source 1..1299: mol_type = other DNA
atgaacagagtttttgtattaagtaaaacaggtaagacgttgatgccctgccatccggcaagggcaagacagctattgcatagcaaaaaagcaagagttaaacgtctttatccttttactatacagttaactcagcgttcaaaaggatatatacagcctgttgaactcaagttcgatccgggttcaaaacaaacaggtgtagggctggttttacatgggaaaaacaggctgtctgccatatatgccgcagtgttaacgcatcggggacaggaaataaaaaacaatttagactctcggcgtatgataagaagagccagaagaaaccgtaaaacccgctatagacaggcacggttctttaatcgtgtaagaagtaagcataaaggatggttggctccatccgtccagagccgtgtagataatatagtagaatggtctaagcgtttcatacgattggctcctgttggttttatcactgttgaatcagttaagtttgatatgcagaagatggaaaacgctgcagttcaaggagtggagtaccagcgtggcacgctgtttgattatgaagtaaaagaatatttgcttgagaaataccattatagctgcgtctattgtggaacaaagaatgtgccatttgaaaaagagcatgttatcccacgtagccgtggcgggagtaacagaataagtaatctggtgttatcctgtcatgattgtaatcagaaaaaagataacttgccaatagaagtgtttttaaaggataacccggcgttattgaaaaagataaaagcacaattaaaaagttcgttaaaagatgctgcagcggtaaacataacccgtaaacaaatcgtaaaagaactgtctgatttaaatgtgcctgttctgacaggaacgggagcggaaacgaaatacaacagagtaagtcagggatatgaaaaggagcattatatagatgcgttgtgtgcaggcacaacgggagcgaagatatatatccctaaaaagttaaagccgttgttgataaaaaaggaaagaagaaataacaggcagatgtgtctggtggataaatatggctttcctagaggaaaagcgaaaggatctaagatagtgcatggatttaaaacaggtgatatagtgaaagcagttgtgttgaagggaaagaaaaaaggtgtatataaaggaaaagtagcggtaaggtcaagtggaagcttcaacataaacgtaaaacaaggaagagtagaaggaataggctggaagaactgcgtaatgctttaccgtttcgatgggtatagctatactacctattag

SEQ ID NO: 1496 - DNA, 337 bp, unidentified
  misc_feature 1..337: note = GENOME_ACESSION: mgm4799983.3 MG-RAST
  source 1..337: mol_type = other DNA
gtcagtaaccccgccctgtcggacgaggcttgtaactgaaaacagccttatcgttttcctaaacaagtctccgacttggattaactgaccagccttagtctgtgaaacgctgagttttacagactacgttaaaaaacagatgacaccgtagaatgcttctccagttctatgcaatgtcgtaatacattaaacatttctttggggtaaggaaaagtgtgtgctacatgaaatgttttttaactttggcgaggagatattactttatgaaaaacgccgtttttcataaaagataaaaggtaacttattaaaaaataataaaaggaaagtaatgaacaga

SEQ ID NO: 1497 - DNA, 921 bp, unidentified
  misc_feature 1..921: note = Ga0307376_10007847 JGI
  source 1..921: mol_type = other DNA
atggtgtatgtattggacaagcgcaagagacccatgaacccttgcaccgagaaacgggctcgcctactcttggaacgcggccgggcggtggttcacaagatggcgccgttcacgatccggttaaaggacgtggtggccgccgacctgcccggatttacgctgaaactggaccccggttccaaagtaaccgggggagccgcaatccgggacggaaaagaagtcgttggatgttacgagtgtcaccaccgaactgacatcaaagacaagatggacgcccggcgggggcaacgccggagccgccgggcacggaagacacgttataggaaaccctgttggggcaaccggcacccggagaagtgcgccgcctgcggtgggaacgcgaaacacggcagccggtactgccgtccctgcgccgcggtaaggcacttcgttgacaacggctgccgggagacctggctgccgccgtcgctccgtgcccgcgtggaagaaaccctattctgggtggaaaagatgcgccggcttctgccgatcaccgggattgcaatggaactggtccggttcgacacccagttgatggagaaccccgacatctccggggttgagtaccagcagggcactctgaccggctacgaggtccgggagtatctcctggagaagctcggtcatcggtgtgcctactgtcggggtacctcgggggatccggttcttaacgtggagcacgtggtaccacggaacccggctcaaggaccgaaaggcacggatcgggtttcgaatctggttatcgcctgcaagacgtgcaatgacgcgaaggacaacctgcagccggaagaatggttgaaacagttgcaggcttccggaaagaagattgatcaggtacgggcggagaacctgcccaatgttctaaagcaacttaagcaaccc

SEQ ID NO: 1498 - DNA, 350 bp, unidentified
  misc_feature 1..350: note = Ga0307376_10007847 JGI
  source 1..350: mol_type = other DNA
gtcatagacccacgcctaaaggcgggggcttgcggaggaaactccaaaagtccacgtcttaaggcgagaaagcggtatgaagttaccttcgggtacaaccatatcgcgctatgacccacccaagcccgccgggacatccaggcgagcgggctacgttatcttggtcatgacaccttgggatgcttctctagtcccatgccctgtcgccggtggttaaacagtaagccggggtgcagcgagcagtgctgtcggcgcaaaaagccgggataacattggttaggagagatgccggcggaagccggcgcgtcacaggctccgcaaggggtctccgaaaggggatgcacaagatg

SEQ ID NO: 1499 - DNA, 1137 bp, unidentified
  misc_feature 1..1137: note = Ga0209800_10000857 JGI
  source 1..1137: mol_type = other DNA
atggctgatgccgacaaatccggcaaatgccagaattttgctcaagcagggcagggcaaggcaaaggtgattcaaagaacaccctttgcaattcacttgctttatgagaccaccgagcatattcagccggtgaccgttgggattgatgacggagggatcaatatcgggattgcagcggtttcaaacggcaaggttttatttcaacagaaagttgttttacgttcggacgtcaagtcaaaactggatacccggaggcaataccgtaaatccagaagaaaccgcaaaacaaggtatcgaaagtcaagatttctgaacagaaagtcatccattcccacatgcaaggtgtgtggcgggaatgccccggtatctcaggtgatctgtcgatcctgcctgaacagagcggatggggttcatcaaaaatatgcgaagatcaaaaaaagtgttttccgaatcccaccatcaatcaaggcaaaaaaagatgcgattatccgggtggtcaagcagatcccactgcccatttccagaattgtgctggaagatctctatttcgatttccaggcaatggagaatccggacatttccggtgagcagtatcagcatggagatctgctttatcacaagaatttcaaacaggcgtgtctggtgcgtgacaagttcagatgccgtgtttgcggtgcgcaaacaaaactgcaatgccatcatatccgtcaaagggcaaagggcgggacagacaagctctcaaatctgatgacgctttgtgatgtctgccatgatcgacatcataaagaagggctcaaacttccgaaacaaaagagttccttctacatgtcggcagcacatgtccagcagggaaagcactatctgcaagctaagttgtcacgaatcgcgccattacggacgacattcgggtatatcaccagtcattttcggaacaatgccgggatagaaaaatcccatgtcaatgatgctgttatcattgcagataaacaggcaagtcctctggaccggcagatacagacaaaacatgtgcagtcacggaaaagaagtttgcatgaagcaactgcaagaaaaggaaggaaaaccccgaaccgaacccagaaacggaataacaaaaacgtatttaccctgaaaggtttt

SEQ ID NO: 1500 - DNA, 263 bp, unidentified
  misc_feature 1..263: note = Ga0209800_10000857 JGI
  source 1..263: mol_type = other DNA
gtcaactacccctcctgaatcaaagattcagaaggggcttgtaaaagcccaagttgactagcctcagtctctttattagggactacgttcggcaggatgtagatacctttggatgtaatcgccagtccgaagctctgtcgtggctctgtaaaagctctgtgaggaaggagcggttaaccacgttgtgaagcctgctgaacattggcgaggcgaaccttacccctctttggagggtgtgcataactgaaaggttttttatgaaa

SEQ ID NO: 1501 - DNA, 1209 bp, unidentified
  misc_feature 1..1209: note = Ga0180438_10006853 JGI
  source 1..1209: mol_type = other DNA
ttgagagtacctatctatgtgttgaacatcagggggcaacccctcatgtctaccacacaacacaacggcaagaagttgttaaaacaaggcaaggcaaaagttgttcagagatgtccttttaccattcagttgaactatgcaactggagaggcgacacaaccgattaaactgggagtggatattggatatacgaacattggatttagtgccaagaccgataagttagaagtcataagtggcacgctgaccttgcgaaataatgtttctaacaagctagaggaaagacgcaggtatcgtagcacgcgtagaggcagattagggtatcgaccaccacgatttgataacagaacacgacccgaaggatggttcgcccctagtattcagcataggcatgactcacatattcgattagttgaaacacttgaaacactgctaccgattacctacgaaaaggtagaagtggcgaatttcgatgcgcacaaaatgcagcatccagaaattacaggcgtcgcatatcagcagggcgaacttcagggctatgaagtcagagaatacctgttagacaaatggggacgaaagtgcgcctactgtggtgaaaagaacgtgccattagaagtagagcacatcattcctagaagtagaggtggaacagaccgagtatcgaatttgacgatcgcatgtaggaaatgcaatctaaagaagggagataagaccgcagaggagtttgggtatcctactatacagaagcaggcaaagcaacctctgaaagcacctgcatgtctgaataatattcgttggaaattagtagaacagttaggagcagagcatacctatggatacgtcactaagtacgaacgtaacaaattagggctggaaaagtctcatgttaatgacgcgtttgtcattgctggaggaacaactcaagagcgctgcaggtcttatgaagtgatgcaagtcaggcgcaataatcgttcgctacagacgaatcgaaagggattcaaaccctctattaggaaacagcgataccagttgcaaccccacgatgtggtaacttataatgggaaagtataccaagtcaaaggggtattcaattatggcacctgggtacgattacgtgactcacagggagcggtcgtcaacaccaacattaaaaacgtgaaactgttgaaatatggaaaaggcttagtatttaccttcaaaaacaactaa

SEQ ID NO: 1502 - DNA, 289 bp, unidentified
  misc_feature 1..289: note = Ga0180438_10006853 JGI
  source 1..289: mol_type = other DNA
gtcaatcaccccctagcaagtgagggggcttgttccgtgaggagtgagagtaattggttgattagcctaagagaggtcatggtggaaacaacatggcgacatctacgttatcaggagagttcaagaacacaccaggggatgcttctctagtcccttgctctgtaaatggtggtttaaacagagaggcaactctcagtgatcaccgtatagtactgactgataactttggcgaagagaaccaaccgactttaaagcaatttaaaggaggagataggacttgagagtacct

SEQ ID NO: 1503 - DNA, 1287 bp, unidentified
  misc_feature 1..1287: note = Ga0098074_1007018 JGI
  source 1..1287: mol_type = other DNA
atgcagtcaaacagggtctttgtggtgaatagcagtggggaaccgctgatgccgtgccatccggcacgagcgcgaaagctgctcaaggttggacgggccaagattcaccgttaccaaccgtttgcaatccagttgttggattgtgagaatcaggacgtccaaccggtagaggtcagggtcgatcctggcagcaagacgacgggcattgctctggtggcctatggcaaacgtgggggtagggtcgtgtgggcggcagagctacagcatcggggctggattatcaagagtcggcttgagaagcgtagtgctgttcgcaggggccgacgccatcgaaaatgccggtacaggcccaaacgctttgacaatcgaaaacgtaacaagtttgaccgttggttgccgcccagcttacagagcagggtggacaacattgatgtgtggataggccggctctgcaagtacgcaccgttgcgctgggcggcggtcgagacggccaagtttgatacccagaagatggaaaatcccgagatctcggggattgaataccagcggggtaccttggccggatgggacgaacgcgaatacctactggagaaatggggtcggcgttgtgtgttctgtggtgctgagaatgtgccgctccaggttgagcatttgatacccaaatcgagagcgggtacttctgagcgtacatataacaaggcgatagcttgcggtccttgcaatcaaaagaagggcaaccaaactgcggccgagttcggttttccagaactgatggacaaggccaagcagtctctaaatctaagggatgctgctcttatgaattccacacgctatgccataggcgatgcagtgaagcgacacctgcccactacgttctggacaggctcaaggaccaaaatgaaccgcataaatcagggctatcccaaagctcactggatcgacgctgcctgtgtgggagaggctggtgccgacgtgttcttgccgcaggggttacggcctcttcagataagagccgtaggtcgggggagccgacagatgtgtcgcatggatcgctatggcttcccgcgtaccggtcccaaaacggtcaaacgggtttttggtttccagacaggggatattgtcaaagccgacatcccaaagggcaagtatgctgggctacacattggccgtatatcctctgtccgtgcctctggaggttttagtttgaaatcggtaccaaaggtcaactggaaatattgccagctaatccagcgggctgatggatacgaatatggatggattgactaa

SEQ ID NO: 1504 - DNA, 353 bp, unidentified
  misc_feature 1..353: note = Ga0098074_1007018 JGI
  source 1..353: mol_type = other DNA
ggacacacccgtttcgcccttacccatgtggggcgaaccctaaccttttcgtgtgaaatggatagggtcgctacgaaaccagtcacagccaggggataatcgtcgtgattatcccaccgggctacgttaccgctgaatgtataggcaccttggggtgcttctctagccccaagctctgcggttggtagttaaacagacctgataaggagggtcggtgctgccagcgagaaaccagtggataacattgacgaggagacgggcaaatgggcatagccccgatgcctaaaccaccgaaaggtgagaacccggcgtaagccgggaaacagaaagagaagggaatgcagtcaaacagg

SEQ ID NO: 1505 - DNA, 1242 bp, unidentified
  misc_feature 1..1242: note = Draft_11733483 JGI
  source 1..1242: mol_type = other DNA
atgaaggtatatgtaatcaacaagcacgggagaccgttgatgccttgtagcccgagaaccgctcgtttacttttacgagataaggccgcgaaagtaatcaaacgagatcccttcactatcaaaattctagtcggagttaaaggctacacacaagatttaactcttgggattgatcctggttcaagatacattggttctgccgttagagatgataaaaatcaagcttattatctatcacaagtagagcagcgtactgatgttaaagcgaacatggatcaacgaagaatgtatcgacgaactagacgtaatcgtaaaactcgatatcgtaagccaagatttatgaatcgaaaagctagtactaaagacgatagatatccaccaacgctagaatctaaatatggagcaatcgtaagagagatcaatttcgtatgtaatattctcccgattaagaaattgtatatcgagattgcgaagtttgatacaagtgctcttacgaatccaaacgtacttgagtatcattggttgtatcaacgaggtccacagcttggattctacaatactaaagcgtatatactctttagagatacttatacttgtcagtattgtaagaacaagagaaaagactctcgattacatgttcatcatattcaacacaagtttcaaggcggaacggatcaaccgaataacttaatcacgctttgcaaatcctgtcatgatgatctgcacaagaaaaagattatgcttaatacaaagcatttaaacacaataaataatcttaaacatgcttcacagatgaatgttttatgtagtatgattaaaagtagatttgtttctggatcttatatcgagacgcttggtggaattgcaaaaggtgttcgagagaattttcaatatccaaaggagcattattgggacgctttctttggaagctttgaaaacggaaacactccaaaactattaatagaccgagtactgatgaagaagtgtgtcgcgaaaggatcttatcaattgactaacggtaagagatctgagaaacggttaccaactggaaagatttgtggttatcgagtctgggacaaagttttgtatcaagatcaacagtatttcgtaagaggtcgtatgtcgactggttatgctaatctttgtgacatttcgggtactcagtttaagattcgtccgatgcctaagtttaataaaatgacaagaattggagcaagagattcatggattatgaccacataa

SEQ ID NO: 1506 - DNA, 278 bp, unidentified
  misc_feature 1..278: note = Draft_11733483 JGI
  source 1..278: mol_type = other DNA
gtgaactacccattgattaaagatcgatgggctttggatcaaaccggagccggagatcaccagactaagtactaagaaattagaactacgttatttatgatgcagatacctttcggtgccgcctcagccgattgctctatcgtggctctgtaaacatcctgcggaaagggaagtcaaccacatcacgaagcatagataacattgtcgagaggaagtcgaatttactcgctggtaacaggtgggtaatacgcattactccttaaggagctcatatgaag

SEQ ID NO: 1507 - DNA, 1380 bp, unidentified
  misc_feature 1..1380: note = Ga0104854_10039936 JGI
  source 1..1380: mol_type = other DNA
atgaaccaggtatttgtgctcagtaccacgagacagccattgatgccgtgctccccagctcgtgcgcgacgattgttaaaagccaagcgagcggcggtcttccgacggcaaccttttacgattattctcaaaggtcgaatcgctggggctacccaaccagtggcttggcaaatggatccgggaagccgcacaaccggccttgcactcgtgggcgagtttcccgatcagggccgggtcgttctgtgggctggcgagctgcatcatcgaggacacctcattcgccaaaagcttctagcccgtcgggcaatgcgccggaaccgtcgatttcgcaagacccggtatcgggctccccgatttctcaatcgccggcgcgcagaagactggcttccaccctctctcaagtcgcgtgtggataatgtcgtgagttggacaagaaaaatccaacgtcttgtgccgattacctcgatcgcgatggaacttgtgcggtttgatacccaaaaactcatgaatcctgagattgagggggtggcataccaaaggggtgagctgtttggctatgaagtccgagagtatctgctcgagaagtggaaccgtacttgcgcatattgtcacaagatcaatgtgccgttggaaattgagcatttggttccgcggagtcgtggtggcagcgaccgtgtgagcaacctcacgcttgcctgcacgaaatgtaatcaacgaaagggtaatcagacggctacagagtttggctatccgcagttgatgaagcaggcccagcaaccgctaaaggatatggcggccgtaaacaatacccgctgggcgctctatcggcaactgcagtcactcggtctcccagtctcagcgtggtctggcgggcgaaccaaatacaatcgtacccaacaaggctaccccaaagcacattggattgatgcggcatgcattggagagcacatgctcctgcttgatcctaatatgagaccgctgaccatcacagctgtgggtcgtggcactcgccatgtcgttcggactaacaagttcggttttccgttagcaagggcaggtcgaattaaacgactctgtggttttcaaaccggcgatcttgtcgaactaatccagccgcgtggcaagtatgctggtcgatggtttgggcacctcaaagcgatacgtctgacagggtattgcgaactcagaacatcactgggcaaagtcggcgcgcctacatcgcgctttactattttgcaacgaatgggcggctacaaatttaccaagaaaggttccatctctagtgagctatctaagatcaatcttcttgggaataaatcagaatctatttcgataggagaatctaatggaagcaaaactctatcgatcagcgatgagtga

SEQ ID NO: 1508 - DNA, 329 bp, unidentified
  misc_feature 1..329: note = Ga0104854_10039936 JGI
  source 1..329: mol_type = other DNA
ccgtctcggtcctatctatatgtccaacgtggtagcaaaaaaggtccgagggacattgaaaataattcttgacctgtctcaaccaggctccgtccccatcaattcagcaatgcattggtgatgggactccgttctgcgcgaatacataggtaccctgggatgcttcaccagtccgcggcactacggtcagcgattaatcagcacggcgtcgggacaacgggcagtgtcgttggcaaacaaaccgcgcgagaacattgccgaggtgaccataactcccatcatgggacgtggctgtaaagccaataaagaaaggaagtcagatgaaccag

SEQ ID NO: 1509 - DNA, 1116 bp, unidentified
  misc_feature 1..1116: note = Ga0376082_0008098 JGI
  source 1..1116: mol_type = other DNA
atgcgagttccggtattatcaccaagaggaaaacctctgatgccagctaagcccagcagggtgaggcgctggctaaaagaagggttcgctaaagttgtcaagaacaaactcaaaatctttcaagttcagttagtagaagaaccatctgggacagaagttcaaggctgcgtagccggaaccgatcctgggaagctgtacaccggacttgcggtacagaccgcaaaagacacgctttggctagggcacattgtcctcccctatgcagtcatccgcaaacgattagatcaacggcgaatgatgcgtagggggcgaaggggtcgccgaattgatcgcaaactaccttatgcccagcgtaatcacagacaaaaacgattcaataaccgccggagcaaaaaactgcctccgtcgatccgagcaagtcggcagttagagattagcttgataaagacgctatgctctatctacccaataaactgcatagtctgggaaaaggttgtagctaaggggtcttcatgcttctctcccgtaatgcaagcgcagtactgggcaatcaatatcctagaaaaaagctgcggatgcgaggttcagcagctagaaggctgggaaacctctaacctccgacaatatctgggcttgcacaagcaaaagcatcaaaaaggagacgctataccagaaacccatgctgtcgatgctgttgctcttgcctccagttgttttgtttggtacaagcaacacaaaggtaaagcaggctggtgggaaggttcggtcaaagttacgcccgctccttttgttgtcattcgccgtccaccgattagccgtagacagctccacctaatgcttccctcaaaaggtggggtgcggcgcaagtatggtggaaccgtaactcgtcatggatttcgcaagggggattatgtttgcgctgaacaagcaggacgcatctactacggctgggtgtcaggcgacaccgccaagcaagtttcagttagcgattctagctggaatcggctagggcaattttctgttaaaaaagtccgtctgttgcagcgaagcacggggttaatcgtcgtgccttcagccggattgtcaaatctccccctattgaaggggtcgatttga

SEQ ID NO: 1510 - DNA, 247 bp, unidentified
  misc_feature 1..247: note = Ga0376082_0008098 JGI
  source 1..247: mol_type = other DNA
ttcaactaccctaggctgctacgctcaagctgagggattgcccggagcaggacgggtgacgcaagtgttgaatacgaccgctgagactagcctcggtaagcacttctaggatacttctctagtccggattatctgcaaaaccgcttgttacggtttcatctaaaaggtggacatcctaggttagttggtcaaagagacgttctgtaaggaacacatactctgaaaggagaattatcttaaaatgcga

SEQ ID NO: 1511 - DNA, 2460 bp, unidentified
  misc_feature 1..2460: note = Ga0373620_0000796 JGI
  source 1..2460: mol_type = other DNA
atgaagcagaagttaaaacagagaactaaaaagaacacacctacggatgctccacaagtccgtagcaactgtggtctgtcattaaacaaagaggaaactcttagtgtgtcaggctcaaaaacctgttttaacaatcccgaagtggatttatctcaacatacagagaggcttaaagccattgtgtatgtaattagtattgaaggacgcactttaatgccatgcactccagcaaaagcgaaaaaattacttaacggtaatcgcgctaaggttattaaattgtatccattcactattaaattaaattttgagtgcgagaatcaggcgcaagaaatcagacttggagttgattccggatttaacaatgttggaatgtcagccattacctcaacgaaagaagtattgtctcaaacaattacgcttgacagcaaaacatcaagtaggctgaccgaaagaagaatgtatcgcaggttaaagagaaacaaattatggtatcgaaaatcaagatttttgaatcgagggaatcaaaaagaaggttggcttccaccatcaattcaaaggagatatgacgctcatttgacgctaatcaagaatgcaaaatcaattctgccaatttcaaaagtcacaatcgaaactggcaattttgacatcgctaaaattataaatccagacattaatggcattggttatcagcaaggagatttgtatggctaccaaaatatgagagcatatctgatggcgcgagaacatggtttatgccagttgtgccacaaagaatttacaaaaggaaatccatcgcatattcatcactgcaaagagcgtcacgaacagggctctgaccgttcagaaaacttggcgataattcataagaagtgtcacaagaaattgcataataatggattaaaattatttactccaaaagagtataaagcaaatacatttatgtccatcatccaacataaattcaaacaagatattccagatgtaaatatcacctttggatacaaaactttcgttgaaagacaaaaactgggattagaaaaatcccacgccactgatgcgtttgttattgctggcggagcaacacaagagcgatacgggtcaattacaattcaacaaaagcatagaaataacagggcgattcaattaaacagaaaaggattttcgccttcaatccgaaagcaacgatatgctattcagccaaaagatttgatttggattaacggaaaaatattttcagttggcgggatgcaagacaaaggcacacgagttaaaattgaagattcaaaaaaggtttattctataaaaagtgtcgaaaaaatgtatcactttggtggattttttttacaactaaaaaaaatgaaacagaaaaaaataatgccttatacctctcaactaaatctaacaggttttacaggaaaatctcacaacaagcggtggaagcaggatgagattgatttcatccagcacaatataaataagccagtagattggctatcgtcccagcttaataggtctgagggttctatcaacacaatgatttggaaattaaaaaaggaatccgagactcagactacggttgcattacctcacgcatcatcagcaggacaacgattcgacataaaaaataatagcgacaagcccattaaaataatctcatcatcacctattgtattagagcctaacgaatccactaccatttccggctctacacctcactggcagaaccaagtagagaaggcaaggcaaatactggtagtcgaaggaatggctgagagtcaagctgacaccgagatgtcatacgtttattccatcttccacgaaaatccaactctcaaaaattgtcatcaagactcgatagtttccgcaatcattgacataggcagaaccaagagcacaattaatccagctttaaaacttgcataccttaaagccaaagacggcaaatgcgtattcgagctcacctatcgcggattaatcaagtccttgacagatagcggtagtataaaagttatggacgctcatatagtttatgaagatgactatgagttcgagtatcttccagccgagaataaaattacccataagccaaaagttgctaagaccgaagctgaaaataatgcacgccaaattgccggagcttattctgtcgccatactgaatgacggaacaaagcattatcacttcatggagatatggaagctcgcgaaaatagaacaaatgagtaccggaggcgagagcgactatttctataccgaatggaaaacagatatgtacaagaagtgtgcaatcagaagtcattataaattcctgccaaaaggaactacgctaccggaatacatccaacgagcaattatgattgatgatgaaaattcaagcatcatgatgagtagcagtaaattcggtgcgggcaaaaaaagaggtggaatgatggaatttttcaataatccaaaaattgactga

SEQ ID NO: 1512 - DNA, 263 bp, unidentified
  misc_feature 1..263: note = Ga0373620_0000796 JGI
  source 1..263: mol_type = other DNA
gtcaatcacccaatccaaaagaaagggcttgagccgtgaggtttaagggtaacaggttgattagggagcgtaaattggaaacaatgaagcagaagttaaaacagagaactaaaaagaacacacctacggatgctccacaagtccgtagcaactgtggtctgtcattaaacaaagaggaaactcttagtgtgtcaggctcaaaaacctgttttaacaatcccgaagtggatttatctcaacatacagagaggcttaaagccatt

SEQ ID NO: 1513 - DNA, 1290 bp, unidentified
  misc_feature 1..1290: note = Ga0180008_1007149 JGI
  source 1..1290: mol_type = other DNA
atgagctacgtatttgttttagacacgaacaagcaaccactcaacccggttcatccaggttgggcaagaaagctattatcatcaggacgtgcggcagtatataagagatatccatttaccattatcttgaaggctgccatcccttcagcggaaatacaaccattaagattaaagattgaccccggcagtaagacaacgggacttgctattgtcaatgacgtttcaggggatgtactgtttgccgctgaacttaaccatagggggcagcagataaagaagtcaatggatagcagaagggctattcggagaggcagaaggaataggaaaacgagataccgcaaaccacgtttcaataaccgcaggaggcaagaaggatggttgccaccatcgcttcgtagtagagtagagaacattgagacgtgggtagcccggctacaaaagttatgtatgattacagcgattagccttgaattggttaagtttgatatgcaagcaatggagaatcctgagataatcggtgttgaatatcaacagggagaacttcaagggtatgaggttagagaatatctccttgagaagttcaatcgtaaatgcgtctactgcggcgttgagaatgtaccattacaggtagaacatattgtaccaagagcaagaggtgggagcaatagagttagtaatttaactcttgcttgcgaaccatgtaataaaaagaagggtaaccaaacagcaaaagagtttgggtatcccaaagtacaatcccttgctaagaaaccattgaaggacgctgctgctgttaatgctacccggtgggcattatatcgtcggacggaagcaacgggattgcctatagaagtaagtactggtggtagaacgaagtacaatcgtagtataagaaagctacctaagacacactggcttgatgcgacttgtgtaggagcgtcaacgccagaagtcttggatgtcgaagggatacgtcctttggatattactgccactgggcgtggttcaagacagatgtgccgtgtagataagtacggtttcccgcgcacatcggctaagaagttcaaacgtgttcatggttttcaaacaggcgatatggttaaagctgttgtaccaactgggaagaatacagggacgtatatcggacgtatagctattcgggcttccggcagttttaacattaagacaccaaatagtaccatccaaggcattagctatcggtactgccaacttgtgcagcgacttgatggttatacttacgagagggagacggcattcctccccgcctga

SEQ ID NO: 1514 - DNA, 255 bp, unidentified
  misc_feature 1..255: note = Ga0180008_1007149 JGI
  source 1..255: mol_type = other DNA
gtcaactacccctcctaattctccgaatcagaaggggcttgcgaaagcgagcttcaaggttgaccagctatagttctttgagaactacgttaggaacgaatgtataggtactgtcgtggtgcttcaccagcccgacgctctacggtatgttgttaaacagctaaagagggataagcagtgcagcatacaaaaaaccgttccgcaacattagcgaggtgactattactcttactcttcggagtaaggaggtgtctt

SEQ ID NO: 1515 - DNA, 1296 bp, unidentified
  misc_feature 1..1296: note = Human gut metagenome
  source 1..1296: mol_type = other DNA
atggtatatgtacttaacaaaaacggacaaccacttatgccaacaaacagacacggaaaggtaagaaggcttttaaagataaacaaagccaaggttattaagcgttgtccatttacgatacagttgttgtataatacaacaaattgcatacaaaatattacattaggtgtagatgccggttctaagcatattggattatctgcaactacaaaagataaagtattgtttgaagctgatgtagaacttcgtaacgatataacaaaattacttgaggcacgaagaaaatttcgtcactcaaggcgaaatcgtaaaacccgttacagaaaaagacgatttaacaatcgagtatccagcaaacataaaggttggttggctccaagtattgagcataaaattcagactcattttgcaatggtagaaaaagtacacaagatgttgcctattacaaaaattgtagtagaaacagcatcgtttgatatgaaattgcttaaagctcaactggaaggtgaacccattccaaaagggacggattaccagaaaggtgagcttacaggttggaatatcagggaatatattttccaccgagataattacacctgtcaatggtgtaaaggtaaatcgaaagatttaattcttgtaacacaccaccatgcctactggaaaggcgaccatacaaacaaaccctcaagtctgattacactttgtaacacttgcaatgatagtaaatatcacaaaaaagaagctaataggctttggggttgggagccaaaaataacaaactcttataaacacgcggcctttatgaatgttatgagatgggtattttataatcggctaaaggaaatttatgcaaatgtttctatgacttatggttatattacgaaaaacactcgtataaaaaacaatctaccaaagacacattatttagatgcacgttgtattagtggaaatccaaaggctaagagtagtggagagtatttttactataaaaaggtcagatgtcataatcgtcagctatataaagctaatacgttaaaaggtggcatccgaaaacgtaatcaagctgagtatacagtcaaaggttttaaactctttgatagagtagaatatcagaatcacgaatattttatatttggtagaagggcatcaggtttctttgatattagaaatttaaatggccaaaaggttaacaaaggctctgtcagttttaagaaattaaaattaaaagaaacaaacaaaacttatttaattgaaaggtgtacggtggatacaagagatgatttagctcctctatga

SEQ ID NO: 1516 - DNA, 282 bp, unidentified
  misc_feature 1..282: note = Human gut metagenome
  source 1..282: mol_type = other DNA
gtatagtcaataacccacgactaaagccgcaggcttgcaaaagcttttattgactagcctaagtgtttcaaacactacgttaaaagagaatatatagttaccaaagggtgttatacctagccttttgctctaaggtcggtggttaaacagttctgatgggtaggaacagtgttgccgatataaaacctcttattaacataggcgaaggtatcttacagtttgatatgtactggcttatagcatacaacatatcactattaaagaaaaggagtgtttgttatg

SEQ ID NO: 1517 - DNA, 699 bp, unidentified
  misc_feature 1..699: note = Ga0268283_1011674 JGI
  source 1..699: mol_type = other DNA
atgccatgttcaccaagaacagctcgattacttctacgcgataaatgtgctaaagtaatctcacgagatccatttacaattaaattattaataggagttccaggttatacacaaccattagtgttaggtattgatcctggatcaaaatatataggttcagcagttcgaaccaagaaaaaccaagcaatttatttatcagagattcatcaacgtacagatgttactgataagatgaagcaaagaaagatgtatagaagaactagacgcggaagaaaaactcgatatcgaaaaccaagatttcttaatcgaaagaatagcacaaagactaatcgttatccaccaacacttgaaaacaagtttcacactattcagaaagaagttgagtttgtaactaagatacttccaatcaccaaaatgtacatcgagatgggaaagtttgacatgcacgcaatgatgaacccagctgtattaaatcatcactggatgtatcaacaaggtaacgaatttggtttctacaacaccaaagcttatgttttgaatcgagatgattatacatgtcagtgttgtaagggaaagagaaaagaccctcatttacattgtcaccacataatctatcgaagaaatggtggtagtgatagagctgataacttgttagttgtttgtgaaacttgtcacgatgatattcacgctaacaagatt

SEQ ID NO: 1518 - DNA, 278 bp, unidentified
  misc_feature 1..278: note = Ga0268283_1011674 JGI
  source 1..278: mol_type = other DNA
gtggactacccaggaggcgttagctcccggacttcagagtaatctgaagcctaagatcaccagactcagtatctagaaacggatactacgatatctatgatgtagatacctgcgagtgccgcctcagctcgctgctctatcgtggctttgtaaacatcctgaggaaacggaagtcaaaccactttacgaagcatagatatcattgtcgagaggaagttggaaagtctactggtaataggtagacgctacacattactctgaaaggagacataaatttg

SEQ ID NO: 1519 - DNA, 1257 bp, uncultured Methanobrevibacter sp.
  source 1..1257: mol_type = other DNA
atgttcgtttatgtactaaacatgcatggtgaaccgttaatgccatgtaaaccaagaaaagcaagaaaattactgaaagaaaagaaagcaaaagtggtgaacaggacaccatttaccatacaattgttgtatggatcttctggttataaacaaacggttaatctgggtgttgatgccggaagcaaatacattggattatcagcaaccaccaataaaaaagaattatttaaagcaacagttgaattaagacaagacatacctaaattgttagaaagtagaaaaactcagcgcaagaatcgcaggagcaaattacgttatcgtccggcacggtttaataatcgtggtaaaaaaggaaaactggcacccagtattcagcataaaattgacagccatttaacaataattaaacgtatttgcaatataattcccatagaaaacatcattgttgaaactgctgaatttgacatgcataaactaaagaacccaagtgtatctggtgcggattatcagcatggcgatgcagaaggtttttataatgttaaatcagctgttttaagccgtgacaattacacctgccaaatatgcggagcaaaaaataccaaactgcaagttcatcatatcagattcagaagtgatggcggttccaatcgcatggacaatctagtaacattatgcaaagaatgccatgataaagtacatacaggcgaattgaaatatacaaaaaaagtcaaatcattcaaacattccagtcatatgaacatcatgagaaaaaaattaatacaatctttaaaaaaagaattcagaaatgtttttgagactttcggttatttaaccaagtatactcgtgaaaaattgggccttgttaagtctcattgcaatgatgcttttgtaattagtcacaatttggatgccgaacaatcgaatgttgaatattcatataagaaagttagacgacataatcgccaaatacataaattcaaacctagtaaaggtggaaaacgtcaacgcaatcagtcaccatatattgtaaatggttttagaagatatgataaagtaatgtacaacggtaagggatgttttataacaagtaagcgtagcagcggttattttcagttaaaaacatttgatggaactgtaattagccaaggagtaagtagtaagcggttgaaattattagaacctattaaaggttggttaatagattggaggttggcaattcctccccgacctaaagaggtcggggtatccttgccataa

SEQ ID NO: 1520 - DNA, 272 bp, uncultured Methanobrevibacter sp.
  source 1..272: mol_type = other DNA
gttgattaaactaccacggcttgtagaagccgtggatttctagagtcttttctaggaatccactagtttaatagactcagaccattaattggtctacgttactcaagaatattaggtaccgtggaatgtttaatcccagttccacgctctacggtaagtgattaaacaggttctgagatggtaggaacagtgttgcttacaattttaaaccttgggataacattgtcgagggataaaataactcaggaataggaggtaaacgtttaatgttc

SEQ ID NO: 1521 - DNA, 1026 bp, unidentified
  misc_feature 1..1026: note = Ga0401685_0570 JGI
  source 1..1026: mol_type = other DNA
ttgaaagttccagttttagaccgcaataaaaagccgttaatgccttgctcacctaaaagagcgagaaaattgatggaaagaggtgaagccaaaccttactggtctcgcggagttttctgcattattttgcaaaaagagccgagcggtcgagccaagcaaaaaatcgtagtaggcgtggatagcggttccaaaatggaaggctataccgttaagtccaagaaggacacgtttttgaacatccaatcagaagcggtcacttgggtaaagcgaaaggttaaaactaggcgagaagctaggcgaactcggagaactcgaaacaatccatatcgggctaataaatccaaccgggcttgcctgagaaaaaaccgaataccgccggcaacaaaggctcgttggggtttgaaactgcgagtgttaaattggctaagcaaactttatccgatttcgcacgtcgttgttgaggatgtgaaagcggtaacaaagtctggcaaacgtgcgtggaataaaagttttagtccgctacaagcaggcaaggcttggttttaccaacaaataaaaaatacgaaactcaaatcaaaactcaagctgaaactcgttagcggattttacacgtcgaagttgagaactcggtacggtctgcacaaaagcaaaagcaaaatggatgtgaactttaatacgcattgcgtagactcttgggttatggcagacaattgctttaaaggcagacgggttgttgacaatagcagagttctgtttattcagccgttaaactttgctcgcagacaactgcataagttcaatgctaaaaagggtgtgcgggctaattacggaggaacgcgaagtttggggctgaaccgaggagcgttagtcaaacatgtaaaacacggcttatgtttagttggcggaacctcaaaggggaaaatttcgctacacgcagccgacacttacgaaagattgtaccgaaatgcaaatacggctgactgcgaactgcgaacaaactttcgctgggcggtccagtgggcttga

SEQ ID NO: 1522 - DNA, 224 bp, unidentified
  misc_feature 1..224: note = Ga0401685_0570 JGI
  source 1..224: mol_type = other DNA
gccaatgggcttgtgaaagaagaaaccaacttctgaagcaattaaaaagtacgactaccctacggcactcgcagaaatgcgagaggccaaacttagcagcagcggcgtggtagccgcaagagtacggtaaaaatgttctgctagtttttaccctctacggctgaaagtggggaagcagtattaaaacttggcgggtaaccgctaaaacaaaagggagaagtgag

SEQ ID NO: 1523 - DNA, 495 bp, unidentified
  misc_feature 1..495: note = Ga0400245_005261 JGI
  source 1..495: mol_type = other DNA
atgtcggtcttcgtgttggatagacgcaagcacccccttatgccgtgcaccgaaaggcgtgcgcggcttttgctcggccgtggtcgggctgtggtggtgcgtgcgtatccgtttacgatccggctgaaagactgtgccggtggcatcacacagccggtccgtatcaagatcgattccggcagcaaaaccaccgggatcgcgatggttcgagaaaacggccagaagcaacacgttctggccttggcgatcaaagccaccgggcgcggccgctataagcgcacacgcttaacaaagcacggtttccctcgtagctatctgatgcgccagaagaaagttcaagggtttcagaccggtgacatggtgcgagccagatgccgacaggcacgaaagccgacatctggccgggccgggtcgccgttcgcaagaccggcagcttcaacatccagacaccgggcggcgccatacaaggcatcttatatcggtatttcacattaa

SEQ ID NO: 1524 - DNA, 295 bp, unidentified
  misc_feature 1..295: note = Ga0400245_005261 JGI
  source 1..295: mol_type = other DNA
gtcaactaccccgccctgaaggacggggcttgtagaaaacaccctgcaagccaggttgaccagggaaagcggacaccaacccgcaccgtttatcacaggtcgctaagactcaacgccgaacgcttcctcagttcggcgctctgaaaggctgggatcacgctggcgaaaggcaaagcaccgaaggttccggtcaccacgcaagtaggagccggtgatagacattcccgagggaagagaggcttcggcctccgtcacaaggcccgtaagggcattcattgaaaggaaaacgatgtcg

SEQ ID NO: 1525 - DNA, 411 bp, unidentified
  misc_feature 1..411: note = Ga0394872_0000490 JGI
  source 1..411: mol_type = other DNA
atgttaagagtacccgtattagacaaaaacaaccgacctttaatgccgactcttgccagtcgcgctagacgttggctcaaagaaggcaaagccatcggcaagttcaacaaattaggacaattttatgttcaactccaagaacatcctagtaacaacaaaactcaaccaatcgctattggtattgatcccggtaaactgttctcagggattggggttcaatcagctcttcataccttagcaggtattacttacacaggctggtgttctggagatactgcattccaagtatctgtttccgattttaattggaaacggctgggacaatttactgcctcaaaagtggagttgctccaacgctccacaggactaatttgtaaacaggaaacagtattcgttggagcaactggttaa

SEQ ID NO: 1526 - DNA, 219 bp, unidentified
  misc_feature 1..219: note = Ga0394872_0000490 JGI
  source 1..219: mol_type = other DNA
aacgttaattgaaagccattgaaattcatttcaaggcggtttatctggttggtgcaagatctcagtattagcctaatcttggaacaaacctccagatacttctctagtctggaatcactttaagttcttttgggagaacgttgtcagacaagacatcttagattaggtgggcgaagagactaaaactatttactcgataggattatatctatgttaaga

SEQ ID NO: 1527 - DNA, 1233 bp, unidentified
  misc_feature 1..1233: note = Human gut metagenome
  source 1..1233: mol_type = other DNA
ttgagagtatttgttttgaacaaacgcggaaagccgctgatgccttgttctccggcaaaagcgcgccttctgcttaaagagaagaaagctattgtggtaaggcgcacgcctttcaccattcagctcacgattgcgaccggcgagtccaaacagccggtgagtctgggtgttgatgccgggtacaaacatgtcggactttccgcatcaactgaaaaggctgaactttatgcatccgaagtcgaactgcggaaggacatcaccgatctgctctctgctcgtcgtgcgttacggcaatcccgccgtaaccgcaaaacgcgctaccgcgcaccgaggttcgacaaccgcatccgcaccaagcgcaaaggctggcttgcaccgtcggttgaaaaccgaatcaacgcgcatttgtcgcgcatagaagcggttctccgactgctgccgatcacgaagattaccgtggaaacggcgtccttcgacatgcagcggctgaagaatcccgacatttcaggaaaagagtaccaagaaggtgaacagctcggcttttggaacgtccgcgagtatgttctttttagagatgggcacgtctgtcggcattgtcacggcagatcgaaagacccggtgcttaatgttcatcacttggagagcagacgtaccggcagcgattcgcccgacaacctgattacgctttgtgagacgtgccataaggcgcttcaccgcggcgaaatcacgctgaaggccaagcgaggacaatcgttccgggcgcaagctttcatgggaattatgcgccgggaggttttgaaccgcctaaaggcgtcgtatcctgagctgaaggtgcacgaaacctacggctacttaaccaagcacgcgcggattgcgaacggcattgtcaagtcacatggtgcagatgctttctgtattgccggcaaccttggagccgaaagctcggcgaattcttcttccagaagcagactcgccgaaacaaccggcagattcacaaactttccatcctcaaagggggcattcgaaagcgcaatcaggcaccctttgaggccaaaggcttccgtctttttgataaggttgcctgccagggagaagaaggcttcattttcggccgtcgatcatccgggtcttttgatgtacgaaagctcgacggcacccgcatttcagccggcatcagctgcaagaagctgcgtctgctggaaaagagacgaacctatttaacagaaattcgaa

SEQ ID NO: 1528 - DNA, 247 bp, unidentified
  misc_feature 1..247: note = Human gut metagenome
  source 1..247: mol_type = other DNA
gtcaactacctcggcctaaaggccggggcttgaaatagcctctagttgactagcctcaggccgtcatttggcggactacgttggttgagaatatataggcaccgcgggatgtagatactagtcccgcgctctgcggccgatggttaaaagctctgagaggtaggagcggtgctgtcggcttgaaaccccctccaacattggcgaaggatcacaaccggtcgaaagaccgaggagacaaaacttgaga

SEQ ID NO: 1529 - DNA, 1338 bp, unidentified
  misc_feature 1..1338: note = LHMISPF_alex1_c86 JGI
  source 1..1338: mol_type = other DNA
atgagcaaaatattcgttgtagacaccaacaaaaatcctctaaatcctatccatccaggccgagccaggatgctgcttcaagagggcaaagccgctgtctggaaacgttacccgttcaccatcatcctgaaagatgttctaccaaatccccaaattgcacccttgcgattaaaaatagatccaggcgctaaatttactggcttagcactggtagatgatgcaacaggagaagtagcttgggccgccgaactagaacatagaggctttcaaattcgcgatgctttaaccaaacgccgccagttaagaagaggaagacgccatcgaaaaactcggtatcgtcaaccacgctttgataaccggaaacgccctacagggtggctcccacccagtctgcaaagccgagttgagaatatcgtaacttgggttcgtaggttacaaaagctagctttgatttctgatatttctcaggaattagtcaagtttgatactcaactcatggagaatccagacatcagtggattcgcataccaacaaggtgagttagctggttacgaagtgcgagaatttctgcttttcaaattcaatcatacctgtatgtactgtggggctaaagatactcgtttggagattgagcatcttttacccaagtctaaaggtggttcaaatagaattagtaatttaggcattgcttgtaggaattgcaaccaaaaaaaaggccgtcaagctctcagagaatttttagcccaaaaacctgacttgttacagcgcattctgagacaagtaaaacaacagaaagccgacactgctgccgttaattctacccgttgggcattatttaatcgactcaaagagactggattatccgtggaagttgggactggtgggcggacaaagtttaaccgatgtcgtcaaaacctacctaaaactcactggctggatgctgcctgtgttggggcatctacacccctcaaactaaaagtttcaggggtagtgccgctgtcaataagggctgttggttatggaaatcgtcaaatgtgtcaagttgacaaatttggctttcctaagcgtggtaaggaaggtaagctaatcaaacgtgagcgacagaaaaattactttggttttcaaacgggcgacatggttaaagctattgttcctactgggaaacacgctggtactcacgttggtaaagtcaccgtcagaaaatccggtgcatttgatttgactgtggctcatgtgcgcttgcagagtattcgttggaagcactgccgcgcggttcaccgctttgatggttacagttatgcctctttgtccaccaatgtcgagtttttaaacgattag

SEQ ID NO: 1530 - DNA, 249 bp, unidentified
  misc_feature 1..249: note = LHMISPF_alex1_c86 JGI
  source 1..249: mol_type = other DNA
gctatccgcgaaccactggacaaacctggacaatcccgataaatccttggtagagatagcccggttaagtctaaccacagactacgttaagaaggtcacgacaccctgtgagtgcttgccagctccttgctctgtcgctaccagttaaacatctttatttcgctaaggaagtgctgctagcatgacaagccctcttaacattaccaaggcaaaagtcacccgattattcggaggctcaatatgagcaaa

SEQ ID NO: 1531 - DNA, 1350 bp, unidentified
  misc_feature 1..1350: note = Ga0172362_10014068 | JGI
  source 1..1350: mol_type = other DNA
atgcagaagttagaaaaaagagatacatacacacctacgaatacttctctagttcgtagcaactgtgattctgtgattaaacatggtcaattcgaccaagtgttgcagaatttaaaaactttttctaacaactccgaagagaaccaacagtctggcaagactgaacaggacttgcgagttcctgttttaaacatgcgtggacatcctttgatgcctacaaatccaagaaaagcaagaaagttgttagaacaaaacaaagctaaagtagtaacaataaaaccatttacgatacaactaaattatgctacaggagaaacaaaacagaatattatattaggcattgatgcaggatacaaaaaagttggtttttctgcaagaaccagcaaaaaggaacttatatctggagaagttgaattgagaacagatatacctaaaaaactacaagaaagggcaatgtatcgcagaaaccgaaaaaatcgtctttggtataggcaactacgatttaacaatcgtggacgaaacaacggatggcttgcaccaagtatacaacataagcttgatagtcatcttagaattgttgaaaaaattaaacaacttcttcctatcacacagattgtagtggaagttgcaagttttgatatacagaaaatcaaaaacccagaaacgcaaggtgagcaatatcaacagggtgaacaacttggtttctggaatgttcgtgaatatgttcttcatcgggataaccatttgtgtcagcattgtcatggtaaaaagaatgaccccttgttgcatgtgcatcatatcaacggtaaaaaagaaggtgctacagaccgtccagaagaacttttaacagtatgcaagacctgtcatgatgagcatcataaaggcattgatattatccctaaaaagataatcaagaatttcaagcctgaaacttttatgacaaccgttagatggaaaatagtcaacgctctaggttgtgagcatacttatgggcatatcacaaaaaacaacagaattaaagcaggtttgcctaaatcacatatcaatgatgcttttgttattgctggtgggactgaccagcaacgttgtaaaccgattgtttcaaaacagataaggcgtaacaatcgttcaatacagattaatcgtaagggattcaagccatctattcgcagacagaaatacaaacttcaaccaaacgatatagtcaaatatttggggaaggaatgcaaggtaaaagccatattcaacaaaggtaattggattaggattgttgatggtattgaaactattattaattcgaacattaaaaatgtagagttgttatattatggaaaaggaatatttaattag

SEQ ID NO: 1532 - DNA, 256 bp, unidentified
  misc_feature 1..256: note = Ga0172362_10014068 | JGI
  source 1..256: mol_type = other DNA
gtcaactaccacccactgaagtaggtggcttgtcccgtaagggatgacgtaagagttgattaggaggcatagaaaaatatgcagaagttagaaaaaagagatacatacacacctacgaatacttctctagttcgtagcaactgtgattctgtgattaaacatggtcaattcgaccaagtgttgcagaatttaaaaactttttctaacaactccgaagagaaccaacagtctggcaagactgaacaggacttgcgag

SEQ ID NO: 1533 - DNA, 828 bp, unidentified
  misc_feature 1..828: note = Ga0134404_104661 JGI
  misc_feature 385..394: note = MISC_FEATURE - Any "n" represents any nucleotide
  source 1..828: mol_type = other DNA
atgagcacttgcgcttgtgttctcagtaagaatggcgaacgcctgatgccgactatccgtcttggcaaggtacgccatcttctgaaagacggaaaagcaaaaatcattaagcatcatccatttactattcagttactgtatgacagcgaaacgaatattcaacccattgaaatctgtgaggacgtcggttacaactacatcggcatcagtgtgaaaagccaatctcacgagtatgtatctgcacagtatgatacattgcaagacgagaaaagctgtcacgatgcttgccgtagaatgcgccgaactcgcagaaacaggctacgttaccgccaaaagcgctttgacaaccgcaaacgtgacaaaggctggcttgcaccctctcttnnnnnnnnnngcgaagttgtgcctattacgcatgcaaccgttgaagttggttctttcgacacaatgcttgtaaaagcaatcgaggaaggtaaagctacaccagaaggcgcagattatcaaaaaggccctcgctacaatttagcaaccttgcgggaagcagtattctaccgtgataactacacctgccaagtttgtgggcgcgaagccagtgaaggtgcaattttgcacgtgcatcacatgttttattggaaaggtcgccatgacaatagtctcagcgagcttataacagtatgcgagaagtgccatacaccagctaaccatcaaaaaggcggcaagctctatggattcggtgaagatataaagtttgccaacctttctggtgcagcatttatgaacactgtacgctggcaaatcgttaatgaactttacgctgcttttggaaag

SEQ ID NO: 1534 - DNA, 326 bp, unidentified
  misc_feature 1..326: note = Ga0134404_104661 JGI
  source 1..326: mol_type = other DNA
gtcaacaaccccgccttaaccagtccgctggttatagatggggcttgcagggcaacccgtaagcccggttgattagcctaagtctgctgctccagcggcaggaaactacgttgtgtactaataatataggcaccttactcatgctccacaagtggtaagcactgcggacggctcgttaaacatctctaagggtaggagaagtgcgaacgtcatgtcgaaaggctaaaacggtataacaacattggcgatgtggaccacagggcgcaagccctgacttatcgatttacaactattatacgaaaggagtaccttgcatgagcacttgc

SEQ ID NO: 1535 - DNA, 669 bp, unidentified
  misc_feature 1..669: note = Ga0123338_10030355 JGI
  source 1..669: mol_type = other DNA
gtgatcctcaaaggacaaatcgaacatagaaacgatgttaaaaaactgatgacgctaaggcgtggcaataggtcttataaaaggtatcacaaaaggtatagaatttgcaggtttgacaatcgcgcatcgtctaaaagaaaaggaaggattgccccaagcattaaacagaaaaaagattcggttcttagggcaatcaatcagttgagtaaacggattagaattaaagaattttggttagaagatgtcatgatagatattcgtgcatcaacagacggatatgaatcgtattcgtggcaatatcaaaaatccaacagacttgatgagaacttacgaaaagcggttatccttagggataaactcaagtgcgcagagtgcggaaagacaaacaccgttttagaggttcatcatataaaggctaaaagatgtaatggctcaaacaccttgggcaatttaatcgcattatgttctagttgtcatcaagaaacagcaggcagagaaaaagagtttgaggaaaaatactttaagctgatcaatggcaaaaatgtaaggcttgacgatgcacaacatgttatgcaggggaaaagctatctcagacatcaattatcaatgctggggcaattaagcattacaaatggtggcgatactgcaaacaagcgaatagattggagt

SEQ ID NO: 1536 - DNA, 499 bp, unidentified
  misc_feature 1..499: note = Ga0123338_10030355 JGI
  source 1..499: mol_type = other DNA
tagaaaaatatgtacaatagtggacacataggcctattgcacgtagactgttgagcaggtctcaagtcttagtgactgctacagtcgaaagatgtgttgcagatatgaactacgttggatagtaaggtaaagacacacctttggatgtaatcgtcagtctaaagctctgtgagtgccaaccaagaaactgcgctaatgccatgcgtagataacagggaaacacaagtcctctatctgacattgacaagacgaaaaatactccgaaaagatggcttatcagaaatgatactagagaaagaatattcattcgtcatagtcagcgaagggaaaaagttaactcctaccccaataaacaacgcatggtttttgatcagaaaaggcaaggctaaattagtgagcaaatatccaatggcaattcagttgttaagatccattgaaaaagaggatgttgacaagtcagctattttgtgtggaattgacgatgggtctaaacacgttg

SEQ ID NO: 1537 - DNA, 567 bp, unidentified
  misc_feature 1..567: note = GENOME_ACESSION: mgm4743570.3 MG-RAST
  source 1..567: mol_type = other DNA
atgacacgaagagcaaaatatcgcaggaacagaagaaatcgtaaaactcgctacagaaaggaaagatggttaaatcgtgccaactctattaaaaatggcaggtttagtcctacgatgcggagtaaacttcacagccatataaaagaaatagagtatattaaatctattcttccaattacagaaatggtatttgaggcaggtcagtttgacactcaccttatgaaaaatccaagccttgctaatctcaaagttaaacattggggctatcaaaaaggtgctaattacggatttgagaatactaaggcaatagttcttaatcgagataactatacttgtcaatactgtaaaggcaaacataaagacagtaagttagaagtacatcatattgtatttcgcagtcagggcggttctgatgaagaaggcaatctaattactttatgtcatacttgccataaaaacttgcatagtggaaaaattaacctcaaattgagtggcaaaattaagggaacccttaaatatgctacgcagatgaactctattcgtaagcaactttttagactatatcca

SEQ ID NO: 1538 - DNA, 312 bp, unidentified
  misc_feature 1..312: note = GENOME_ACESSION: mgm4743570.3 MG-RAST
  source 1..312: mol_type = other DNA
gtgaactacccaccacctaaaggcagtgggcttctgttaaatggttcaccagactaagttgttagaaatagcaactacgatatttaggtcaagatacccttggttgacgcaacagaccatcgctctatcgtacatatttaagttaggtcagagtaagaacagccttgtgatatgtgcttaaaaagcctttatatcattgtcgagttgaagtcggaacaactgcatggtaacagtgtagcaaagtacgcacaaccattgcataagtaatggcattatgtgattaagttcacaggaaaggagcacctgttatgg

SEQ ID NO: 1539 - DNA, 1065 bp, unidentified
  misc_feature 1..1065: note = Ga0114919_10008950 JGI
  source 1..1065: mol_type = other DNA
atgcaaatgcaacaacagaagttattgagaagaaatacatacacaccattgaatgcttcacaagttcaatgcaactgtgatttggcattaaacaaagaggaaactcttagtgtgtcaaatttaaaaactctcaataacaatcccgaagtgaatctaccgcagaatacagcgggtcttaaagacatttatgtattcattaaatcaattgacggtaaagctttaatgccgtgtaaaccagcgaaagccaaacatttattaaaagaaggaaatgctaaagtaattaaacgtgccccatttaccattcaattaacgtttgaatgtaaaaataaaatacaagacattacgttaggaattgattccggatatcaaaatattggattttcagcagtttcgaatttgaaagaattaatatctggaacagttaaacttgataacaaaacaaaagaaagactcgacacaaaaagaatgtatagaagaaataaaagaaataagttgtggtatagacaatccagatttttgaatcgttttatacctgaaggatggttaccaccatctatagagcgtagatataaaactcatttaaatttaattgaacgtttaaaaaacattttacctattaataaagtaataattgaagtaggtaagttcgatattcaaaaacttgagaatccagatattaaaggcgttagttatcaacaaggagaaatgtaccaatatcgaaatagaattggatatttactttcaagagaacatggagtatgtcaatattgtaaaaaacaaggtgggggaaactggcgattacatcatattttgggcaaagaaaaagatagacctaaggattgggctttattacatgaaaaatgtcatcaactcttacatattaaaaaacaagaaaacattttaagaaaacaaaaatctaaaagttataaagactcaacatttatgaacataatacgtaaaaaattcaaacaagatataaagtgtgaattaacttatggttattatacttttcaaaatagatgtaatttaaatttagacaaaagtcatgttaatgatgcatttgtt

SEQ ID NO: 1540 - DNA, 264 bp, unidentified
  misc_feature 1..264: note = Ga0114919_10008950 JGI
  source 1..264: mol_type = other DNA
gtcaactaccactgagctaaagactcagtggcttgcaatgtgaattgcaacgcaagagttgattagggagttgaaaaatgcaaatgcaacaacagaagttattgagaagaaatacatacacaccattgaatgcttcacaagttcaatgcaactgtgatttggcattaaacaaagaggaaactcttagtgtgtcaaatttaaaaactctcaataacaatcccgaagtgaatctaccgcagaatacagcgggtcttaaagacattt

SEQ ID NO: 1541 - DNA, 1287 bp, unidentified
  misc_feature 1..1287: note = Bioreactor metagenome
  source 1..1287: mol_type = other DNA
atgcaaagagttttagttttaagccaagataaaaagccattaatgccttgcttacctgcccgagctagaaaacttttaaataaatgcaaggcaaaagtatatcgttattatccattttgtattatattgcaacatcgtatagatggcgatatacaaccaatatcattgaaattcgatccgggtagtaagacaacaggagttgccctcgttggcttattcccaaaagggaatatctgtttatggggagctaatctaacacatcgtggctacgcaatcacaaaatctttgttatccagaaaagcaattcgtcgtggccgcagaaatcgaaacactagatatcgcccgccacgttttttgaatcgaaatattcctaaaggttggcttccgccatcgttacgttctcgaatttttaatatttatacgtggtgcaaaaagctcaagcaatttgcaccaatccaacaaatcgaaatagagagcgtcaaatttgatacccaaaaactgcagaatgctgaaatatctggtatagagtaccaacaaggtactctgcaaggatacgaaattcgcgagtatttgctagaaaaattcgggcatcagtgtgtatattgtggcaagtctgatgtaccattagaaatagaacatgtagtatgtcgtcataatggtggcagtgatcggattagcaacttagttatatcatgccgtatgtgtaacgaaaagaaaggtactcaagacatcagaatatttttaaaaaccaagcccgctctattgcaaaagatacaaagccaattacaagtcgcactcaaagacacagccgcagtaaatgccactcgatatgcaattttagacgcactgcaacaatttcaactaccaattcaatatggcactggtggccaaactaaatataatcgcacgacacaaggctatgcgaaagatcattggattgacgcggcgtgtgttggcgtaagtggttttaaagtaaaaattccccctaaaatgcacatattaaatatcaaggcagtaggacgcggtactcgccagatgtgtttaacagataagtacggtttcccgcgaacaggcccgaagcaaaagaaacggatatacggctttcaaactggggatatagtatatgctaaagtaccaaagggcaaaaaagccggggaatatataggccgagttgctattcgtagcaaagggtattttgatattcggacacacactgctctcataagtagcatttcatatcgttattttattctcctccaacgaagcgatgggtatcaatatgattag

SEQ ID NO: 1542 - DNA, 331 bp, unidentified
  misc_feature 1..331: note = Bioreactor metagenome
  source 1..331: mol_type = other DNA
ctctacaagcccacctcaaaaaggcgaagtttgttagagaaatctggcgaatttcacgttgaccacgcctaagcctcaggtaacgaaagaggctacgttacgcacgaatccaagtaattggtgtaataggcacgtcaggatgcttcacttggtacgctaagtgctttactccagtcctgacctctgcggcaatccattaaacaggtgtaagtggtttaggccagtgtggattgcaaaaaccgtgtttcaagtaacattggcaaggagagcttaacctgcgcaagcagagttggtacgtaagtaccttcctgaaagggattttatgcaaaga

SEQ ID NO: 1543 - DNA, 897 bp, unidentified
  misc_feature 1..897: note = Ga0070707_100019090 JGI
  source 1..897: mol_type = other DNA
atgatgtttgtctatgttcgcaatcaggacagcacaccgatgatgccttgcacgccagcgaaagcccgcaagctcttgcaggcaggcaaggcgaaggtgatgaatcgctgtcccttcacgattcaactcacctggctgtgtgagggacacgttcaagagatcacactcggcatcgataagggcagttctatcacaggactttgctgtgttggcaataggaacgtcctgttctcagcagagatccaccatcgccgagatgtcaaagacaaaatggatgaccgccgtgatcggcgcaagagtcgtcgagggcgcaagtggtaccgccctgcgcgattcaagaatcgcgcatcaagcaggcggagtgggcgattgcctccctcgatcaaaacgaatgtcgaggaggtcattcgggtagtgaagcagatcccgttgccgatttcttcgctggtcatcgaggacgttcaggtagaccttgctcgcttgaatgaccccacgcttcaaggcagtcgataccaagatcccacgcgactcgatgagaatctgcgcatggcctgtttgatgcgcgacggctacgcctgccagtactgcggcaagcaaaaggttcggttagaagctcatcatctggtgtacagggaacaaggcggaaaagatacgctgacgaacttgctcaccctgtgccaagcatgtcataaaaaggttcaccaggggaaaatccggcttgagggagtgggagtcagtggacacctggaccagattgcgcagcgcacgatgcagggcaaaagctacttgtatgcgacgctgggcgcacatacccccttgagcacgctctttggataccagacggccaccctgcgccaaaccagagggtggccgaaaacgcacctcgccgatgccctc

SEQ ID NO: 1544 - DNA, 239 bp, unidentified
  misc_feature 1..239: note = Ga0070707_100019090 JGI
  source 1..239: mol_type = other DNA
gaaaatagttcctaaaaaggagagcgtttgagagcgctggactcatggagctaccagcgggccagcaatggcagcagttccttgagagatcacaccttccgatgttcgctccagtcggaagctctgtgggcagatattaagggtaagcgaaagccgaaggtgtatctgctgggaaaacctcctggaacagtcgcgaggagcaatttactccgcagggagggcctaaagccatgatgttt

SEQ ID NO: 1545 - DNA, 1248 bp, unidentified
  misc_feature 1..1248: note = Ga0187899_10002485 JGI
  source 1..1248: mol_type = other DNA
atgacgacctttgtcatctcggcagagggcgaaaagctgatgccgacgacaaacatcaggaagataagaaagctcctccgctccggaagagcaaagatcgtgaagaacgcgccgttcaccgtacagcttctgtacgagagcggaaacgctgtgcagcctatcgaatttacagaggataccggctatcagtatatcggagcctctctcaagtcggagaaacacgaatacgtaagcgccgagtatacgcttcttaaaaacgagaagcagcatcacgatgaccagcgccgcgaggtgagacgtcctcggcgaaacagaaagcgctatcgcaaggcgcgctttgataacaggagaagacctgaaagctggctcgcgccgtcgctcagaaacaaggcggaccgccacgttgacatcttcaggatgtattatgcggtatgcccaataatgagcgtctcgctggagatgggccagttcgatccggcggtccttgacgctatcgagcaggggaagcctgtacctgagggagctgattaccagtatggccctcgctacggctatgacacactgagagaagcagtcttcacaagagacggctacagatgcctttgctgcggtaagtcggctatagacgacggagtcatacttcgcatacatcacgtaggcttccgcacgggcgacagatccaacaggcttagcaatctcgcatcagtatgcgagaagtgccacagtccgaagaaccataagccgggcggaaagctctgggatctgaagccgcctaaaggtacggcatccgcagcgtatatgaacaccgtaaagtggcatattctcgaagagataaaggccttcggtatagagacccatatcacctacggtgccgtgacgaagcgcacgagacttgatctcaatatcggaaagtctcacgcaaacgatgcctattgtatcggcaatatgagaccgaaacaccgcacaaggacgcagtgcgttgagaagcgccgccgcaacaaccgcatacttgagaagttctacgatgcgaagtatgtggatgtacgtgacgacaaagcgaagaaggcggcggagctcggatgtaaccgcacgtcgagatccataccgcgaaacaaccctcagaacgagcgcaccttccgcgggaagaagatatccaaaggcaggcgcagtatccgcatgcagagatatttgtatcagccaggcgatattgtcatcttcggtggagagaagcgcatggtcaagggcact

SEQ ID NO: 1546 - DNA, 348 bp, unidentified
  misc_feature 1..348: note = Ga0187899_10002485 JGI
  source 1..348: mol_type = other DNA
atcaaccacccaccgcttaggctaacgccttgaagcgggggcttgtgaaaacacaagtcagttgattagcctaagtgcttcgagcactacgttatccgcgaatggctgcgaccaaataggtacgtcaggatactccacaagttctgacctctacggatatgcgttaaacatcggtgagggtagccgaagtgcgtatatcatcaaaccgcggaataacattggcgatgtggacaccgccctacggggcgaggatccgcatacacgcctctacggaaaaacggtatgcggaagccgtaaggcaaagtacgttagagcaaaagtaagaagagaaaggaggagcgtatgacg

SEQ ID NO: 1547 - DNA, 1038 bp, unidentified
  misc_feature 1..1038: note = Ga0394882_0012572 JGI
  source 1..1038: mol_type = other DNA
atgattaaaaaaccaaactatgtgttagttttagatgctaacaaaaacccattaattccgtgtaaaccatcgctagctaaaaaattattaaaagctcaaaaagctgccgtttaccgaagatttccttttacgcttattctgaaaaaagaatgtactgtaaatcagcaaaaactagaatctcgtcgtcagtatcgtcgcttaagacgaagtagattgaggtatagaaaaccaagatttgacaatcgccaaagagctaaagattggttagctcctagtttagagcatagggttttaactacgatgaccattgtgagacgactaattaaattcgctcatattagttcgatcgttatggagttggtaaagtttgatacccaaaagctagaaaaaccagaaattttaggaattgaatatcaacaaggagaattattaggctatgaaattagagaatatctattagaaaaatgggagagaaaatgtacttattgttctcaaaaggatattcctttgcaaatagagcatattgttccaaagtcgagaaacggttcaaacagacttagtaatttatgcctagcttgcgaaaaatgcaatcgaagaaaaggagttaaatcgatcgagcaatttttagccaaaaaccctagcttacttaagtctattttagttcaagctaaaaaaccattacacgatgctgctgcgattaatgccactagatggaaattgtttaatactctgaaagaaactggtttaacaattttaactggaacgggaggacaaactaaatttaatcgttctcagtttggtttagaaaaaaaccatttttatgatgctgcttgtgttggaaaaatggataaattagaaatttttgccaaccaacctttgattattatttgcaaaggacaagggggaagacagaaagcagcattaaataaatacggatatcccattagatacaacatctttggacaaaaagcaaaaagcattcacgtcaataaattaagacgagtccatcaaaaggatggatatagttatgcacaataa

SEQ ID NO: 1548 - DNA, 267 bp, unidentified
  misc_feature 1..267: note = Ga0394882_0012572 JGI
  source 1..267: mol_type = other DNA
ctaaaaaacctatacaaacctaattaaggttggtattttgttggaggttgcagactaagttatcacgtaaggtaactacgatagtcaagtcatgatacctacaaatgaacgccagtttgtagctctatcgctagaaattaaggaacgggtcaaaaggtttatatccaagcgtgtttctagcttaaaaagcttgcattatcattgtcgaggctaacttaacctattaactaggaactaatcaaaaccatgattaaaaaaccaaactat

SEQ ID NO: 1549 - DNA, 861 bp, unidentified
  misc_feature 1..861: note = Human gut metagenome
  source 1..861: mol_type = other DNA
atgtatgtattcgtcatagggctggatggaacaaggcttatgccttgtaaaccaaggaaagcccggaaattaatagaagctcacaaagctgaaatctataagaagcagccatttacaataagattgttgtataagacaggctgtgctacacaacccgtaacaataggtatagatacaggttcccagcatatcggaattgcggtaacatcaggaaacaaagtcttgtaccaggcagagatagaattgcgcagcactatggacaagcgttcgctcatggaaactagacgcagttaccgcagaagcagaagataccgcaaaaccaggtacagaagtcctaaattcagatttcatacaaaacggacatactctgaaacacttgttaaacgtaagactacaggtgttatgacccactgggttaaacatactaactcaatgagtacaaacagaccggacggatggcttgcaccatccatgcagtcgaaagcagatcatcatatccgatggattaacagatttttagatgtacttccaccagatacgaaacttcggttggaaattgccagattcgatatagcaaggatgaaaaatccggaagtgcatagtgaattataccagtatggtccacagtatgattacgaaaatttaaaggcttatgtatttgacagagaccattacaaatgtgtggtctgtaagaggaaattggggagtaaacagccggatggacattctttaaaaggaatgatgcatcacataacattccggtctaaaggagctacggacaatcctgatcagcttgttacagtctgcgaatactgccatactcctcaggcgcataaaaaaggcggagtactctgggatctg

SEQ ID NO: 1550 - DNA, 224 bp, unidentified
  misc_feature 1..224: note = Human gut metagenome
  source 1..224: mol_type = other DNA
ttaaataatcgagcatggttaaatgattgtcgcccgtaagggcaggatgactagcctaagttccaagagaactacatcagaagtacaatcccagttccagacagtaccctaatctgagcgctgggcgggcaacatatgaatccaggagaaagaatgatgtggcccggtgttacaagtactctgatattggcgaagggtaattgctgactttggccagcatagac

SEQ ID NO: 1551 - DNA, 1509 bp, unidentified
  misc_feature 1..1509: note = Human gut metagenome
  source 1..1509: mol_type = other DNA
gtggggacgacgacctggtgctccaagcgcaccggacacaggcgaggggcgaactaccccgtaaggggtcccggggcttttcagtccccgggaaaggaggaaataatgaaggtttttgtcattggcatgactgggaaaaggctctgcccaacttccccgtctaaagctaaaaaactgctgaaaacagggaaagcacatgtttacaggcgtgtgccgttcacgatccggcttgattataagaccggaggctccgcaccgccgctgaaactggggatcgatacaggggagcagcatatcggtacagcagtatgtaacgatgccacagtcttctgtaaatcagaaattgaacttataaaatccatggaaaagaagaaaaggctggaaaaacgcaaaatataccgcaggtcccgcaggtacaggaagacccggtacaggcatccgaaattccgtttccggacaaagcggatttatgtggaaggcgggtacaggaaacggaaaggcgggaagatggtgctccggcattggaagaaagtcccaaacacggtcatgacgaaccggcatgaaggatggctcccgccgtctatcgagtccaaggtaaagcaccatatcgactggatcaaccggtatatggatgtgctccctgacgggaccatgctcggcatagaagtagcccggttcgatattgccaggatgaaagacccgtctatccgcggagaactttaccagttcgggcggatgtatggccgggaaaatacgaaggcgtatgtactggcaaagtttgattatacctgcccgatctgtaaaaagaagtttgacagggacaggaagccgcgtatgcaccatgtcaccatgcggaagaacgcagccactgacaacccggatgagtatgcaccagtatgtgtgctctgccattccggggaggagcatctgccagggggtgtgctggataagctggcaaaggaatgcagacgcagggaataccgtgaacctacgttcatgaacatccttcgccgccggctgtttgagacttacccggaagcggaattcacatacgggaatatcacaaatgctgaccggaagatgctggggctggaaaaaacccacgcgaatgatgcggtctccattgccatgcatggggcgaaaaaagtaatagactgcgaagatacggtctattaccgccaggttcacaggaagaaacggtcccttcataaagcaaccccgcgcaaagggaagaaagagccgaaccataccgcaaagcggaacgtgaagaacgtcccttatgtaggcaagttccacatcaatgataaagtgaaaggtccagacggaaatatcggattcataaccggtttgacaggaagtgcggcctatatcacggatttcatcggggaatacatctatccggaagggaaggattacaaacaacatacgctttccagcctgcggtacgtccatcattgtgggaattggatcaccagctccgtatcaggtgcggctgtatctcacgactaa

SEQ ID NO: 1552 - DNA, 337 bp, unidentified
  misc_feature 1..337: note = Human gut metagenome
  source 1..337: mol_type = other DNA
gtcaataactcatgactgaagtcacgagcttggaacagcttccaaggcttcctgttagccgtacatgaaacggcagttgactagccttgtccttttccctgcaccgcagggggaagggcagtcctgatgcgttaataccgccgcagacagaaaaagccctgcaaagggcggctcccatctgcagcgcggttcaggcaacggatggtcccttgagtggggacgacgacctggtgctccaagcgcaccggacacaggcgaggggcgaactaccccgtaaggggtcccggggcttttcagtccccgggaaaggaggaaataatgaaggtttttgtcattg

SEQ ID NO: 1553 - DNA, 1353 bp, unidentified
  misc_feature 1..1353: note = Bacillus sp. FJAT-29814
  source 1..1353: mol_type = other DNA
atggtctttgtgttaaatgcgaataaacaaccgttaaacccttgccatcctgcaaaggcaagaaggttactcaagaaagggaaagccgtagttcataagaagtttccgtttactattcgattaaaggataggaaagatatttctttgaatcaacaaacctatcgaatcaaaatggatgttggttccaaaataacaggaatcagcatcatgaagaagaatgaagtggtgttcttagcggaactccaccacaaaacagacatcaaacaaaagttagaagcccgtcgttcttatagaaaatcaagacggaatcgtaagacccgttaccgtcaagctagatttttgaaccgtaaacggtccgaagggtggttgcccccttccctacagtcgagggtggacaatgtaatttcatggactaatcggttgaaaaaactaattcctttgacagatatcagcttagaattagtcaaatttgatactcaaaggatgatgaaccctgaaatcagcgggcttgagtatcaaaaagggaccttacaaggatacgaagtccgagaatatcttttagagaagttcggttggcaatgtgcttattgcggaaccaaagatgctccattggaaattgaacacgtttatccgaaatcaaggggaggttccgatcgagtcagcaacttgactcttgcctgtcgagagtttaacgaggaaaaagataccttaaccttggatgaatgggcaatccaattaatcaagaaaaaggataagcggagcaaacgaattttatccagttttgaccctatcaaaaaacagttacagaaacctttgaaagatactgcagttgtcaattcaacccgttggaaactttatcaaatgcttttgaccactgatttaaaggtggagtgtggaaccggggcaagaacaaaaatgcaacggatacaacatgaatttcctaaggaacattactacgatgcggtttgtatcggagagtctactccttccaccccaatacactttaaaactaactatgtgttacaaatcaaagccaaaggacgaggctcaaggtatcgatcgggaacagataaatacggttttcctatccgtcagttaccgagagtcaaaatgatccatggctttatgtcgggagatatggtcaaagcgattgtgcagagaggtaaatatctgggaacttggttcgggcaaattgctatgcgttccagtggttatgtggatatcaaagatatgaccggaaagcgaatagcacaagggattcaggtaaaatgctgtcagcttgtacagcgttttgatggatattgctattttataaacaaacgaaaggagtcggcaattccgcaccatgtgtga

SEQ ID NO: 1554 - DNA, 287 bp, unidentified
  misc_feature 1..287: note = Bacillus sp. FJAT-29814
  source 1..287: mol_type = other DNA
gtcaactacccacgccccaaaaaagcgggggcttgtgaaagtaagcccgcagttgtccagtttcagtttcttttaggaaactacgttggtttggtcatcatacccaaggatacttccctagtccttggctctatggaatctcattaaaagcaagcaagggtgttagcgagcggtgtgggattcacgacaagcctgtccaaccctaacgaagggaacagccttacggttgtgttacccgtgcaaacggagaaagattcacaatctttaaaaaggagccgagtcggatg

SEQ ID NO: 1555 - DNA, 1386 bp, unidentified
  misc_feature 1..1386: note = GENOME_ACESSION: mgm4773634.3 MG-RAST
  source 1..1386: mol_type = other DNA
atggttgctgtattatcaagtaccggtatccgtctgatgccgacatccaactacaaagcacggaagcttcttgcaagcggccgtgcagtcaaagagaaatacaacccaatcttcacgattcggcttttagatcggagtaacggagaaatacagccaattgaatacgattctgacacaggagctatccatgtagggatctcgatcaaatcacaaaatcacgaatatgtgagcgaacagagagatctcctctctgatgaaacagagcggcatgatatgcggagaaaataccgcagacagcgaaggagccggttgcggtaccggaagcccaggtttgataaccggagagcctccaaaaaagaaggttggctccctccaggcatccagaaccgtatggaccagcaagtccagatttttgagaaatacgctgaaacgttccctgttacacaggcaaccttcgagatgggatccttcgacacccagcttttacaggcggtcgaatccgagaaaccggagccgaaaaggacagattatcagcaaggcccaagataccggacagaaaccctgcgacaggcagtatttttacgtgacggatatcagtgctgcttctgcggacgtggtatcaaagaccacgcaaagctccatatccaccatctggggttccggaatggagatcatacgaaccggatgagcaatctggcaacagtttgcgaaaaatgccatacgccgaagaaccataaactgggtggcatcctttatgatgcgaaacccaagctgaaaccatttaagggggcggcgtttatgacagcggtacgatggaagatgtgggacatgctaagaacatccagaaccgacatagagttccatatcacttacggaaccaggacaaaactgacccgccagaagctgcatctggagaaatcccacgcaaacgatgcgtatgctatcgggaacttccatccgaagcaccggacacaaacggtttatctgcagaaacgccgcaggaataaccggtgtctggagaagttttacgatgcaaaatacatagacagccgtaccggcaaaaaggtcggtggacaggaactgttttccggaaggtcaaggcggaaccgggacctctccggagagaacctacatcgttaccggggaaggaagatctctgcagggaggcgggtaatccggaccagacattatctaatccagccaggaaccattctgaaatttgatagaaagcggtatctggtcaaaggggttcattgtaatggaacccgtgtaatcctggagaataagaaatcggtatcagttaaaaaagtaacaattattaaatacaacggtgggtggattcccgtcgagaaagggaaacgggagagtttatcagggggcgactga

SEQ ID NO: 1556 - DNA, 370 bp, unidentified
  misc_feature 1..370: note = GENOME_ACESSION: mgm4773634.3 MG-RAST
  source 1..370: mol_type = other DNA
gtcaactactcggtcattgaataaccgagcatgcaaaagcaagatcttgcgtgttcgattattcttggttgcctgtttcgacaggcggttgattagccttagctgtccggtacgggaaaccgacgaggcggctacgttgtccgggaagatacaggcacctggggattcttcccacgtccccagctctgcggccgtgtattaaacatccctgagagtaagggaagtgtgtacggtacttataaccccggccaacattggcgatgggaaccacccgaacccaggtgtttttgcctggaagtaggagatacccgttcagattcatcagtaacgggaaggcgtaagccatcaatggaaaggaggcaccggaatg

SEQ ID NO: 1557 - DNA, 1500 bp, unidentified
  misc_feature 1..1500: note = Human gut metagenome
  source 1..1500: mol_type = other DNA
atgacaggcagctataccaattttaccgtcttatttccttgtcgaatagttgacgtaccccaccgaatgacaggcagctataccaggctacgggaggaaaagaaaatggcagtatgtgttttaagtgcaaacggtgaacggctgatgccaaccgaaaattacggcaaagtgcgccatctgctgaaggagggccgcgctgtgattgcaaagcgaaacccgttcaccatccagctgacctacgagaccagtacctatactcagtccatcgaaatgtgcgtcggcaccggatatgagcatatcggcgtcagcattaagacaaaggcaaaagaggtcgtatcgcagcaatatgatttgctcacgaacgagcgctcccgccatgacgactgccgagtgcaccgccggacgcgcagaaaccacctgcggtatcgggctgcacggttcaataaccgtgtatccatcagaaagcccggttggattgctccgtccctggataataaggtggagcggcacctggatattatctcccgctatctgtctgtcatgcctgtcacggatgtctttatcaaggccgcaacatacgatacacagctccttgcggcgctggaggcaggggagcctgtcccgcagggcaaggactatcagcatgggccgcagtacggccacgatacgctgcgggaagcggtctttgaacgagaccactatacctgtgtgtattgcaagagaggcctgaaagacggcgctatccttcatgtccatcatgcctactactggaagggtctgcatgggaacagcatgagggaacttgcgacctgctgcgagaagtgcaacacacctgccaatcacaaggagggcggaaagctgtggggcttcgataagcctctgcggaaatataccggcgaagcgtttatgaatagcgtgcgctggattctctaccagcgtgcgatggctcacttccagggcgctgcggacatacacatgacctacggcgttatctccaagcgtgttcgcaccgacctcggcctcccgtattcctgcgctacggatgcctactgcatgggcgagctgcgtccagaagccagatgcgaaacagaggtcttccagaaatacaggcgaaacaacagagtcctatccaaattctatgacgccaaatactacgacacacgggaaaagggagttatccgctctggcaacgagctgtcctccggtaggacgaatcgcaatcataaccttgacggtgaaaatctgcgccggttccgtggctgcaagaagtcgaagggccggacctcgaccagaaagcagagatatgccttgcagccaggagatgtcgtggtctttggcaatcgcaaatacgtttccaagggctgctccagctatggcagggaattaaagctactcacggatggaaagccgcttgtggtcagcacgaagaaaatccagcttgtcagtcacaagggcggctgggtgcggcttccccaggcggcagccggggcaaaagaataa

SEQ ID NO: 1558 - DNA, 313 bp, unidentified
  misc_feature 1..313: note = Human gut metagenome
  source 1..313: mol_type = other DNA
gtgcgtaccatcaaacccagtgtatctttggcgatgtggaccacagtaacgccgtgcaagcggtaagtgctgatttaccaaatttttggtttttcttgaagcctgtatcgaagactaccaacctacattgagttgatacccccgccaagtagctataccctatggcgaatacagcaatcaactctcgattgttgacgtaccccaccaaatgacaggcagctataccaattttaccgtcttatttccttgtcgaatagttgacgtaccccaccgaatgacaggcagctataccaggctacgggaggaaaagaaa

SEQ ID NO: 1559 - DNA, 1080 bp, unidentified
  misc_feature 1..1080: note = JGI1357J11328_10012623 JGI
  source 1..1080: mol_type = other DNA
atgttgaccagggtaagcaggattagggcaggcaacccgcttgagtcttgctccgttgcggatagtgccaaagaccgacggcagagtgcttctccagccctgccctctcgaactcacgccagcagacacgccgggtcaggcacgaaacggggcgcgagagacgaccggtccgcaacattcccgaggagagccttcgagacggatgccaatctcgacgcgtcacggcccaagggtacgaccgaaggccgtctcgtcgcgaggggtaacccccgcgttttcgttctcgaccggcatggacgcccactcatgtcgtgccgattctgccgggcaaaggaattgctcgataagggtcaggccgttgtctacagtatccgccctttcacgattcgtctcgttgaccgtgtgggtggcgcggtccaaccggtccgcgccaagatcgatcccggctcgaagatgaccggcatcgctgttgttcgcgatgttgagcacgttgatgcaacgacaggtgaagtcacccgcgaagccgtggtgctgcacctgcttgagttagagcatcgcggcgcgacgattcgaaggcgccttcagcagcgtcgcggattccgtcgccgtcgccggtcggcgaatctccgatctcgcgccccgcggttcgacaaccgaacaagacccgatggctggctcgccccgagcctacaacaccgggtcgtcacaacaatgacgtgggtctcgcgcctgagacgagcgtgtcccatttccgctctctcggttgagagggtacgcttcgacactcacgctctcctcaacccggaaatcgatggcgttcaataccagcgcgggacgttgttcggcacggaaattcgtgagtatctgctcgcgaagtggagccacgcctgcgcgtattgtgacaaggcaggcgtgcccctgaacacagatcacctcgttgctcaggcgcggggtggctcggatcgggtgagcaatctcgtgatgtcctgcatcgactgcaacacacgaaaggccgatcggctgatcgaggagtttctcgcgcatgaccctgagagactcgcgagcattctcgcgcaggca

SEQ ID NO: 1560 - DNA, 327 bp, unidentified; identical to SEQ ID NO: 389
  misc_feature 1..327: note = JGI1357J11328_10012623 JGI
  source 1..327: mol_type = other DNA

SEQ ID NO: 1561 - DNA, 1329 bp, unidentified
  misc_feature 1..1329: note = Ga0099364_10003009 JGI
  source 1..1329: mol_type = other DNA
atggtatatgtaataagcaaacagggaaggccgcttatgccaaccgaaaggcacggcaaggtaaaacatttgctccgccaaggcagggcgaaggtactgacgacaaaacccttcaccatacagctgctttacgactccgcagagcacgtacagccggtcacattaggcatagacacgggctacctaaatatgggcttcagcgccgtctccgggggtaaggagctcatatccggcgaagtcaggctgcttaaaggcatgtcggggcgcatctacgaacgctcaatgtaccgcaggccaagaaggaacaggctgcgccaccgcaggaacaaaggcaagcttcacacaaagccaaaagggtggcttgcgcccagcatcgaacacaaggtagacagccaagtaaggttcattacaaacaagctggctaaaatcttacccgaaccaaaagtcatagtggaaatagccaacttcgacatccagaggcttatgaacccggacatagaaggcaaggaataccagcagggtaagcagtacgggcacatcaatgtccggcactacgtattccaccgggataactacaagtgccaaaaccctaagtgtaaaaataaagacccgaagcccaccttgatagctcaccaccttcgctttaggaatgacggcggcaccggcaggccggacgaccaagtaacgctttgcagccagtgccacagctccgcaagccacaaaagctttttaaaggactggaagccaaagaacagggggtttaaggcggagactttcatgactgcaacctataggatgcttattgagcgcctgacggcattgggctttgacacggactacacctacggctacatcacaaaagccgacagggaagccctagggctggagaagacgcacgccaacgatgccttctgcatagcgggcgggacaaaccagacaaggatagagccattgacctatcagcagatgaggcgcaataaccgcaatcttgaaaggttttacgacgcaatctacatagacacccgcaccggcgagaaagcatccggctcagagctgtgcagcggcaggactacaaggaataaaaacaaaaacggcgaaaacctccgcgtttaccgcggcaagaagacccgcgagggccgacgcagcattaggaagaaacggcacccttaccagcctaatgacttggttaagcgcaatgggcaaatctatacagtcaaaggcagccacaatctaggcgcacgcgtcatgctaaaagaaaccggcaagtcagtgcaagcaaagctgctggagccatacagatacagtaaaggcttcgtttgcttggcataa

SEQ ID NO: 1562 - DNA, 298 bp, unidentified
  misc_feature 1..298: note = Ga0099364_10003009 JGI
  source 1..298: mol_type = other DNA
gtcaactacccaccgcttagcgtctagcgacgcttgaagcgggggcttgcaagaaacacggacttgcagcccggttgattagcctcagcctagcaataggctacgttatgcgggaatacatagttgcccccggacgctccacaaatccggaaggcaaggacaacggctaaacatccctgaggggtaggggaagtgccggctgacagaaaaccccgcataacattggcggtgtggaccaaccgcaaggccacggcctaagcggcattacgcgggcaaccgcatcatggagacccagatg

SEQ ID NO: 1563 - DNA, 1221 bp, unidentified
  misc_feature 1..1221: note = Ga0272440_1006716 JGI
  source 1..1221: mol_type = other DNA
gtgaaaaaagtttatgtagtaaataaagatgggaaaagtttaatgcctactaatcctgcaaaagctagaattttgcttaaagagggtaaagctaaagtggagaagagaaaaccctttactattaaacttacttatggaagttcaggttatgttcaacctataattgtaggtatagacaaaggtgcaaaatacacaggagtttgtgctatgtctgaaaatgaagttttattttcagctcaaattaaccacagaactgatgttaaagataagatggaaaatagaaaaaataatagaaggcagagaagaaacagactatggtatagagaagcaaggtttaataatcgttcatcttctaaaaagagtggtagaataccaccatctattaaaacaaatgtagaagaagtagtaagagttatgaataaaataagattacctatatctgaaatatatgtagaagatgtccaagtagatattagaggattaactgagggtaatacaccaaaagattatcaaaaaagtaacagattagatgagaatttaagaatggcttgtttgataagggatgattatacctgtcagtattgtggaaaatctaattgtaaattagaggctcatcacatagtatttaaaagtaatggaggatctgatacaattactaatttgatatctttatgttcagattgtcacaagaaagttcataaaggattaataaatattacttatggttttaaaaaaagttttcaattaaaaatgagtcaaaggtctatgcaaggtaaaacttacatgtatgaaaagcttaaaggattagcacctgtaaacttaatctttgggtatgaaaccgcaaagtttaggaaacggaataatttagaaaaagatcatgatattgatgctttttgtatagcttctttaagatctggttatacaataaattacaataaggataatttttacaacataaattttagacctaaacaaacaagaaggcagtattttgatcttccaagaaaaggtaagggtagaatcagatatcaagttaatcaagaaattgaaggtttaagaaaaggtgatattgttttggttaagggtaaatttgaaaaacaaataaattctatttatagtaatggtaatgttgcatttaaaaggactaagggagaaccttcagcagtaaagcctaataagtgtaagttattagaaaaaagtcgtacagttgtctacacttag

SEQ ID NO: 1564 - DNA, 272 bp, unidentified
  misc_feature 1..272: note = Ga0272440_1006716 JGI
  source 1..272: mol_type = other DNA
tattacagaaatagtctctaaaaatatagacaaataagactatattcatgaggctaacagagggcttagaaaataagcagaagttagattttgtatcacacctttaaatgttattccagtttaaagctctgtgttctaattttaagggtagcggaaacgtgagagtgaattagaagtgtaactttatctaacaacctcaaggagtaactaactaccttcgggtaagataaaagttttttattaacttttaataaagaggaaaagtgaaaaaa

SEQ ID NO: 1565 - DNA, 1233 bp, unidentified
  misc_feature 1..1233: note = Ga0209212_1034368 JGI
  source 1..1233: mol_type = other DNA
atgcaaagagccttggttttgagttccacgaagaagccgctcatgccctgtcatcctgcaagggcgagggagcttctgaagaaagggaaggcggcggtttaccgtaaatatcccttcaccatcatcctgaagtatcgggttgacggtgaagtacaaccagtggagctgaaggtagaccccggctccaaggtgtccggccttgccattgtctctaagttctccaagggggcagtagccatctggggaacgaacctgaaacacaggggtgatgccatcaggatggcgcttgcatcacgcaggagcttgaggaggggcaggagaaaccgcaagaccaggtatagggcaccaaggtttgacaatcggactcgtcctcaaggctggcttcctccttctctcatgtccagggtggataatgtggtggcctgggcacggaagctaataaggttcgtccccatttaccgcatagcagtggagaccgtgcggttcgacacgcagctcatgcagaatcccgagacttcaggagtcgagtatcaacgaggggaattgcagggctacgaagtcagggaatacctgcttgagaagtggggccgcaagtgcgcttattgtgattcggaggggattccccttgaagccgagcacatccatcccagatcaaaaggaggatccgacagggtaagcaatcttacgttggcttgcgaggaatgtaacaagaagaagggtaatcgggatatccgggagttcttggctgacgacaagcctcggctggaaagaatacaggctcatacaaaaactcccttgaaagacgccgcagccgtgaatgccgccagatacgtaatcgggagggaactcaagaagctcgggctcctggtctccttctggagcggcggacgcaccaaatacaacaggacgaaacagggctatttcaaagaccactggatagatgctgtctgtgtgggtgagtcgggagtcgatgtctgtatctacccggcccataagcccctcagtatctcatctatgggacgagggagcaggcaggtagtgcgaaccgaccgctatggattcccggcaagtaaggcagggagaataaaaagggtctttggtttccagaccggggatatcgtcaaactggttcaacccaacgggaagtatgccggggtacacaagggaaggctggcgggtatcagagtgaccggacaatttgatatcaaggcttcaattggaaaaataacagcg

SEQ ID NO: 1566 - DNA, 260 bp, unidentified
  misc_feature 1..260: note = Ga0209212_1034368 JGI
  source 1..260: mol_type = other DNA
acctgcgcacatccgtgtgcttgttcattcagcgttttgtcagactcaaccagacctcagcccttcggggctacgttaggggtgaatacatagtcactccgggatacttctccagtcccggactctgcggcaggaagttaaacaggacggaccgggtaaacggacagtgctccctgcataaaaccaccccataacattggcgaggagaccttaaccggcgcaagccgagtgagaagaaaggtagctttcaaatgcaaaga

SEQ ID NO: 1567 - DNA, 1326 bp, unidentified
  misc_feature 1..1326: note = Ga0123353_10014374 JGI
  source 1..1326: mol_type = other DNA
atggtctatgtcgtatcacacgaaggaaaccctttaatgccgacgtatcggcacaataaggtatctaagttgcttgatgagagaaaagctgttgtgataagcaacaacccgttcacaattcaactgctttatcaaacggaaaccgaagtaactcaaccaatcacattaggcatcgacgcaggctaccaaaaggtcggttacagcgcaataactgaccaagaggaactcatcggcggcgaactcgaactattacacggcatgaagaagcgtatagcggacgctgcaatgtatcgcggtcagagacgcggcaggctccgccaccgtgaaccgcgttttgataacagggcaagagacgagggctggctggcaccgagtatacagcataaacttgacagccatatacggctcatcgaaaaggtacttgggctaatgccagtgacaagtatcataatcgaagtggcaagctttgatacccagctattgaagaatcccggtattcgcggcaaggagtatcagcaaggcgaactaatggacttttggaacacccgtgaatatgtacttcacagggacaagcacaaatgtcagaaccccgattgtacgaacaaatcagagcagccaacacttgaaacacatcatatcatataccgcaggaacaatggctctgacgcgcattggaacctcgtaacgctctgtagtaagtgtcatacacctcaagcacatgatacatggctcaaggattggaagcctaaatacaaaggttttaaggctgaaacgttcatgtcaatggtacggtggaaactgatagaactgctctcggagtacaatgtgacacatacttacggttacgagacgaaggttaaacggttagcattaggtcttgataagacacatgccaacgacgcgtttgttatagccggtggaacgacacaggccagatgcaagcagattaattttgcacaaagaagacgcaataaccgctgcttggagaaatggtacgacgctaaatatacagataatcgtaccggtaaacctgaaaaggcggcaatcttgaataacggcagacgtacacgtaacaaaaacaaaaccaaacccgaggacaatctaaaggtgttccgtggtgagaagttaagcaaaggccgccgctcgataagaaaacagcgttatccgtatcagccgggtgataaagttctttttgagggtaagagatatacggttacaggtgctcactgtaagggaaaaagcgtaatacttaaagagaccggtaaatcggtagcaggaagcaaactaacacatctatcatacggcaaaggtatggtagctgtgtaa

SEQ ID NO: 1568 - DNA, 337 bp, unidentified
  misc_feature 1..337: note = Ga0123353_10014374 JGI
  source 1..337: mol_type = other DNA
gtcaactacccaagtctaaagagcttgggcttgtagtaaaacgcaatacgagcccggttgaatagcctaagaccttcgaggtctacgttacccaagaataattcaataggcaccatagggtacttcacaagctctatgcaactgcggtacatggttaaacatccctgtgggtaggggaagtgctgtgtacagtcacaacttaaggcagaacccgtaacgggcctatgctggtggcttgaaaccttgggatacccttggcaatgtgaaccgatacggtcagatagtaccagcttaccgctaaaactatcaaaaaaatgggaaggagtttatcgcaatg

SEQ ID NO: 1569 - DNA, 1338 bp, unidentified
  misc_feature 1..1338: note = Ga0209124_10001910 JGI
  source 1..1338: mol_type = other DNA
atgacgtatgtattggatcaaaacggcaaccccctcatgccaaccgagcgtggcgggaaagtccgaattctgttaaaaaccaaaaaagccaaagtggtgtgtcgtaacccgtttacgatccaactgctttatgatagtaaggcgtttacgcaacccgtaacgctgggtattgacagcggatatgccgaagtgggctattcggctgtcactgaaacaaaagaactcatgggtggcactttaaaactgctcacgggccagaaaaaccgtctcaaagaacgaaggatatatcgccgtacaaggcgtaaccgcttgaggtaccgccagtcacggttttcaaaccgtgcaagaaagaagggatggctggcaccctccattcaacacaagcttgacagccagttgcggtttattgagcgcatcaaaaagcttctgcccatcaccaaaacgatcattgaggtcgcctcctttgatacacagaaaatattaaaaccagatattgaaggccttgagtatcaggaaggcgcgcaaaaagacttctggaatgtaagagagtacgttctacatcgggataaccaccaatgccagaaccctgattgtaccaacaaagccagtcagccgatcctgcgtgtccatcacattgtatttagagacaacggtggcacagataaaccttctaacttgattaccctgtgtacccagtgtcatgtttctaaaaatcatcaggcgggacagttcctgcatgactggatgcaaaacggcaagaaagccccaagtctcaaaggggcgacctttatgaccatggtgcgctggcggttggtagacattctgaaagacgtaggcgccactgacatcgcctatggatatcagaccaagtctaatcgcataactttaggtttggagaaaagccatcacaacgatgccttctgcattgcacatggcgaagaacagaaacgattgtcagcgattgactatctgcaacggcgacgcaacaaccgctcccttgaaaagttttacgacgcatcctatctggacatacgggacgggatcaaaaaaagcggtaaagaactttcaagtggtcgcacaagtcgtaacctcactgagaacggcgaaaacctccgtccttaccgtggtgaaaaagtccgggtcggccgacgcagtatccgcaccaggcggtacccttttcgatcaggaaacatcgtttcttatgagggtatttgttataccagtggcggaagccacaacaagggcaacagtgtcaaactgttggaactgaaacgttcgatcacacccaggaagctaaaattaatacagtacaatgcaggcatcgcctgtgttgcttaa

SEQ ID NO: 1570 - DNA, 290 bp, unidentified
  misc_feature 1..290: note = Ga0209124_10001910 JGI
  source 1..290: mol_type = other DNA
gtcaattacccaccacttaaattctaatgaattttgaagtgggggcttgtataagctcagttgattagccttagtccttgaagaagggctccattagcttttaatgtataggtaccatgggatgccccacaagtctcatgctctacggtgcgtgattaaaccgtttcgatgggtcgaaaccgtgttgcgcatattaaacaaaagcataatattggcgatgtggacaaaccgccgttaacgcaacttttgccgagacggtgcggattaactttacaaaggagtttcaaatg

SEQ ID NO: 1571 - DNA, 1224 bp, unidentified
  misc_feature 1..1224: note = Ga0216255_10040300 JGI
  source 1..1224: mol_type = other DNA
atgccatgtggacctcaaaaagcaaggagattattaaaagaagaaaaagctgaagtatttttgttggtaccatttactattcgtttaaccattgtaactggagaaactgtacaatcctgtatagctgggattgatcctggatttagcaatgttggaatatctattgttattcttggaataaaagaagttttgagtatggaatttctattaaggacagatattgttaatctcaattccgaaagaagtcaatatcgcagagggaggcgttatagaaagacctggtatagagcatcaagatttttaaatagaaagaaaggtgatggctggcttgcaccatcgattcaacataagaaagacagtcatgttaaaataattgatttcataagcaagcttgtgccgattaaaaaaattattatagaagttgcagcttttgacattcaaaagattaaaaatccagcgattcaaggaaaacaatatcaagaaggagatcaaaaggatttttggaatattcgtgagtatgttctgcatagagattctcataaatgtcaacagtgtaagggtaagtcaaaagacaagatattgcaggtacaccatattgaatcacaaaaaacaggtggtgaccgtcctgacaatctcataactctatgtttagaatgccatgcaaagctgcatcaaaacaaaatacagttaaaagttaagaaaagaaaaggttttaaagccgaaaccttcatgtctacggttaggtggaaaatagttgaagatttaagaaagcttggatacgatgttgaacatacatatggctacattacaaaaaataatcgtatcaaaatagggttagaaaaaactcattgcaacgatgcatttgtaattgctggcggaacaacggaggcacagcctctcgcagaagaaagaagttgtatccaatacactgttaaacaggtacgcaggcaaaatagaaaattattcaaaggaataagaagccatttaagaaatactgcgtcaaggcatgttcatggctttcaacgttttgatcaagttatttttgaaaaagaaagatgttttgtttttggaagaagaagctctggctattttgatctcagaaaactcaatgggcaagttattcatcgttctgctaaagccaatagcctgaaactttttcaatcgtttaacactttactatgggagcaatcctcgaataaggcattcgcttcctcccctgattga

SEQ ID NO: 1572 - DNA, 297 bp, unidentified
  misc_feature 1..297: note = Ga0216255_10040300 JGI
  source 1..297: mol_type = other DNA
gtcaacaaccccccattgaaatgggaggcttgcaagagcctcatgttgactagggagcatatacaataggagatatgtttttatggctgtgcagaagttgtttaggtcaagacaccatggggtactcctctcgctccatgcaacacgggcaactgtttttttacagaagtccatggtactgtcgttagtggttaaaagctctgtgagggtaggagcggtgctgctagcagaacaagcctttacaacaatcccgaagaggccttcactccccacttttagggaggacagaacttgaga

SEQ ID NO: 1573 - DNA, 876 bp, unidentified
  misc_feature 1..876: note = Activated carbon metagenome
  source 1..876: mol_type = other DNA
atggctgttttcgtgctggacaagcaaggcaagccgctgatgccctgtagcgagaaacgcgcgaggctgctcttgtcgcgcggccgcgcgcgcgtacatcgtgtggttccctttgtcattcgattggtggatcgcctccagtcggaaagtgcattgcagccggtggcaatcaagcttgatcccggcagcaaaacaacaggcgttgcagttgttcgcatcaaggaagaaacggacgaagacaacagcgagattcgcaacatcgcctgcgccatttcactgatggaattggtgcatcgcggcaagcagatcagcaagtcgcttacggcgcgtcgcgccttcaggcgccggcgcagaagccaacacctgcggcatcgccaagcgcgctttgacaaccgaaccaagccggaaggatggttgccgccttcgctgcaacaccgtgttgacgccaccgtgtctttggtgaaacgcctgcgtcgctgggcgccggcaaccggaatacagcaagagctggtgcgcttcgacacccacgccatgcagaatcccgacattgccggcatcgaatatcagcaaggcgaactggcgggttacgaagtgcgggaatatctccttgaagcatggagccgtcaatgcgcctattgcgacgcgaaagaggttcccttggaaatcgagcatatcattgcgaaaagccagggcggaaccgaccgtgtttcaaacctgaccttggcttgccggtgctgcaatcagaagaaaggagccctccccattcagcagtttgtgaaagaccctgcgcgcctggcgcgcatcctcgcccacgccaaggcgccattgaaagacgccgctgccgtcaatgctgcgcgctgggcgctgttttctgcg

SEQ ID NO: 1574 - DNA, 296 bp, unidentified
  misc_feature 1..296: note = Activated carbon metagenome
  source 1..296: mol_type = other DNA
gtcaactacccccgactaaagtcgggggcttgaagggaacaatcccggaaagccagattgaccagggaaagcggtaaccaacccgctacgtgtactacaggtcgttaagacgtaccggcgaatgcttcctcagttcgccgctctacaaggtctggatcatgctgcggaaaggtaaagccgcgaaggttcggatcgacccgcacagggagccgggcgtacacattcccgaggggagacgccccgtaaggggcgcgtcacaaggcccgtaagggcaaatttggagaaagaagatggct

SEQ ID NO: 1575 - DNA, 1413 bp, unidentified
  misc_feature 1..1413: note = Wastewater metagenome
  source 1..1413: mol_type = other DNA
atgaaacaaacacaaacaaaaattgtacctgtgttggctgtagacggtacaccgttaatgccaactacacatggttacgcaagagtgttaattgctcgtggcaaagctgtagctgttaagcaaaagattttcactattcaattattacacgaacacaagacaaacaaagaagaaattaagtgtgaacttaaagttgattgtggttttggaaatattggttacagcgttgtagcgaataatgaagaattaattggtggtgaagttgaattattaactggcatgtcagcacgaattacaacaaaggctgggtataagactcagcgtaatggtcggaaacgttaccgtaagccaagatttgacaatcgcaaacgtaaggatgattggttgccaccatcaaatgaacataaaaacgagtcacattttaaattaattgatttaatgtgttcattatatccagtgaatcatttaaaattagaagctggtaattttgatatgcaaaaattcaagaatccagatattaaaggcaagcaataccaagaaagtaatttggataagaaattaaatcctaacttacgcttggctattttgtaccgtgatgattacaaatgtcaatgttgtggtgattctttaagtaagaataaaaacattaaactagaagttcatcatatagtctaccgttcaaaaggtggctcggattctgaagctaatttggttacgttgtgtacaaaatgtcacacagctaagaatcataaagatggtggcatattgcacaagtggatgcttcaaaagaaaagcatgggtagtttaaaagaagctacgtacatgaatatattagcatctagattaaaacagcgctatccacaagctgagatatgttttggatacgatacggctgaaaaacgcaagtcgttaggtcttgaaaaaactcaccataatgatgcttttgttgtaggtggtggtgtagatgagacaaccatgagagttgaatcatctactaatttcaagcaaaaacgtaggcatgataggtctctaacaaaattctatgacgcacaatacattgatattcgtgatggcaaaaagaaaaaaggcgcagaattaagttgtggtagaactaaacgcaataaaaatcttaatggtgaaaatgagcgaatatttcgcggtgagaaggttttaaaaggacgtgtaactcattgtttaacaaaatatccgattgaatctggtgatataatttcttatcaaggacaaatatatgtctcaggcggaaataaaaacaaaggtgcctatattaaagtagtggtagaaggtaaagaactaagtttaaaaacacctgaagttaaagttcttaaacgtaatcgtggaacttacattacaacgcaaccctcacgggcttgcttgaatccagtgaatggttaa

SEQ ID NO: 1576 - DNA, 301 bp, unidentified
  misc_feature 1..301: note = Wastewater metagenome
  source 1..301: mol_type = other DNA
gttaagtacccacgacccaagggtcggggcttattagctctgctataagctcgcttaattagcttaagtgatgcttgtcgaaagataagctgaactacgttacctagtaatatataggtacttcggggttgctctcaagctccgaactctacggcttgtaattaaacatctctgacgggaaggagaagtgttgcaagcgtttaaaacattaggataacattagcgatgggaatttgctaaagttttaatccacttataaaaaggatttttatcccatatgaaacaaacacaaacaaaaatt

SEQ ID NO: 1577 - DNA, 960 bp, unidentified
  misc_feature 1..960: note = Human gut metagenome
  source 1..960: mol_type = other DNA
atggtgtatatacaggacatagatggtaaaccgatgatgcctactacaaggcatgggaaggttaggagactgctaaaagacagcaaagcggtcgttgtgaacacatgtccttttaccatcaaattgatgtacaagacatcaggttacaaacaagagattgtgttaggtgtcgatgccggaaccaaacatgttggtctatcagcaacgacgaaaagcaaagaactttacagcagtgaagttattcttagaagtgatattgtagaacttttgtctacaagaagagagtcaagaagaacgagacgaaataggttgagatacaggaaacctcgttttaacaacaggataaaaagcaaacgtacaggatgggtagcaccttcggtgagacataggattgatgctcatatccgtgttatcgacaacatctgttctatcctgccggtatcccgtgtcatcgtcgaggttgcccagtttgatacccagaaaataaagaatcccgatatctccggtgatgaatatcaggaaggagatcaacttggtttttggaatgtcagggaatatatcttggcaagggatgggcataaatgtcaacattgtaaaggaaagtcaaaagacccgattttgaatgttcatcacatcgaatctcgaaaaacaggaggtgattctccttcaaatcttattactttatgtgagacttgtcataaggagtatcataaaggtaacatcgatttgaaggtaaaacgaggcaagtcgcttcgcgacgcagccgtgatggggatcatgaaatggaaattgtacgatgagttgaaatccagatgcgacaacgtttcgatggcgttcggatacattacgaaatacaatcggattaaatacgggattgaaaaatcccatacatccgatgcgtttgttatttctaggaacttcaatgcgaaacgaattgaacgtcaatatttaaaacgttaa

SEQ ID NO: 1578 - DNA, 271 bp, unidentified
  misc_feature 1..271: note = Human gut metagenome
  source 1..271: mol_type = other DNA
atataatttcattatatggttttaatatatccataaggatcggattattagcctaagtcttgaaacagagtctacgttatttgagaatacatagttaccaaggaatgtttgcccaagttccttgctctaaggtaagtgattaaacaggagtagtgtatttgcgaaacagtattgcttatatataaaacctcaaaataacattggcgatgggtactaacagggtttttaccctgacttatgttgaataaacattgaattagtttgtaaaatg

SEQ ID NO: 1579 - DNA, 846 bp, unidentified
  misc_feature 1..846: note = Human oral metagenome
  source 1..846: mol_type = other DNA
atgcgggcgaagtccaacttcgtgaaaaacctgtcgacgagaagagagatgcgaagagccagaagaagtcgcaaaacaagacataggaaggcgcgctttgacaacagaagaagaccggaaggctggctcgcgccgtctgtgagaaaaaagatcgatacccaccttaaggtgatagcggacctgcacaagatattgcccatcgcaaaagtgatcatcgagacatcggctttcgacacgcagaaactcaaagcggacctcaaagatcttgcccgcccgaagggcgaagaatatcagcaaggcgaaatgacgggcttttggaacgcgagaaagtatgcgcttttcagagatgggcaccgctgccagcactataaaggcaaatccaaagacccggtactggaagtgcatcacatcgaaagcaggaggactggaggcgatgcgccaaacaacctgatcacactctgtaaaacgtgtcacgacgcgtaccacaaggggaagatcgaactggatgtgaaacgatgcgcatcgttcagagacgcggccttcatgggcatcatgcgctgggcggtgtacggcgtactcaaggaggaacacccagatgtatcgatgaccttcggctacaagaccaagaatgcacgaatagagaatgggttagaaaaatcgcacatagttgacgcgcgctgtatatcaggaaaccctcttgccgccccggcagaatatatcttcgtgcagaagaaagtgagaaggcataaccggcagatgcacaggaggactatcggtaagggcgctatcgtaagagaaaccaggcgctgcacaccatcttcggtttcagattgttcgacaaggtaa

SEQ ID NO: 1580 - DNA, 299 bp, unidentified
  misc_feature 1..299: note = Human oral metagenome
  source 1..299: mol_type = other DNA
gtcaactacccacggctaaagcatatgggcttgccgaagcccgtcagggcagatgtaaaagccccggttgactagcctaagtgttttcgagcactacgttacctgagaatatataggcaccgtggaatgtactacctagttccacgctctgcggcatgtgcttaaacagttccgggaggtaggcccagtgctgcatgtgaaaacctgcggataatattggcgaaggtagcattacgaccgcacgcgccggcttacagcgtaaagcgtgcaatatcttatgaaaggagcgatgccctatg

SEQ ID NO: 1581 - DNA, 1128 bp, unidentified
  misc_feature 1..1128: note = Ga0222708_1003174 JGI
  source 1..1128: mol_type = other DNA
atgcagagagtccccgtacaaaaccctgatggcagtccagccatgcccaccaagcgcagtcgcgctgaagcgtgggtgaggcaaggcaaagccgaatgggtcaagaccgatctcaggattaaagcagttcgactgctaagagaaccctccgggcacaatacccaggccattgtggtgggagtagatcccggcaagctctactcaggcattgccgttcagtcggccaaagccacgctgtttcaggctcacctggccctaccctttgagcgggttagggaacggatggacaatcgccgcatgttgcgtcgttctcggcgcagtcggcggatcaaccgggatgttccctttgcactccgcaaccaccggcagaagcggttcgataaccgccgtggcagcaaactcgccccctcaatccgcgccaaccgccaacttgagctgcgcgtagttcgggagttgtctaccctgtttccgattaccgccattggctatgagaaggtcaaggccgatgtggacttgacctcgggccgcaagggtgcccgctctgggaaagggttctctcctgtaatggtgggccaggcctacgccattgagcaaatgagccagattgcgccggtctacacccgctatgggtggcagaaggacggcaatgggacatctcaacttcgcacggctctaggcttggttaagtccaaaaacaaagcagagcagaccccccagagccatgccgtcgatggtgtggcgctggcctgcgggtacttcattgagtaccagtcctttcaccagtgccgcaaccatggccatgattggtttggccaggtcaatatcacgacggcaccatttgccgtgattaagcgcccacctatctctcgccgccagctccacctgatggttccggccaagggcggcgtgcgccggaaatatggcggcaccatcactcggcatgggttcagaaaaggggatctagtcaaagctgagatggcgggccgggtgtcggtcggctatgtcagcggggacacggagcgacaggtttcggtctccgacatcaattggcggcggattggccagttcaccgcatccaaagttcagcttctttatcgcgcaacgggcatcctggccacctgcccgcag

SEQ ID NO: 1582 - DNA, 229 bp, unidentified
  misc_feature 1..229: note = Ga0222708_1003174 JGI
  source 1..229: mol_type = other DNA
ttcaatgacccccacttagcaaagctgaagtgggggagtggccggagataacccggtcgtaactgcgaatagagccattgagcggttaacgagcaaacacttccaaattcttctctagtttggattagatgtgagggggcagaatctagctccactgggtcattccaggacacagcgttaaccgtggcgtaagagaccagtagttttggaattatcttccacatgcaga

SEQ ID NO: 1583 - DNA, 1482 bp, unidentified
  misc_feature 1..1482: note = Ga0207145_1003 JGI
  source 1..1482: mol_type = other DNA
atgcttgccagttccaagctctgtaacatagaagctaataagactgagggtataagtccgtgcttctatgatatgccgctgattaacattagcgaggcacacgttaccccagaaatgggcgaaggaaaaaacatggtactagttatcgacaacaataaaaagccggtcaacccctgccgtcctgcagatgcccgactattactaaaaggaggcaaagctgctgtctttagacggttcccatttactattattcttaatgaagactctcttcaaaaggttagaccattacgtttaaaaattgatcctggaagtactaccactggcatggccctagtggatgacaaaacgggaaaggttattagtgctcttgaaattagccatcgcagtaaaacaatttcacgatctatgatatctcgggcaagctctagaaaatcgagaagatacaggaatacccgctatcgtgaagcaaggtataacaacagaaaaactgcgagtggatggttgccaccttcttttggcagcagaattgcgaacgatgaaacctggataaaacggttcatgcgatatagccccatctcccacataagcgtagaaattgctaaattcgatacccaattgatgcagaatgcggagatttcggggattgaataccaacaaggtgcgctccaaggatatgaggtgagagagtaccttctggaaaaattcggtcggaaatgttgctactgtgggggtaaggatcgtccccttgaaatagaccatattgtgcctaaatcaagaggaggaagtaatagagtctcaaacctagctatctcttgtaagtcttgtaaccaaatgaaaagtaatcaaaatgcgcatgaatttggctatcctgaagtgcaaaaatatgctcaatcatcattaaaagatgctgcagcaatgaatattacaagaataattcttcttaaacgaatagaaacgaatggcttgccgctagaaacaggcaccggagctctcacaaaacttcatagaatggagcaaggtcttgagaaagcacattggattgatgcagcgtgtgtagggatctcgacaccaaagaaattattaataaatgatctacaacctttgctagtaaaggctacaggtcacggctcacgccaaatgtgcaaagttgataaatatggttttccgcgcactcaatcaaagaaaaataaaaaaaagttcggctttcaaactggcgatatgatcaaagctatagtcaaagatgggaaaaaaaagggtacccatcttggtaaagttgcggtaagatcaagtggatacttcgacatacttagacctcagggaatagtaacaggcattaaacatacagcatgtagaatcattcacaaatctgatgggtatagttatagctacttgcctatcattagagaaaagaatagattggtggagttgatgggactcgaacccatcacctcatggatgccatccatgcgctctaccagatga

SEQ ID NO: 1584 - DNA, 315 bp, unidentified
  misc_feature 1..315: note = Ga0207145_1003 JGI
  source 1..315: mol_type = other DNA
tggtggagttgatgggagtcgaacccatggcctcgtcaattaccgcgccattattggcgcagctcaacagctcgcgttgaccagcttcagccaggactagtgtagtcatcgggctacgttaattaggagcgctaaaaatcacaccttgggatgcttgccagttccaagctctgtaacatagaagctaataagactgagggtataagtccgtgcttctatgatatgccgctgattaacattagcgaggcacacgttaccccagaaatgggcgaaggaaaaaacatggtactagttatcgacaacaataaaaagccg

SEQ ID NO: 1585 - DNA, 867 bp, unidentified
  misc_feature 1..867: note = Ga0376510_00006 JGI
  source 1..867: mol_type = other DNA
ttgagcatatttgttctggatacaaacaaaaagccgcagaatccggtacatccggcaaaggcaagactgcttttgacagaagggaaagccgcagttttcagacagttccccttcacgatcattttgaaagagaaagtcttggacgtggcatcaaccccattgcggatcaagattgatccgggcagtagagagaccggaattgccgtgattaacgacgattccggagagattgtttttgccatggaactgagacatcgaggccaacagatcaaaaacaatctggaagcaagaagcgcaatcagaagatcccggagaaaccggcaaacgcgatacaggaaaccgcgctttgagaacaggaccaggccggaaggatggctgccgccttcattaaaaagccgggtttataatatcgaaacctgggtcaaccgcttgtgccgattttgcaatattcaggcaatttcaatggagttggttcggtttgacatgcagaaaataccgcattggctcgatgccgcctgtgtaggcaaaagcacacctgaaaagatttttcagatcgacaaaaccgtgttgattgtaaaggcagacggtcatggctcaagacagatgtgcagggtaaacaggttcggattcccccggacaacagcaaagtcaactgagaaaaaagtcaaaggctttcagacgggcgacatcgtcaaggcggttgttacttccggcaaaaaggttggaacgtacattgggcgtgtcgctgtcagaaaaagcggatcgtttaacattaaaacagtggacaaaacagtacagggcattagctggaaatactgcagactgcttcacgcatctgacggctattcctacaatacgacgtgctaa

SEQ ID NO: 1586 - DNA, 242 bp, unidentified
  misc_feature 1..242: note = Ga0376510_00006 JGI
  source 1..242: mol_type = other DNA
gtcaactacccctcggctgaagaccgaggggcttgaaaaagccccgaagttgaccagtctaagtgcttcgagcactacgttagatcggaaataggtaccctggggtgctcgccagccccaggttctacggcaagtggttaaacaggtctaaggggttaagccggtgctacttgcgccaaacccgatcataacattgacgcggcaaacattaccttggaaacaagaggattttaaaattgagc

SEQ ID NO: 1587 - DNA, 1254 bp, unidentified
  misc_feature 1..1254: note = Ga0172381_10003644 JGI
  source 1..1254: mol_type = other DNA
atggtttttgtagtagataaaaacaaaaagcctctggctttatgccattctgcaaaagcgagaaaacttttagaccgtcaagaagcagtaataattaatcattatccttttgtaatcaggctaaaaaaagaaacagagggagaagtaaaaaagacttactgcataaaaatagatcccggtgcaaagtttacaggtcttgcaattctcaataacaatgaggagattgtattctgtgcagttattcagcataaggcatttgagataaaagaaaaacttacttccagggcttcattaagaagaggaagaagggcaagaaataccaggtatagaaagccccgtttttcaaacagagtaagtaataaaaaggctggatggttaccaccttctttaagatcaagaatagacaatataacaaactgggtaaaaaagcttatggctatatgtcccataggagaaatttactttgagaatgtaaagtttgacactcagttaatggaaaatcctgatgtaaatggagttgaatatcagagaggggaattatatggctttgaaattcaggaatatcttagagaaaagaccggctttaaatgtgcttattgtggcaaagaaggcacgaaagagaaacttgaaatagagcatattattccaaaaagtaggggtggaagtaacagagtaagtaatttaactttagcttgccataagtgcaatcagaaaaagggaaataaaacggctaaagaattcggatatccacaagttgaagtcaatgcaaaaaagccattaaaagacactgccataatgaattcttcccggaaagcaatgtttattgaattaaagaaaataggacttccaataaagacaggtacaggtggaaggactaaatggaatagagtcaatcaaaaacttcctaaaactcattactttgacgcttcttgtgttggtattataccggaaaaattggaagtgaaaacagagcaagtcttaaatataaaggcagtaggaagaggaaaatataaaaggactgatactgataaatacggatttccaagagcttacagggcaagattaggatatttccagggatttaaaagtggagatgtggtaaaaagtatatacggaataaaaagtatagtcagtgtaagagctaaaggcagttttacattagagaataagaaaaatgtttcaccgaaaaaatgtcaattaattcaacgatgtaatggatatgtctataaaagtgagataaatgaggagaggtaa

SEQ ID NO: 1588 - DNA, 295 bp, unidentified
  misc_feature 1..295: note = Ga0172381_10003644 JGI
  source 1..295: mol_type = other DNA
ttcgaaactactttcttgcaaattccgaaaagtgaaaacttttcattatgtaaccagccaaaagtcgagtgactacgttagaaaagttatgacacccggaggtgcttcctcagcttccggctctgtcgtgtagcattaagcgaggtcgtgactgcggctacagtgtgttacacgtaaaaagcttatctaacattggcgaggggagactttttaaaagcgttacctgctctgtagtaatacagggtagagatggccgaaaggctaaatttaaaaagaaaggaaagcggttaaaatg

SEQ ID NO: 1589 - DNA, 1023 bp, Desulfitobacterium chlororespirans
  source 1..1023: mol_type = other DNA
gtgcataacaaagtaccagtcgtccatcaagacggcactccactgatgccatgctcaccggtcaaagcccggaagctattgcaaaaaggtggggctgttaagaagtggacggaagcaggaatcttctacatccagctcactacgtcaaccagtaaacatacgcaacctctggtattgggatatgaccccggagccaaatacgatggattttgcatagccagtaaaaagcaaatgcaaacatccggcatgatcatcgtcgaaaacagaatcaagaagaagctggaacagcggcgtaatatgcgtcgagccagacggttccgcaagaccagacggcgaccggcgcggtttaacaaccgaaagaacagggagaactggctgccgcccagcatcaaagccaaggtggaaatgcggatagcgtttctcaagcaactcctggccatttatccaatcagtcaagtcgttgtggaagatgtcaaaatcgacggcaataagctcaaaggacaaaagggccgtcaatactggacctggactatggtaggtaaaaccaagctctaccgatggttagaggcaagaacagagttgagcttatgtgaaccggaggataccgccagggtgcgaaaagaatacgggctaaccaagataggcgaaaagaaagcccatgtttttgaatcccaagccgtagatggatttgccttatgcattgccacacttggtactcaagataaaagcgtaaccagcttcagcgtttggagaaggccagagaatccacgaaggcaattgcaccggctagagccgaaaaaaggcggtatcagaccgccttatgggggcagcgttacactgggatttaaaaagaatacggtagtggaatacaaaggtaaactctaccgtacaggcgggacaacgaaggggaggctcagtctgcacagttttgactacgataacaggcgaatcacgcagaataccaagccggaagagtgtcgtaaagtgtttgtgcagagctggtttcacaaaaaagtagtttaa

SEQ ID NO: 1590 - DNA, 250 bp, Desulfitobacterium chlororespirans
  source 1..250: mol_type = other DNA
gtcaataacccccgcttaaagaagcgggggcttgccctggcgggggcaagggaaacaagttgactagactcagccctgagaggggctacgcgagttgggctataagaacctcctgggtgccagtcccagcctggggaaattcggcagaaccgctaaatgccatgataggttttaacctgtctaagcccggcttgctttgtcgagggacactcaactctgaaaaggaggcacgattaccgtgcataacaaa

SEQ ID NO: 1591 - DNA, 804 bp, unidentified
  misc_feature 1..804: note = Archaeon SCG-AAA382B04
  source 1..804: mol_type = other DNA
ttgacaggaaaaaaggaggattcttacaccaaagacacaactttaggaatcgacgctggttactcaaaaatagggttctcagcagtcacagataacaaagaacttatctcaggaaaaatggaattaagaaacgacatctcaaaaaaacttgatgagagaaaaaagtatcggagacaaaggagacatagaaacaccagatacagagaacccagattcgataacagaacgaaagaagaaggaggggtggttagctccttcaatcaaacacaaaaaaaaaacacccacataaggttagtgaagaaaatcaagaaattattgcccattgatgaaacagtagtagaggttgcaaatttcgaccaacaaaagatgaaaaacccagaaatctcaggagtaaaataccaacaaggaaccctacaaggatacaacgtcaagaactatttattagagaagtttgattacgaatgtgcttactgtagtaaaagtgatgttcctcttgaagtagagcacataactccaaaatcaagaggaggaagtgacagagtttcaaacttaactataagttgcgtagactgcaaccaagaaaaagggcaaacaaactgcaaaagagtttgggtatccaaagatacaagaaagagcaggagaatccttgaaggaaacagcctttatgaaccaaatgcggtggaaaatagtcaacgaactaggatgcaaacatacactcggacacataaccaagaagaaaagactggaagaagaaatagaaaaatctcacatcaacgatgctttcgtgattgctggcagtgctaa

SEQ ID NO: 1592 - DNA, 320 bp, unidentified
  misc_feature 1..320: note = Archaeon SCG-AAA382B04
  source 1..320: mol_type = other DNA
gtcaactacccctccctaactcactttgttcgtgaggaaggggcttggtaggagattagccatatgcgatgtcactctagggaagtggcaaatgaactacgttcgggactgagtgtctgacaatacaccttgcgggtgcctcccaagctccacgctctggaaaacatagtggacgacctcacagcgtcctctttcccaggctgtgcaacatcactacggtctacgcctgtcccaccattggcgatggaaacctgacccgcatctacgcggagatgacccttacgggtcgtaaaaaatagtttgtgagaaatatgaagaaa

SEQ ID NO: 1593 - DNA, 1257 bp, unidentified
  misc_feature 1..1257: note = Ga0376085_0000839 JGI
  source 1..1257: mol_type = other DNA
atgaagaaagaaaacacaagagttccagtaatttcgccatcgggtgaaccgttgatgccgaccaaagcctcgcgggctagacgctggataaaacaccagatagctaaaccattttggaacgatttaggtatctggtgcatccagttattggttgagccatcaggcagacaaacccaagatatcgttgttggtagcgacccaggtaaaaggtactcaggtattgctgttcagtcttctaaattcaccctgtttatgtcgcatcttgttctgatgggattcattcctaagcaaggcacagcaattgcaggcgtcaaagagaaggtgtcctatcgttccctactcaggcgtggtcgaagaggaagacgtattgcccgtggtaaaactttcaagctcagaaatcatcgccaaaagcggttttccaatcgtaagaaaactaagctagcgccctcaattcgctcaaaccgtcaactcgaaatacgggttatttctgaattatcccaaatatatccaattgcagcaattcgggtagaaaaagttcgagctgatgttgataagacatcagggagaaaaggggctaagtcgggtaaaggcttctctcccgtgatggtaggtcaggcttggatgattgaacagttatccaaaatagcgccagttgtcacagttgaaggttggcttcaagacgggaacggtacatctcaagttcgtgaacgcttaaagcttaccaaaaacaaatctgataaagcctcgccagttccagaaactcatgctgttgatgctgtgtccatagcttgtagtcattttgtccaatacaagccctttcatacagctaatactcgtggctgtacttggataggtgatgtgacggttacaccgtccatcttcaaagtcatctctaaacctcggattacgcgccgaagattgcatgatgccgtgccagccaaaggcggaattagggagcgttacggcggctcaacaacacccttcaaagcgaggaaaggggacttaattgagtactcgacttcatcaaaaggagaaatcaaaaaggtgattggatattgttcgggttacacggggaaaaatctgtctttaagtgatgctaattggttacgtctcggcagattcgctaattcaaaatgtcggattcttgccagaaatacaggtttggtaatttcggggggattgacccccgcgaaattaccctcctatccccctacgaccaaccctaacgggtatggtcgcactaccccggagatctga

SEQ ID NO: 1594 - DNA, 248 bp, unidentified
  misc_feature 1..248: note = Ga0376085_0000839 JGI
  source 1..248: mol_type = other DNA
ttgaactaccgttcctaaccctgcgggtatagaaacggattccaaggagataaccctggaacgcaagcgttcaatacctcacgagttcagtagcgtcttaacacttccgggtgcttcactagctcggatttcatgtagtccctggaatctcagggggttgggtaatgccaagacacgcgctactcaatgagggaagtgacctcaaacttatctttcgaggattgtatccatgaagaaagaaaacacaa

SEQ ID NO: 1595 - DNA, 927 bp, unidentified
  misc_feature 1..927: note = Wastewater metagenome
  source 1..927: mol_type = other DNA
atgtccaaagtattcgtcgtggatgccaacaagcacccactgaatcctgtccatccgggttatgctcgtctcttgctgaaacagggcaaggcagcagttctgcggcactaccctttcgtcctcattctgcatgccgaagtggagatgcctcaacttgaaccacttcgggtcaagctcgatcctggcagcaagacgactggcctagcgctggtcaaggatgcaaccggcgaggtgatcttcgccgcagagatcacccatcggggggctgagatcaaacatgcccttgatggtcgacggggcgtacgtcgggggagaaggcagcgcgatacccgataccgcaaaccaaggtttctcaatcgccgacgaccaaagggctggctcccgccctcgttggaaagtcgggtgtgcaatgtcgttacctgggtgaagcggctgaggcgtctttgccctcttgctgccatttctcaggagttagtacgctttgatctgcaagcgatggagaacccagaaattgcgggaatagcttatcagcaaggcaccctcgcaggctacgaggcaagggaatacctcttagagaagtggggtcggaagtgttgctactgtggagcaactcgcctccccttacaaatcgagcatatccagtgccgagctaagggtgggtcagatcgcatttctaatttgtgtctcgcctgtggaccctgcaatctgaaaaaaggaacagtggatattcaggtgtttctggcaaagaagccagatctcctcaagcgcatcctggcccgggccagggcaccgcttgcggacgcggcggcagtgaattcaacgaggtgggcgttatatgagcggttgcaagcggtgggactgcccgttgagtgcggaagcgggggcgtaccaagttcaatcgggccagccgagggctagagaagaccc

SEQ ID NO: 1596 - DNA, 289 bp, unidentified
  misc_feature 1..289: note = Ga0137370_10002449 | GENOME_ACESSION: SagtaG_47_$F_3300012285GENOME_ID: 35434 CONTIG_ID: 2448 SOURCE: JGI DATE: 2019-01-27.
  source 1..289: mol_type = other DNA
gtcatgaaccccggcttggaaagccggggcttgcagcagggctacccactctgcggtaggccacgattttccacgtctcacatgagcagactcagtccttcggggctacgttcggaacgaaataggtaccagtgggtgcgcggccagcccactgctctacgatgcagcattaaacaggtctagagggttaagccagtgtgttgcatgtgaaaccgttcctgaaccttgtcaaggccacctttacccgcgcaagcggaggctctgaaaggagcacctatcgatgtccaaa

SEQ ID NO: 1597 - DNA, 1266 bp, unidentified
  misc_feature 1..1266: note = Prevotellaceae bacterium UBA3839
  source 1..1266: mol_type = other DNA
atggtatatgtacttaataagaatggtcagcccttgatgccgacagaacgtcatggtaaggttcgtcgtatgctgcgtgatggtaaagctcacgttgtacgacttgaaccttttaccattcaactggactatccatcggaagaagtcgttcaggaggtttcgctaggagttgacgctggtagcaagcatattggtatttctgccacaacggaggaatgtgagttgttagcaatgcaagtggaagagcgtgatgatattgtagaacttatagctactcgtagagaatcaaggaggacacggagaagccgcaagttacgatatagaccatctcactttgacaaccgtcgccgcaaggaaggttggttgacaccaagttcagaaaacagggttgcggcacatctgcgtatcattcatcttgtcaattccatacttcctatagcaaagacaactatagaagttgcacaatttgattcacaaaaaatcaagaatgacaggattgcaggaatagaataccaacagggtgaacaacttggattctggaacgtccgagaatatgtactttcaagggacggacacatttgtcagcactgcaaagggaaaagtaaagacaagattttgaatgtgcatcacattgaaagtagaaagactggtgggaatgcacccaacaatcttataacactttgtgagacatgccacaagcaataccataatggcaacattcaactaaaggttagacgaggaaccaatctccgtgatatggctgcaatgtccattattcgctgggaggtctatactcgtgccaagcgagaatttaacaatgtacatttgacttttgggtatctaacaaagcacagtcgcattcaaaatggcattgcaaaaactcattgtgcagatgctttctgtatagcaggcaacattaaagcagaacgattaccttggctctatatggtgcggatgcaacgtcggcacaatcggtctttgcacttagtgaagccggctaaagggggcttgcgtcaacgcaacatagccccacattggatacctaagacaaaactacaacaatatgatgttgtggaatgggatggtagaaaatcttttatatctggaagcgctaacggtcgtctgtatctaaaagatattcaagggaaatatgtagctacctatgaatctggagcgaagaaagcgataaatgcaaagcacgtgagattcatcagacgcaaacgtggcagcatgataattgagcaattgaccaaaagtgttgtatag

SEQ ID NO: 1598 - DNA, 291 bp, unidentified
  misc_feature 1..291: note = Prevotellaceae bacterium UBA3839
  source 1..291: mol_type = other DNA
gtttacccacaaaaatgctggcactaacagcctatagtgagtaagccgattagcctcagtcatttaaacatcatatcgagaatatgaatattgaatgaactacgttagaagtgaatgtataggcaccttgaaatagtcgtccaagtttcaagctctgcggtcagtgattaaaaggagcgaaagcaacggtgttactgatatatgaaaccactttataacattggcgatgggcgcataacgggcattagcccgacttacagtattttaaattgaattgaataatccccaatg

SEQ ID NO: 1599 - DNA, 846 bp, unidentified; identical to SEQ ID NO: 1579
  misc_feature 1..846: note = Ga0302321_100092658 JGI
  source 1..846: mol_type = other DNA

SEQ ID NO: 1600 - DNA, 299 bp, unidentified
  misc_feature 1..299: note = Ga0302321_100092658 JGI
  source 1..299: mol_type = other DNA
gtcaaccactcgggattgaaatcccgagcatgtgaaccaacagtaggtgcttttaggcaagcatgttctagttgaccaggctcagtgtattaacaactacgttaccagagaatacataggcaccttgggatactcgccagtcccaggctcttcggcagacggttaaataggtgtaagggttaagccagtgctgtctgcataccagaagtggacgctttaagcgtaaaccgtcggataacattgccgaggcacacattacccgcgcaagcggagattaaaggagtagttcgatgcaacgt

SEQ ID NO: 1601 - DNA, 1092 bp, Moorena sp.
  source 1..1092: mol_type = other DNA
gtgtatcggcaaatgattaccagagttcctgtggtgggcgtggacggaaaacccctcatgcccaccacgccaagaagagcccgcctgttaatacgggacggcctggccaaacgccggagaaacaagctggggcttttttacgtccagatgctccggccagtcggaaccgaaacccaacccatggccctggccgtggaccccggcgcgaagtacgacggcatatcaatagcttcacacaaacaaatcgaactaaaggcgatggtgttcctgcctgttggcgtgccggagaagatggaaacccggaggaatctgcgccgggccaggagattcaggaacactccccgcaggccagcccgtttcgacaatcggaggaggaaaggttactggttagctcccacgcagcgttccaaagtggaatgccggctgaaagtcgtccgggaactctgcaaagtattccccgtctggctcatcgtcaccgaagacgtgcggttcaaccacgccaggagtcgcaacggtaaatacttctccaccgtagagatcggcaaggccctcacttactttgagtacaaaaagctggccgaactcaagctcgtgaaggtatccgataccgacgcctggcgtgagaggttcgggttggtaaagtatacggaacgcaagtgggaacaaacacccgagacccacgccaatgacgccgtggcgatgttgatgggtataaccggctgcgaaaaagccgtcacgcctttctatgtctggcgaaaactccagtacgcccgccgtagcctgcaccggcagcatttccagaaaggcagcaaaaggcccctgttcggtggcgccagcaacggcacttttttccgcaagggcgactgggtggaggcagaaaaagccggagtaaaatatcgcggttgggtctgtggactgccgacggaaaccacgaaactggtgggtgttgcggatgcagacggcaagcggataggccagttcagcccgaagaaagtcaggctgctggccaggtcaacaggtttttcctggataacagcggcatgagttcagcttctttatcgcgcaacgggcatcctggccacctgcccgcag

SEQ ID NO: 1602 - DNA, 240 bp, Moorena sp.
  source 1..240: mol_type = other DNA
gtcaaccacccccgcttgtagaagcgggggcttgtcctggcggggacaggggcaactggctgactaggcggcaaccttacagttgcagaagtccgaggggctacctaatcacttccgggtgtttcgccagcccggactatgtgaggcagaaccgctaaatgccacgtacgaccaagaccgtattaagccccgtggacagcgccgaggcgacaatcactccgaaaggaggccgtgtatcgg

SEQ ID NO: 1603 - DNA, 1347 bp, unidentified
  misc_feature 1..1347: note = Ga0163153_10017205 JGI
  source 1..1347: mol_type = other DNA
atgaaagtttttgttgttaatcagaatggggaaccgctaatgccaacaacaccgcgcaatgcccgtttacttctgcgcgatggacgggcaagaatctttagtcgcaagccgtttgcaattcaattgctaaactcaactagtggctatgtgcaagataccattttaggcatcgacgcgggctacaagacaatcggctttagcatcgttaccgaaaaagaagaattggttggcggtgaagtcaagctgttggaagaaatgtcggaacggctaaaggaacgagcgaggtatcggcgcaatcgacgggggagcaagacgcgctatcgcgcaccacagttcgacaatcgccgtcgcgatagaggctggttagctccttcgattcagcacaagttggatacacattcacgattaatcgagatgtacaagcgagttttgccgatccagacgatcatcattgagacggcaaactttgatattcaggcgctcaagaatgctggcagtgaagggattgagtatcaacagggtgatcaggcaggattttggaatttacgcgaatatattctacacagagacaatcacgcgtgccaaagtccagtatgcgaaaagagacgcagggaagatttgcctgttcgcagcgagattttagatgtgcatcatatcggattttggaagcaggatcgaacagatcgccctagcaacttgattacactttgcgacaaatgtcatgttagcaaagaacatcaactaaaggggatgctgtggggatgggaaccaaagctcaagggattcaagcccgaaacgtttatgtcaacggttcgttggcggctaatcaatcaacatgatgccatcaacacttttgggtatattacaaagtcggcgcgtatcacgcttgggcttgcgaagtcgcaccataatgatgcctttgttattacttgcggaacaaatcaggagcgctctgaaacaatagttattcagcaacgcagacacaacaatcgcagtcttgagacctttaaggatgctaagtatatagatacccgcgatggtgaaatacgcgggggaaaggaattgtcaagcggtagacgaaaacgcaacaagaatttgtccagtgaaaacttgcgtcaataccgcggggaaaatgtcagaccagggacgcgatccataagaagaaagcgctatccgttgcgacctggggatattgtcttgtataaaggacagaaacggattgttaaggggacgcatagcgaaggaaaaagcgcttttctctacgcgaatgcaaaaccggaaaatgcacaggtcaaaaatcttgttcctatatgtcatatttctggtttgatggcgaatttcgcctga

SEQ ID NO: 1604 - DNA, 255 bp, unidentified
  misc_feature 1..255: note = Ga0163153_10017205 JGI
  source 1..255: mol_type = other DNA
gttatagaccccatccctaaagggaggggcttgaaccgtaaggaacaagccccctatgattagactcaggtcgcgagacctacgttatcgcgaatatatagacaccaggggatgcttcacaagtcctttgctctgtggacaatggttaaacatcgctgatgggtaggcgaagtgctgttgtttcaaaaccgcgaataacattgtcgatgtgaactacaaccgcaaggttgatcaaaagaaaggtttttgatgaaa

SEQ ID NO: 1605 - DNA, 1686 bp, Moorena sp.
  source 1..1686: mol_type = other DNA
gtggcacttttcgatgcttctagtcggaaaccctgcaaagcagacaccgaatctaagaaaaccgtatttcccgccatgcacaggcttatccccgatgcaccgccaccgtttggcagtgtgacactgcatggcaatcatccaaaggagaaattctcattgcaggaacaggcgtatatctatgtgatcggtctggacggcagaccacaaatgcccaccagaagacatcgacatgtgaaaaaacttctaaataccggcaaagcccgtatcgtggaacacgttccctatacgattcagcttttatatgaaaacagccctgtattacagccattgcaactgaccgaaaatcccggtcggacgaacatcggcatcgctgtattaaccgaacagggaaaacttgtattctcagcatccgcagaaacgagaaacaaggaaatacataaattaatggaaaaaagaaaacagcaccgtcagaattccagagccggagagcggaaagcccgacagcgccttgccagaaaacatggtacgacactgaaagaagggcatctggatcggaagcttccatattataaggaagaaaaaccggtcacatgcaaagacatccggaacacggaagccagatactgtaaccgcaaacgaaaaagcggctggctgacaccgacagtcgaacaattggttcgcacgcatctgaacctggtccataaagtacagcgttttcttcccatcacagacatcgcactggaaatcaaccgatttgcgtttgcgttactggatgatccttctgctaccggcattgattttcagaccggtccgctgaaaggatacgatgatatccacgcagccgtatcagatcaacagcatggggtgtgccttttgtgtggaaaagagatagaagcatttacctatatcgttccaaaagcaaaaggcggatcagaaacactggcgaatgtagcaggcgtctgtaactgctgtctggaaaaactgcataccgatcagaacgtccgtgaggaactgaaacagcagaaagagggacagtttaaaaaatatggtgcactaagtgccatcaatcaggcaatcccatatatctgcgaacaactgatccgggaatatggaagctcacatgtgcaattttgcactggaggcgaaacctatcatatgagggaactgctgggctatacaaaagaacaggcgatgacagcaccagcaatagatgcttatgtgattggtctggtatcccttggaatcattccggaggaaaaaccggattttacattttcgcatcagattcgtcagtttcgcaggcaagaccgcaggattatcaaaagccagcgggaacgcacctataaatatcatggcacaaccgtggcaaagaaccgcaattcacgattccaacagaccagtccctcgttggcagactggtatcaggaaatgtgtctgacctacggaaccacacaggcagaaaaaatgcgatcccagcttactgtagttaaaagcacccgaagatacaataacccaaaccgcctgtatccgggaaccgtattttactatcgcggcgaacggcatgtgatgagcggccagctcagtaatggactgtatctgcgagcagtgggagacagtaagacgaattataaggcaaaagaatgttgggtggcgaagcggaatgcggggttggtgtttgtggagtag

SEQ ID NO: 1606 - DNA, 397 bp, Moorena sp.
  source 1..397: mol_type = other DNA
gccagaagaactggaaaaagcactgaaaacgcttgcagaagacctgaagatcaagaccgatgcacgctttattccggtaacacatacagatgaagtcttcctccagcaattatatgacgggaacagacatttgaacatgtcacggggtgtgattcaaaacggcaaaacgatcatacaggaaggtcccttgcatgggctggaagaaaaaatcgtcaaaatcgaccgtcataaacgaatcgcatttctgaaaagcagtgaccagactaaagaagcattactgtttaaagtcggtctcgagattacagaaaaaacaactgcataacgcatatgggtatttacaaagtcagctgctccggcagaaaacacagcaggggcagttgagcagagatacgatgtc

SEQ ID NO: 1607 - DNA, 1365 bp, unidentified
  misc_feature 1..1365: note = Ga0307377_10081489 JGI
  source 1..1365: mol_type = other DNA
atgcagcagtttaaaggaaagttaaagaacgtaccaaaggatacttcactagtcctttgctctacaaatctggaattaaacagagatcaaagtctcagtgttccagatagccttagcaaaccgcctttaaacactcccgaagtgaatcaaccgtcaacgaacaacgaggacttaccatcaaaagtgttcgtattaagtatcaaaggtacaccacttatgcctactaaatgttccagggctagaaaaatgttgataagtgggaaagcaagagtagttaaacgattcccttttacaatacaattaaattttgaatgtgaaaatgtggtgcaagaaattagtttaggagttgatactggatttggaaatataggattttcagcaataacagagaaagaggaattaatatgtggtaccttaattctcgatggaagaactaaagaaagacttgatgaaaaaagaatgtatcgtagaaatagaagaaacaagttatggtatcgagaatcgagatggtcaaatagggtaagaaaagaaggctggttaccaccttctactgagagaagatatcaaacacatttaactattatgaagcaattgaaaaagctactacccatatcaaatataactttagaagtagcaaagttcgatattgctaaaattgaaaatcctttaatagaaggccaagattatcaacaaggtacactttatgattatcaaaatatgaaaagttatttgatgagtagagaaaaaggtaaatgccagttttgtggtgaagattttaaaggacaaccttcacatatacaccatattaaatctaaacgagaaggtggcaatgatagaccagacaatcttgctttgttacataagaaatgtcatgaggagatgcatgctaaacatttagaatacaaattaaaatcaaattctgaagattataagcaaactacatttatgaatattatcaacaaaagatttaaacaagatataccagagttgaagattacgtatggaaatattacatttgtcgatagaaataatttaggattagaaaaaacgcattataacgacgcatttgtaatatcaggtggaactcagcaatcaagaacaaaggcaataaaaattaagcaagtacatagaaataatagggtactacaattgaatcgtaaaggatttaaaccatcaatcaagaaggagaaatctaaagttgatcccggagatttgttttgggtagcaggtaaacaatatacttgtacaggaatgttcaacaaaggaaaatatatttgttttgggagtacttctaaaaaagaatatttcaatttctcaaaagtagtaaaaacattcaaacagggcagttttttatggaatatataa

SEQ ID NO: 1608 - DNA, 260 bp, unidentified
  misc_feature 1..260: note = Ga0307377_10081489 JGI
  source 1..260: mol_type = other DNA
gtcaactacccatgagctaaagactcatgggcttgaatcgtgaggttcaacgtaagagttgattagggagcatattatgcagcagtttaaaggaaagttaaagaacgtaccaaaggatacttcactagtcctttgctctacaaatctggaattaaacagagatcaaagtctcagtgttccagatagccttagcaaaccgcctttaaacactcccgaagtgaatcaaccgtcaacgaacaacgaggacttaccatcaaaag

SEQ ID NO: 1609 - DNA, 831 bp, unidentified
  misc_feature 1..831: note = Ga0310147_000164 JGI
  source 1..831: mol_type = other DNA
ttgttagtgttcgtacttaacaagcatggaaaaccccttatgccatgtaaaccatcaaaagcaagaaaactgttgaaacaggggaaagctaaagtagtcaaaaaagaacctttcacaattcaacttctgtatggaagtagcggatacaagcagaagtgtatagtgggaattgatgcaggaagtaaaaatatcggtatagcagtaacaactgaagatggcagggtaatttacaaggcacaggtagagttgagacaggatataaaagaaaaaatagaaacacgacgaagacttcgaagagcaagaagaaatagaaagacacgctaccgcaaacccagattcaacaaccgcaaaaaaccaaaaggatggttgcctccatctataagagcaagaatagaagcacattataatctcatcaaaagacttactcaaataattccagtatcaaagattaaggtagaagtagcgaaatttgacgtgcaggctattcttaatcctaacatacatggcaaagaatatcaaaaaggcaggatgcatggttttgacagtgttaaggaatatgtgaaaatcagagatggttttaagtgccattatgccaagttaagacctgatataccatgttcagggaaactgactgtagaccatatcgtacccagaagcaagggtgaaacagacaatccaacaaaccttgtgtgctgttgtgaagcacataatacagcaaaagggaatatgagttataaacaatttactggaaaacaaccaccaaaaattgaggattttcgtcccacagtatttatgaatgttttgagagtttatcttgttccgatgttgcag

SEQ ID NO: 1610 - DNA, 248 bp, unidentified
  misc_feature 1..248: note = Ga0310147_000164 JGI
  source 1..248: mol_type = other DNA
gtcaactacccaccgcttatagaagcggaggcttgcaaaagccttagttgactaccctcagccagggctaaaacgccatcgggctacgttaggcaagtcatgacaccatgggataatgcccaagtcccatgctctgtcgcatgtacctaaacagtcctgaggggtagggacagtggtacatgcatagcaagcttgcctaacattggggatgggcaaaataactccaaaaggaggaacacttcttgtta

SEQ ID NO: 1611 - DNA, 969 bp, unidentified
  misc_feature 1..969: note = Ga0073582_115410 JGI
  source 1..969: mol_type = other DNA
gtgttgaagcagaagttattggagagaaatacatacacacccaagagtgctcctccagctcttggcactgtgaccctgtgtttaaacagttctaaagcagaaggaacagtgatgcagagtttaaaaacctctaataacactcccgaggaggctctcacccctaaagcacgagggggacaggacttgagagttcctgttatttatgtgctcaacatgagaggtgatcctctcatgcctacttcaccacgtaaagctagaatattactcaaaaaaggagaagcacgtgtcacaaaaagaacacctctaactattcaactaacaaaacccacaggagaggctaaacagagcatcacattaggagtggatgctggttatagtcatgtcggtctctctgtgacaacacaaaacaaagaattgctatcgtcagaagtaaatcttagaatagacatggttaaacttaattcagatcgcagacagtaccgcagaactagaagaaacagaaaaacgtggtacagacaacctagattcttaaacagagttaagagcaaacataaagggtggctccctccttctgtacaacataagttagatactcatgttaaattagtcaaaaatgtacttaacatacttcctgtgtccaaaatcattgtagaagtaggtaactttgatattcaaaagattcagaacccagagatagagggcaaggaataccaaaaaggttctcaattagggttctataatgtcagagaatatgtacttcacagagacaatcacacttgtcagcactgtaaaagtaagaatgtacctcttgtagttcatcatattgagagccgacagactggtggagatagacctaataacttaatcactttgtgcaagaaatgtcacagtgaccatcatgaaggacttattaagttaaaagttatgaagagcaaaccttttagagcagcgactttcatgtctactatt

SEQ ID NO: 1612 - DNA, 230 bp, unidentified
  misc_feature 1..230: note = Ga0073582_115410 JGI
  source 1..230: mol_type = other DNA
gtcaacgactctggggttaaaaccccgcagcttgtaacaaaagctgctgtagtgaccagggagctttaaacaagtgttgaagcagaagttattggagagaaatacatacacacccaagagtgctcctccagctcttggcactgtgaccctgtgtttaaacagttctaaagcagaaggaacagtgatgcagagtttaaaaacctctaataacactcccgaggaggctctca

SEQ ID NO: 1613 - DNA, 1296 bp, unidentified
  misc_feature 1..1296: note = Anaerobic digester metagenome
  source 1..1296: mol_type = other DNA
atgaatcttgtgtttgtattagatgcaaataaaacaccattgttaccatgccatccaatgagggcacgcaagttgcttgagtcaggtaaggcatcagtttataagagatatccatttacaattattcttaaacgagtggttgaaaatcctgtagatcctaacttagaaataaaagtagaccctggttctaaaacaacaggtatagcagttgttaatccacacacaaaaagagtagtatttgcgggtaatttacaccatagaggagaacggattgtaagtgatttacttaaacgtagccaagttcgtaggggtagaaggaatagaaaaacaagatatagaaagccaaggtttgataatcgtaaaaaagaagagggttggttgccaccttcgttgttatctagggttaacaatgtggtagtatggacgcaaagattgatgaaatattgtcctattggtgttatacatgtagaaacagctaagtttgatacgcaacttatgcaaaatcctgaaattagtggcattgagtaccaacaaggcacattacaaggttacgaggtcaaagagtatttattagagaaatttgactataaatgtgcttattgtgggatacagaacgtaccattagaggtagagcatgtttgggctaaaagcaaaggtggttctgatagagtaagcaaccttgtaatatcttgtgttaaatgtaacgatgaaaaaactaatatgcctattgaagaatttctaaaagatagacctgagctactaaagaaaattcagtctcaaatgaaagcatctcttaaagattcggctgttatgaacgccatcagatatcgaatcggtgatgagttaaagaagttgggtttgccagtttgtttttggacaggtgggagaaccaagtataacagacataaacagggctatccaaaagagcactggattgatgctgcttgcataggagaaggtggtgatgatgttctcctagatcctaatatgcaaattttaataattgaggctattggtagaggtaatagacagatgtgtttaatggataagtatggctttcccagaactaaacctaaacagtctaagcgagttcatggttttcaaacaggtgacatggtacgcttagtgcaacctagtgggaagtatgctggcacatatgtagggaaagtagttgttagagcacgtggagactttgacattattacaaaagaaagacaaaaaataacagcaacatggaagcgatttactttattacaacgctttgatgggtatagctatacttttagccccgcttag

SEQ ID NO: 1614 - DNA, 253 bp, unidentified
  misc_feature 1..253: note = Anaerobic digester metagenome
  source 1..253: mol_type = other DNA
actttataccctccatggcaacagtttaggtagagggctatatgcccaagttcaaccagtttaagctctatgagagctacgttatccacgaatatatagacaccttggggtgcttctccagctccaagctctgtggtaagtgattaaacagtacaatagcttagaagtgtgcagtgttgcttacaaaaaccgtggaataacattgactaggagaccgttacttttaaaaaggagtgattcttagatgaatctt

SEQ ID NO: 1615 - DNA, 1266 bp, unidentified
  misc_feature 1..1266: note = Ga0376687_0067215 JGI
  source 1..1266: mol_type = other DNA
gtgccagagccggaaggaagggcgctgatgggcaccagcgttgctctcgtcatgacacccagtcgtgcttccgaagctcctggagctgtcgcgagagcgttaaaagcacccgtcggggtacgggtcggtgcgttgagcccaacaagcgagagcaccagcggcgaggggagcgtgcctccggatacctgctcgggaccgtcagacagcccggtaacggggccctcatccgagggcacagaaaggagtcaccccatggtctttgtgctcgaccaacacaaaaagccgcttatgccgtgtacccccagaagagcacggctcctgctgacgcgcaagcgggcggtggtccatcggctcagtcccttcacgatccggcggcatcggaccgcagcatccagcagagtaccgtacagccggtggtgctcaagatcgatcccggctcgaaaaccaccggcctggccctggcgcgggtcgaggagagcgaagagggagaggtgcaccacgcgctgcaccttgccgagctcacccatcggggagaggagatccgcgagcgtctgcgcaaacgggcggtctatcgccgccgcaggcgttcggccaacctgcgctaccggccagcccgcttcctcaaccgtcgccgcccgcccggctggcttcctccgtccctgcgctcacggatcgacaacgtcgtgtcctgggcctcccgctaccggcgctgggtcccgctggtgcgcctggaggtcgagcgcgtcaagttcgacacccagaggctcgcagaatagggagatcacaccgccgcggagttcggccatcccgaagtggccgccctggccagccgtcccctgcgggatgcggccgccgtcaacgccacgcgctttgcgctctgtgacgaactgcgcgcgctgggcctgccgctcaccagccttgtgtggaggacgtacgaggtggaaccgtgcccgcttctcgctccccaagacgcacgcgctggacgcgttgtgcgtgggggaactggctgggattgatgctggcgcgcaccagacccttgccatcaaagcgatgggtcggggtcgctacagccggaccaatgtcgacgagtcggggttcccggtgggctacttgatgcgcgcagcgcgcaggttctggggatcaaaacgggggaccgggtgcgggcggtggttcccgaggggtttgcggcgcaggggacgcataccgggcgcatcgcggtgcgagccaaccggcagtttcgcatgggccgtgtgcaggggatacccg

SEQ ID NO: 1616 - DNA, 271 bp, unidentified
  misc_feature 1..271: note = Ga0376687_0067215 JGI
  source 1..271: mol_type = other DNA
gtcaacgatccccacgcatgaatgcgggggcttgtcccttgtgttgatgccgttttcgttgtccagccgaggtgccagagccggaaggaagggcgctgatgggcaccagcgttgctctcgtcatgacacccagtcgtgcttccgaagctcctggagctgtcgcgagagcgttaaaagcacccgtcggggtacgggtcggtgcgttgagcccaacaagcgagagcaccagcggcgaggggagcgtgcctccggatacctgctcgggaccgtc

SEQ ID NO: 1617 - DNA, 1332 bp, unidentified
  misc_feature 1..1332: note = human gut metagenome genome assembly, contig:NODE_8362_length_2558_cov_1.603676, whole genome shotgun sequenceWGS
  source 1..1332: mol_type = other DNA
gtgaaggatcacaaccggctgcaaggccgaggagaacaaaacttgagagtatttgttttaaacaaacgaaggaagccgctgatgccgtgttcttcggctaaggcgcgcattctgctcaaagagaagaaggctgttgtagtgaggcgtacgccattcactattcagctgacgatcgctaccggcgaaacgaagcagccggtaagtctcggcgtcgatgccggatacaagcatgtcggcctttctgcttcaacggaaaaggccgaactctatgcatccgaagtcgaactgcgtcaggacataaccgacctgctttctacacgacttgcactgcgccgctcgcgtcgcaaccgaaagacgcgctaccgcgcacctcggttcgacaatcgcgttcgcagcaagcacaagggttggctggcaccgtctgttgagaatcgcatcaatgcacatctttcacgcattgctgccgttcttcgaatactgcctcttacgaagatcactgtggaaacagctgccttcgatacgcagcttctgaagaatccagatgtttcgggcgaagcgtaccagcagggcgaacagcttggcttttggaacgttcgcgaatatgtcttattcagagacgggcacgtctgccagcagtgtcacggcaaatcgaaagatccggtgctcaacgtccatcacttggaaagcagacgtaccggcggcgattctcctagcaatctactcacgctttgcgaaacctgtcacaaggcgctgcaccgtggcgagatcaagctgaaaactcaacgaggcaaatcgttcagagcagaaaccttcatgggcatcatgcgctggacggttctgaatcgactgaagtctgcatatcccgaactggatgtgcgcaacacctacggctatctcacgaagcacgcacgcatcacacatgggattgcaaaatctcattgtgcggatgcgttctgcatcgccgggaatttcggagcaaagcgactcgggtactactacttccaaaagcagacccgtcggcacaaccggcagattcacaagctttcaatcctgaagggcggcattcgcaagcgcaatcaagcgccttacgaagtcaagggattccgtctctttgacaaagttgcatgcaaaggagaaggtgccttcatcttcggccgccgctcatcgggaagcttcgatgttcgaaagcttgatggaacgcgaatttcagcaggcatcagcttcaagaagcttcgtctgctcgaaaagcgcagaacctacttaactgaaattcgaaaggaggcggcgcttccacccctgcctaaacgcaggggtctccgcgtcgatttttga

SEQ ID NO: 1618 - DNA, 248 bp, unidentified
  misc_feature 1..248: note = human gut metagenome genome assembly, contig:NODE_8362_length_2558_cov_1.603676, whole genome shotgun sequenceWGS
  source 1..248: mol_type = other DNA
gtcaactaccccggcctgaaggccgaggcttgaatgagcctctagttgactagcctcagtccgtcatttgacgggctacgttggttgggaatgtacaggcaccgcgggatgtcgatcctagtctcgcgctctgcggccgatagttaaaagctcttagaggtaggagcggtgctgtcggcaagaaaccccttccatcattggtgaaggatcacaaccggctgcaaggccgaggagaacaaaacttgaga

SEQ ID NO: 1619 - DNA, 1842 bp, unidentified
  misc_feature 1..1842: note = Draft_c0007806 JGI
  source 1..1842: mol_type = other DNA
atgccgacggaaaggcacggcaaggtgcgccgaatgttaaaagacggcagggcgagagtaatcaaagccaggccgtttacgatccaactaacttacgaaactacaagttacacccaacacattaccctgggcatagacgccgggtaccaagaaatcggcctatctgcggtatctcccgggaaggagttgttatccgccggatgcacccttctaaaaggccaggtcgagcgcaacaaagaaagattaatgtaccgcagacagagaagaagccgcctgcgttaccggaaaccacgcttcaataaccgtaaaaaacccgaaggctggctggccccgagtattcagcacaaactggacagccacctgcgcctggttgcctgggcaaaaaagctgcttttcatcactgacatagtgatagaagtagcaagtttcgacatccaggcaattaaaaatcccggcatccagggaaaagagtaccagcaaggagaacagtacggcttctggaaccttcgcgaatacatcctgcaccgggacggccaccagtgccagaaccttaaatgccgcaacaaaaaccaggtgcttcaaactcaccacataggtttttggaaagacgatatgacggacaggccagggaacatcatcaccctctgcgacaaatgccaccggccggagaaccacaaggaaggcaagttcttgtggggatgggagccgaaagtaaagccgttccgggcagagacatttatgagcaccgtaagatggaagatagtcaacgctctaaaatgccggcatacatacggccatataacgaaatcccgcaggatagggctaaagctggaaaaaagccatgccaacgatgcctttgtaatagccgggggcagttgccaaacaagggcaaatacttttagtatagagcaggtccggcgcaataaccggtccttggggaagttttacgattcccgatatatagatatccgcacaggggagaaagtcagtggccaggagttgaactgtggccggcgcacccggaacaagaatctgaacagtccgaacctgcgggtataccggggcaaaaaagtatctaaaggcagggtgagcataagaaagcagaggtacccgtatcagcccaaagacattgttgaatttggtggctggcggtacacggttaaaggtatgcatagctacggcgcctatatcaatctggcggaattgagcaagccggtgaaaacggaactaggtcagacttgtgcggtacagcaaaggtttttgtgtagcgtagggaaaaacttgtcgctctgcgggcgacccggcattcatctttcgcctaaagaggcgggagtcttctgccggattatgataaatatattatcaggaattaatattacacatttaattgattatgaaagtgatgatgaattgcatactacgcaatttcaaagaacattagatttgctaaaagatacttccaaattgggcaaacaaatcaaataccgtttaggttacaccaatttgacttttgaattatggatgattttacataaagcgaattgtaatactttatttacatatagatggcaatatcttgatgcaataaacagagcatatggtgagaaatttgaaagtctcaaagagtataagcatgaattcaatttcaagagagtgcttggaaaaatatccttacctgaagtgaaagtggcgatcgatcgatccaaggccatcatgcaaacaaatatggcaaatggtctagtgttgcagcagtacaaaggatatcgttattacagagaaaatccgtctctttcagtttgggagcccatcgaaaaaataatgatggattgtggactgatgtaa

SEQ ID NO: 1620 - DNA, 292 bp, unidentified
  misc_feature 1..292: note = Draft_c0007806 JGI
  misc_feature 11: note = MISC_FEATURE - Any "n" represents any nucleotide
  misc_feature 23: note = MISC_FEATURE - Any "n" represents any nucleotide
  misc_feature 38: note = MISC_FEATURE - Any "n" represents any nucleotide
  misc_feature 48: note = MISC_FEATURE - Any "n" represents any nucleotide
  source 1..292: mol_type = other DNA
gtcaacaaccnccgcctatagangcgggggcttggggnagcgtatagnggaaaagctatacgtccccaagcccggttgattagcctcagccaccgggcgtaaagcctgacggggctgcgttgcaatggaatatataggcactccgggatactccactcgtcccggacactgcggccaatggttaaatatcgctgaagggtaggcgaagcgctgttggcgacaaacccgttgtaacattggcgaagtggacccactgcgaaagcagccttgtttccgaaaggagatcaacatg

SEQ ID NO: 1621 - DNA, 1431 bp, unidentified
  misc_feature 1..1431: note = Ga0376513_002019 JGI
  source 1..1431: mol_type = other DNA
atgatttattttgtgaaagataagaatggtaaacgtggtcatccgacaagacgtgcagattacataactaaacatttaaaacgtggtactgctaagataattagtcgtactaaagatagcttaacagtaaaactattggatattgaatttaaagatgaagatactattgacgctgaatttagagtaggtattgatcctggtacaaatcatattggatttgctctatataaaatttataaacaaaatattactttgttaataagtggtgaagcagatattagaagtactgatataactaagaatcttattaatcggaagatgtatcgtaatactagacggagatatcgtagaaaaaacgttcttcgtaaatatggaaaagctaagtttcgtaaaccaatttggaaaaacagaaaacgtaaacattttcaacctactttcaagcatttaattaacacacatattaatgtaattaaatatttcttaaatcgatgttcaattaataaagtacatattgaatatgctaaatttgatactcaaaaaatggttaatccaaacattaaatctatttggtatcaacatggaccacaatacatgtttgaaaatactaaatcttatatccgtagtcgagataattatacttgtcagatatgtaataaaaattgtcttgattataatgaagtacatcatattatatggcaagaatatggtggatctgataaaccagataatcttatattactttgtccaatttgtcataagaaagtgcataaaaatcttgttaaatgtccttctattccaactcagaatcttaaacaagcaggtcttcttaattcatgtatgaaatatatatttatgatatttgagaaaagtgtaccgactcaggatactcttggaagtattacaaaaatagtaagaattaattctggaatagagaaaactcatgaaaatgatgctaaaattatagcgttatgtgatagtcttgatttacaagatattgaaaattataaatatatcgacttaaataatcatgtaacagttaaacaatatcgtagacatgatcgagcttgggtaaaaagatatgaagatcgtaaatactatattactggacaaggtaaaaaagtatttgctcataatcgtagtaaatcaactgttcaaaaaactcgtggattagatgagttaaaacaagaattaaaaaaacgtggtataattaataagattcaaattattgctaagcctggtggtccaatatattgtcggggcaatattaataaacgatttattcctggtcaattaattaattataatggagatattgatatctgccgaggttgggcgtctacacaatgcaaagtaatacttgaaaataatggatatgttaaacaaaaattatgcaaagtaattcgtaataatagtggattagtgtttgtttag

SEQ ID NO: 1622 - DNA, 276 bp, unidentified
  misc_feature 1..276: note = Ga0376513_002019 JGI
  source 1..276: mol_type = other DNA
gtcaactaccgggtgcttagcacccggcatacagatgtgggcatagtccacataagtaatgctagttaaatactagggttgaacagacaatttagctaaagtttacttcagggtgccactcccagctctgaacacactttaaaactagaggtaaaaagaatatagtgtaaatcctcatcgctgactattaggtaacgaagatcagtgctactttagctaaagtcgagggagacgtaatgcaagtttctcagatcagaggaaaattttaaaatgatt

SEQ ID NO: 1623 - DNA, 1008 bp, unidentified
  misc_feature 1..1008: note = Ga0071116_1000899 JGI
  source 1..1008: mol_type = other DNA
atgttcgtaccaacaataaacaaccaaggcattccggcaatgccaacaacgccccaaagagcaaggaggcttatatgctctaaatctgctactccattctggagtcacggcattttctgtattcgactaaacgtagatgtgcaagacaataaacaagatatagccatcggtatagacacaggtagtaaaaaggaaggctttagcgtgtgctctaaaaagcacacgtacctaaatattcaggcagatgcattgacctacgtaaaagctaaagtagaaacccgtagaatgcttcgccggagtcgcaggagccgaaatactccatatcgcaagtgccgatggaatagaaagataggaagactaccgccttcgaccaaagctcgatgggattggaaactgcggattgttaatattctaaggcgagtaatacctcttactcactcttgcgtcgaagacattaaagccaaggccaagaaaagaaaaaggaagtggaacatatcgtttagtcctattgaagttgggaagaaatacttctataatgcacttgattcgacactaaagctaaaagtaattggtggaactaagacggctaagctacgaaaggaagccggactcaagaaaaacaagaaaaaactgagcgaaaagttcgagactcactgcgttgatgcgtttgtgttagcgtgtcatatcatttggcgacctataattccggacaataaagtcatcctttgcgtttcgccaatagaattaaaacgcagaatgctacatgccatggtgccttcaaaaggaggaactcgaagaaaatacggaggaacaagatcattaggactaaaacgtgggagtttagtcaaacataaaaaacacggaatatgctacgttggcggcaccatgaaaaatcgaatctcactacataaccttaatactggtaaacggttatgccgaaatgctaagccagaagaatgtaagaaactaacatttaatacatggaggcggcattcctacaatggataa

SEQ ID NO: 1624 - DNA, 179 bp, unidentified
  misc_feature 1..179: note = Ga0071116_1000899 JGI
  source 1..179: mol_type = other DNA
atcagtaacccacgactaaagttatgggtctgtctgaaaggaactaaccacttctggaggatggattaaaccactgattagacgcatgatttcacggtgaaatcaagctagccaactggacgtggtagtccgaagaatatgcaggatgctcctcaagtcctgcttcccttcgttggcca

SEQ ID NO: 1625 - DNA, 639 bp, unidentified
  misc_feature 1..639: note = Ga0134388_1000763 | JGI
  misc_feature 141..150: note = MISC_FEATURE - Any "n" represents any nucleotide
  source 1..639: mol_type = other DNA
atgctgaaggcgggcaaggccgtcgtcgtgcgtcgaacgccgttcacgatcaagctgaccatcgccacaggcgagacgaagcaggacgtgacgcttggcgtcgatgcaggcgcaaggcacgttggcatttccgccacgacnnnnnnnnnncgacaggacatcacgggacttctggccgatcgtctggcattccgacgtgcaaggcgcaatcgaaagacgcgctaccgctccccgcgcttcaacaatcgcgttcgatcaaagcacaagggatggcttgcgtcgtccgtcgaaaaccgcattcaggcgcacatgtcgcgcatcgatgcggtctgcagactgcttcccgtcaccaagatcgtgattgaggcggcatcgttcgacgttcagaagatcaagaatccgactattgaaggcacggactatcagcagggcgaccagcttggattctggaacgtgcgcgagtacgttcttttcagagacggtcatgtttgccagcactgtcatggtcgttcgagggacaagatcctcaacgtgcatcatcttgagagtcggaaaacgggcggtgatgcgccaaacaacctgatcacgctgtgcgagacatgccacaaggcttatcacgcaggaaagatcaagttgaag

SEQ ID NO: 1626 - DNA, 300 bp, unidentified; identical to SEQ ID NO: 995
  misc_feature 1..300: note = Ga0134388_1000763 | JGI
  source 1..300: mol_type = other DNA

SEQ ID NO: 1627 - DNA, 1149 bp, unidentified
  misc_feature 1..1149: note = human gut metagenome genome assembly, contig:NODE_4209_length_4046_cov_2.370370, whole genome shotgun sequenceWGS
  source 1..1149: mol_type = other DNA
atgctcacgaacgagcgctctcgccatgacgactgccgagcgtaccgccggacgcgcagaaaccgcctgcggtatcgggctgcacggttcaataaccgtgtatcaggcaaaaagcccggttggattgctccgtctctggacaacaaggtggagcggcacctggatattatctcccgttatctgtctgtcatgcctgtcacggatgtctttatcaaggccgcgacatacgatacacagctccttgcggcgctggaggcaggggaacctgtcccgcagggcaaggactatcagcatggaccgcagtacggctacgatacgctgcgggaagcggtctttgaacgggaccactatacctgtgtgtattgcaagagaggcctgaaagacggcgctatccttcatgtccatcacgcctactactggaagggtctgcatgggaacagcatgagggagcttgcgacctgctgcgagaagtgcaacacacctgccaatcacaaggagggcgggaagctgtggggcttcgataagcctctgcggaaatataccggcgaagcgtttatgaatagcgtgcgctggattctctatcagcgtgcgatggctcgcttccagggtgttgcggaagtacacatgacctatggcgtcatctccaagcgcgtccgcaccaacctcggcctcccgtattcctgcgctacggatgcctactgcatgggcgagctgcgtccggaagccagatgcgaaacagaggtcttccagaaatacaggcgaaacaacagagtcctatccaaattctatgacgccaaatattacgacacacgggaaaagggagttatccgttctggcaacgagctgtcctccggcaggacgaaccgcaatcataaccttgacggcgaaaatctgcgccggttccgtggctgtaagaagtcaaagggccgaacctcgaccagaaagcagagatatgccatgcagccgggagatatcgtggtctacggcaatcgcaaatacgtttccaagggctgctccagctatggcagggcattaagcctactcacggatggaaagccgcttatggtcagcatgaagaaaatccagcttgttcgtcataagggcggctgggtgcggcttccccatgcagcagccgaggcaaaaaaataa

SEQ ID NO: 1628 - DNA, 318 bp, unidentified
  misc_feature 1..318: note = human gut metagenome genome assembly, contig:NODE_4209_length_4046_cov_2.370370, whole genome shotgun sequenceWGS
  source 1..318: mol_type = other DNA
gtgcgtaccatcaaacccggtatatccttggcgatgtggaccacagtaacgccgcgtgagcggtaagtgctgatttacctttttggtttgtcgtttggaatatactcggcaaactcaacttcagttgacgtcccccaccaaatgacagggagctataccgtacgattaaattgcaatccggattgacaggttgacgtcccccaccaaatgacaggtagctataccgcagccccccccgcaaacggagcatcacgcacagttgacgtcccccaccgaatgacaggaaactgcacccgcagcgtgaaaggaaaaaataag

SEQ ID NO: 1629 - DNA, 705 bp, unidentified
  misc_feature 1..705: note = Ruminococcaceae bacterium
  source 1..705: mol_type = other DNA
gtgaaagtatacgtgataagcaaaagcggcaaagcgttaatgccgacgaagccgggcagggcgcgaaaaatgttaagggacgggaaagcgaaagtagagcagcgaacgccgtttacgattcggttgatggtagaaacgaaggaatacacgcagccgataacgttagggatagacgcggggagcaagacggtcggcgcctcggcgacgacagaagcagaagaggtgtacagttccgaaacagagcagagagacgacatagcggaattaatagcgacaaggttagaatatcggcgggcgaggcgcaagcgaaagaggcggtacagaaaaccacggtttcaaaacagggtaaaagcgaagaagcgcgggtggatagcgccgagtatacggcaaaaaatcgaaagccacttgaaaataatagcgagcgtgtgcaaaatattgccaataagcaaaatagtaatagaagcggcggcgttcgacatacagaaaatcaagaacccggagataagcggcgcggagtatcagcaaggcaatcagcttgatttctggaatgtgcgtgaatatgtgttgtaccgtgacgggcacaaatgccaaggcaaaaaaggctgcgcaaacaagatactgaacgtccaccatatcgagagccggaaaacgggcggagacgcgccaaacaatctgataacactatgcgaggagtgtcacaatgcg

SEQ ID NO: 1630 - DNA, 247 bp, unidentified
  misc_feature 1..247: note = Ruminococcaceae bacterium
  source 1..247: mol_type = other DNA
gtcaacaacccacaactaaagtatggggcttgcggcgaaaacggtaagtcaggttgactactctaagccaggagaggctacgttatacaagaatatatataggcacttgcggatgtatgctcaagtctgcaacactgcggcgcgtgattaaacagtcctgaagggtagggagagtgttgcgcgtgaaaaccttgtaataacattgaggatgggcaactaactctgaaaggagaattatacagtgaaa

SEQ ID NO: 1631 - DNA, 1206 bp, unidentified
  misc_feature 1..1206: note = SL_8KL_010_SEDDRAFT_10000047 JGI
  source 1..1206: mol_type = other DNA
atgagtaaaaaagtttacgtgcaggacaaaaacggcgatcctttgatgccgacaaaaccggcaaaagcaaagcatatgctgaacgacggtagagctgaagtagtccaacgctcccctttcacgatccagctaacatacgagatcgaaggagaaaagaacaaacaagaggtggaactcggtctggacccgggctataccaagacagggttttcagcaaaagtggaagacaaagaactgatcaatgggacgatggatacggacaccaacgtgtccgacagattaacagaaagaagaaaatacaggaaaaaccggagaaacaggaatacaaggtacagagaaccaaggttcgacaacaggaaacgtgataacggctggttggcaccgtccatacagcacagattagatatgcacagacaactggtcgacgagatcaaaaagatactgcccgtcgataaagtagtagtagaagtcgcaaagttcgaccaacaaaaaatacaagatcccgaaatcgaaggtgtcgagtaccagcacggcaccttacagggatacaacgtcaaacactacctgttagagaaattcgactaccaatgtgtctactgcggtgcggaggacgtacctctcgaagtcgaacacatcgtgcctgattcgcgtggaggtaccgaccgcgtggacaacctcactatctcctgtcacgattgcaaccaggaaaaaggtgacagaacagcagcagagttcggctaccctgaagtgcaggaacagacaaaagaaacactgaaagaaaccgccttcatgaatcaagtaaggtggcaactgacggaagaactcgacgctgaaccaacttatggccatgtcaccaagaagaaacgaaaggaattggacctcaaaaagtcacacgtcaatgacgctttcgtgatcgcaggcgctgacggcaccgaagagcggtgtgaaccattcaaagtcgagcagcgcagaagaaacaaccgcaaactgcagttgaataggagcggcttcggtaggagtgtgaggaaacaacgttaccctatacaaccgggcgacacgataaaaaagaatgggcaagaaaaagtagctaaaggaacattacactatggtcagtacgtgcgggtagatgataatgatggttactctgactggaaaacagaagatgtgaaagtggtaacgtatggtaaaggattacagttcaactaa

SEQ ID NO: 1632 - DNA, 324 bp, unidentified
  misc_feature 1..324: note = SL_8KL_010_SEDDRAFT_10000047 JGI
  source 1..324: mol_type = other DNA
gtcaacaacccgcaccccagaggggtggggcttgaaaaagtcctaatacgcgggttggagattagcccaagcgatgtctcctcgaaggtggaggcagatgagctacgttcgggactgagtgttcgatatacaccccgggatgcccctcaagtcccgggcactggaagagtagagtggacgaaacacgtcacaatcccaacggcgtgcaacatcacctgctccaacacctgtcccaacatgggcgatgaggacctacctgtttgacataacagggctgagaacctcagcgtcaaaatatgtcaggaacgaaacatgagtaaaaaa

SEQ ID NO: 1633 - DNA, 1458 bp, unidentified
  misc_feature 1..1458: note = Ga0137415_10000002 JGI
  source 1..1458: mol_type = other DNA
gtgataagtagtagtcaacttaagataacattggcgagagtgactaacaagtcccttacgggattattggaatttttgatggaaaagaaacagaataatggaagacgtatcgttatctcaaaatcaggtcgagtaaaagttaaaccaattacttttgttagtgtaattggaagtgatggtaaaccactaatgccatgtagtggcaaaagtgcaaggaaacttttagataaaggtcgtgcgaaggtaattcgtagagaaccgttcattattcaattacttgatcgaacacaaatcaattgtaaattacaacctacacaaattaaaattgatcctggtagtaaaacaaccggattagctatcgtgcgtgaagatagaccaaacgaaattacagttattcgtttaatggaattagaacatcgtggccgtgttattaaattaaaactttataatcgagctatgcatcgccgtaacaggcgttcgcgtaaaacacgttatcgtgaagctcgtttcttaaatcgtactagaccacaaggatggttacctccttctatccaacatcgtattgatagcacgatgtcttgggttaatcgacttagacgatggtttccaattactaaaattgtttatgaggatgttaagttcgatacacaactggctcaaaatactcatttagaaggcataatgtatcaacaaggtacattattaggatacgaacttcgtgaatatttattacttaaattcgatcataaatgtgcttactgcggaaatgggtgttctaaaggttttcaaatagatcacgtaattcctcgtagtagaggtggatctaatcgtttgattaatttagttcttgcttgcaaagagtgtaatcaaactaaaggtaataaaagttatcaagagttcttaaattttaatcaaattaagatagataaatttaagaaacaaatattaaaacctcttcgagatatggcggttatgaacgctatacgaaatgaacttagattagcacttattaaaactggtttattaattgaaactggaagtggtgggttaacgaaatttaatagattacgttttaaaatacccaaaactcatgctctagatgctatttgtattggttatatagttaaaatacatggatggattcataaaacattacatataaaatgtaatggtagaggtagatatcaaagagcaatacctgaccaatatggttttattaaagcttatatacctagacagaaatatttctttggattcagaacaggtgatcttgttcgtgtaagatcttctatcaaatctggtattaacccaccactttggtcaaaggtcagtcgtgtagtatgccgagcttctggtaagtttgtttttaaaataaatgaaaagatttatcaaccttcttatcgatactgtcaacgtgttcaacatatcgatggatatagttacataactgttatataa

SEQ ID NO: 1634 - DNA, 363 bp, unidentified
  misc_feature 1..363: note = Ga0137415_10000002 JGI
  source 1..363: mol_type = other DNA
gtcactgtcgaataccttagctaacctcggaaaacattaaaaatggaaaaaagttcatccactccactttaatacgtgagttgtaagactagatgaatcagcctcagtatgaaaatactacgttattttgatgcatatcttggaatgcccactcagttccaagctctatggtcttatcattaaacaactctgtgagataggagtagtgtgataagtagtagtcaacttaagataacattggcgagagtgactaacaagtcccttacgggattattggaatttttgatggaaaagaaacagaataatggaagacgtatcgttatctcaaaatcaggtcgagtaaaagttaaaccaattactttt

SEQ ID NO: 1635 - DNA, 1191 bp, unidentified
  misc_feature 1..1191: note = Ga0256842_1002984 JGI
  source 1..1191: mol_type = other DNA
atgccaattaaacagataaaagtttttgtagtggatgcagaagagaaaccgctgctacctactacacctgcaagggcaagaatacttctaaagaagggtaaagctaaggtttacagaatgattccctttaccattcagttaagcaaggttattaacgaccctgctggaaaatttactgcctctgttgatgatggagctaaatgggtaggaattgctgtaaaagggaaagatgaaattgtttttgtagctaatgtgagactcaggcaagatgtaggcagaaaagtcaaagaaagagcaatgtatcgtagaaacagaaggagcaggttaaagtatagacctgcaaggtttttgaacaggaagagagctaaagactggctaccaccgtctatcagatatagaaaagaagttgttttgagaatcctcaatgacttaaagaaatttctcaacattacggaagttgttattgaacaggtcagatttgacatttcttctcttgtagctggaagaaaacttgtaggagcagaattccaacagaaaagatatgaaggaagaagctttagagaaaaagttcttaaaagagacaattacacctgtcagatttgtggaatcaaagagaatcttgaagctcatcacataattccaaaaagcaaaggaggaacgaatcttgtagagaatggaattaccctctgtaaggactgtcacagagcagttcatgaaggaaagataaaaataactgctaatattcttttcttaaaagctccatcagcaattcagcaaggaaagtggtggttatacaggaagttaaaggaacagtttaaaaaagtagaaataacttttggttatctaacaaagaagaagagagaaaaactcaatcttcctaaggaccattatgcagatgcttgtgcaatgcttaactgcaatcatgtagtttctcctgtttatctcctccttccacgaagaaggagacctgagataaacaactccacaaagaagcatgaagaatatagaggattcagacactttgatcttgtagttgcttatcatagaactaaagggaaggtgatagggtgtgtgaggagtttaaagaaaagagggttagctttaagaactaagttttcaaataactttgtagttggatacacgaaaagcagactactctggagaccaaaagggttagtgtatgtgttgtga

SEQ ID NO: 1636 - DNA, 318 bp, unidentified
  misc_feature 1..318: note = Ga0256842_1002984 JGI
  source 1..318: mol_type = other DNA
agttttcattacggtttggatgggtctgaggtggaggtagtcctgatgaaggataagctgaacctgccgaacaggaaggtaggaggtgaagaggagagggaattcctttcccgctacctacgttctgtagttgtccataaggacagacaccctggagtggagcaccagctccaggctctgttggtggtgggagacgaaactcagcctgagatggtgttggtgaacactctcatcactgttagagactacgggacttcaccgaggtgcagtttaacccctttatgggaggtagcttaaatgccaattaaacagataaaa

SEQ ID NO: 1637 - DNA, 1398 bp, unidentified
  misc_feature 1..1398: note = Ga0209777_10021516 JGI
  source 1..1398: mol_type = other DNA
atgcagaagttacaaggaaagtttaagaacacaccaaaggatgcttcccaagtcccttgctctgtaaattttcaattaaacagagacgaaagtctcagtgctgagaataaagtactgacttgtaacaatcccgaagggaatctagtccagcatacaggacgctcattaaaagcaattgtgtatgtattaaacaaagagggaaaacccttaatgccttgtagttttgcaaagtctaaaagattggtaaaaaaaggaggcgcaaatgttgtaaaaagatttcctttcacaattcaaattaattttgaatgtaaggaagagattcagtccgttattttaggaattgatcctggatatcagaatgtaggtatttctgctaggactaccaagaaagaattgataagagtagaagtacagttaagaacagatatcaataaaaaacttacagaaaaaagaatgtacagaaagaatagaagaaacaaactttggtacagacaaccaaggtggtcaaatagagttgctacaaaaaaacaaggttggttggctccttctgtgcagcacaaattggattctcatataagattagtaaagagaatctgtaaattgcttcctgtatcaaaaataattgtagaagtggcaaattttgatattcagaaaattaataatccagatatttctggagtagaataccaacaaggctccttgctaggatatgaaaacagcaagtcttacttaattgctagagaaggaaagtgtcagttgtgtaataaagaatccactaaaggaaatccttttaaaatacatcatataatacaaagaaaagatgggggcactaatagcccttctaatctagctttactgcataaaaaatgtcatgataaattacatgagcaaggattaaaactaaaagcaagtaagcaatttaaggcagagacttttatgtccacagtaagatggaaaatagtagaagaattaaagaatcttcccactagtattacttttggatatattacaaaagtaaaaaggcaggaaagtaatattgaaaagtctcattccaatgatgcctttataatttctgagggaaaagaccaagaaagagctgtgtgcctcaatattaaacaaaaaagaaagaataatagatgtctacaattaaatagaaaaggcttccagccttctattagaaaacaaagataccccatacaacctaacgatttagtaaaaataaatgggaaaattgctctttcaggaggagtacactgtaaaggtaaaagaattattgtaaacggaaaaagtgtcaatataagtttattagataaatggaaatttaattttggaagttttatgggggcagcaattcctcccacatctaaagatgtgggtttccttgctgcgaatttatga

SEQ ID NO: 1638 - DNA, 259 bp, unidentified
  misc_feature 1..259: note = Ga0209777_10021516 JGI
  source 1..259: mol_type = other DNA
gtcaactacccacgactaaagtcgtgggcttgtcaggtgactggtaacgtaagagttgattagggagcttaaaggaaactttatgcagaagttacaaggaaagtttaagaacacaccaaaggatgcttcccaagtcccttgctctgtaaattttcaattaaacagagacgaaagtctcagtgctgagaataaagtactgacttgtaacaatcccgaagggaatctagtccagcatacaggacgctcattaaaagcaatt

SEQ ID NO: 1639 - DNA, 1311 bp, unidentified
  misc_feature 1..1311: note = human oral metagenome genome assembly, contig:NODE_138_length_60038_cov_8.947085, whole genome shotgun sequenceWGS
  source 1..1311: mol_type = other DNA
atgacaaaaacactaaccaaacaaacaacgcaagcttgcgtgttagatcaacaaggtaaaccgttaatgccaacgacacgtcttggcaaagtttatcgccttttaaaaacacaaaaagctcatattgtgtcatatgaaccgttcacaatccaattggattatgaacctgacacacacattattcaaccgatgacactcggcgttgatagtggtgctattcattcaggttattctgtaactaataaaaaccgtgaatactatagtgctgaagtcatcgcacgtaataatatttctaaacgtcttttagatagacgtatgtaccgcaaaaatcgtcggtctagaaaaacacgttaccgcaaaccacgatttaaaaatcgtaaaaacaaaaaaaaaggttggttaccaccatcacttgaacaaaaagttgcagtacaagtaaacgaaattgaccacttacatcactattttcctattgaaacaatcattgttgaagtcgctgaatttgatattcaaaaaatcaaaaatcctgatattgcaggcattgaataccaacaaggaaccttacaaggttataacatccgtaactatcttcttgaaaagcatggacgcaaatgtttctattgtggaaaaagcgtttctaagttcgaagttgaacacatgataccaaaaacaagaggtggctctgatcgtattgataatctaaccttatcttgtcatgactgtaatcaaaaaaaagatacattgaccgcagaagaatttattcgacaaaccttaccacctaaaaaagcagctaaaaagttaaaacaattgcctaatgaaaaacgtctgtttaaatacatggcacacatgaacgctaccagatgggctttatacaatgctattgacgaaaaatatccaaatgtcaaaataacttatggctacattacaaaatacaaccgtattcaagcaggtcttccaaaagctcaccacattgacgctaaatgtattactgatttttcaaccgttccatctataaaacaaactgttattaaaataaaaatgcgtagacacaatcgtcaattacatcaattgactttcagcaaaggacatatacgcaaggcagcaagtttaccaacaattatcttcggttttcagttatatgacctcgtgttatttgataatcattattattatattaaaagccgtcgaagttcaggatcatttgaccttacttctatagaaggtttaaaaaatacaaatcgaagttacaaaaaattaacattattagcacatacaaatgcatatctaactaacagatacactaatgactaa

SEQ ID NO: 1640 - DNA, 343 bp, unidentified
  misc_feature 1..343: note = human oral metagenome genome assembly, contig:NODE_138_length_60038_cov_8.947085, whole genome shotgun sequenceWGS
  source 1..343: mol_type = other DNA
agctagatcaataaccacccactgaaatgggcggtttaattaacttctttacaatgagttaatcaaaccgtgattgattagccttagtttttttaaaactccgttacttgtaaatatataggtaccgtgggatatctgcctagtcccacgctctacgcgttattattaaatagttctgattggtaggaaccgtgtgataacgataaaaaactacaagataacattggcgaaggcaacaaagggtttgtttatacccgcttaccgcatcaaataaacaccaaatcaactagaaaggactttgtcaaaacatatgacaaaaacactaaccaaacaaacaacgcaa

SEQ ID NO: 1641 - DNA, 1347 bp, unidentified
  misc_feature 1..1347: note = Ga0167622_1004112 JGI
  source 1..1347: mol_type = other DNA
atggttttcgtcctcgcaaaaaataaacacccgctcatgccgtgctccgaaaaacgcgcgcgcctcctccttcaacgtgggcgggcacgcattcacacgctctacccattcacgatccgtctcatcgatcgcactaccggcgttctgcaaccaatcgcgctaaaaatcgatcccggctccaaaacaaccggtatcgccctcttgcgagagcagtgcgaggacgccaatgtactgttcttggcagacctcgcgcaccgcggaagcgctatttccaagaagatccacgagcgagcagggtatcggcgtcggcgccgctccgcaaacctccgctaccgcgcgccacgattaaataaccgcacgcgaaaggcgggttggctcgcgccctcgctccagcaccgaattgacagtacgttctcgtgggccaggaaactccaagcacgcgcgcccatcacctccttggcgcaagagcttgtcaggttcgatacccaggtaatacaaaatgctgaaatctccggaactgcatatcagcgcgggaccctctacgaatacgaagcacgcgaatatatcttcgagaaattcggacgccaatgcagctactgcgacacgaaaacgggaccattgaacctcgatcacgtccaacccaaaagccgcggcggatcgaaccgcgtcgcaaacctcgtaccagcatgcatcccgtgcaatacatccaaggggagccagcctatagaacaattccttagccacgacccgcttcgactcgcacgcatccgtaaccagctaaagacgccccttaaggacgccgcggctgtcaatgctactcgctgggcgcttttccaagcactgtcaagcctcgcgctaccactccaagcgggaacaggcgggcaaacaaaatttaatcgtaaacggtatgacctgccaaaaacgcatacgtttgatgccgtctgtgttggcatgatggacaccgtcgtcacgatcagcaacagcaacagagcaattctcgtaatcacttgtatgggacgcgggagctatcaacgcacgcgcgtcaccgccaatggtttcccacgaggatatcttatgcgcggcaagcgggcgcgcggatttgctacaggcgatctcgttatagcatcggtaccaaaaggcaagcacaccggcacccatacgggacgcgttgccgtacgggcaacagggtcattcaatatacagaagagtaatgacgtccttcaaggcattagcgtacgacacgtccgccttctgcagcgcaacgatggataccgatattgtctctccccctccagcgaaaggacgccgctcctcctcggcctgaacgccgaggtctccgcagcgtaa

SEQ ID NO: 1642 - DNA, 284 bp, unidentified
  misc_feature 1..284: note = Ga0167622_1004112 JGI
  source 1..284: mol_type = other DNA
gtaaactaccccggcctaaaggccggagctttctgaaagggacgctcatatttaccagggttggcgtgatgtagatcacgctccgttagagacaggtttaagaccgacgttgggatgcttcctcagttccaacctctcgaagttgcagtagcagacacgccgggtaaggcacgaaacggattgcaacaaaacgccgatctctaacattcccgaggggagcgagcccgcaaggctccgttacaaggctcttacgagcaaacacaaatagaaaggagtacgtcatg

SEQ ID NO: 1643 - DNA, 1323 bp, unidentified
  misc_feature 1..1323: note = Draft_10008528 JGI
  source 1..1323: mol_type = other DNA
atgaaaaatcgtgttttcgtggtggatcgccaccacgatcctttaatgccgtgctctgcaaaacgggcacggctactgcttcaacgcgggcgtgcccgcgtccatcgtttcaaaccgtttactattcgcttggtcgatcgcctccaggcgtcgtcggcgctacagcctgttaccgtcaagattgatcctggtagtcggtatacagggattgtagtggctcgtggcgccgataggcgtttcacgcatctccatgggctgtttctgatggagctggagcatcgcgggctgcggatcgcagcagccctccgtcaacgagccgcactgcgtcggaatcggcgcagtcgtaaaacacgctaccggcctgtacggttctcgaaccgcactcgcccagcgggctggttagccccatcgttgcttcatcgagtccagtcgacattgacgtgggtgcagcgactgcaccgctgggtacctgtgaccgcattggcgcaggagctggttcgcttcgacacgcagcgcatgcagaatcctgaaatctctggtgttgagtaccagcaagggacgctactagggtacgagattcgtgagtacctgatggccaaataccggggctgttgcgtgtattgcggtcgtaatgcgaaggacgtagagatacagattgaccacgttcgaccacgggcgcgtggcgggtcgaatcgcgtgagcaatctcgtactggcttgttggcgctgtaatcagtcgaagggtgctcgacctgtagaggagtttctctcagggcgacccgaggcgctgaaaagggtgctagcgggactgcgtcaaccgctacgggatgctgccgcggtcaacgccacgcgctggtgcctgtaccgtcgattactgggaacggggctccccgtccaaaccgggagcggtgcccaaacgaagtggaatcggactcggtttggattaccgaaaacccatgcgttggatgcgttgtgtgttggagaagtggtatctgtggcagatacaccgggccatgcgatgccggttcaatgcgcgggaaggggactttaccagagaactataacggaccgtttcgggttcccgtcgcggcaccggatgcgccagaagcttgtttcaggcttcaaaggtggtgacatttgctctactgtcatttcactacgtagaccaaaagcgatgttaggacacatcaccctgcgcctaaggggcgttttcagtttttatgacatcagtagtaagcttcctcacgatcgtaattttaggtttttgcgtagagttgcgatcagtgatggatttcgttattttaccaagaagggagatctgtga

SEQ ID NO: 1644 - DNA, 298 bp, unidentified
  misc_feature 1..298: note = Draft_10008528 JGI
  source 1..298: mol_type = other DNA
gtcattcatcgtaaataaaaaggagattcacaatgatcaaagttggtatcagcttccaaacctaagcacttaaggaagccagactcagtctcccgtaaaacggaggctacgataccccagaaataggtaccggcggatgcctcctcagtccgccgctctacggctagtcattaaacagctctacgggtttaaggcagtgtggctagcgccaaacctggggatatctttgtcgagaggagcccggctctagaagccggcgtcacatcgttccgtaaggaaaacccacatgaaaaatcgt

SEQ ID NO: 1645 - DNA, 1251 bp, unidentified
  misc_feature 1..1251: note = Ga0315284_10052402 JGI
  source 1..1251: mol_type = other DNA
gtggttctcggccctaaaggcagcaaaaccaaggagattttgaagttggtatatgtagttaacaaaaatggaaaccccttgatgccttgtaaggaggcaaaagctaggcatctgctaaaaagcggtaaggctagagttttacttaggtgcccttttacaatttgtctcaattgggaatgcgaagagggtgtacaagaggttgtagcttcactgataacaagtagtagtgaggtaggagtagctgttaagcgcgatagtggggagtgcctttacgctgctgaaatagaactcagacaaaacgtaacaagagctaccgttcaaattgtaaaaggtaaaaagaagaaagtttcacgaagaatgcagtataggagaccacgtaggaatagaaaaactaggtatagacagtgtagaaataggaatagaactggtaactatcgtcaaaagtattcgccaacacttaggagtaaaattgaagggcatgagagagaagtacgtagggtagaaaagctgttaccagtaacacggtggttagtggttagaggtgcaaaggttgaaggccattttaaggatggcagtctggaagaacagtggttaaatgttcagcgacaggtgtttgagagagatggtttccggtgtcgtcactgtaaaaaaggtaagagagaacttcatgctcaccatttagaagcacgtaaggatggcggtcttgatactctagaaaacttagtaacgctgtgtaaggagtgtcatggggattatcatcgaggtcttatatctttaaagataggtaaacatacttataaaggtaaagttgatacagaagtagctataataagaaagaatttagtggtggaaaagtcggaagacgtttacggctttcaagtaaaagctaaaagaaatgcactagaactatcttattcaccacttaatgatgcttgtgcggctcttaatgttaaaccatcgactaatgtttatggtattaggtgtatccctagaggggattaccaaagaactcgtggtcgtcactctcaacaagtagttcctaaggggaaaataatgggttttaaccgttttgataaggtacgatatttgggaaaggcactttttattaaaatgcgaatgagtacggggtattttaaattaacagatataaataataaagatataccaaaagtaatactaggaagaaaactgaagcttttaggaaggagaagatcctgtcttattgctttgaccaccccaacctccccctaa

SEQ ID NO: 1646 - DNA, 328 bp, unidentified
  misc_feature 1..328: note = Ga0315284_10052402 JGI
  source 1..328: mol_type = other DNA
gtgaacctcccctccctaaagggaggggcttctgaagtgatttaggagggtaacaggttcaccagactcggttctaagaaattagaactccgttatttagcatgtagaaaccctagaatgccgcctcagttctaggctctttcgtggcactgtaaacagacttggttttctatggaaaaagaaacgtgagtcagtcaaccacaaggtgaaggctaaataacattgtcgagaggaagtccgtggtttttaggtggttatagtctaaaaacaggcataacgagtggttctcggccctaaaggcagcaaaaccaaggagattttgaagttg

SEQ ID NO: 1647 - DNA, 1314 bp, unidentified
  misc_feature 1..1314: note = Ga0207193_1000837 JGI
  source 1..1314: mol_type = other DNA
ttgcatagaaaaacagtaaaaccatcaaacagtgtgtttgttctgaataaagacaaacagcctctttctccctgtcaccctgctagagctagggagttgttagacaagaagaaagcatcagtctttagactttatccattcacaattatactcaaaactcaaaagaagaacccaaagtttcaagatactagggttaagatagacccaggttctagaactacaggcatagctttaatcatagaaggagagaagaaagggtggtttctaatttgggctgcaaacctagagcataggggtcatgctatagttaagaaactcatctctagaagacaacaaagaagatctagaagaaacagaaaaactaggtacagacaaccaagattctcaaacaggaaacactcaaaacccaaaggttggcttcctccttctttactttctagagttaacaatgttacaaccattgttaagagaattcagaagttctgctacgttgaatcctgtactgtagaaactgtgaagtttgacacacaaaagatgcaaaattctgagattaaaggaattgagtatcaacaaggagaactacaagggtacgaagttaaagagtatcttctagagaagtacaagagaacttgtatttactgtggaaaaactgatgtaccactagaagtagaacacattgtacctaaatctaaaaatggaagtaacagagtttctaatttagcgatagcgtgccacttctgtaatcaaaagaaaggaaataagaacctagaagaattcttaaagaagaaacctgatattttaaaatctgttaaaagtgagttaaagaagagtctatctgatgttgctgctgtaaactctactagaaagaagataaaagaagagttaaagaagctaataatagaaacttctttctccaaaggatacattacaaaatacaacaggcttaaacaaaaatacaagaaagatcactggatagatgcagcttgtgtaggaaagtattctggaattgaagtgtttattcctaaaaggtttaaacctataataataaaggctaatggaagaggccatcgtagattctgctctatggataaatatgggttccctaagtctaaacctagacagagaagaaaacagatagagggagtacaatctaacgatacagtgagggctactcacaagaaaggtacttttgtaggcagagtaggattgtctaacgaccaatttacaatgaaagtagaaacagggtacattagatttaatgctagcgactgtaaaattctacacaaggaggatggatatgtttatagtgtttaa

SEQ ID NO: 1648 - DNA, 333 bp, unidentified
  misc_feature 1..333: note = Ga0207193_1000837 JGI
  source 1..333: mol_type = other DNA
attgattataatgatccaaaaaatcacttacctttaaaaagggtcacttaccaaggggcaagccccttggcttttgaccagactcagtgcatctagatgcactacgttatgagagaatatataggtactagtgggtgcttctccagcccatctgctctacgcttggattttaaacagatatgggagatatatgtttagcaacgttaactcttatgcagtgagttcaagatacaaaacctctcattaacattgtcgaggagaacttaacagctacgtgctagatttaggaggaatcctaccttgcatagaaaaacagtaaaaccatcaaacagt

SEQ ID NO: 1649 - DNA, 1020 bp, unidentified
  misc_feature 1..1020: note = Ga0180732_1000047 JGI
  source 1..1020: mol_type = other DNA
atgcagaagtctgtaccagtgatcagcgcgacagggaaaccattaatgccgactaataattatcgcgcgaacgaactgataaaaaagaacagagcaaaacgccgtttcaaggctgggattttttatatcaagttaatccagcgtactgatggtgtaacgcaggacattgtggtaggaatcgatcctggcagcaagagagaagcgttcacggtgaaatcagaattacatacttacttaaacattttaagtaattctgtttcatgggtaaaagaagcggtagaaacaaggagaaacgcgagaaaagtacggagatataggacaactccatgcaggaagaataaaaacaatagatctcaaacaacctttttagcaccaagtacaaaagcacgttggcaggcgaagttaaggattgcagtcattctcgcgaagttgtttcctattaagacatttgtagtagaagatataaaagcacctacatttaagaacgctaaaagatggaatacatctttttctccactcgaagtcggtaagaagtggttctataaagaacttgaaaaaattgcaaaagtagaattaaaatctggttacgatacataccaaataagacaggagttaggacttataaagacaggtaataaatcagccgaaattttttccgcgcacaatgtggactcttggtcattggcttggagttcagtgcgaggtggtactgttccagaaaacaaagaaattacaagattaattccaattcagtttcacaggaggcaacttcatcgttttaatttctcaaaaggcggcataagaaaagattatggcagcacaatgtcacttggattaaaacgcggcagccttgtaacacatcctaaatacggtatttgttatgtcggtggcagtagtaaagatagattaagtgtgcataatttagagacaggagaacgattagctcaaaacatagataagaaggatttagtatttctttcttataattactggaggacgacaattcctctgcacacataa

SEQ ID NO: 1650 - DNA, 232 bp, unidentified
  misc_feature 1..232: note = Ga0180732_1000047 JGI
  source 1..232: mol_type = other DNA
gtcaataacccctatttaaaaataggggcttgcgaaagagaagaccaatcatcttagcaggttaaacaattgactacacagctagtaactgaattctctgagcgtggtagctcgaaaagatgtaaagaatgcttcccaagttcttttcctctctgagagtcagtgtggatgggagaaattgtagtaaggttagggtaacttaactaaataataaggagtaataaatgcagaa

SEQ ID NO: 1651 - DNA, 1362 bp, unidentified
  misc_feature 1..1362: note = Ga0256404_1003517 JGI
  source 1..1362: mol_type = other DNA
atgccgaaaccagtattcgtaatagcttctgatggcacagcattgatgccaaccttagctgtaaaagctagaaaactactaaaagccaaaaaagctattattgtaagctacatgccgttcgccattcagcttacatatcaaagtggacacaacacacagccggtggagatttgtatcgacacaggctcggaacatatcggtgtttccgtaaaatcagagaagcatgaatatcttcatgcgcaatttgacaacctcaaggatgagaaacaacgacacgaagcaagagcaatgtatcgtcgcacaagacgaaacagattgcgttatcgcaaaccacgattcaacaatcgaggaattccagaaggttggttagcaccaactgtggagcataagaaaaacaatcacatccagattatcagcaggcttgtaggactcatcccagtgaaagacatatacgttgaggtcggacaattcgatacacatcttatgcaagctcttgagcaaggaataaagcttgaaggagaagattatcaacgtggattgaagtatggtcttgccaacacgagagaagcagtattcgtcagagacaactatacttgccaatgttgtgggaagagtgtaaaagatggagtaattctccgcgtccaccatatagtccatcgaagcaacggtggtagcgattctgctagcaatctgctaacaatatgtaataaatgtcacactccgaagaatcacaaacccggcgggaaattagatggtctaaagcccaaaaattcttctctgaaagatgcaagcttcatgaatgtcgtgcgttggtatattgtcaatgagcttaaagaaaaattcccaggaataggaatccacacaacttatggaagttacaccaaagcttcaagaagagctttaggtcagatagaaaaatctcacgccaacgatgcatatgcaatgggcaactttcacccatcacacagaacacacgaatcagttatcaagaaacatagaagaaacaacagagtcttaagtatattctacgatgctaagtatatagattcacgcaccggagaagttaaaagcggaagcgaattagcgtgtaacagaacaaatcgaagcattccaagaaacaattcgaacaacgagcgaatcttcagaggagataaggtttctaaaggaagagtttccataagaagaaggcattacgaaatacaaccaggggatatattaacttacagaggaaagaaatactcagcagtaggagttcattgtaacggcacaagagtaattttagagacaaagcaatccattaggataacggatttacatattaaaagaaagaaaggagggtggcaattcctctccgccctatag

SEQ ID NO: 1652 - DNA, 341 bp, unidentified
  misc_feature 1..341: note = Ga0256404_1003517 JGI
  source 1..341: mol_type = other DNA
gtcaaccacccaccacttaaattcctaatggaatcctgaagtgggggcttataagccaagcccagttgattagcctcagtgtttcgagaactacgttatgcagtgatgcttaagcaacttacccaggaatgctccacaagttcctggctctaagggtatgtattaaacatctctgatgggtaggagaagtgtgcataccttcaaaacatgcataacattggcgatgtggaccaccctgcatttggcaggagaatccagaaagggcgtaagctctcctggaaggtgtagaccagggcgaaagcctgaaacttaaagaaaggaggcatcaaatgccgaaacca

SEQ ID NO: 1653 - DNA, 618 bp, unidentified
  misc_feature 1..618: note = human gut metagenome genome assembly, contig:NODE_911_length_18023_cov_19.4281, whole genome shotgun sequenceWGS
  source 1..618: mol_type = other DNA
atggaaaaacgccggcagcaccggcaggcatccagaagaggagaacaccttgcgaggaaacggctggtcaggagactgggaaccacgatggggaatatcctggaacggctgcttcctggctgtgaaaaaccagttatggtgaaggacatcatcaatacggagtcccgattcaacaaccggcgccgcaaggaagattggctgacgccaacagcaacacagctgttaagaacacatctgaacctggtggaaaaggtatgtcggatccttcccgtcagcgggattgcattggaggccaaccggtttgcatttatggaactggaagcaggcggccatctggaatccggagtggattaccagtgtggacctctttacggatatcgcagtattcgtgaagccctggaagagcttcaggatggaagatgtcttctgtgcggcgaacgtgccattgaacatgaccatcacctggttctcaggtcaaagggtggaagcaacactctggcgaatatggccggcttatgcgaaaaatgtcatacgctggtacatacgaaccaagaagctgcggagaaactggaagccatcaaggcagggagcttctcatttggaaaagcttctgcatag

SEQ ID NO: 1654 - DNA, 211 bp, unidentified
  misc_feature 1..211: note = human gut metagenome genome assembly, contig:NODE_911_length_18023_cov_19.4281, whole genome shotgun sequenceWGS
  source 1..211: mol_type = other DNA
gtcaactatccatccgctaaagcgaatgggcttgtaaaagcccagagactttacaggtgagcagttgagcagaaccgtgacgcagcaggttcgccttatcactccgggatgacgccaagtcccggacactgagatgtggctgcgcccaggttatgacaacactacagggacatgttccctggcttatagcaaaggagatacaatgaactat

SEQ ID NO: 1655 - DNA, 309 bp, unidentified
  misc_feature 1..309: note = Ga0255345_1013787 JGI
  source 1..309: mol_type = other DNA
atggtatatgtattaaaccaagacggacaacctcttatgcctactaataggcacggtaaagtaaaacacttacttaaaagtggaaaacctacaggaaagattaaaggttttaaaaaattcgataaggtttcgtattttggaaaggaatatattatcaaaggtcgtatgagcagcggatatgctattcttatggatgctgatggtaacaagatagacttttcagatatgccgaaaggctataagacaccgaaattaagtaatcttaagagaatttctgctcgtaggagtgtgataacaacaatcgcttag

SEQ ID NO: 1656 - DNA, 302 bp, unidentified
  misc_feature 1..302: note = Ga0255345_1013787 JGI
  source 1..302: mol_type = other DNA
atggaatagccctaacttatacgcctgtggacattgtgtaagacattgagttgcgtatcatcgtagccaatgcagtagtggttgaagcaggaagctccgacttcaaatgcgtagcattaagtcggagtagttcacgttaggtcagagtaattatagccttgtgatgtatgtgtaaaaagtctatctatcattgtcgagagcaagaacgattctgtatatggtaacagtatacagatagtcgcaaccactacataagtagtggcattatgtattaagttacatagaaaggagtgccagttatg

SEQ ID NO: 1657 - DNA, 1023 bp, unidentified
  misc_feature 1..1023: note = Ga0376497_007558 JGI
  source 1..1023: mol_type = other DNA
ttgcatagagaactaaagaccaacggcgggatgcttcctcagtcccgtcctcttgaagcccgggttgcagaaggccttgtgtcatcccattgggacaacctacaggggtgtggacgaaacgggtccgggcatacagccgctgtgcaacaatcccgaggggagagttcaaccgatgccagggttgaaccgtcacccgcctttgcggtgaacggcgtaagccgtgtttttgtactcgacaagaacggtgacccgttgatgccgtgccatccggccagagcaagaaagtttctggcacggggccgtgcccgggtccaccagatgtttccatttaccatcagactcgttgaccggatccgggagaacagtgatgtgcagccggttaatgttaaaattgatcccggagccaaaacaaccggcatggccgtggtgagacaggatggtggccatgcccaaatcctgcacctgtcagaactgacacaccggggcgctgtcatccggaagaaactggatcaaagatccaattaccggagaaggcgaagaaccgcaaacctctggtatcggaagaaaagattcgacaacagaacctggcccaaagggtggcttccgccaagtctcagatcacgggtggataacactttatcctgggtgaaaaagtatcaaaggatctgcccggttacaggcattgtcctggaacgggtccggttcgatactcagaagctgcagaacccggatatttcagggatcgagtatcagcaaggcacactgttcgggtatgaggtaaaggaatacctgcttgaaaaattcaaccggacatgtgcctactgcaacggcttgagcaaggatccggtcttggagattgagcatttcatccctcgcaatccctcaaaaggggataagggatcaaaccggatcagtaacctggccattgcctgtaaaacctgtaatcaggaatcaaaaaagaacctgcagccggcagattggatcagccttttatccaggtcacagaaaaagatagatcaggtc

SEQ ID NO: 1658 - DNA, 219 bp, unidentified
  misc_feature 1..219: note = Ga0376497_007558 JGI
  source 1..219: mol_type = other DNA
gtcaactaccccggcctgaaggccggagcttgtaaaaggctccacggttgaccagggaaatgttcaaagttttatggcaaagacaaaaaaggagaacattagaagttgcatagagaactaaagaccaacggcgggatgcttcctcagtcccgtcctcttgaagcccgggttgcagaaggccttgtgtcatcccattgggacaacctacaggggtgtgga

SEQ ID NO: 1659 - DNA, 1221 bp, unidentified
  misc_feature 1..1221: note = Ga0247608_10001764 JGI
  source 1..1221: mol_type = other DNA
atgctgaaggacggacgggcagtgatagtctcttatgagccgttcaccatcaggctcacatatgagcctgaacacaagtatgtcgagaaggtaattctcggagtagacactggaagcaaatatgtcggactgagtgctgcaagtgatgagaatgagtatttctgtgcagaagcacagatacgttctgtcgaaatcaaggaactccttgatgaaaagagaggttgcagaagacaaaggagaacaagcaagctccgttacagaaaaccgaggttcaataacagggtttcttcaaagaaacccggatggcttccaccgtcagtgactgcaaagatgacgagccatgtacagttgattaaacttgttgaaaggattcttcctatatcagagattgttatagagaagggaaagttcgacacacacaaactgaagaacccggatgtatccggttctgactatcagcacggaaagaaagaatggtttgagaattcaaaggcattcgtcaaatacagagacaattacaaatgtgtatgctgcaagaagaaatccgcaaagaacagaaaacttgaagtgcatcatatactttatataaatgatgggggttctgatgacccggacaacctggtgacattatgtcaccagtgccatgagaaaatccacaagaataaactgaaacttccgaggaagttcaatgcacgttcaaagacagtcaaatctctcagggatgcagcatttatgaatgcaatgtcggacaaacttgtcgaacttgtccgtgcggaattcccacacgtcacagtgaaaaccacatacggttacatcacgaaaacaaaaagagaaaagatggggttgttgaaacgacattcaaatgatgctttggcaatcactggaaacttgtcagccaagccgtatagccggcttgtcagaataaaaagagtacgcagacacaaccgcaagatattcaatgtcagaatattcaagaaaagagtcaggaaaagaaaccagagtgatgtcaagttcatcggaggtttcctccggtgggacaaagttctcattaaagaaaccggtgttaccggtttcataacaggacggatgaagaaagaaaaacatgcagtagtctgtaatatggacggagagaaattacatgagaaaagcactattgctatgtggaagattaaactgttaaagcatgcaaacggtatgctttatgaagaaacaaacatataa

SEQ ID NO: 1660 - DNA, 301 bp, unidentified
  misc_feature 1..301: note = Ga0247608_10001764 JGI
  source 1..301: mol_type = other DNA
gtcaccaaccgccgggtctgaagaacccgcggcttggttccactgcggaaccgtagccgagtgaacagcctgagtgaaaggactgatgtccttgaactacgttacccaagaatatataggcaccgtcgggtgttcgttccagccttatgcactgcgtccggctgttaaacaaaaactcttgcggaagagtgtgcagccggaatacaaaaccttgggataacattggcgagggacaaccataggattctaaatcctacattgcaattaattttgctaaattaaaatcaagtttgaaatgtac

SEQ ID NO: 1661 - DNA, 1347 bp, unidentified
  misc_feature 1..1347: note = human gut metagenome genome assembly, contig: scaffold82971_2,whole genome shotgun sequence WGS
  source 1..1347: mol_type = other DNA
atgtgccggcttaccgctttaaacatatcatacagaaaggaagtgccttacatggtatatgtgttagatatcaatggacagcctcttatgccgactgcaaggcatggaaaagtaagaaggcttttgaacattcatcttgcaaaagtggtgaaacgctgtccatttacgatacagcttttgtatccaaatacaaaagaaacacagcctgtatctcttggcgtagatgcaggaagtaaacatattggtctggccgccacaaccgagaagaaagtcatttaccaagaggagctaattcctcgcaacgatgttgtaaagttgttgtcagcaagacgaactttacgccgttctcgaagaagtcgaaagacgagatacagaaagccaagattcaacaatcgtgtgcattccaaacataaaggatggttggctccatctgtagaagtcaaaattcaggagcatatcacagctatcaaaaacgtctgcaagattcttcctgtgtctgagattcacgtagaaacagccgaattcgatctccagcgtctgaaagcaatggaagaaggtaagcctttgccagttggtacggattaccagcttggagaacagtacgacttctacaacacgagacagtatgtacttcatcgagacggatacacctgtcagtgctgtgatgcacatgataaagatgtcaaactgcatgtacatcatatcgaaagccgtcagacaggaggtaatgctccgaacaatctggttacactttgtgaacactgtcataaggcacttcatgaaggaaagattgagcttcccaaaaataagaaaagaggcaaatcccatcgagatgccgcctttatgggtatcatgcgtaacactttgctggaacgtctgaaaaaagaagtagatgttccagcaacgatgacatatggatatatcacaaagtactggagagaaaaggcaggcttagagaaaagccatatcaatgatgccatctgcatcagtaagcatccatatgccaaacctttggatgcctactatctgacgaaagccgtacgacatcacaatcgccagattcataaagccaacttcagtaaaggtggtatccgtaaacgaaatcaagcaccatatcttgtaaaaggatttcgcctgtttgataaggtctcgtatcaaagtaaagagtatttcatctttggaagacgagctacaggcttctttgatataagaacgctggatggaactaaagtaaacaaaggttctgtcagttataagaaattgaggattcaggacacagcaaaagcatatgtaaaggaggtgcgagcaattcctcacatgaatgaattcacgtgtgtccttgcatga

SEQ ID NO: 1662 - DNA, 279 bp, unidentified
  misc_feature 1..279: note = human gut metagenome genome assembly, contig: scaffold82971_2,whole genome shotgun sequence WGS
  source 1..279: mol_type = other DNA
ctgtcaactacccgccaataaattggcaggcttgtaaaagcctaagttgactagcctaagtgcttcgagcactccgttaagagagaatatatagttacccgtggatgtaacacctagtctacggctctaaggagacacattaaaccgttctgtgaggtaggaaccgtgtgtgtcttattgcaaacctctcattaacattggcgaaggtgtcatttacggctcgatatgtgccggcttaccgctttaaacatatcatacagaaaggaagtgccttacatg

SEQ ID NO: 1663 - DNA, 1449 bp, unidentified
  misc_feature 1..1449: note = Ga0315282_10018675 JGI
  source 1..1449: mol_type = other DNA
atgcagaagttaaggaagagaaatacatacacacctacggttattccgcaagatcgtagcaactgtggcttgtcattaaacagagaggaaactctcagtgtggcaggctcaaaaacctttcttaacaactccgatgcggacctaactccgaaagaaggtcagaacttgagagtatctgacaaagtttatgttttaaacagaagggaacagccgttaatgccttgcagtcctgtaaaggcaagattattgttgaagaagggaaaggcaaaggtagtaaagagaacgccttttactatccagttggtctatgctacaggtgaagcaaaacaacctgttactcttgatgttgatagcggctataagcacatcggcttatcagcagtaacagataaaaaagaactatttagttcagaagtgcagttaagaaccgatattgttaaattgctgaaggatcgaagccagtaccgtagacacagacgaaacagattgtggtatagagaaccaagattccttaatcgtaagaggcctgaaggctggttagctccttctatccagaacaaactggatgctcacattaaggttatcaaccaggttaaagcaatactgcctgtatctaagattaatattgaagtagctacctttgatacgcaaaagatggtcaatccagaaatcagtggcgttgagtatcagcagggtaaactgcaaggctatgaagtgagagaatatcttcttgagaaatggggtaggaaatgtgcgtattgcggcaaaaagaatgttcctcttgagatagagcatattattcctaaatcaagaggtggaactgatagagtagataatttggcattagcttgccatgagtgcaaccagaagaaggacaacatgactgcagaggagtttgggcacccagaagttcaaatgaaagcgttagagacgcttaaagccacagcctttatgaacatagttcgatggaaactggttgataagctgagggagtcaggaaacatagttaatgtaacttatggatacattacaaagagtaacaggattgcattaaaaattcctaagtctcacataaacgatgctttcgtaatggcaggtggaagtaatcaaacaagatctaacgttcaatatttcatcaagcaggtaaggaagtgtaacaggagtttattcaaggcaaacctgcttaaaggaagcaaaagaaaagtgaatacgataagagaagcgtttggctttcatagatttgacaaggtactgtataacgggatagaatgcttcatatatggattaagaagcaagggttattttgatttaagaaaacttgatggaactaaggttcatagttctgcaaaggcaaaagaatgcactctgattgagtgtgcacacacgtttttaacagaaaggagaatggctctcctccccaaccttaaaagtggggtctccgagccataa

SEQ ID NO: 1664 - DNA, 259 bp, unidentified
  misc_feature 1..259: note = Ga0315282_10018675 JGI
  source 1..259: mol_type = other DNA
gtcaactaccctcacttaagaaatgagggtttgcatcgtgagatgcaacacaagagttgataaggaggcattgaacatgcagaagttaaggaagagaaatacatacacacctacggttattccgcaagatcgtagcaactgtggcttgtcattaaacagagaggaaactctcagtgtggcaggctcaaaaacctttcttaacaactccgatgcggacctaactccgaaagaaggtcagaacttgagagtatctgacaaa

SEQ ID NO: 1665 - DNA, 1014 bp, unidentified
  misc_feature 1..1014: note = Ga0315288_10049882 JGI
  source 1..1014: mol_type = other DNA
gtggaaatggtaccagtagtagataaacagcaaaagccacttatgccttgctccgaaaagagagcacggcaaatggttatatctagaaaggcgactcctttttggaaaaagggggtcttctgtattcgtctaaatgtggaaccttcagccagaaatttgcaacaagtagttgttggaattgatcctggatcaaaaaaagaaggtctgacggttaaatcgaaggcacatacttatcttaatgttcaagctgatgccattacgtgggttaaagaacatgtgaagctaagacgtataatgcgaaaagctcggcggcatagaaaaacaccttatagagagtgtcgaaataatcgcactatgaattgtcttccaccttcaacaaaagcgcgttggcaatggaagttaagacttattacttggttttcagagatgtacccaattactgattttatagttgaggacgctaatgcaattacaaaaaagaattgctctaaatggaatggtaacttttctcctataaaaataggtaaaaattggttttacagtcaaataaaaaaatttggaaatctgagtcttcgtaagggttgggatacaaaaactttgcgagataaaggtggacttggaaagagttcaaataagatgagagactcctttgactctcattgtgttgattcatgggttttggcaaatgaaattgcacaaggacacacaaaacctgaaaacaagagagttctttgtgttgttcctttgcgatttcatcgtagacaactacataggatagtcccgtctaaagggggtaaaaggccaagttatggtgggacaagaagtttaggtttaaaacgtggttctttggtacagaaccctaaatatggccttgcttatgttgggggtagttcgaaaaacagaattagtcttcattctttaagggatggtaaacgtttaagtacttccgtaaaggtaagtgattgcaaggttttatcttttggtggtactagagcctattgggctgaggtgtga

SEQ ID NO: 1666 - DNA, 247 bp, unidentified
  misc_feature 1..247: note = Ga0315288_10049882 JGI
  source 1..247: mol_type = other DNA
taaaggacacgcataacatctgaactactttaagtaagaagctagcccttctgaaaaaggcagagaaaggtaaactttctaggattagccaagattaaaaatcaactagccatctagagttggcaactcaagaacacatgaagaatgctaccctagtttttcttccctgtgatggtcagtggcgaagggttgtataaacaaggtctgtaaagacaagatgtaaattaaagagaaagtagtggaaatg

SEQ ID NO: 1667 - DNA, 1359 bp, unidentified
  misc_feature 1..1359: note = Ga0180435_10000153 JGI
  source 1..1359: mol_type = other DNA
atgcaaagagtattcgtacaatctatcgataaaaagccgttaatgccgtgcgctcctgcgcgcgccagaaagctgctgtcgtctggtcgtgcgcgcgtggtacgacgctatccatttaccattcaactagaacaggcgaccaccaacaatacgcaacctgttcgactgaagctcgaccccggctccaagaccacggggatttcattagtggcattgttcgaaaatggcttccgcgtggtttgggcggcgaatttgtcgcatcgaggccatactgttaaaaagaatcttgatagtcgccgcggttatcgccgtggtcgtcgtagtcgcaacctgcgctaccgaaagtcacgctttttaaatcgcggtggcgataaatcaggatggctaccgccatcactgatgtcgcgtgtacataacgttgaaacctggtcaaagcgcctcaaaagcttctcgctcatcactgcggttgatgttgaaacggtacgttttgatacgcagctaatgcaaaacccggatattcagggtgttgagtatcagcgcggcgaactggtcgattgggagttgcgccagtacctgctttaccgacacaagcatacttgcgcttattgcggcggtttaagcaacgacccaattctcgagcgcgagcacattcatccacgctcgaaaggtggaagcaaccgactatccaatcaagtgattgcttgtcacacctgtaacgatacgaaaggcaatttactgcccgagcagtggttgtcgttactcaatacatcaagcaaaaagattgatcgtgttcgcgctgacaactttaaacagattgttgcgggacagagaccaagcctgcgcgataccggcgcagtaaacgccactcgttacaaaatcggcgacgtgttgaaatcgcattttgaccaggtcgaattctggtccggtggccgaaccaagaaaaaccgctctgatcagggttatcggaaagatcactggatcgatgccgcatgtgtcggcaccagcggtggctccgtatttatccctgaaagcctgacacctctgctgattaaggcgcaggggcacggctcacgccagttcaccaagccgaatgcctcgggttttccaagaacatcggccaaggcgcgatcaccttttgttcgcggctttaagacgggtgatctggttaaggcctcagtgccgactggtttaaaggctggcattcacgttgggcgggttgctgtaagaaaaaccggctcttttaatatttcaacaaacacaagtaccgtgcagggaatcagtcacagatactgcgaaaagattcattgtgcggatggttataactacaactttggaggcgcgcttcctccccacggataa

SEQ ID NO: 1668 - DNA, 288 bp, unidentified
  misc_feature 1..288: note = Ga0180435_10000153 JGI
  source 1..288: mol_type = other DNA
gtcatctaccccacggttaaaaccgggggcttgaaaaagcccggatgaccaggctaaggccagaacatttttcgaagatgttttggactacgttggaaaagtcacgacaccctggaatgcttgccagttccaggctctgtcgctaaagattaaaagcccgttaggggtattgggcggtgtctttagcacgacaagcctttccaacattgccgaggcaaacaaactcatcttcggatggagaaccggcgggtaaccgcctaacttaaccaatggataatgatgcaaaga

SEQ ID NO: 1669 - DNA, 1320 bp, unidentified
  misc_feature 1..1320: note = Ga0070738_10016471 JGI
  source 1..1320: mol_type = other DNA
gtgtcaaaagtctttgtggtagatgccaaccagcagccactttccccggtgcatccagggcgagcacgagtgctgcttacgcggggaaaagcggtagtgtttcgccgctacccgtttaccatccgcttgaaaaacgcgccgctttctccagaggttgctcctctgcgcttgaaaatcgatccaggcagcaagaccacgggaatcgccctgctcgacgagacgacaggagaagtggtcttcgcggcagaactggcgcatcggggggatgccattaaacaagcccttgatcagcgtcgggccgttcgtcgaggacgccgacagcgcaaaacgcgctaccgaaagccgcgctttgccaatcggcgacggcgcgaagggaagctggctccctctctgcaaagccgagtgagcaacgtcctgacctgggtccagcgtctcatgcgtctgtgtcccatcacggcgctgagcctggaactggtcaagttcgatcttcagcagatggagcatcccgagatcagcggtgtgcagtatcagcaagggacgcttttcggctatgaagtcaagcaatatctgctggaaaaatgggatcgggcctgtagctactgtggaagaaaggatgtgccgctgcaagtggagcatatccaggccaaagtcaatggaggcaccgatcgggtcagcaatctctgtctggcttgtgatggctgtaataaggccaaaggaacgcaggatatccgagcgtttctggccgaaaagccggagctgcttgcgcgtcttctggctcaggccagggcttctctcaaggatgctgccgctgtcaatacgacccgatgggcgttgtacgaatgcttactggctctgggcttgcccattgagtgtggctcaggtgggctgacgcagttcaaccgaaggcagcggggattgccaaagcaacactggattgacgcggcctgtgtgggcaagagtactcccgttcaactcaagctggctgcgatcctgcctctgctcatcagcgcgaccgggcatggcagcaggcagaagtgcaatgtcaacaagatcggcttcccttgctccaaagccaaaggagccagaaaggtcaagggctaccagacaggggataccgttcgggctgtcgtcaccacaggcaccaaacaaggtatctatgtcggacgagtgcttgtgcgagccagtgggtcctttgacatccgcacgcgcagcggtcggatccagggcatcagttatcgcttctgtacgcccattcaccgctgcgatggctatagctatcaacaaggagtagcgtatgcacagcataatcccgcccaataa

SEQ ID NO: 1670 - DNA, 312 bp, unidentified
  misc_feature 1..312: note = Ga0070738_10016471 JGI
  source 1..312: mol_type = other DNA
gtcatgaacccccgcataaattgcgggggcttgcagacagagtttgctctgtggcaagccctgaacatgaccagactcagccagagtcttccctttggtgggaaggctaccgggctccgttaggagcgaaagcataggtacgtccgggtgcgaggccagcccggaccgctacggcaagcagttaaacaggtctagtgggttaagccagtgctgcttgcatctgaaaccgctccataacgctgtcgaggccacctttacctgggaaaccagaggcccgcaagggtagaagcaaaggaagcaatcgtgtcaaaa

SEQ ID NO: 1671 - DNA, 1359 bp, unidentified
  misc_feature 1..1359: note = Ga0114918_10012039 JGI
  source 1..1359: mol_type = other DNA
atgcagaagttagggaaaaagctaaagaacgtacctatggatacttcacacgtccatagctctataagttcttctttaaacagagttcaaagactcagtgagaagaacatgtgctgttcccataacaatcccgaagtgaatcaacctcaatgtaaagaggggcagaacttgagagtatctaccaaagtttacatattgaatatgctaggtaatcctttaatgccatgtagtccgagaaaagcaaaaaaattattaaaagaagggaaagtagtagttgtcaaaagatttccattcacaatccaattgttaattccaacaggggaaacaaaacaaaaaataacattaggaattgattctgggtatatgaatattgggtttagtgcagtatcagaaaaagaggaattagtatctggtacagttaaattagatgaaagaacatcagaaagattaacagaacgtaggatgtatagaaaaattagaaggagcaaactttggtacaggaaatcaagatttttaaatcgctccaaaccaaaagactggcttcctccatctatacaaagaaaatatgatgcacatttgaatcttattaacagaattaagaagattattcctgtttctgaaacaattattgaagtagcaaatttcgatattcaaaaaattatgaaccctgatatttcaggaacaggttatcaacaaggttctctatatgaatatcagaatatcagaagttatttaatgaccagagaaaaaggaaaatgtcaactttgtggtaaggattttaaaggacagtcaagtcatatacatcactgtaaacaaaggaatgagaatggaagtaatagacctaaaaatcttgctattttacataaggcttgtcataaaaaactgcacaagaaaggattgaaactatctaaaccaaaaagctataaaccaaatacatttatgtctatcatacataaaagattttggcaggatgtagatgatttacagataacttatggatatgaaacatttatcaaaagaaatgaattaaatttggaaaaaactcatagtactgatgcttttgtaatagcgaaaggtactattcaaaacagatgcaatgaacaaattatacaacaaaaacatagaaataatagagttttacaattaaacagaaatggattcaaaccttctattaaaaagaaaaaatctaaagttaatccagaagatttgttttgggttaatgaaaaacagtatatttgtaaaggtatgtttaataaaggacagtatatcacttatggaagcacaaaaaagaaagaatactttaaattttctaaagtagaaaagatatatcatcaagggagttttgcatggaatatataa

SEQ ID NO: 1672 - DNA, 266 bp, unidentified; identical to SEQ ID NO: 315
  misc_feature 1..266: note = Ga0114918_10012039 JGI
  source 1..266: mol_type = other DNA

SEQ ID NO: 1673 - DNA, 477 bp, unidentified
  misc_feature 1..477: note = Ga0137391_10019969 JGI
  source 1..477: mol_type = other DNA
gtgtggtattggctgcgcgcaggtctggcagaagtcgtcagacgcgagccattcacgatccgtttgaaatgtgcaaccgccgagtacacccaaccggtcagcgtcggggtagatactggttcacagacagctggagtagccgctaacgccaatgaagaggtggtctaccagatgcattgtgtcgctcgcggcaactaccagttgtataacgggaagcgcagcgagcataaagtctgggcacccaagaagctgcacggttggaagctgtacgaactggttgaggcgaaaggagtggttggctatattggtggcaggcgagtgaaaggcagctttgtgatgaaggatgtgaccaccggaaaaacactggtcgaggtgaccccgcgcaaacttattcggctggtccggccttgccgagggtggatcatcacgaaacaagaaatgcagagagaggaggagcgcgcttcctctcccgtttaa

SEQ ID NO: 1674 - DNA, 296 bp, unidentified
  misc_feature 1..296: note = Ga0137391_10019969 JGI
  source 1..296: mol_type = other DNA
gtcaatgaccaccccattgagggggtggctggtgagaaattcgtttcttgcacgccgaattgaccagactgtgctctcgagatcgaggagccgagcaagtaggcgtctgctcgatcaaggaaggagctccgatagcgggaagtggtcaagcacccaccttcgggtcctgccccagcctgaagccctggaactgttttcttaaccagtggtgcggtcagccaccgtggaaagcagacatcccgcccgctatccttgtcgaggggactacttgaccccgaaagggagacttatgggga

SEQ ID NO: 1675 - DNA, 1293 bp, unidentified
  misc_feature 1..1293: note = JGI11643J12802_10127370 JGI
  source 1..1293: mol_type = other DNA
gtgagagtgcctgttttagacacaaccaaaaaaccgctagcgccgacaacgccgcgtcgcgctcgattgcttttgaaatcgggcaaggcggcggtgtttcgtcgttacccattcacgatcattcttaagcgagagatcgaaaatccgacgacgcccgatctaaagatcaaaatcgatcccggatcgaaaacgacaggcgtcgcaatcatcaatcagcaaaccggcgaagttgcctttgccgccgagatagagcatcgcgggcaggcgatcaaagcctctctggactctcgtcgctcgcttcgtcgggggcggcgtcagcgaaaaacccgttaccgcaagcctcgtttcgagaaccgaactcgcccgaaaggatggctcccgccttcgctcgaaagccggattgagaacgtctacacctgggcgcgcagactacaacgtgtatatccgctgaaaagcgtcgcgtatgagcttgttcgattcgatatgcaactattgcagaaccctacaatcgaagacgtcgaatatcagcaaggcgtccttcaaggctttgaactgcgtgaatatgtgttgatcaaattcaaccatagatgtgtttacgccgacgcgaaaagcccttgcgatgaggtcttgaacgtcgaccacctgatccctcgttcacgcggcggatcgaatcgagcgagcaatctcgtttgcgcttgtcgaaaacacaacgaagagaaaggcgccctgtcacttgaagaatattcaaagttgcgtggcgtcgatttctcaccgattaaagctcaggcgaaggcgcccttgaaagacgccgccgctgtcaatgcgacaaggtgggcgctcttcaatcgcttgaagactctcgatctgccgattgaaacgggatcgggtgggttgaccaaattcaatcgaacaaagctggaggcgccgaaggcgcattgggtcgacgccgcatgcgttggaaagagcacgcctgagaacttgaagatctcgaacgttcagccgcttcggatcagagccatggggcatggctcgcgtcagatatgccgaaccgataagtacggctttccaaaaacacatcgcacacgcaaggcaatattcatgggatttcaaaccggggacatcgtgaaggctgacattccgaaggggaagtttgcgggccgccatgtcggcagattgtcggctgtacgccaacgaccatcattcacattgaacggcttcgatgtccacccaaagcatttaaagcgaatccatcacagcgatgggtttaactataaaatgaaaactgtgggctga

SEQ ID NO: 1676 - DNA, 283 bp, unidentified
  misc_feature 1..283: note = JGI11643J12802_10127370 JGI
  source 1..283: mol_type = other DNA
atctgctatgccacagttttcgagaaaagacaaaggcattgattcagcccgactaagtgattgactcgccagagttatgaactacgatctttgcgaatataacaatagtcaccttgggatgcgatgccagtcccaggctctgaggctcgcgtttaaacagttgatccgaacgcgaagacagtgacgtgagcaaacaaaccgcaaaagatcattgtccaggcgaacattacgtgagcgatcacgtcaaactcgaaagagtttaattaaccgtgagagtgcctgt

SEQ ID NO: 1677 - DNA, 1413 bp, unidentified
  misc_feature 1..1413: note = human gut metagenome genome assembly, contig:NODE_539_length_54612_cov_5.601316, whole genome shotgun sequenceWGS
  source 1..1413: mol_type = other DNA
atgagtgtattcgtggtcgggctgaacggatgccggctgatgcctacatctgaaagagaggcccgtttattactgaaacatgggaaagcttctgtttatcggaaagtcccatttaccataaaactaaattataagacaggcagtaccacacagcctggttatttggggatcgataccggatcgcagcatatcggagtgtccgttgtccgcgaagatggtaccgtgttacataaggaagagatcggtctcagggattccatgagtaaaagaaaactgatggagtcaaggtcttcattaagaagaggaagacgtcatcgaaagaccagatatcgccatccaaaatggagactaaaagccaaacgtgtttattacgaaactccagaccgaaaaggaagacactggaagaagcaaaagatcacgttcgcgtccaaacgaccgcagggctggcttcctccatcgctgcagtcaaagacggatcatcatatccagtggatcaagaagttacaggatcttcttccagatggatatcgtctttcgatcgaacttggtcgtttcgatccggcaagaatgaaagatacagagatccatggagatctataccagaaaggaccacagtatgactatgaaaatgttcgtgcttatgtcctcgatcgtgacagatatacttgtcaggtatgtggaaagaagggtggaaaattacatatacaccatatcctgtacagaagtcatggtgcgaccgataatccacagtatatggctacgatatgcagcgattgtcatagcacagagaaccatcaaccgggaggcatcctttatcagtggatgcaggagcagaagaaatttaccagaggactaagagatgctacattcatgaacatcttaaggaaacgtctgatgaaagcatttccaaaagcaacttttacctatggaaatatcacaaaagcagacagagagaaactgaagattcctaaaagccatggaaatgatgccactgcgatcgcaatcgtaaaaactgggatcatgacggtaaaggataacgaacctgtgatctatatccaacaggtccgaagaaaaaaacgttctctgcatgaagaaactccgagaaaaggacgcaaagaaccgaaccgtaaagcttcacgatacaataagaatacgaaagcagtcaccgtgaccaaaagaaagaataagaaaaggatatcgatcactggctgtctgttcgatcgtgtagaactgaatggaaagaaaggatggatctctggatttactgataagtcctgctatataaaggatgagaatgaccaatatattcggatatctccgaagtacaaacaggtcagtctgtcaaaactcaagatcctgcatcactgtggaaactgggtgataggagcaagaagatcccttggtaagggatga

SEQ ID NO: 1678 - DNA, 316 bp, unidentified
  misc_feature 1..316: note = human gut metagenome genome assembly, contig:NODE_539_length_54612_cov_5.601316, whole genome shotgun sequenceWGS
  source 1..316: mol_type = other DNA
ttgaataaccgagcatgcgaaaaaagtatgtgaagtcatttcatggtccccgaaagggcatgctgactagactcagtgcaacggaacccactttttgtgaggaataccattagtactacgtcccagatatcaatacccgacccggtagtacccaagccgggaacagggttcaggcaacggatgtctttcaggagaagaggacactgacctggagcacgaagtatctggaactttgtcgaagggtgatcactcccatccgggagggcaggacttttgtgtacctgccataacaatatataaggaggaccagccatga

SEQ ID NO: 1679 - DNA, 1248 bp, unidentified
  misc_feature 1..1248: note = marine metagenome genome assembly, contig:NODE_629_length_21822_cov_14.725040, whole genome shotgunsequence WGS
  source 1..1248: mol_type = other DNA
atgccttgcgttcccgcaagagctaggcagttgcttaaaaaaggtaaggcatcggtataccgtcgctttccttttacgatcatcttaaacgaacgggtaggtggaagaactcaacctaccgaactaaagtatgacccaggtagcaaaaccactggcatcagtcttgtggtgcatggtaaaaccgctagtcgtgtagtatgggcaggagaactaacacatcgtagttggagtattgttgaggcactaaatactcgcagaaacattaggagatttaggcgttaccgtaaaacccgttatcgccaaccacgcttcttaaaccgcactagaaaggatggatggctaccgccatccattcagtcgcgtgtggataatatcgtgaccataacgcggaaattacaagtatttgcgccattatcatcacttgcttgcgaagtggttaagttcgatacccaaaaactacgcaatcctgaaatcgatggtgcagagtaccagcgaggtacgttgtttggtttcgagctatgggagtatttattagttaaatggaatcattcatgtgcttactgtaatgctaaaaatacgccattagaaaaagagcatgttgtagctaaaagtaaaggcggttcaaacagtgtaactaacctagtcgtttcttgccgaccttgcaacgaaaggaaaggcaccaaatcgattgacgaatttttgaaaaagaaacctagcgttttaaagaaaataaaatcacagcttaaagcgccactaaaagatgcggcgtcaatgaatgcgaatcgctatgcgatagccagagaattagaaacattcaacttacctgttaattacggaacaggtggtcaaacaaaatataaccgcacaaatcaaggctatcgcaaagaacactggatagatgcgtcttgtgcaaccagcacaggtgagaatatccaaatactggataccatgacgccactcatcattaaagccgttggccgtggctcaagaaaaatgtgccaaacagatggttatggtttccctagctctaagccaaaagctgtaaagaggattaatggattccagactaatgatatcgttaaagctattgttacgaaaggtaaaaagaaaggtgtttatgttggtaaagtatcgattagaagcactggatactttaatattaaaacaaaacaaggtaagatacagggcataaatcacagatactgcaacctattacaaaggatagatggctatgaataccacacctaa

SEQ ID NO: 1680 - DNA, 277 bp, unidentified
  misc_feature 1..277: note = marine metagenome genome assembly, contig:NODE_629_length_21822_cov_14.725040, whole genome shotgunsequence WGS
  source 1..277: mol_type = other DNA
gttaactaccccgccctgaagggctgagcttgtaaaagctacgcttttcgggattagttgaccagcctaagttcttagagaactatgttagataggtcacgataccctagaatgcttccacagttctaggctctatcgtaagcagttaaacaggacggtgcgggaacaacggacagtgctgttgatgtaaaaagcctttctaaccttggcgagtggaccgttaccgcagaaatgcgtgagtcgcgtaagcgacataaatattaacaaattgaggtat

SEQ ID NO: 1681 - DNA, 780 bp, unidentified
  misc_feature 1..780: note = Ga0063293_10084471 JGI
  source 1..780: mol_type = other DNA
ttgagagtccctgtgttaaatatgagtggaaagcctctgatgcctacaagtccgagaaaggcaagaatacttttgaagcaaggaaaggcaacagtagttcagagaatgccctttaccatacagttaaaatacccatcaggcgaaacaaagcaagatattacattggacataaataatagatattcaacaattggcttcagtgcagtaacagaaaaaagcgaattaatttcaggtgagttaaccctgagaaaaggcatctcaaaacccttggagcagaaaagaaattacagacgagttcgaaggaataaattattgcatagaaagccaagactcaataatcgtagcaaacccaaaagctggcttgcgtcaggtattcaccataaactcaatacacatctgagattgattgaaaaattgaaagaagtactacccataacgaaagtgatagtagaagtatcagcatttgatactcaaaagctacagaatccagagattaaagatgtagaataccagcaggaagagttgcagggacatgaagtaatagaatacctgctggagaagtggaagcataagtgtgcttactgtggaaaggataatcttcctctggagattgaacacatcataccaaaatcacgaggaggttctgatagagtttctaatctgactttagcgtgtcataaatgtaatcagaataaaggagataagacggcagcagagtttggacatccagaaatacagaaggtgggaccatacagaaaaaaaacaggagttatcttgtaa

SEQ ID NO: 1682 - DNA, 221 bp, unidentified
  misc_feature 1..221: note = Ga0063293_10084471 JGI
  source 1..221: mol_type = other DNA
gtcaattacccccgttaaaaggggggttgttccgtgagggataagagcaatttgttgattaggagatattaaaaaatatgtggaagttattggtagagttaaagaacacatcaagggctcctcctcaagtctcctgctctataatatctctcgtacagtactggccaataataactctgctcaagacataccttctggcaggagtggaaagaacttgagag

SEQ ID NO: 1683 - DNA, 1311 bp, unidentified
  misc_feature 1..1311: note = Ga0074255_1053809 JGI
  source 1..1311: mol_type = other DNA
atgaataatggccgcccgatagcggcctacgtgcaggccatcgacggttcaccgctgatgcccacccgcaagaaaggcaaggtgcgccacctgctgaaagacggcctggccacggtcgtgtgcagggtgccgttcacgatcaggctgacctacgagaccacgaggtacgtccagaaggtgtcgctcgggatcgacacgggctacgggagcgtcggcctgtcggccaccaccggcgacggcgacggcagcggcggaggcggaggcgaggtcctctacgaggaggagctgaccctcagggacgacgtcaagggcaacatctccaccagggccgagctccgcagggggcgcaggtccaggaatacccgctaccgcgaggcgaggttcgacaacaggcgcacgcccgagggatggatccccccgtccatgtcggagaaggttgacagccacgtctccatggttgagagggctgccgccatactcccggtgtccagcataacggtggaggtggggcagttcgacatgcagctcataagggcgcaggaggagggccttcccgcccccgaggggaggggctaccagtcaggccccatggcggggtactggaacgttcgcgagtacgtgctgtacagggacggccacaggtgccggaactgcggcggcaggtcaggcgacaggatactccaggtgcaccacctggagtcccgcaagaccggagggaactccccgggcaacctcgtcaccctgtgcaggacctgccacgacgggtaccaccgcggcgaggtggagctgaagataaggcgcgcaaggcccatggccgccgggaccggcacgaacatcataggccagcgcgtatacgacatcctgagggagaggtacggggatgagaaggtccgcctcacccgcgggtacgtcaccaagatgcgccgcagcgagcacggcctggagaagacccactgcatcgacgcccgctgcatatcaggcaaccccggcgcggcccccgtagaggggacgatgtaccggtcgaggaaggtcgcgtgccacaccaggtcccttcacgtgatgaagaccggcaagaaaggggcgaggcgcagcaaggtcgcatcccacaagataggcaggagccgcttccagaggtacgacatggtgatgcacgaagggaaggagtgcttcatctccggaagcacgggcggaaggccggtgctcaaagacatcgactggaacagggtcaccgaaaagcagtccgtgaacgtaaaggaaatcaagttcgtaagaaggatgcgtaacgggataataatacagaaggttaaatag

SEQ ID NO: 1684 - DNA, 372 bp, unidentified
  misc_feature 1..372: note = Ga0074255_1053809 JGI
  source 1..372: mol_type = other DNA
ctcaagtttctaaagtaacttgtctcgacagagtaaagcggagccgcaagcgcgaatttaggagcgggttagtccaagccccctgcggccttgggggctacgttgggatggaaataggtaccccgggatgtgaaggagtcccaagtcccgggcactacgggcagcggttaaaagccccgaaaggggcggtgcccctgccgccaaacccatccgcaacatcgacgatgggaccacaactcctcctccgggaggagagttacgaccgaaaggttgtgtcggacccggacatccaccgagtccaaggaaaacaaaaaaaagaaagagatgaaaggacagaaggagaacaacatgaataatggccgcccgatagcg

SEQ ID NO: 1685 - DNA, 1341 bp, unidentified
  misc_feature 1..1341: note = Ga0209800_10005712 JGI
  source 1..1341: mol_type = other DNA
atggcggtctacgtgctggacaagaccggaaagccgctgatgccctgcagcgaaaagcgcgctcgcctgctgttggagcgcagtcgagcccgggtgcatcggctgctgccgttcgtgatccggctcaccgaccggcgccaagccgattgtaccctgcagccattggcgctcaagctcgatccgggcagccggttcaccagcatggcgctggtccgccggcagggccggcgggtttcggtgctgtcgctgctggagctgatccaccggggcgcggcgatccgccaggccctgctgcaacgggccgcgttccgccggcgccggcgcagtgccaacctgcgctaccgggcaccgcgcttcgacaaccgcacccggcctgcaggctggctgccgcccagcctgcgccaccggctggacacgagtctggcctgggtcgcacgcctgcggcgctgggcacccatcgccagccttgccgtcgagcgggtcaagttcgacctgcaggctctgcagaacccaggaattgtcgggatcgagtatcagcagggcacgttgcagggctacgaggtgcgcgagtacctgctggagaaatggggccgtcgctgtgcctactgcggaaccgagcaggtgccgctggaggtcgagcacatcgtgccgcgcagcgccggcggcagcgaccgggtgtcgaacctgacgctggcctgccggacctgcaaccagaacaagggcaatcggccactcgaggtgttcctggcacggcaacccctgcgcttggccagaatcatggcgcaggccaaggcgccgctacgcgatgcggcggcggtcaatgccacccgcaacgccctgttcgcctcgctcctggctaccggcctgtcggtggaggccggcagcggcgggcaaaccaagttcaaccgtcgccgcctgggcctgccgaagagccatgccctcgatgctgtctgcgtcggcgaggtcgaggcggtggcgggctggcagcggccgaccctggcgatcagggccaccggccgcggcgagtaccagcgtacgcgcctgaccgcgcatggctttccgaggggctacctgacccggcgcaaacgccatttcggcttccagaccggcgatcgggtccatgccgtcgtgcccaccggcaagaaggccggtgtccatcgtggccgcgtggcggtgcgccagaccggcagtttcaacatccagacagcgggcggtgtggtgcagggtatagggcatcgccattgccacctggtccagcgagccgatggctacggctattccctgcaatcgttcgatagtgcccaactcgagaaggaggcagcgagagcaggggcacgctga

SEQ ID NO: 1686 - DNA, 291 bp, unidentified
  misc_feature 1..291: note = Ga0209800_10005712 JGI
  source 1..291: mol_type = other DNA
gtcaactaccccggcctaaaggccggagcttgtgaaagcaggctgggttgaccagggaaagcggtaatcaacccgctccgtttgcaacaggtcgcatcgacccaccccggaatgcttcctcagttccgggctctggaaggtcgggatcatgcgggcgaaaggtaaagcgccgaaggttccgatcgccgcacttcgcgggagccggttgccgacattcccgaggggagcgagccgtaaggctccgtcaccaggcccgtaagggcattgtttgaaaggaggatcgccatggcg

SEQ ID NO: 1687 - DNA, 1227 bp, unidentified
  misc_feature 1..1227: note = Ga0068305_10111221 JGI
  source 1..1227: mol_type = other DNA
atgatttatgttttgaacaaatacgggaaaccccttatgccaaccacgaatgagggttacataaggaagctgttacacagaggcgatgccgctgtggtgcaacacgatttgtttacggttaagttgttgaacgatactactgaccatacggataaggttacactcggcatcgaccccggatattcacacatcggattttcggcagtttcgggtgataaagaacttatttcgggcacacttgaacaggaaggcgcaggtaagaaatgcaccaatcctatgagcaaacgacttgctgataagctgatgtatcgtcgtaacaggcggtcgagactgtggcatagaaaggcgagatggcaaaaccgtgtttcaacgaagcagaaaggttggttagcaccatctcttatgcgaaagaaagatacacacttatctctcgtaaacagattgaagaaggtattgccgattgaccacatagttattgagcgcaacaagtttgacattgccgcgattgaaaacccagatattcagggtgtacagtatcagcgtggtacgttgtacgattacgagaacaagaaggcgtacttgctgtcgaagcaagagggcatttgtccgatatgcggcgaaattctgaagtctgacgttcacctgcatcacgtcaagccacgcgcaaaaggtggttcggataatgttggcaatatggttgctctgcataacgactgccataagcggttgcatcgtgaaaagttaaagctgtcaacgagcggtttcaagaagaagcacaaagcagacacgtttatgaacatcgtcaggcacaggcttgttgacgaattacaggcggacgtaacgtttggcagttacacgaaggttgcgcggattgagaacggcatcgaaaagacgcactataacgacgccttcgtgattgcgggtggaacgacgcaagaacgatgccgccctgttgtgttcattcagaagcgaaagaacaacaggtctttgcagaggaacaacttgcacacaaaaggcggcaggtcaatccgtcgtcagcgttcaatttatcagacaggcgatttgatttggacagcgagcgggatgcacaggtgtggcggtatgacgggtggccgcattgttctcaaagatgaatacaaggagggatgtaaatccccaattagaataagtactaaattaataacaaagcatttgagttcaaaaagcatttggactctttgcggataa

SEQ ID NO: 1688 - DNA, 274 bp, unidentified
  misc_feature 1..274: note = Ga0068305_10111221 JGI
  source 1..274: mol_type = other DNA
ctttccaaagaagaattggataaggttttgaatttgattatccgcaatgagtccaatgacttggtgcggcagtcaaattagagggcaactcggaggagttgcagcagtttaagattgagatacatacacaccaaagggtgcttcccaagccctctgctctgtggttataaggacgtaaactcgaaagagcgacaccgaaataacttaaaaacatcttaaacaacctcgatgggaatcaacccgcttcggcggtgggcttgaaaaacaggaacaa

SEQ ID NO: 1689 - DNA, 906 bp, unidentified
  misc_feature 1..906: note = human oral metagenome genome assembly, contig:NODE_7457_length_3750_cov_2.000000, whole genome shotgun sequenceWGS
  source 1..906: mol_type = other DNA
atgttcgtatatgttttggacaagaatgggcaaccacttatgccaacatcacgttttggcaaagttcgtaggttactaagagataaaaaagtaaaagtagtaaagcgttgtccatttacgattaggttgttgtacgagcctgaaactaaaatcgtacaagatgttgtgcttggtgtagatactggttctaaacacgtgggtgtagcatgtgtaggtaatgataaggtattgtatcaatcacaagttgaactaagggatgacattaaaagaaaaatggattctcgcagaatgtatcgaagaagtcgtagaaatagaaagactagatacagaaaagcaagatttttaaatcggggcaattctattaagaaaggtaggcattgtcctacgattgttagtaaatactacgggcatgagcgagagattgagttctgtaagaagattatacctgtcaaagatacagtccttgaaacaggtaaatttgacactcaattaatggaaaagccttggttacaacaatataagtgggcatatcaaagaggtgtgaactatgggtatgcgaatgcgagggaacatgctttagttagagataagtatacttgtcaatgttgtggcaaaaagaactgtagagtagaggcacatcacatagtttttagaagtaaaaatggcagtaatgatttagagaattatattacattatgtgaagattgccacaaagcagttcatttaggggagattgagttgaaactgaatggtaaacgtaaaagtgatttacgacatgcaactcaaatgtctaccatcagaagcatgttgttaaagaaataccatgatgctattgagacctatggttttgtgacaaaagcaaatagggaaaacttgaatatcgacaaagaacattacttagatgct

SEQ ID NO: 1690 - DNA, 337 bp, unidentified
  misc_feature 1..337: note = human oral metagenome genome assembly, contig:NODE_7457_length_3750_cov_2.000000, whole genome shotgun sequenceWGS
  source 1..337: mol_type = other DNA
gtaaacatgcactaggttaaatacctagtaccttctaggtacggttgtttacaagactccgtggttagaaatagccactacgatagttggatgatacacatacacacccttggttgaatgctcaagactgaggttctgtgattgctgattaagttgggctaagagtgctgaataagtcctgtgttagtaatttcaaaactctaattatctttgtcgatgagaagtccgacacttattttgttaatagaaataagttaggcattacagttcagtgggtactgtcttacaaagtaaaactcactaaaaatcaatacgaaaggagttaagacgtatgttc

SEQ ID NO: 1691 - DNA, 525 bp, unidentified
  misc_feature 1..525: note = Ga0070770_10195732 JGI
  source 1..525: mol_type = other DNA
gtgaacagcgtatttgtactcgacaatcacaaacaaccactctccccgtgttcacctgcacgggcacgtatgctgttgcgtaaaggcaaggcagcggtgtatcggcgctatccgttcaccattatcctgaaacaccgtaccggtgggaacgtgcatcccgtagaactaaaactcgatccgggcagcaagaccacaggcgttgccctggtgcaacagaagggcactggcgcagcggttatcttcgcagccgaactccaacatcgaggcgcggccatcaagaaagcactcagcacccgtcgcgcccagcgtagatccagaagaagccgcaatacccgctaccgtgcgccgcgcttcaacaaccgcacctcccagcactatcccaaagctcactgggtagatgcagcctgtgtcggggattccggaaaaacagtaagactcgaccctaagcagcaacccctgacaatcaaagccacgggtcgtggcagtcgtcagatgcgtcgggtggataaatttggctttccgcgg

SEQ ID NO: 1692 - DNA, 310 bp, unidentified
  misc_feature 1..310: note = Ga0070770_10195732 JGI
  source 1..310: mol_type = other DNA
gtcaacgacccaccaccaaacctacccggttctggtgggggcttgtgagagcaagtccgaagttgaccaggcacagccaccagcgaactttcgctgacggggctacgttagtggcgaatacataggcaccttgggatgtccacccagttccaagctctgcggttggcgattaaacaggcttagaggggttaagccagtgtcgcccgcataaaaaaccgccgcataacattgccgagggtaacattaccgccgcaaggcgagaaagccggtgtagaccggcactgattcaaaaggaagtgacgtgaacagc

SEQ ID NO: 1693 - DNA, 1320 bp, Moorena sp.
  source 1..1320: mol_type = other DNA
atggtttttgtgctggacaagagaaagaagccgctcatgccttgctcggagaagcgagcacgattgttactggaacgcggacgcgccgtcgtccaccggctccatccgttcacgattaggctcaaagaccggctacttgaggagagtgtgctgcagcccgtcgggctgaagctcgatccaggtagcaaggtcactggggtggcggttgtgcgccgggaagagagggcggatggtccttgggatcatgccttgcacctggcggtgatcgttcaccgtggagatgccattcgggaacggatgcagaaacgagcggcacaccgccgccggaggaggaacgccaatctgcgctaccgcgccccaaggttcaacaatcgccggagggcaaacggctggttcccgccttcgttgcgaagctgggttgggaacgtactctcgtgggcgagccggtaccggcgcttggcacccattgcttttatcgagatcgagaccgtccggtttgacacgcaggcgctccaaaacccggagatctccggcgtggagtaccagcgtggcgagcttttcggctatgaagtccgagaatatctgctggagaaatgggggcgccgctgtgtgtactgtggtgcggagaacgtgccactggagatcgagcacatcgttccgagatcgagaggcggaactgatcgggtaagcaatctcacattggcttgtcgagcctgcaaccaggccaagggggaccggacggcggaggagtttggtcacccggaagtgcaagccaaggcaaaggtgccgctcaaggagcccgcggccgtcaacacgacgcgctacgcgatccggaacggtctgtgcgccatgggcagagaggttcgctcatggacgggcgggcggacgaagtggaaccgggaacggtttggactcccgaagacgcatgcgttggacgcactgtgcgtgggcgatcttgccggtgtgtccagctggcatgctctggttcttgaaatcaaggcgctgggacgcgggcagcggtgccggacgaacgtggacgcccacggtttcccgcgcggatacaggatgcgttccaagacggtgcgcggatttcgcacgggggatctggtgcgtgcggaagtactgaagggcaagcgcaccggagtccatattggccctgtggccgtgcgcgcctctggatcgttccgggtgggaaaagcggatgggatttcgtggaggtgttgtcgcctgcttcagcgggcagatggatacgggtatatgaaaggagggcgcggcgcctcctccccaggcgtaaacgccggggcttccggcgccgcatga

SEQ ID NO: 1694 - DNA, 317 bp, Moorena sp.
  source 1..317: mol_type = other DNA
gtcatagaccccacgcctaaaggcgggggcttgcggggatgacccgaccagcccgtctatgaccagcccaagcggttgagccgaaggacaaggcgaggaagccgctacgtcgccggcaggccaaagacccactccgggatgcttccccagtcccggaccctggaagctccggctgcagacaaccttcggggtgtgggcgaaacgggccggagcagatggccagccggcgacatgggcgaggggagcggtccgggagagtccacccgggcccgtcaccggccccgtaaaggggtcccgaaagggaggaaaggatcatg

SEQ ID NO: 1695 - DNA, 1209 bp, unidentified
  misc_feature 1..1209: note = Ga0207421_10015550 JGI
  source 1..1209: mol_type = other DNA
atggaagagaaagtttatgttcaagacaaaaatggtaaacctttagaccccacaaatccagccagagccagaaaattattagacaaaggcagagctgaagtagtacaaagagaaccttttactatcaaaatcgtagatagaaaaaaagaaaattcttatactaaagatgtaactttaggtgtagatgcagggtataagaaagtagggttttcagcaattaatgaaaatgaagagttaattagtggagtgttaaaactacgcaatgatatatctaaaaagttagaacaaaaagctaattatcgcagaaatagaaggcatagaaatactaggtatcgcaaacctcgctttgataatcgcaaaaaagaagaaggttggttagcacctagtattagacataagttaaatagccatattaaattggttaatagattaaaagatatattaccaattacaaaagtaatagttgaagttgctaaatttgacactcaaaaaatgcaaaatcccgaaatagaaggggttgagtatcaacaaggcaaattgcaggggtatttagttcggaattatctattagaaaaatttaattatcaatgtgcatattgtggaaaagaaaatacttctttagaagttgagcatataattcctaaatctagaggaggttctaatagagtaagtaatttaactattagttgccataagtgtaatcaaaagaaaggtagtcaaacagctaaagaatttggttatcctaaagtgcaacaacaagctaaaaagagtttaaaatcaacagcttttatgaatatagttagatgggaaatagttaataaattggattgtgattatacttttgggcatattacaaaaatgaatagaattaatttagatttagagaaaacacattataatgatgcttttgtaattgcaggaggtactaatcaaaatcgagttaatccaatagaagttaacattaatcgcagaaacaatcgttcattacagactaatcgcaaaacttatggtagaagtgttagaactcaaaaatattcattatcgccaaatgatttagttaaatatgaaggtgaagtttgtaaagttaaaggaacgtttaactatggtacttgggttagaatgaaagatagtcaaggtaatacagttaattcaaatgttaaagatgtagaattagttaaatatagccaaggtttatcatttataagttaa

SEQ ID NO: 1696 - DNA, 339 bp, unidentified
  misc_feature 1..339: note = Ga0207421_10015550 JGI
  source 1..339: mol_type = other DNA
tcaactactccacctgaatcaagctaaagattcagatggagcttgaaaaagctcataagtggagtaggagattagtctaagcgatgtcttctctaaggtgaaggcaaatgagctacgtcctgggctgagtgtttgacatacaccctggagtgcttctccagcttcaggctctggaaactatggtggacgacctcataccgttatcctgatggtatgcaacatcaccatagtctatgcctgctccagacgttgacgaggagaacccacctccatttggagagatgacctttacaggtcgtaaaattatagttttaaggaagtgttagtatggaagagaaa

SEQ ID NO: 1697 - DNA, 1389 bp, unidentified
  misc_feature 1..1389: note = Ga0180732_1000469 JGI
  source 1..1389: mol_type = other DNA
atgcagaagttattaaagagaaatacatacacacctacagatacttctctcgtctgtagctctgtggccgtgtctttaaacagagaggaaactctcagtgagcatggcttaaaaacctttgataacaccctcgaagagaatcgacctcagcatagagaggggcaaacattatctgccaaggtctatgtaattagtgtaggtggtgagagtctaatgccgacaacaccaagaaaggcgaggattttgttaaatcgaggtaaggcgaaagtgattagaaaaaccccgtttacggttcaattaacgtttcaaactacacggtttattcagccaataacacttggaattgacagtggttacaaaaacattgggtttagtacaataacggataataaggagttaatgagtggagaagttaaacttgataacatgatgagcaagagattgggtgatagggcaatgtatagaaggcaaaagagaaacaaactttggtataggaaaccaaggtttaataacagggtgtcgagtaagaagaagggatggttacctccttcgattcaaagaaggtatgacacacatttaaatttagttaataaaattaaagggttgttgcctattactaaggttatcatagaggtgggcaattttgatatacagaaattgaataatccagaaattgagagcaatggatatcaagaaggctcattgtaccaatatcagaatgttagatcttttattatttcgagagaaaagggtaaatgtcaattatgtggaaaggataagggaagtgattcgtggcgtcttcatcatattataacacaattaaaaggtggtactgataaacccaataattttgctttactacaccttaaatgccataaaaaattgcacaaacaaggattagagaatcaattcaaaaagaataaacaatataaagcatcgacatttatgaatattatcaaaaataagtttcagcaagatttggattgtgatatcacttttgggtataaaacctatgtggacaggtgtgaacttggtttagaaaaatcacacggcaatgatgcttttgttatagcgggtggaaacggacaggagagaattgacccgtttaaagttatgcaaaaacgcaaaaacaataggtgtttacaaaagaatcgcaggggatttgctccagcgattcgtaaacaaagatatccaattcaaccgaaggacttagttcaaatagccggtgaatggtcagagacaacaggtactcactgtaaaggctcaagaataatggtaaataaaaagtcaattaatatcagattagtggaaagtgtgtttcacacaggaactttaatatggagacaggcaatttctcccaaactcgaaaggttgggttttcttgcttga

SEQ ID NO: 1698 - DNA, 269 bp, unidentified
  misc_feature 1..269: note = Ga0180732_1000469 JGI
  source 1..269: mol_type = other DNA
gtcaactacccaaacctaaaggattgggcttgttccgtgaggttcaacgcaagagctgattagagggcaaagaaacaatggaaataaaaatgcagaagttattaaagagaaatacatacacacctacagatacttctctcgtctgtagctctgtggccgtgtctttaaacagagaggaaactctcagtgagcatggcttaaaaacctttgataacaccctcgaagagaatcgacctcagcatagagaggggcaaacattatctgccaag

SEQ ID NO: 1699 - DNA, 828 bp, unidentified
  misc_feature 1..828: note = Ga0394881_0000594 JGI
  source 1..828: mol_type = other DNA
atgcaaaaagtatttgtgttggacaaaaacagacagccccttatgccttgccatcccgctagggcgcgagagttattgacattggggaaggcatcggtgttcaaacgatttccatttacgattattctcaagaatcgtgaaggtggcgaactgcaacctatcgctctcaagattgaccccggcagtaaagaaacaggcattgtaatggtgggggatttcaagcgtggcaaacgggtgatttgggcgggtgtgctagagcctcgtggacaacaagttaagaatgcgatagaaatccgtcgcactttaagacgtgggcgtagggcagtaaatgccactcgttgggcattgtacaattgtctgaaaaattcgggattgcctatcgaagtcggtacaggcggacggacgaagtttaaccgcactaggcagggctacccaaaagcccattggattgatgcaagttgtatcggtgagagtggcatctgtgtttatcttgagccgaatatgtcttacttgcacatcaaagcaacaggtcatggttcgcgtcaaatgtgtggcaccgacaagtttggctttccaatacgccatcgtttacgccaaaaacgccattttggatttcaaacaggtgatatggttaaagccgttgtcatcaaaggcaagtatgtaggtgttcatgttggacgggttgcgtgtcgggcaacaggtagttttgatatcacgaccaaagcaggtaaagtaactgttaattacaaaaattgtagcatcctgcatcgcgcagatggctatagctacgcttatcaaagaaaggagtggcattcctctgtcagctaa

SEQ ID NO: 1700 - DNA, 253 bp, unidentified
  misc_feature 1..253: note = Ga0394881_0000594 JGI
  source 1..253: mol_type = other DNA
gtaagcaatccatcgccaaaagcgaagaccctttaataagcctcatgcttaccagattcagcccattcgggctacgttaagggtgaatacataggtacttcgggatacttcaccagtcccgaactctacggtacacgattaaacaggcaaaatggaatatgcccgtgtcgtgtacataaaccactcactaacattatcgaggtgaacattacatccgcaaggacaggaaaaaatgaggtaactcatgcaaaaa

SEQ ID NO: 1701 - DNA, 795 bp, unidentified
  misc_feature 1..795: note = Ga0209591_10074768 JGI
  source 1..795: mol_type = other DNA
atgcttaaaccaaattacgttttcgttctagatacccgcaaaatcccactcacgccatgtctgccctctgtagcatctcgcttattggatgcagggaaggcagcggttttcagaatgtttccgttcaccatcattctcaaaaaggaggtaaatgttacacctgaacctattgaactaaaaatagacccaggctcaaaaacaacaggactagcaatcctgcttggtgccaaagtcatctttgcggctgaactaacccatcgggggagagcaatcagcgcgtctttggaatcaagggcagcatcaagaggtagccgtcgggcacgccatacccgctatcgccagccgcgattcctgaaccggacgcgccctaaaggctggttggctcctagcctccaacatcgggttctaactaccctgagctgggtggagaaattccgccgctatgcgcccattggctcaatcactcaggagttagtcaggtttgatttgcaacagattgagaaccctgaaattgtcggggtcgaatatcagcaaggtgaactcgctggctacgaagtcagagaatatttgctcaacaaatgggataggaaatgtgcttactgtgacgcccaaaacctacccttgcaggttgagcatattcatcctaaatcaaagggagggagcaaccggatctctaatctggctctggcttgcgagaagtgcaacctcaaaaaagggactcaagatattaaggatttcctcaaaaagaaacctgaactactgaaaagcattcttgctcaagccaaacggccatta

SEQ ID NO: 1702 - DNA, 302 bp, unidentified
  misc_feature 1..302: note = Ga0209591_10074768 JGI
  source 1..302: mol_type = other DNA
gtcagatacccagccctaaaggactgagcttgtagactgcccgactctagcgagcgggtataaaccaagctaatctgaccagcctaagtcttcacggttcgacttggctcaccgtaaactggctacgttttttgagtcacgacaccttggaatcaagctagttccctgctctgtcatctgcaattaaacagtcttaaggtcactgagacagtgttgcaggtctaacaagctcttaaaacattggcgaagcaaacattatcccttacaggaaactaagcgtcataatgcttaaaccaaattac

SEQ ID NO: 1703 - DNA, 900 bp, Lactobacillus mucosae
  source 1..900: mol_type = other DNA
atgatgcaaaaacaaaaacaagttaattatgtctacgtagttgacgccaacggcacacccgtcatgccgacttcacgcttaggcatggtgcgccgctggttaaagtcgggccaagcggtctggtacggaaatagtcgtacgactatccagttcgtccgctcgattgatacgcagacccaaccgctgacgctgggcgtcaacaccgggtttcacttaggtatggcagtcgttggcaatgatcgcgaatactatgcttcagaaagcattcgtaagtcggaaaaggatcggatcacggcccgccgcgagtatcgacggacacgacgcaaccgcctgcgttatcgtaagccacgatttaacaatcggcggcgaaaagcaggttggctcgcgccgtccgttcagcatcggctcgagtttacggttcgcgagattcagcgcttgtaccggttcttgccgatcagtcagctggtcgtcgaggttagtcccttcgacaaccaaaaacttgccaatcccaacatcaagccgtgggaatacacgcaaggaaaaatgcacggctatcaaacagttaaggattatctgctggcccgcgatcataaccgtgatgccctggatggtcaagtctacccggcctcgcagctgcgggtgcaccacctcgttcagcgcaaagacggtggcacgaatcagcccgacaacctggttttgttgagtgacgtgcatcacaatcaagccaatcacgttaacgggacgctggccaagctggcagccaaccgacaacgaacgatcgactatcggggagcttactttatgagcctgcttgccagccgtttgaatcgttattttcctgactacgtgcagacgcagggctatctaacggctaatctgcgtaccgttacgggattgtga

SEQ ID NO: 1704 - DNA, 321 bp, Lactobacillus mucosae
  source 1..321: mol_type = other DNA
agcagtcaacagaacccactactaaagtagcgggcttgcggtgcaaaccgtaagcatggttgattagcctcagtcatctttggatggctacgttaccgctgaatagataggtactctggaatgccaccctagttccagactctacggtcagccattaaacagagccaaggttccggctcagtgtggctgatatacaaaaccagcggataaccttggcgaagggtactcacgtatcggtctttgaccagatgcgacttactgattcattaattgattctagaaaggagtggcatgatgcaaaaacaaaaacaagttaattat

SEQ ID NO: 1705 - DNA, 1479 bp, unidentified
  misc_feature 1..1479: note = Ga0256829_1004322 JGI
  source 1..1479: mol_type = other DNA
atgaaccgagtaatcgtactcgatacgaataagcaacaactagcaccttgccatccagcaagagctagagagttacttaggaatcaacaagcgtcagtctatcgtaaacaaccgttcacgatcatacttaaacatactgtagatgtagtcgatacacctactagatacgaactcaaaatagaccccggtagtaaaactacaggagtcgcggtcgtacaacacaccaccaatggttctaaagtagttatgggtatcaacctacaacacagaggacacatcataacacaacaactactagctagaagacagttacgtagttctagacgtagtagaaacttaagacatagaccagctaggtataataaccggagaagatcgtcagactggttacctccttctatacaatctagactagataacgtacgtacagtagtcaatcggttactaagaaccatacctataacgtctataactatggaagatatcaagttcgatccagctaagatgactaacaataacatacatggaaaagagtaccagaacggtaccttagtaggaacagagatcaaagagtatctcttagccgctaataaaggtacgtgtcagtactgtcacggtaaaactaatgataatcggttagaggtagaacacgtacaccctaaatcaagaggtggtagtaactccgttactaacctaacgttagcgtgtaggacgtgtaacatagctaaaagtaacatgctgctcccagagtggaaagcacacttggggctctctggtaaaccgttagatataatacgtatatctgttatagataaactaagactcaacaagactgttaaactcaaagatgctacagttatgaatgtgctacgtaagcatcttaaacatctcttagagtcgtacgggctaccagtagaatatgccttcggttacgttactaaatacaatagaactaatcagaaacacagaaaagatcactggatagatgctgcgtgtgttggtactactggtactaacgtatacatccataagaaacacaaatgtctaactatgcgtgctatgcaaaataacaacagacagatgtgtcttagtgataaatatgggttccctagaactagacctaaaggtcctagtaatgtctgtggttatcgtactggagatctagtcaacgctgtggtacctagaggtaagtatataggtagctatacaggaagaatatccgttagaaccagcggttacttcggtattaataaaatagatgttaactataaatatatgaagttactacaagctaatgataactataaatactcttatggcacacctacactacacaatatcatacatagagagaaccaaaacctctctaaactagttcatgatataggcgccaaacactacactatccaaaagatggttaagcatggtcaacaaggtaacactgtacgttatcttacaacggttactatagcggcatag

SEQ ID NO: 1706 - DNA, 285 bp, unidentified
  misc_feature 1..285: note = Ga0256829_1004322 JGI
  source 1..285: mol_type = other DNA
gtcaactaccactacctgaaggaagtggcttgtaatatagctacgacctaaccataggtaagacttgtaatatagtctaagttgtccagtctaagtacttagagtactacgttaggatagaatatataggtaccccgcggtggccgttccagcccagggctctacggtatatagttaaacaggtctgtgtggaaggaccagtgctatatacttacaacctatccataaccttgacgaggagcacataacagttatcctagtggtaactagaaacatagtaaggaa

SEQ ID NO: 1707 - DNA, 585 bp, Moorena sp.
  source 1..585: mol_type = other DNA
atgcgtggaaaaccattaatacctacacgacctggaaaggcaagaatacttttgcagcaaggaaaagcaatagtaattcagcgagcgccatttactattcagcataaacttgagacacatctgagattgattgaaaaactgaagaaaatactacctgtaacaaagataggagtagaagtagcgagttttgatatacaaaaaacccagaatccagagattaaaggaatagagtaccagcagggagagttacagggttacgaagtaaggaaatatatgctggagaagtggaagcataagtgtgcgtactgcggcaagattaatcttcctctggagattgaacatattatacctaaattacgaggtggaacagatagagtttccaatctggttatagcgtgtcataaatgtaatcagaagaaagggaatcaaacagcagcagagtttggacatcctgaaatacatcagaaagcaaagcaagcattaaaagaaactgcgtttatgaatattgttagatggagactggtgaatactctaaagtgggttggacctgtgggtatattacaaagcatgctagaattaaattag

SEQ ID NO: 1708 - DNA, 257 bp, Moorena sp.
  source 1..257: mol_type = other DNA
accaatcaccacttattaaaatggatggtctgcctcgtgagagataagggcaacaggctgattatggggcgttaaaagatgcagaagttattggtagagtttcagaacacaccagtagtagatactcctcaagtcccctgctctgtaagtgagacattaaacagagataaaaagtctcagtgtaccctgtatagtactggccaataacagctccgaagaggacttacactctggcaagagtggacaggcgttgagcg

SEQ ID NO: 1709 - DNA, 1308 bp, unidentified
  misc_feature 1..1308: note = Ga0209204_1004127 JGI
  source 1..1308: mol_type = other DNA
atggtttatgttttatctattgaaggcaaacctttaatgccaactaaaaggtatggtaaggttagacatcttctaaaacaaagacttgctaaagtagttaaagttaaaccttttactattcagttactttatgaaactactaactatacacaagacattacacttggtatagatagtggctataattatataggtttttctgctgtaacagagaaagaagaactaatctctggtgaagttaagctaagaaatgatatacctgaacttatcaaagaaaagcaaatgtatcgtagaattagacgaagtaaactaagatatagaaaacctaaatttaataacagaacatcatctaaaaaagaaggatggttagcaccttctattaaacataagttagattctcacattagatttatagaataccttaaaaagatactccctataactaatatagttatagaggtagctaattttgatacacataaactaaaaaatcctaacgtagaaggtgaaggttatcagcagggagaacaacaaggcttttataatcttcgtgagtatattctttatagagatgactatacttgtcaattatgtggtaaaaccaatgttccacttgaagtacaccatataggcttttggaaaggagatagaacagatagaccaagcaacctaataacactatgtactaaatgccatactcctaaaaatcataaagaaagtggcaaactatatggtatgaaacctatacaaaaatcactgaaggaagcgacatttatgtcaactgtaaggtggaaattagttaatacattaatgtgtaactatacttatggttatattacaaagtctaaaagaataagccttaacttagaaaaaactcattataatgatgcgttttgcatagcaggtggaactgttcaaacaagagtagaacctatatattttgaacaagtgagacgaaataatcgttcctttgaaaagttttacgatgctaaatatatagatataagagacaactctattaaaacagggcaagaactatttaacggtagacgaacacgcaacaaaaactacaatatagaaaacttaagactgtttagggggcaaagagtatctaaaggtagaagaagtattcgtacacaaaggtatttttatcaacctaaagatatagttatatttgaaggtaacaagtatattgctaagggaatacaaaacaagggtagttatattaaacttgaaaaactgcctaaacctgttaaaacagaattagttaaaccttatatgtttagaaaaggattatgtattctgtag

SEQ ID NO: 1710 - DNA, 270 bp, unidentified
  misc_feature 1..270: note = Ga0209204_1004127 JGI
  source 1..270: mol_type = other DNA
gtcaactacccaccgcctatagaggcgggggcttgtagaaatacaagctcggttgattagcctcagccaccagcgatatgctgacggggctacgttatatgggaacatatagtcaccataggatgctccacaagtcctatgctctgagggtagtggttaaacatctctgaggggtaggagaagtgctgctactatacaaaaccccatataacattggcgatgtggacctacaggcttttgcctgaattacctttaaggaggtttaatatg

SEQ ID NO: 1711 - DNA, 1023 bp, unidentified
  misc_feature 1..1023: note = Ga0102924_1014628 JGI
  source 1..1023: mol_type = other DNA
atgaatgtagtgtatgtactttcaccagacaaggtgccactcatgccttgctcgtgcgcgattgctcgcttgttgctcaaacaaggaaaagcaaaagtggcccgccgaaccccttttaccatcaaactgcatactcagccagagagcacctacacccaacccctgacgcttggaatggacacaggcagtgcggtgatgggttcggcagtggctgatgaacagggcaacatattgtatctctctgaagtagaagtgcgcaacgatatcgccaccacgctcaaagaacgggcttcctatcgccgcaatcgtcgtcaacggaaaacccgctaccgccaagcccgatggctcaatcgcaagaattccatcaagacagggcacttttcccccacgatgacgagcaaaatcgacgcgcacctgcgagaaattcgctttgtccagtcgttgttaccgattcactccctaatgctggaaacagggacatttgaccctcatgccttgaaacatcccgaggtcttgcagaacaaatggatgtaccagaagggcatcaactacggttttgccaataccaaagcctatgtgctcacacgagatggctacacctgccagcactgcaagggaaaagcaacagatcggcggttagaggtccatcacatcattttccgcagcgaacggggaagcgatgaggaagcgaatttgctcaccctctgcaagacctgccacgatgccctccatgcagggagcatcacgctcaaacaaaaaggcgcgagaaaaggaaatctgcttcatacgacgcagatgaacagtatccgcatccagttgctccggcgcgttgcggcagaggaaacctggggctttgtgaccaaagaacaccgcctcttggcaaaacttcccaaagcccatgtgtttgatgcagcggtcatcgccacacggggaacgatcccaacctttcacacgacaatcatgcttgcgaagagattcaaaaacccctgccgtgtttctgattctctcctgttggaatggtga

SEQ ID NO: 1712 - DNA, 298 bp, unidentified
  misc_feature 1..298: note = Ga0102924_1014628 JGI
  source 1..298: mol_type = other DNA
gggagccacggagtcttcagccctgtagcttcttcggaagcctgagttcaccagactcctttccagaaatgggaagaccgttcgagtggttatgatacctgcggttgacgcatcagactgccgctctatcgcctgtagttaagtagaactgagggaaggttcggtgctacaggtgcaaaaagctgcttgaacactgtcgagatgaagtcggattctcttcctggtcacaggggagggatacgcaccacccggcgcttgccggagcatttttccgaaaggaatcgccgtcatgaatgta

SEQ ID NO: 1713 - DNA, 1509 bp, unidentified
  misc_feature 1..1509: note = Draft_10001674 JGI
  source 1..1509: mol_type = other DNA
gtgcaagataaagtctacgtagtttcaatgaacaaaaagccactaatgccaactacaaactttgggtacgttagaattttattgaaacggaaaatggctaaagtcatactatcaaagccgtttaccgtgcagttactttttgaaaccgaagaaaatgttgtaccgactgtgttaggacttgatcccggtcgggtgaatctagctattactgtattagaaaaagaatctggtaatgttttaatttcttcggagttggtaacccgtaataaaagtgtttccaatctaatgaaggaacgaaaggcgcaccgaatgattcataggggctgccgaagagccaaaaaaatacgtagagctaaacattctaagacggtctttaaaaatgccaaaaacatcatacaatccggcgctttgaaacccatcaaggtaacgtatattaagccaaaaccagctaggtttttaaataggactagaaaagaaaattggcttactccaacggccaatcatcttttggaaacgcaccttcattatgtaaatcttatatgcagaatcatacccgtaagtgaaatagtcattgagtacagcaagtttgatacacagaaattgaacaatcctgcaattcaaggaaacgagtatcaagaaggactgcttaaagggtatgatagtgtccatgattatatttatcaagcacaagacaagcattgtttgatgtgcaaaaacaagattaaacatgatcatcatattgttcctcagcatgaaggcggtagtgaccatccggataacatagcgggtctttgtaagaaatgtcatactaaagctcatacagataagacgtttgttgctgaaattaaagtcaagaaggaaggatcaaaaaaatcctatgatagtgtcggaattcttaattccatcatgccaagagtactgcaaacaattcaagaattgtatgggacagaaaatgtcaccataacgacgggtgatcgaacaagtcaggcaaggaaagcgtatggcctcaagaaaatgcactgtaacgatagctacgttattgccctgtcaaatgttgatcatgtaagtcgtatacgcgatattttgccttatcagttcatgcaataccggaggcataatcggaaagtatgtgatgctgtaagagaacgtcattataaaaataatgacaagaagttagtcgcatccaacagaacgaaacgatacgagcaaaaggacaattctttatttgagtataaaaagcaactcaaagaagcgggactgactaaaaagaaaatcaagcaatctatatcaaatttaaacgttgagccatctaagaaacggcttaaaacgccaaccaaaaaacttgctattaatgcaggatgcaccgttctttataggtctaaacgatatgtggttaatggtactttaaataaaggcataacattgaaattccacggttttgataaagaaacgttctctattgaaaaatgcaaattaattacaaggaattcagggttagtatgtagttaa

SEQ ID NO: 1714 - DNA, 274 bp, unidentified
  misc_feature 1..274: note = Draft_10001674 JGI
  source 1..274: mol_type = other DNA
gtcaataacccctcattaaaatgagaggcatgttagattagcactttccgcaaggaaagaactttacctaatatgttatcaagtgtgcttggtagttattgaacagggaagagagatttacaagacaccttaaaataccactcccagttttaagccctgtgatacttgtatatctgtcccaagggagactcaccgacttaacttgtttgccaacaaacaggaagggtcgtgtttaccaaaattacgaaaggaattcatataagtgcaagataaa

SEQ ID NO: 1715 - DNA, 1050 bp, unidentified
  misc_feature 1..1050: note = Ga0306921_10158369 JGI
  source 1..1050: mol_type = other DNA
atgccacgcggccagagctcgagaattggtgaggaaaggcaaagcagtcgttgtgcgtcgctacccgtttgttattcgcctaaaaaaggatcattcggggcggcagccaatagccatcaaaatcgatcccggagcaaacacaactgggatcgcgctcgtccgattagcttcatctactcaggtcgttttgcatctttccgagttgacgcacgggggggatgcataagggagatgctcaataaacggcgtgcatccaggaaaagtcggcgtgcgcgcaaaacccgttatcgtgcgtcgaggtttaataaccgcatcaggcacgaaggctggttgacaccaagtctgcattcgcgtgtagacaatgtgatttcatgggtcaggcgctaccagctgtgggtaccgattagcgggatcgtcatagaggccgttcgtttcgacattcaaaaactccttaatccggggatatctaacgcggaatatagacaaggcacattgttttcgtacgagctaagagagtatctcctcgaaaaattccagcggacttgcgtctactgtggaagcgagaacgtccggcttgaaattgatcatgtgcagccgcggtccaaaggcggaaccatgaaccctaacaacctcgtactggcttgccacggttgtaaccgggctaaatggagccagccgattgaagacttccttgcaaataatcctgaacgcctaaagcggatcaagagccagcttcagacctcgcttagagcgactgcggcgataaacgccactcgcacaaaaattctgctggaacttttcaggatgcatctgccggttgaggtatcgacgggaggtgaaactaagtttaatcgaactcggcttagcattccgaaaagccacgcattagatgctgcatgcacgggcaaaacacaggaattgctcggatggaatatgtctgtgctctcgattaaggcctgtggcaggggctcgtatcagagaactctcctagacaagtatggttttccgagaggttttttgatccggaagaaaaaaaccaaaggctttcag

SEQ ID NO: 1716 - DNA, 296 bp, unidentified
  misc_feature 1..296: note = Ga0306921_10158369 JGI
  source 1..296: mol_type = other DNA
gtcagctacccacgactaacatcgtgggcttgtagaaatacgagccgtggttgaccagaccaagaaagcaaaaaatgcgatctacgttaaaatacaagtcaaagacccactccggagtgcttcctcagctccggaccctggaagtcccggttgacgttacgggaaaggtaaagcccggcacgaccgagacgggtccgccagatgcggatcagactggttttcaacatggtcgaggggagcgtccaaaaggactgtcaccttctcagcaacgagaagagaaaagcggggtaacccgc

SEQ ID NO: 1717 - DNA, 777 bp, unidentified
  misc_feature 1..777: note = Ga0103869_10001850 JGI
  source 1..777: mol_type = other DNA
atgcaaagagcgttcgtgctagacaagaaaaaacaaccgttgatgccctgccatccagcaagggcgcgagaactattacgtaaggggaaagcgcgggtcttcaagcaatacccttttacgattattctcacagaacgggaagcagggacggtacagaatgtcgctttcaagatagatccgggtagtaagaaaacagggattgtgttagcggcagatttcaaacgtggtaagcgtggtatttgggcagcggtactcgaacatcgtggacagcaaattaaagccgcacttgaaacccgtcgtaacctacgacgtagccgccgcgctcgacatacccgttatcgtccagcacggtttttgaaccgacatacgggcaaagggcatttaccgccgtcgctgcaatcgcgtattgagaatgtctggacgtggctatgtcgtatccatcgtgtatgtccgattagtagcatctcacaggaactcgtgcgcttcgatacccaactcatgcaaaacactgagatttcgggtgttgagtatcagcaaggaacgctgctcggtatggaagtccgcgaatacttattcgagaaatggggacgcaaatgtgcctactgtggtaaacaagatgtgccactggagatcgaacacatcacacccaagtctcgtggcggctcgaaccgtgtcagtaacctaacaatagcctgtcacaattgcaatcaagaaaaaggctcccaaaccgcagtcgaatttggtcatgctgaaattcaaagcaaatccaaacaaccg

SEQ ID NO: 1718 - DNA, 248 bp, unidentified
  misc_feature 1..248: note = Ga0103869_10001850 JGI
  source 1..248: mol_type = other DNA
gtaagcaaccccgcacctacaggtgggggcttttgaagcccaatgcttaccagactaagcgaaagctacgttaggggcgaatacataggcacttcggaatgcttcaccagttccgaattctgcggtggatggttaaacgggacgattgggagtaagccagtgccattcacaccaaaccgctccataacattgtctaggtgaacttatctcccgcaagggaagatttttgaggtaactcaatgcaaaga

SEQ ID NO: 1719 - DNA, 1629 bp, unidentified
  misc_feature 1..1629: note = Ga0114939_10008276 JGI
  source 1..1629: mol_type = other DNA
atgaaaagtaaacgagacaggagacaaacactcagaagtacttccctagcctctggcaagtctattgaagatttctgggctgatgctatacctcttgagggtatgggtccgaaagcaatttcgaacgacacagcttctgctttttatctcaatggcgaagggacgtctgaaaagaaagagaatgagaaagaggaggagaaatcgaaagatctatctcaatctggacctgaatctggaaataaggacaaacacaatgagattatatcaaaatcaaattattcttcgagacagaatccgaagaatacagtgtctgtatttggaccagataagaaaagattaaaaaatacaaggatatctaaagcgaagaaatggataaaacaaaagaaggcaagacaggtcaaggataaatctagacttggagaatttgcgatacagttattgaacaaacctgttggtaagataagagttccggtagtcgataaagatggaaagccattaatgccaacgttgtcgggcagggcaaggagatggattgagaaagggaaagctgtcggtaagagaactaagacaggaatattttatgttcagttattggtagaaccttctggaagaaataagcaagatattgtagcaacattagacccaggaagcagatatactggagtagcagtatgttctaagaaacaggttctatatggatgtaatctagaacttatagctgatgaaaaagaaaatagatttgcatctatcaaaaatagaatggataagagaagagaattgagacgaggaagaagatatagaaattgtagaagaagagaagccagatttgataatagatcgaaaacgggtaagatggctccatcaataagagcaagaaaacaattggaactgaaagtgatatcagaattatgtgagatatttcctatatcagttattgggatagaagatgtagctttcaatcactatacaaagagatggggtaagaacttcagtcaagtagaggtaggaaagaaatggttatatgaagaactgaagaaaatacctggaattagagaagttagactaataaaagggtatgatactaatatcagaagacaacaattaggactagagaaaggggctaagaaagaagaaagagaagtcagagcccatgtcaatgattgtatagcgatgggatctataatattggggattggaatagagacaaagactcggttaagacttggtataaattttgatatcattacaaggcctaaatattcaagaaggaaattgcatgatgagaaggcatcaaaaggcggaattaggaaaagacatggtggtacgacaatagattggacaaatatcagattaggagattatgtggaggctgctagaactgaaaaaggtattggaaagatgatttatagaggttgggctggcggattcagtagtggtaagaatgataataattcgatatctttatatgattttgattggaaaagaataggtcaatttggagttaataacgtaagattattgaatagaaggacaggactaatggtcaagagtatggagatttcagaaaatatagataatatctgtaaatatgggactgaacaggtgagaattgaagatgcttggaagtag

SEQ ID NO: 1720 - DNA, 241 bp, unidentified
  misc_feature 1..241: note = Ga0114939_10008276 JGI
  source 1..241: mol_type = other DNA
gtcaactaccccgccctgaagggcgggcttgttgtgagactcaggactcgccaagataaccaaaaaggtgaataagttagactagcctacttagaggtgaaataagtcaatgaaaagtaaacgagacaggagacaaacactcagaagtacttccctagcctctggcaagtctattgaagatttctgggctgatgctatacctcttgagggtatgggtccgaaagcaatttcgaacgacaca

SEQ ID NO: 1721 - DNA, 1005 bp, unidentified
  misc_feature 1..1005: note = Ga0311341_10020266 JGI
  source 1..1005: mol_type = other DNA
atgcaagtaccagtaatagaccaaaaccgaaatgctctgatgccgacttctccggcaagagcagcacagtggattaagtccaagaaggctaccccattttggaatttgggtatattctgtgtgcggttgaatcaacccacgggaaatatcaaagaaaatatttcgtgcggggtggacagcggaagcaaacgggaagcggtttgtgttaagtcctcaaaacacacttatgtcaacattttagcggatgcggtgacatgggttaaggaagcggtggaacaaaaacggaatgctcgtagaacaagacgaaatagaacgactccatgtcggaagaacaaatacaatagaactcgtggaggattgcctccttccaccaaggcaagatggaattcaaaactccgcattatcaataaactaaggaaaatctatcctattaactcatatgtggttgaagatattgctgcttccaccaaaaagggaaagaaatggaatgtgacgtttagtccgcttcaatgtggaaaagaatatttctacatggaattggagaaacttggaaaactcacgactaagcaaggatatgagaccaaagagatgcgggataaattgggattgaaaaaatcatccagtaaaatggctgagatttttgaggcacataacgtagatgcttgggtgttggctcattcagatgtaggtggagatttagacaacaaggaactaacgagagtagttccattgagattccatagacggcaactccatatgttccaaccatctgtgggtggattgcgaagaccttatggtggaacgatgtcactgggatttaagcgtgggtctttggttcggcatccaaaatatgatttgtgttatgtaggtggaactttgggagaccgaatttctctgcataatctaaaagatggaaagcgattatgccagaacgccaaaccatcagatattaagtttctggcatacaactattttcgttgctcctcccctactctaaagggatag

SEQ ID NO: 1722 - DNA, 168 bp, unidentified
  misc_feature 1..168: note = Ga0311341_10020266 JGI
  source 1..168: mol_type = other DNA
gtcaataacccacgaccctaaagggtcggggcttgaaagaatataattaaccaatatgtttagacaagttaaaacgttgactacacaatcaacaactgaacgaaatggatgtggtaatccaaaatatattgaggatgcttcccaagtcctcttttcctatgttcgtca

SEQ ID NO: 1723 - DNA, 933 bp, unidentified
  misc_feature 1..933: note = Ga0265294_10058290 JGI
  source 1..933: mol_type = other DNA
atgagggttccggttctggattctcgcaggacgccgttgatgccgaccacacccgtacgggcccgcctgctcatcaaactggggcgggcaaaaccgtactggaacaagctcggcatcttctgcatcatcctgacctatggcgtacagcctgacaaccaggatctggtcgtcgggatcgaccccggcagctcctttgagggctggtccgtggtcggcacccaagagactgtcttgaacggcatgtcggagacccccaagcacgtcaagaaagcagtggagactagaagagtgctgcgtcgggcccggcgaggccggaagtgctggcgtcgcccggcccggttcaacaaccggctccgtggtcggcagttcctgccgccgagcacgttcgcccggtggaacgccaaggtacggatcctcaaccaactccagaagatcctgccgatcaccgccgtggtcgtggaggacgttgcagcagcgacgaagaagcactgcaaacggtggaacacgaacttctcgccgttagaggggggaaaacagtggttttaccagacgatccgggatcacggccttgatctgcacccgcgtgccgggtacgaaaccaaagcactccgggaccggttcggcttgaagaagacaagccagaagagcaagccggtcttcgccgctcatgcagtcgatgcttgggtgatggcggcggacgtctcgggtgcggagcagccgaccgaacgggggttgttctactggacgccgatccggttgcaccggcggcagttgcaccggttgcagccggataccggcgggatccgaaaaccctacggaggaacccggtcgctcgggttcacccgggggacgcaggtccggcacgtcaagtacggattagcctatatcggaggaacgttgaaaggaaagatgtcattgcataacgcggtcacc

SEQ ID NO: 1724 - DNA, 366 bp, unidentified
  misc_feature 1..366: note = Ga0265294_10058290 JGI
  source 1..366: mol_type = other DNA
gtcaactacccctggttaaaaccgggggcctgtgaacggctacgcaggaccaaacagtagactaggaggcaagaaattgcagcagcgttacgggctacaagaacggcgggatgtttccctagtcctgccctcttccgggcacgccgaacccgacgtacctctcggggtactaagcctgcctcgcaactccgaagggaaatgcaaccccggctcgaccgggagaaggtaataccatgagggttccggttctggattctcgcaggacgccgttgatgccgaccacacccgtacgggcccgcctgctcatcaaactggggcgggcaaaaccgtactggaacaagctcggcatcttctgcatcatcctga

SEQ ID NO: 1725 - DNA, 981 bp, unidentified
  misc_feature 1..981: note = human gut metagenome genome assembly, contig:NODE_1363_length_7809_cov_11.459247, whole genome shotgunsequence WGS
  source 1..981: mol_type = other DNA
ttggtttggaatgtacaggcaccgtgggatgtttatcctagtcccacgctctgcggtctgtgtttaaaagttctgagaggtaggaacggtgatgcagacaagaaacccattccaacattgacgaaggatgagaatcggccctcgggccgaacaaccggccttcgggccgagcaagcggagcctgcgggtatccgcaaaggagatactttgaaagtatttgttttgaacatgcgcagcaagccgctgatgccgtgttcgccagcaaaggcgcgacacatgctgaaggcgggcaaggccgtcgtcgtgcgtcgaacgccgttcacgatcaagctgaccatcgccacaggcgagacgaagcaggacgtgacgcttggcgtcgatgcaggcgcaaggcacgttggcatttccgccacgacggaaaaggaggaggtcttcgcgtccgaagtcgcgcttcgacaggacatcacgggacttctggccgatcgtctggcattccgacgtgcaaggcgcaatcgaaagacgcgctaccgcgctccgcgcttcaacaatcgcgttcgatcaaagcacaagggatggcttgcgccgtccgtggagaaccgtatccaagcgcacatttcgcgcatcgaggcggtctgcagactgcttcccgtcaccaagatcgtgattgaaaccgcatccttcgacattcaaaagatcaggaatcccgaagtcgaagggacgggctatcagcagggcgaccagcttggattctggaacgtgcgcgagtacgttcttttcagagacggtcatatctgtcagcactgtcgaggccgatccaaggatccgatcctcaacgtgcatcatcttgagagtcgtaaaacgggcggagatgcgccaaacaacctgatcacgctgtgcgagacatgccacaaggcttatcacgcaggaaagatcaagttgaaggtcaagcgcggtcaatcgttcagggcggaagccttcatg

SEQ ID NO: 1726 - DNA, 285 bp, unidentified
  misc_feature 1..285: note = human gut metagenome genome assembly, contig:NODE_1363_length_7809_cov_11.459247, whole genome shotgunsequence WGS
  source 1..285: mol_type = other DNA
gtcaataacccccgcctaaaggcggaggcttcaaagagcctttattgactagtctcagcaaacctcctctgggaggcgagctacgttggtttggaatgtacaggcaccgtgggatgtttatcctagtcccacgctctgcggtctgtgtttaaaagttctgagaggtaggaacggtgatgcagacaagaaacccattccaacattgacgaaggatgagaatcggccctcgggccgaacaaccggccttcgggccgagcaagcggagcctgcgggtatccgcaaagg

SEQ ID NO: 1727 - DNA, 1308 bp, unidentified
  misc_feature 1..1308: note = sediment metagenome genome assembly, contig:NODE_138_length_117839_cov_9.207605, whole genome shotgunsequence WGS
  source 1..1308: mol_type = other DNA
atgccatgcaccgagaagcgggcgcgcctccttctcagaaaaggccgtgcggtggtccaccgcatctcccccttcaccatccgcctcaaggaccggctcgccgaagagagcaacctccagccctgccgcctcaagctggacccgggattccggcagaccggcgtcgcggtcgtgcgagaggagcaggaccctcacggtcccgtccaccacgccctccactgcgcagtgatccaccaccgccaggaggaggttcggtccgacatgctcgcccggcgctctgcccgtcgccgcaggcggagctccctgcggtaccggcctccccgattcgacaacaggcgcaggccccaaagatggctccccccgtccctgcgcagccgcgtctgcaacgtcgtttcgatcgcccggctgtacacgaggctttcccctatcgcggccatcgacgtggagctcgcgaagttcgacacccacaagctccagaacccggaggtctcgggggtgtcctaccagcaaggggagctgtggggctacgaagtccgggagtacctgctggagaaatggggccgcaggtgcgcctactgcggcgccacaaacgtcccccttgagatcgaccacatcgtccctgtgtccaggggtgggacggaccgggtcagcaacctcacgctggcctgctcggcctgcaatcaggccaaggggaaccgaacggctgaagaattcgggcaccccgaggtgcaggagaggacaaagcaacccctggtaggtgcggcggcgatgaacgccacccggtacgcgatgctcagtgccctccggtcctttgggctgtccgtgtactcccacacggcagcgcggacgaagtggaaccggagcaggctcgggctatctaagtcgcacactgtggacgccctctgtgtgggggagatggccgcagtcgccggatgggagatgccggtgcttgggatccgcgcgattggcaggggtcgccggtgccggacgaacttcgacgcgcacgggttgcccagaggatatctgccgcgcacgaagcgggtgttcgggttctgcacgggggatctggtcgttgccgaggtgccaagtgggatgtacgcaggccggcacatgggaacggtcctgatccgctccagcgggaggtttgacatcaaggacctgcgcgggcggcgggtggcgcaggggatcaggtggcagcactgccgcctcgtacagcggttctgcgggtactcttacggaaaggaggaagcggcgccttcctccccacgcctgaaggcgggggccttcggcgccgcagaaggatggtga

SEQ ID NO: 1728 - DNA, 318 bp, unidentified
  misc_feature 1..318: note = sediment metagenome genome assembly, contig:NODE_138_length_117839_cov_9.207605, whole genome shotgunsequence WGS
  source 1..318: mol_type = other DNA
gtcatggaccccacggctaaagccgggggcttgcgatgagcaagcctgcccatgaccaggccgagcgcttgatccgacggacaaggggatgacggcgctacgttgccggcagtgctcgcagacccactccgggatgcttccccagtcccggaccctggaagccccggctgcagacaaccttcggggtgtggagaaacgggccggggcacgtgccggccggcaacatggccgaggggagcgcggagaggagtccatcccgcgcgtcaccaggcccgtaagggcgccccttcgggggcagaaaggaggtagggagccttg

SEQ ID NO: 1729 - DNA, 837 bp, unidentified
  misc_feature 1..837: note = Ga0376086_0041273 JGI
  source 1..837: mol_type = other DNA
ttgtcactgtttcgtctaaaaggcggaatcatcctgatagaggtgtgcgaagggactttcaaacttgactcaaggattatctccatgcgagtaccagttttatcgccagaaggacagccactcatgccgactaaaccaagtcgtgcaaggcgatggctaaaaagcggaaaagccaaaattgtttataacgatttgggcatttttaccatccaactgatgtttgagtcatctggcactaacactcaaccaattagtgtcggtgtcgatccgggtaaaaaatatacgggaattggcgttcaatcagctaaatctactttgtggatggctcatttacaattaccttttgaaactgtcaaagggcggatggagcaacgacggatgatgcgtcgtggtcgcaggggaagacgagttaaccgcaaagttccctatagtcaaagagcgcatcgccaagcaagatttgacaatcgacgctccaaaaaagttccaccatcgctccgagcgtcgaggcagctagagctgcggattattaaggaactgactaaaatctatcctctaactacagctgtttgggaagtggttattactcgtggcagcaaaggattttcacccgtaatggttgctcaatattgggcaattgaccaactcaagcaactgctgccagtagtcacccaagaaggttggcaaacatccaatctcagacagtggctggaattggaaaaacagaaaacccaaaaaggtgatgcaattccggaaacccatgcagtagatggagtggtactggcttctactcagtttgtccgatatcgacaactcaagggtaaacaaggatggtgggaa

SEQ ID NO: 1730 - DNA, 236 bp, unidentified
  misc_feature 1..236: note = Ga0376086_0041273 JGI
  source 1..236: mol_type = other DNA
gtcaactaccccgcactccgctcacgctgcgtgacggggcttgcaagagacaaggtttgcaacgcaagagttgactagcacgcttgagcctctatctggcacgcactctcaggtatttccctagcctgagttatctgcaaaacagcttgtcactgtttcgtctaaaaggcggaatcatcctgatagaggtgtgcgaagggactttcaaacttgactcaaggattatctccatgcga

SEQ ID NO: 1731 - DNA, 1308 bp, unidentified
  misc_feature 1..1308: note = MIS_10021274 JGI
  source 1..1308: mol_type = other DNA
atggctgtatttgtattaggtaaaggtaaattacctttaatgccttgttctgaaaaaagggcaagaaaattattagaggctaatcgtgctgtagtggtacgggtatatccgtttactattagattaaaagatagatcagatggtattatgcagcccttaaatgttaagcttgaccccggtagcaaagttacaggtattgccttaacaagagatgtagaaacggtaactattgatggtgaaatagtaaaaacggtaaacgttttaaacttatttgaacttactcatagaggggaactaattagttcttctttaaaaactagaaaagcttttagagctagtcgtagagctagaaatactagataccgatctcctagatttttaaatcgggctagacctaaaggatggttgcctcctagtctaaaccatagagtgacttctattttaaatttagtaattaaattaaaaaaattagtaccattaactaatataacacaagaattagttaagtttgatatgcaaaagatggtaaatcctgagataagtggtattgaatatcagcaaggtacgttgcagggttatgaagtacgcgaatatttgttagagaaatataatagaacttgcgtatattgtggtgtgaaaaatgtacctttacaaatagaacatatccaagctaagtcaaaaggtggtaccaatagaattagtaatttgacattagcatgtgaatgctgtaataaaaagaaagataatttagatattagtgtgtttttgaaaaataagcctgagttattaaataatatcttaaaacaagtaaagtcccctctaaaggatgctgctgctgtaaatgctactagatggtcattatttaataacttaaaaaaaataggtttaagtatggaggtaggatcgggaggtttaacaaagtttaatagagtgaacttaggactacctaaaactcatgttttagatgctgtaagtgttggtaaattaaatgttatcaataattggaatatcccatccttaattatgaaatcaacgggtagaggtagatatagtagaacctataataattcttttggttttccaataggatacttaatgaaaacaaaaagtattaagggatttcagacaggagatactgttaaggcactaattacaaaaggtaaaaagataggggaatattttggtaggttaacaataaaagccacaggatatttcactataaaaacacgtagtaccactgtaaatagcttatcttttaagtactttacgttgattcaacgtgcagatggctatagctatactttttaa

SEQ ID NO: 1732 - DNA, 272 bp, unidentified
  misc_feature 1..272: note = MIS_10021274 JGI
  source 1..272: mol_type = other DNA
ataagtcacccccgcagtaatgcggtatttttgaaaggaaatatggatttaacagactaagttgaatttatttaactacgttgtaatagagtttaagacctacctatgaatgcttcctcagttcatagctctagaagtttaaatcgcagacacgcttagggtaagcacgaaacgggtttagacataatgctgaattacaacattgtcgaggggagattcacagaaatgtgagcgtaacaaggcgcgtaagcgtaaaggatttttaaatggct

SEQ ID NO: 1733 - DNA, 513 bp, unidentified
  misc_feature 1..513: note = JGI24712J26585_10005370 JGI
  source 1..513: mol_type = other DNA
ctggtcggtggtcgggaccagagagactgtcgcaaacggcatgttggaggctccaaaaacgtcaagaaagcaatcgaaacccgaagaacgctgcgtcgcgcccgtcgtcaccggaagtgctggcgtcgtcctgcccggtttgacaaccggctcagcggccggcggttcctgctaccgagcacgtttgcccggtggaacgccaggatccgaattctggaccagctccagaagatcctgccgatcaccgatgtggttgtagaggatgtttttgcggtgacaaagaagaattgtcggcggtggaacgaaaacctctcgccgttggaggtcggggaacaatggttttatcaggcaaccagggatcgcggactcgatctacacctgcgtgcggggtatgagagaaaagaactccgggagcggttcggcttgaagaagactcagcagaagagtaaaccggtgtttgctgcccacgcggttgatgcgtgggtgatggcagctgacgtcccgggtgcggag

SEQ ID NO: 1734 - DNA, 375 bp, unidentified
  misc_feature 1..375: note = JGI24712J26585_10005370 JGI
  source 1..375: mol_type = other DNA
gtcaactaccccaccctgaatggtggggcttgcgaacggctaagcgagaccaaacggtagaccaggaggcgaccaatcgattgcagcagcgtttcgggctacatgaacgggtgggtgcttccctggcctgtccctcttccgggcacgccaaaacccgatctgctctctggagcactaagcccgtctcgcaactccgaagggaaatgcgaccccgattcgaccgggaggaggtaatacctgccatgcgtgtacccgtatcagacaccaatcaaacaccgttgatgccgacgaccccggcacgtgcccgtctcctcctcaagcagggaaaggcgaagccgtactggaacaaactcggcatcttcagtatcatcctca

SEQ ID NO: 1735 - DNA, 1452 bp, unidentified
  misc_feature 1..1452: note = metagenome genome assembly, contig:NODE_590_length_29055_cov_3.058414, whole genome shotgun sequenceWGS
  source 1..1452: mol_type = other DNA
atgaaagtatacgtaatcggatggaatgggttcgggcttgcgccaacgacgccacggaaagcacgcattctgctgaaatcaggcagagcaagtgttgcgtttcgtcacccattcaccatccgtcttaaatataagaccgggtgtgcgcacccggctggaatgagcatcggcgtggacaccgggtcccagcatatcgggatcagcgtcatcagcagagagcaggaaattgttatcagcaaagaggaatacgagctccgctccaccatggaaaagcgggctcttctggagacaaggaagaacctgcgaagaagtagacggtcacgaaaaacacgttaccgtcatccgaaatttagaccggataccaggcgcacctatcaggaaacccagattaagcgaaataaaaatatgacacactggaagaaggagacgaatacatatgagtcgtcgagaccagaaggatggcttccgccatccatgcagtcaaaactggaccatcatatccgtatcatttccagatatcaggaagccttgcctcctgatacgaccttaaggatcgaagttgggaggtttgacgtccagcatatggagaatccgatgattcacggtgaaatgtatcagaagggagcacagtatgaatcagagaatctgaaagcatatatcttctcaagagatggttacacctgccagtgctgtaagcaaaaagccggaacgaaacggaaggacggaacgaccgtccgcctgatcgtgcatcatatcgatttccggagcaaaggtgcttctgataacccgaaacacttgatcacagtatgtgacaaatgccatacgtccgcagcccataaaccgggcggcatcctgtacgactggatgctaaaaaacaaaacagtagcaagaggataccgggatacggcggtcatgaacgtcttaagacgtcggctctggaaagcgttcccgaatgccgaatttacatacggaaatatcacggcagcggacagaaaaactttcggtcttgagaaagctcactgtaacgacgcaacagcgatcgccgcacatggactgaaacagatccgggacattccggatacaacgtattatcgccagatccggaaacagaaacgttctctgcatgaggcaacaccacggaagggacggaaggaaccgaaccgcagcgcaaagcggaatccaaagaatactagccagtccggaggtctgtacctgaatgataaagtgtgggtatttggacagtacggatggatcagcgggttcagcggaacaagcagtgtctatatcaagaaccgggatgggaaatacattcgggttcccgggaaaagccatacgctgatcccggctaagggattgattgcaaggactcattgtaataactgggctgtttatagcgcaaatacgattttatatgacaggcgggaaggaactattaagaccacagaaacataa

SEQ ID NO: 1736 - DNA, 259 bp, unidentified
  misc_feature 1..259: note = metagenome genome assembly, contig:NODE_590_length_29055_cov_3.058414, whole genome shotgun sequenceWGS
  source 1..259: mol_type = other DNA
ttgaataaccgagcatgcgaaggtagaaaatggtgtctgtgcaggttcgcctgcgcagactagttgactagcctaaggacaaggtccctacaagccagtaagggaagccttagtactacgtcttatggagtgaataccctacccgacaagttgtcccatcggtatgggttcgggctacgtatggaacaagagttcaacgacccggtgatagaagctcccggacattggcgaggacaaatcacatcgaaagatgaaccgg

SEQ ID NO: 1737 - DNA, 1242 bp, unidentified
  misc_feature 1..1242: note = fermentation metagenome genome assembly, contig:NODE_421_length_49700_cov_20.654930, whole genome shotgunsequence WGS
  source 1..1242: mol_type = other DNA
atgaaagaaataaagtattcatttgtagtagatagtaggggaaaagctttaagtcctactaaatctgagaaagcatggtattttataaggaaaggcaaagcaaaattagtaacacagtacccattaacaattaagttgacttatgaggtagacaatacggatattagtaaactacacatgggtttagacgtaggacaaacaacaggaatagccttagtacaagaatgtaaaacaagaaataaagtaatatttaaaggtgagatagtccaccgtaaagatgtaagtagcttaatgacaactcgcaaaggttatagaaaaaacagacgtagtgaaaagaggtatagacctgttaggtataataataggtcatcttcaagtagaaagggaaggttagcaccttcgataaaaacaagacaagatgagatactaaggttagtaaaaaggttacaaaagtatgtgggtatagacaaagtagtaatagaggatgtgagttttgatataaggtgtttaacagatggctacaaaccgtataggtgggaatatcaaaggggtaataggttagatgagaacataagaaaagcgacattaatgagggataactttacttgtcaggaatgtggtgtaaaagacacaatattggaggcacatcatatagtacccaaaaggttaaaaggtagtgacacaataagcaatctaataacgttatgcaatagttgtcatagtagtgtaacaggcaaagaggaagattatatagataaatttcaaagtctaactggtggaaagcaattaggtttacgctacgcgattcacgtaatgcaaggaaagacatatttatataacagtataagtaaattggtgtcagatatagccaaaacagatgggggtacaacaagtaatagaagaattgattggggtatagttaagagtcatagtaatgatgcaatagcaataacaagtttaaaaccagatacagtaggcgtatacgagtataatattcaaccattaagaaagaagcgaaaatgtaagttagataaaagttcagtaatagtgcaaggggacagagtaatatatactccaaggggtaagttctcaataaactgttatgtaaccgcaatattaaagagtggaaagttaaaaggatattacaagttaactgggttattagatggtaaacgttacggtcctgtaagtgtaagaagtctaaggaaattggtaacagaccgaggtttacgcataagttag

SEQ ID NO: 1738 - DNA, 313 bp, unidentified
  misc_feature 1..313: note = fermentation metagenome genome assembly, contig:NODE_421_length_49700_cov_20.654930, whole genome shotgunsequence WGS
  source 1..313: mol_type = other DNA
tataaaaatatgtaaataactattagtttttatagacataactgttggtggtttcaagcctaagtgagtacagcattggaaacagtgaagtacaatgaactacgttagtaggaaaagttaaagacttacctttagatgtaaccatcagtctaaagctctaagagttattgaggaagactgttaatctaagtaatattagcataagtattataagaaaaccaaacaccgaaataacatgaactttctattgaccttggcaagaagggaaatactttgaaagaaaggtaggagaaatcctgatgaaagaaataaa

SEQ ID NO: 1739 - DNA, 438 bp, unidentified
  misc_feature 1..438: note = Ga0137379_10004000 JGI
  source 1..438: mol_type = other DNA
atgtcacaggtgtttgtcttagatacgaataagcaaccgctcaatccggtgcatcccggttgtgcccgcctgctcttgaaacagggcaaggctgcggtctaccggcgctacccgttcacgctgatcctcaagcgtacggtggagcgaccggagcttcagccgctgcgcgtcaagatcgatccaggcagccagaccaccggcctcgccctggtcaacgatgcgagcggggaggtcgtgtgggcggcggaagtgcgggaatatgtcctgctcaagtggcatcaccagtgcgcctactgcgacgcgcgcgctgtcccgctggaactcgaccacgtgcagccgagagccaaaggcggctccaaccgcgtcagcaacttaacactggcctgcacttcctgtaaccaacgcaagggcaatcaagacgtccgcgacttcctcaag

SEQ ID NO: 1740 - DNA, 312 bp, unidentified; identical to SEQ ID NO: 1009
  misc_feature 1..312: note = Ga0137379_10004000 JGI
  source 1..312: mol_type = other DNA

SEQ ID NO: 1741 - DNA, 768 bp, Homo sapiens
  source 1..768: mol_type = other DNA
gtgggtgtaccgcagcaatgcgagattttttatgaaaggatatatatggtttttgtattagacaaatctaaaaaacctttagatatgatcacaaacgctgaagctagaatactaattagaaaaaagctagctgtaatccataagatatatcctttcactattaggcttagagacaatagttgtataagtaatgatagaacttataccgttaagcttgatccaagttcaagacatactggagtggctattattgatgataaagatcaagtagtcatgttagcagagcttgagcatagaggtcatctagttaaaaagaatatggatagcagaagagctattagacgcaaaagacgcagtagaaagattagatatagacctgcaagatttttaaatagaaccaagcctaaaggttggttagcacctagcattaaatcaagggctgacaacgtgattaatttcattaagaaatataagaagctcttgaatatcaataaggttatgattgagaatgtaagttttaatgtagctcaaatgagttctaacactaagctttggggtaataattaccaacaaggacctttgtaccaacaaaagcttagaagttttatattcggccgctcaaacggcaaatgtgtctactgcggagctgaggcaaccgagatagatcacattgtgcctagagctaaaggtggaactaatagcacatataatttagtagcatcttgtagagcttgtaatcaaatgaagtctaataagactttgaaagaa

SEQ ID NO: 1742 - DNA, 272 bp, Homo sapiens
  source 1..272: mol_type = other DNA
gtcaattactcgacaaaaacaaatcgagctcgattgaccagactcagtttatctaacttaactgttagattaaactacgatagataagttatcacacccatggatgcttctccagtctgtggctctgtgttatctatcattgtcgaggagagactagcttagaactttaattgggacattagtctctggttgatagctgtaagttagcgtgcctactgtaaaaggtgggtgtaccgcagcaatgcgagattttttatgaaaggatatatatg

SEQ ID NO: 1743 - DNA, 1284 bp, unidentified
  misc_feature 1..1284: note = Chloroflexi bacterium
  source 1..1284: mol_type = other DNA
atggtcttcgtcttagacacaaagaaaaagccgctgatgccttgcacacccaagcgggcacgacagctgcttgccagaggcagagcagtcgtccaccgggtggcacccttcgtcattcggctcaaagatcgccaggtggaggactcggtcctgcaaccgcttgccctgaaaatcgatccgggcagccagaccaccggcatgacgctggcccgtgtggaagacaggagcgagggagccatccaccatgcggtgttgctggctgaagtgcagcaccgaggccacgaggtgcgagcgcgcaaagtcacgcaacgccatgctcgcagacgccgccgcagtgccaatctgcgccaccgggctgcgcgcgcagccaaccgccgcatcgctcgtgggtggctgccgccgtcgctgctttcgcggatcggcaacgtggtgagttggacgaagcgcttgcgtcgttttgctcccgtcacacgcgtggatgttgagtgcgtccgcttcgatacgcaactactccagaaccccgagatcactggcgtccaataccagcatggggagctttttgggtgggaaatacgagcctatctcctgctcaaatatgcgtaccagtgcgtctactgcggaaaacgcgacaccccttttgagctcgatcatatccggccccgtagccgaggcgggtccagtcgcatcacgaacctggcattggcctgtcacgactgcaatcggcagaaaggggcgcaaacggcggcggaatgggggcacccggaagtggaggtgcaggcaaaaacaccgctcagggatgcggcggcggtgaatgccacacgccacaaactcgtccaggagctaggcgtgttcgggttacccgtcggcacctggacgggcgggcgcacgcgctggaatcgcgcccgctttggcatcgcgaagacgcatgccaaagacgcgctctgcgttggagatctcgcaggcgtgcgagagggcaggctgaagaccgtggcgatcacggccaccggacggggggagcattgtcgcaccaattggagcaaacagggcttcccgcgcggataccgcctgcgccacaagcaggtcaagggtttcaagaccggcgaccgggtgcgggccgtcgtgccggacaagctcaagaccaggggcatccatgtaggacgcgtgcaggtgcgcaaaagcggctcctttgatatccagacgcacgagcgggaggtcgaaggagtcaatgcgacctactgttgcctggtacagcgaggcgatggctatgcctatgcgcttgcatag

SEQ ID NO: 1744 - DNA, 332 bp, unidentified
  misc_feature 1..332: note = Chloroflexi bacterium
  source 1..332: mol_type = other DNA
gtcacgaacccccggatgacatccgggggcttgcagccagaacgctcgtcgttcgcgttgcaagctccatagtgtccagccttagcgtccaatggcgcaggccgccaaatacggacgctccgttcgacgggtcatggcacccagggacgcctcctcaatccctggccctgccgtccagggttaaaaggttcgcaggggtcgagccggtgctctggacccatcaagcccgttgaccattggcgagaggagcatcttgggaatgcctgcccaggatcgtcagacagccccttacggggtcttctccaaagcgcgagaagaaaggaacgaggatg

SEQ ID NO: 1745 - DNA, 966 bp, unidentified
  misc_feature 1..966: note = Ga0072941_1026019 JGI
  source 1..966: mol_type = other DNA
atgtttgtaggagtaattggaaaatcaggaaaacaattaatgccgtgtagtccacgcaaggctagacttcttttgaagtctggcaaggcggagatcgtgcggtatgaaccgtttacgattaaattgaattacgacacaacagaaattacgcaagaagttactgtcggagttgaccttggtagtaaacatcttgcagtttcggcaacaacagaacaaaaggaggtctatacaacgcaagtagaattaagaacagatattgttgatttgttatcagggagaagagctttacgcagaacaagacgtaatcgtaaaacaaggtatcgtcaggctaggtggcaaaataggaagaaacctgaatattggcttccgccaagtgttcagcacaaggtaaacgctacgatcaaaatattggatacaattagacagtgtttccccataaccaagtttatcgttgaggttgctccgtttgacattcaaaagattaacaatcctgacattcagggaggacaataccagcaaggcgatcagtggggttttgctaatgttcgagagtatgtattgtacagagatgggcataaatgcagggtttgcggaaagtccggtaaattacacgttcaccatatagagagtcgcaaaacaggaggaaacgccccaaacaacttagttactttatgtgaaaattgtcataagggacatcataacagtaccaaactgataaagtttaagcgaggacaagtttttaaagatgcaattcaggtgacaattatttcaaagagtgtatgtgactggctagtacatcaaggtattaggtttgagaaaacatacggatacattaccaaacataaacgcaatcaggttggattacaaaaatctcatttgaacgatgcttttgtgatcagtgggaatttaaatgtcaggcggtctgatgaatttgtgcttcaaaagagagttagagcaaataatcga

SEQ ID NO: 1746 - DNA, 304 bp, unidentified
  misc_feature 1..304: note = Ga0072941_1026019 JGI
  source 1..304: mol_type = other DNA
ggatagtgtaatttttacgaaacggaaagaaaggatggattgtaagcaacctgtcccgtatagggatggaactttttagtccttgtttactagattgagcaacacaggcaacttgttgctacgttatttgagaatacataggcactttgggatacttgtcctagtcccaaaccctgcggtttgttattaaacagtcctgattggtaggggcagtgtaataaacatacaaaacctcaaaataacattatcgaaggacaccaactcccgtagggagataacatttaagttatattttattatgttt

SEQ ID NO: 1747 - DNA, 1251 bp, unidentified
  misc_feature 1..1251: note = Ga0374549_000851 JGI
  source 1..1251: mol_type = other DNA
atgccatgtcatcctgcccgcgcacggcaattactcaaagcaggaaaagcggcggtgtttcgccgctatccattctccatcattttgaaagagcgcgatgggggtgatacgcaatccgttgagcttaaacttgatcctggtagccagacaacgggcatagctctcattgcgaatgaacgggtgatatgggcggctgaactacaccatcgcggtacgcggattaagtacgcgctcgaccagcgtcgcgctgtgcggcacagcaggaggcagcgtaaaacgcggtatcgaaaaccgcgtttcctgaaccgtactcgtcccaaaggttggctaccgccgagtcttgaaagccgcgtggcaaatgtcgagacgtgggttgctcggttgcgtcgatttgctcccatcacggagatagccttagaagtagtgcggtttgatacccaatctatgcagaatccagatgtgagcgggattgagtatcaacaggggacgctggcgggctacgaggtgcgggaatatgtacttgagaaatggaaacgaacatgtgcctattgtggagcaacagaagtgcgattggaaatagagcatattgttcccaaatctcgtggaggaagtgatcgcgtgtcgaacctaacccttgcgtgtcatgcctgcaatcagaaaaaagggacacaaaccgccattgaatttggtcatccacacattcaggcacaagctcgccaaccgcttcgtgatgctgcaactatcaacgcaactcgctggcggttgtatgaacggttacaggcaatagggctaccgatgacgtgcggttctggaggacgcacgaaatataaccgcatccagcaaagctatccaaaagcgcattggatagatgcagcgtgtgtaggggaacgtggaagacatgtacaagttcatcctgagatgcaggtactcgttatccgcgcaatgggacatggcaatcggcagatgtgccgtataaacaagtacggtttcccacgcactagagcgaaaggaagcaaatgggtaaaggggtttcaaacaggggacatcgtgcgggcaatcgtgccaaaaggtatacacaagggtacacacatcggacgagtagtaatccgtgcaagagggtcgttctgtattggaacaatcgatggaatttcctatcggtattgcacctgtttgcaacggacagatgggtatgactatggctttggtagtggactgaagccgctgaaacgtggcacttcatcccaccgctga

SEQ ID NO: 1748 - DNA, 252 bp, unidentified
  misc_feature 1..252: note = Ga0374549_000851 JGI
  source 1..252: mol_type = other DNA
gtcaatgacccaagccttttcaggtttgggcttgtgagagcaagccgacattgaccagactcagcccgtgtgggctacgataggcgggtcatgacaccgtaggatgcaagccagtcttacgctctgtcgttggtagttaaacaagcagacggtctatgctcgtgctgccagcagaacaagcctccctatcattgtcgaggcacccattaccgccgtaaggcgagaaagcaacggtaacaattgcacaatcac

SEQ ID NO: 1749 - DNA, 885 bp, unidentified
  misc_feature 1..885: note = GENOME_ACESSION: mgm4707306.3 MG-RAST
  source 1..885: mol_type = other DNA
atgtttatgatatttctattaaataaaaacaagaaaccgctagatcctattcatcccgcaactgcccgaaaattattaaagtatggccaagcagttgttcataaaagaattccgttcacgattcgattaaaagaactcgtggatctggaaccaaagaaatatacgattaaaatcgatccaggatcaaaaacaactggcgctgcgattgtatcagacaacgaggttgtccatttggcggaaatcgaacacaagacaaacatctcaaagaaactccaagatagacgttcgtttaggagaagcagaagaacgcgaaagttgcgatatcgcaagccgagatttgataaccgcactcgagatggaggatggctaccgccatcgctaaatgcaagagtggacaatattttgtctcaggtcaaaaggtatcaaaaactcattccgatcacaagcgcttcacaagagttagttcgattcgatatgcagaagatgcggaatcctgaaatctcgggggttaagtatcagcagggagaactccaagggtatgaagtacgggagtatttacttgataagtttgaccgcaggtgtttttactgcgaagcagagaacatcccccttgaaattgagcatacacatccaaagtctcgcggaggttctaattctgttatcaatcttacgattgcctgcaataaatgcaatcaagagaaaggaaattttactccagaagaatggctaattaaaattaaaagtagacgctcgaaacgatatttactgataaagaaaaacataccaaaactgaagagtgctctaatcaaacctcttaaagatgcggcagctgttaatgcgacgaaaaataaacttaaaagagaactagaaaccatttttggatct

SEQ ID NO: 1750 - DNA, 414 bp, unidentified
  misc_feature 1..414: note = GENOME_ACESSION: mgm4707306.3 MG-RAST
  misc_feature 204..318: note = MISC_FEATURE - Any "n" represents any nucleotide
  source 1..414: mol_type = other DNA
gtcaactacccgcgattgaaatcgcaggcttgtgttagttatatctaactatagtcatagtttcaatctggttgctgttacagaactaagttgaccagcctaagttcgattttagaactacgttattgaggtgcataccctagaatgcttctccagttctaggcactatggaacgcacattaaacatctaatcaacgggatagnnnnnnnnnnnnnnnnnnnnnnnnnnnnnnnnnnnnnnnnnnnnnnnnnnnnnnnnnnnnnnnnnnnnnnnnnnnnnnnnnnnnnnnnnnnnnnnnnnnnnnnnnnnnnnnnnnnagcgcagaaaaggaagtatgtttatgatatttctattaaataaaaacaagaaaccgctagatcctattcatcccgcaactgcccgaaaattattaa

SEQ ID NO: 1751 - DNA, 1077 bp, Janthinobacterium sp.
  source 1..1077: mol_type = other DNA
atggccgtctgccgcatcgaggaagtcgttgaggccgccggcgtcaatggcccggtgatgcatattttgtttctgatggaattggtgcactgcggccaagccatcaagaagtcgctgcatgcgcgatccagtattcgtcggcgccgccgcggcaacctgcgctaccgcgcgccgcgcttcaataatcgcatccggcgcacgggatggctagcgccatcaacatcggatcgactcggccatggcctgggtggcgcgcctgcgccgtctggcgccaatcacgcatctggcgcaagagttggtccgtttcgacatgcagaagatacaaaatccggagatctccggtgtcgagtatcagccaagcacattgctcggctacgaggtgcgcgaatatttgctggaaaaattcaaccgcacctgtgcctattgcgacgcaaccggccgctgcagatggaacatatcgatgccaaggccaacggcggcccaaaccgcgtcagcaacctgacactggcctgcgagccttgtaataagaaaaaatgcgcgcgacgtccgcgaatttctcaagaaagacccggtgcgcctggcgaagatcctcgcgcagcgaaggcgccgctgcgcaatgccgcggccgtcaatgccaccggatgggccttgttccaggcattcaaaaatgctgatcttccggtggaggttggcacaggtgggcgcaccaaatggaaccgctcgcgccaaggtatttcaaaggcgcatgtcctggatgccgcttgcgttggcatcgtgggcgacgtgcgcggcgcgcgcacaccgaccttgcgcgtcaaatgcaccggccgcggttcgcgctgcaagacgcgactgaacaagtatggttttccgcgtgcctatttgacccgcaaaaagacggcgtttggctttcgcaccggtgacatggtggtggccgacgtaccttccggcaaaaacaagggaatccaccagggccgtgtggcgatccggatgacgggcattttcaacatccagaccggcatcgctgatgcgcagacggtgcagggtatctcacaaaaggattgccgcatcatttag

SEQ ID NO: 1752 - DNA, 289 bp, Janthinobacterium sp.
  source 1..289: mol_type = other DNA
atacccggcatagccagcgcatcggcaatgttgcgccgctgctttgtgagtcgctgatagtactcaaagctcataagcacatgggccggtcggcctctatccgtgatgaacaccggcccgttgtttgcggcccgttttgcctcgctcgccccttggttgaactcgcggcttgataaggtggtaatggtcatgacgacacccccgtatgctcgaatgatgtagtaatgttactacatcattcgagcgggtgcaagtgtttcagagtcggtaaacggtcagctcagtggac

SEQ ID NO: 1753 - DNA, 828 bp, Actinomadura latina
  source 1..828: mol_type = other DNA
gtgtcgaactgggcatcgaccccggctccaagcacaccggcatcaccgtcttcaccgacatcggcgggaaccgccggggcctgtacggcatcgacctggcccaccggggcggcagcatccgagacaagatgtccatgcgcgccgcctaccgcaggggccgcaggtcgcggaacctgcgctaccgcgcccccccgctgctgcaaccgcaccaaacccagcggctggctcgcaccgtctctgcggttgcacggcaccgaggtgcgcgaatacctccttgccaagtggatacgcgcctgcgcgtactgcggcgccactggcgtgccactcaacatcgatcacatccgcccccgctccaggggcggctccaaccgggtcagcaacctgtgcaccgcgtgcatcccctgcaaccaggccaaatgcaaccggcccgtggaggagttcctcggccacatgaacaccatcgaccgcattccgcacaccgtcctcatcgccgcagccaccgagcgcggtacctacgctcgcacccgcaccgaccggtacggcttcccccgtctccgcctgccgcgcgcgaagcggttcttcgggttcgccaccggcgacctggtccatgccacggtcccgaccggccggtgggccggaacccacaccgggcgtgtcgcggtccgttccagcggcagccacaccgtcaccacccccgcaggggccgtcaagacctctcgacggctacgcctacaccaccaaacccgaggggccgtgatcagtgctgcggcccggcaggtcagagcaccgctggggccctcccgcgctttcgttctctccccccgctga

SEQ ID NO: 1754 - DNA, 828 bp, Actinomadura latina; identical to SEQ ID NO: 1753
  source 1..828: mol_type = other DNA

SEQ ID NO: 1755 - DNA, 1287 bp, Moorena sp.
  source 1..1287: mol_type = other DNA
atggttgtcgtcttagaccagcaccaaaaacctctcatgccctgcaccgaaaagcgggcccgccaattgctggacagaggtcgggcggtggtgcaccggatggcccccttcacgatccggctgaaggatcgcacggcggaagaatccaggttccaaccattgcgcgtcaaattcgaccccggcagcaaaacaacgggggtcgccatccttttggagggggcccaaggccctaaggtcattttcttcgggaagcttgtccacaaagccagcatcaaagccaaactggacgcccggcgggctttgcgtcgagggcgccgccatcgcaagacgcgttaccggaaagcccggtttctgaaccgcaagcgcccccagggatggctgcccccgtcgctggaggcgcggatcggtcaaaccctgcattccttagcgaagctccgaaaactcgcgccgatcacggcgcttagcgtggagcatgtcaaatttgacacccagaagatgctaaatgccgaaatttctggggtggaataccagcagggcaccctgttggggtacgaagtgcgggagtacctgttggagaaatggggccgcgcttgcgtctattgcggcgccactgcggtgccgcttcaggtagagcacatcgtgcccaaaagtcgcgggggcagtgaccgggtcagcaatctggccttggcctgcgaaccttgcaatctggcgaagaacaaccggacggccgaagagttcggttatcctgcgattcaggcccaagccaagacaccgctgaaagatgcggcgatgctgaatgcgacccgctggcggttgtataaagacctcaaagcgaccggacttcccgtggaaggtgggtcaggcggccgcacgaagcagcagcgcatcgatcacggcttccccaaggagcactattacgacgcgctctgtgtcggagaaagcacccccaaacggttcaccagcctgccagcctacgtgcaggtttggaccgccaaaggccggagcaaccggcaacgctgtcgcacggacaagcacgggttcccgattcgccatttgtctgccaagaaagttcatttcggctttcagaccggggacctcatccgagcggaaatacccaacggcaagtataggggcgggtggacaggttctgttaccgtccgcgccacaggccgtttcgacatcgcgatcgcgggccgcaaaattgcccaaggcgtttcgcacaaatactgccgcattctccaacgcggagacggctggcagtatacaacgcaccgtataggtgcttga

SEQ ID NO: 1756 - DNA, 271 bp, Moorena sp.
  source 1..271: mol_type = other DNA
gtcaaccaccccgccctgaagggcggagcttgtcgtaagctccacggttgaccagccttagcctcttcacgagactccgttcggtcggtgcacacccaggggtgcttctccagcccctggctctgtgggttcacgttaaaagccagctcggggtagtgcaagcggtgcgtggacggctttcgacccgaccgaacattggcgaggagagatgtgcgcaagcacacgttaccagccccttacggggctccgaaaggagcatcggcgaatggtt

SEQ ID NO: 1757 - DNA, 696 bp, Anoxybacillus flavithermus
  misc_feature 121..220: note = MISC_FEATURE - Any "n" represents any nucleotide
  source 1..696: mol_type = other DNA
ttgtcacggagcagttgcaagaaagctgttgaacaagggaaggcggcgatttacaaacgattcccatttaccatcatcttgaaaaaatcagtagacgaatcagaaaatgaaacaacatatnnnnnnnnnnnnnnnnnnnnnnnnnnnnnnnnnnnnnnnnnnnnnnnnnnnnnnnnnnnnnnnnnnnnnnnnnnnnnnnnnnnnnnnnnnnnnnnnnnnnatgaagtgttaaagcagacaggattagatgtcgagtgtggaacaggtgcacgaacaaaaatgaatcgtattcgtttagacttgccgaaaacacattattttgacgcttgttgtgtaggcgaaagcacaacaaatcacttatatttcaaaacaaaagaagtgttatttatcaaggcaaaagggcgtggtagtcgctctcgtacaaacctagatagatatggcttcccaagaggttatcttgcaagacaaaagttcttctttggcttccaaacaggggacatggttaaggctgttgtcccaagagggaaatatcaaggcgtttggtttggcgaagtcgcatgtagaaagactggaagtttcgatattaaaggcaaggacggaaagcgtatcgcacaaggaataaattatagatatgtccaagtcattcagcgatttgacggatatgcttatggaaaggggggggcggaacttgcgtaa

SEQ ID NO: 1758 - DNA, 244 bp, Anoxybacillus flavithermus
  source 1..244: mol_type = other DNA
gtcaacaacccaatgactaaagtcatgggcttgtaagccccatgttgaccagaccaaggcttgaaacagagcctacgttatagatgtcatgacacgttcgggtacttctccagcccgttcctctgtcgtgcaaggttaaacaagcgtggtgggtagcgctagtgtcttgcacataacaagcatctataacatggtcgaggagaatatgacctgctttatgcagaggaaaggggagaaccctatg

SEQ ID NO: 1759 - DNA, 651 bp, unidentified
  misc_feature 1..651: note = Ga0307928_10012696 JGI
  source 1..651: mol_type = other DNA
atgcctacaactaggtgtggtgcagtgaggagatggcttagagacaacaaagcaatagttgttaatctatgtccttttacaattcaattaaaatgggattgtgagaacaacaagcaagaggttattgttggcttagatactggtgctgttaatgttggctgttcagcaataatcaacaacaagtgcttatatgcttccgagacaaaattgagaactgatataagcaaaaaaatgcaaagacgagccaaatacagaagaaatagaagaacaagaaagttaaggtatagaccagtaaggtttgataatagaacatcaaaaagacaattacctccgtcattacaaagtaagatggattcaactgtaaaagttgttaaacaattatcaaagattcttccaataacaaaggttattgtagagatagccaagtttgacacgcaaaagttacagaatccagaaattaaaggaaaggaatatcagaaaggcgttactgaaggatatgataatgtaagggcttatgtgtttgaaagagacaaatatacatgtcaaatctgcaaaaagcaaggtggaatattacaaacacatcatatcaagcaaagaaaagatggtgggacagatagaccagagaacttagctactgttcataaagattgt

SEQ ID NO: 1760 - DNA, 271 bp, unidentified
  misc_feature 1..271: note = Ga0307928_10012696 JGI
  source 1..271: mol_type = other DNA
gtaacacattcccaccgactaaagtcgggggcttttcggcaacgaagcctgtgttaccagacttaggaaagtaatctttcctacgttatttgagatgtagaaacccaacaatttgctcagttgttggctctttcgtggcactgtaaacagctctgagggatttggggcagtcaaccacattgcgaagctcagataacattgttgagagcaacattacagtttgaaggaactggcttacagcaaaaatccttcacacaaaaaaatgcaaaaa

SEQ ID NO: 1761 - DNA, 1227 bp, unidentified
  misc_feature 1..1227: note = Ga0315553_10003099 JGI
  source 1..1227: mol_type = other DNA
atgttagtgtacgtgcaagaccaggatggcaagcccttgatgccaacccgacgatacggcgcggtgcgtcgctggctcaaatcgggccgggcgaaagtggtgcggcgtgaaccgttcacgatccggctcctgaaccgccatggaggctacacccaaccgctggaggccggcgtcgatctggggtcggctcacgtcggtgtgtcggtcgtgtccgagcaagaggcagtactcgccggtgagttccgtctgcgaacggatgtgagcaagctgctgacccagcgccgccagttccggcgtgcgcgccggggacgtaagacgcgctaccgacagccgcgtttcctgaaccgtaagcacaaggacgagcttccgccttctctgcgggtcaaggtggacgagactatcaagctaatccgcctggtggacagcatcttgcccatcactcactggaccttcgagatcggcagcttcgatccgcacaagttggccgacccggacgtggagggcactggctaccaggaaggggatcagtatggcttctggaacgtgcgagaatacgtgctgtggcgtgaccggcacacctgtcaggcgtgcaagggcaagttgggcgatccgatcctgaccgtgcatcacctccggcaacgcaaagagggtggcagcgaccggccggcaaacctggtaacactgtgcgagacgtgccacaaggcgcaccacgccgggcagccgctcaagctggaagcgccgccgaccctacgggatgcgacacatttcaacgtgatcaaggcgtacgtgatgcgggtcactgtccatctgaaccggtcgatcacgttcggctacatcaccaaggcgcggcgagtggcgcaggggctgcccaaatcccacgtcaacgatgcctttgtgatcgccggaggccaggagcaggcccgatcacactatgtctacctgggcgggttctaccgccgccagaaccgcaaggtgaccaaaggagcgagatcgcacattcgcaacaccatccctcaggcattcggcttcaggcgcggagatcgggtcagaatgccagatggacgacaagggtttatctatggcttgcgcacgtccggctactttgacgttcggcagttggctggcgaggtgttgagccactcggtcagttggaagaagctaatgccgcttgagaaagcgcgtacactacgaatcgaaaggaggaggggttggaaacggcctgcctga

SEQ ID NO: 1762 - DNA, 305 bp, unidentified
  misc_feature 1..305: note = Ga0315553_10003099 JGI
  source 1..305: mol_type = other DNA
gtcaactaccaccggctgaaagccggtggcttggggagtgactgaaagtcacctaaagtcccaggccacggttgaccagcctcggccagagagcgcattgcgctctaccgggccacgttgggaaaggcacgacaccctggggtgaacgctccagctccaggctctgtcgctggtggttaaaagctcgcgtgtggtagtgagcggtgctgccagcataacaacctctcccaacattggcgaggagcacgccctgatgggcgactacagccgcaaggctgacttatccgagaggattgagcatgtta

SEQ ID NO: 1763 - DNA, 792 bp, unidentified
  misc_feature 1..792: note = Ga0209985_10000066 JGI
  source 1..792: mol_type = other DNA
atgcaaagagcttttgttctatcttctaccaaaaagcctcttatgccttgccatcacgcagaagcaagagagctgctacgtgatcgaaaagcagcagtctacagaagaatctctttcatgatcatccataaagagcgctcagatggggatcttcagtccattgcgctaaagcttgacccagggagtcggacgacaggcattgccatggtcggggaatttaaaagaggaaagcgccttatcttcgcagctaacctttctcatagggggcaagctgtgaaagatgcgctcgaatcacggcgatccctaaggcgctcgcatagggcaagcaagacaaggtatcgggctccaaggtttttaaatcggactcgccccataggctggcttccaggaaacgccttaagagagttttcactacccatgagcttttcatcgggcggaagaacaaagtttaacagatcaaagcaaggctatcccaaagatcattgggtcgatgcagcttgcgttggaataacgggcgaaaaggtttatatcgcgccttttcataaggcttcaattatgagggcagaatcaagaggctcaaggcagaaatgccttccagataagtatgggtttccaagaacagcgcccaaggcccaaaagcgcgtctttggctttcagactggagatctcgttgcagccaaagtcacgaaaggcaagaaggcgggaagctatcaggggtgcgttgctgttcgttcaactggcaactttaacatcaaagcacagggggcaggttgtccaaggcataagctataa

SEQ ID NO: 1764 - DNA, 271 bp, unidentified
  misc_feature 1..271: note = Ga0209985_10000066 JGI
  source 1..271: mol_type = other DNA
gtcaatcacccgcccctaaaggggcaggcttgtaagaaaggagactgatttcatgcctagttgacccgactcagtcccaaaaggggctccgttacgagcgaatcacatagttacccccggatgcttctccagtcctgggctctaaggttggcggttaaacagatcgaagaggttaagtcagtgccgcaagcaagtaaaccgctcgataacattgtctaggtgaccattacctgcgaaagcggagaaccgaaggtagctttaaatgcaaaga

SEQ ID NO: 1765 - DNA, 1245 bp, unidentified
  misc_feature 1..1245: note = Ga0307379_10050423 JGI
  source 1..1245: mol_type = other DNA
atgttagtttttacactcaacaaacaaggaaagcctttgatgtcttgcagtccctgcaaagcaaaaaggctgctcagagctaaaaaagcaaaagtcgtaagaactacaccttttacgatcaaactgctttatggttcaacagggtataagcagggaattacagctgggatggatacaggtagtaagaaaattggtgtagctgctgtatctgctgatagaattctctatcagtcagaagtagaactgagaaacgatataacaaagaagatgaaacaaagactatcttaccgcagaacaagaaggggtagaaaaaccaggtatcgaaaaccgcgtttcctcaacagaggaaaagcaggttttctggcaccgagtataaagagtaaaattgaatctcatttgagagaaaagagatttacagaaagtattttaccagtatcaaagtggatacttgaaactgcaagtttcgatattcatcttataaccaatcctagtgtagaaaaaaaaggctatcaagaaggtgaacaaaaaggtttttacaacacaaaagcgtatattctgcatagagacggatataaatgtcagaaatgtaaaaagagtaaagttaagttacaggttcatcatattatttcaaggtctaacaaaggaactaatgaaccaaaaaacctaataacattatgtgtagactgtcatgaaaaacttcataatggtgacttcaccattatgggaagtaaatcaaaaacaaaacatgcgacagaaatgggtataattaaatctcagttaaagaagaggtttggagaattcaaggaagtttttggttatgagacaaaatactggagagagcaagttttgggtttacccaaaacccattacaacgatgcaatcagcatcgtttgtaacggagaacaagaagagattaaaatattgaataatgtgatttacaaaaaacatgtttccagaggagattatcaacaaaccaaaggcaatcattctgaaaaaaagataccaaacagtaaactgtttgggtttaaaaaattcgataaagtaaagtataacaatgttttatactttatcaaaggcaggatgagtagtggatatgctatattgtcaaatgtatttggagagaaggttaaattaaagccaatacctaagtttagtaaaatggagagaataaatgcaagaacaacaacgcaggtggcaattcatcccccacctaaaggaaggggttttcttgccacaacaggataa

SEQ ID NO: 1766 - DNA, 293 bp, unidentified
  misc_feature 1..293: note = Ga0307379_10050423 JGI
  source 1..293: mol_type = other DNA
gtgaactacccctgcctaaaggcagaggcttccagaagcctaagttcaccagatcactaataggagaagaagcagtaaaaatattagtaaccgataagaaagaattaggcaccctggggtgccacctcagctccaggcactgcggagattaattaaacagtcttaaagggttatagacagtgttaatctcattaaaacctttcattatctgatcgagaggaaggcgtaagctgagtttgatctcacaaactcagccacgcactacctaaggagaggggaaaaactaaatgtta

SEQ ID NO: 1767 - DNA, 1785 bp, unidentified
  misc_feature 1..1785: note = Ga0113559_100101 JGI
  source 1..1785: mol_type = other DNA
atgaccaattttaaattgagattatattataaaggaaataaaaatatgaattatatggattttgtattaattgtggataaaaataataaaccatgcataccaataaaaaatggtaaagcaggttatttattaagagaacataaagcagaaattataaatcacgagccattagttatcaaaagaactgatgattataattcggatttagaaaatagagatatatttgaattaaaagtagatagtggatatttaaatatcggattttccgtaagcgataatgagcacgaatatattgcaggtcaagttgaaatgctaaacggaatgagtaatagattgttagaaagaaaatctatgcgtagtttcagaagaaatcgtttacgttatagaaaaaataagaacattgattataaaacagtacataatcctacttataaaaatggaaatgaagatggatggtttgcaccgtctattgtacataaaatggaaacgcatatcagaatcattgagcaattaaaacaatgggttccaatcgataaagttattgtagaggtggcaaattttgacattgctgcaatggatgcatatttaaaggacggaactattttaaatggaaaagattatcaaaatggtgaaatgaaaggatatgagaatgttgtatcttatgtaagagccagagataattattcttgttacttttgcaataagaaaaagaaaaaagatggtacactaaaagagaaaccaaaaagaatagaagtgcaccataaaataccaagatcctggggtggtactaataatccaggaaatttgatttgcgtatgtcaaggatgtcatcagaaaatacattcgaataataataacaacaaatattttaaagaattattagaacaagctttacaagaaaatacatttaaagattctacatatatgaatattgttagatgggaattattaaacagacttactgaaaaatatccagagcttgatattgaagctgaatatggttataacacaaaaattaatagaaaagaagcaggtttgagaaaattccattataatgatgcagtttgtataaaagaatttaagaatataactttatctaaaaaagtatttattgtcgaacaaaaacgttgtaatgatagaaaaatggaaagttttgcagatgcaaaatatatagattcaagagatggtaaaaagaaaaaaggaaatgatctaaaagtaattaggcatagtactaaatcaaaacgctctacaaataaagaacatattgataatgaaagaatctttagaaaagagaaagtatctaagggtaaaatacaatttgagtgtcatttatattgcgtaaaaccaggagatttaatatacataaaagaaggtaaacataaagggaaaattgcagaagtttctacaatacagattgtaggcgaaaaaattcctaatccgataattgatattaatgagataaataataaaaaaattgatttcaacagagagttgaaaaaaagaaaaacaacttctaatatgactgattatcaaaaacgttttgcaaaatatcaaattagatttacatataaagaatctgatgcagatggaccatctataacgcttacgcaaaaagaatatgaaaagcttaaagagaataaatcagatagagtaaaaattattcgtaccagacgtggattagtttggagagagtacgacagacttacatatgaagccgaaaatatggatcaggaagaaaagaaattagaagtaaaaaataagaaacaagaattaaaagctgcataa

SEQ ID NO: 1768 - DNA, 1785 bp, unidentified; identical to SEQ ID NO: 1767
  misc_feature 1..1785: note = Ga0113559_100101 JGI
  source 1..1785: mol_type = other DNA

SEQ ID NO: 1769 - DNA, 1296 bp, unidentified
  misc_feature 1..1296: note = human gut metagenome genome assembly, contig:NODE_2190_length_16758_cov_18.186733, whole genome shotgunsequence WGS
  source 1..1296: mol_type = other DNA
atgccaaacaaagtgtatgtactcaacaagcacgggcgtccgctgatgccctgctccccggcaacagcccgtcatctgttagatgacgggaaagccaaagtgaagaagaggacgccctttaccatccagctgctttttggcagcaccggctatacgcaggagattattctcggtgtggatgccggaagcaaaaccatcggcctttcggcttctaccgaaacggaggaactgttctccgctgaggtaaagcctcgcaacgatgtggtagacttactgtccacccgtcgagagtctcgtcgagccagaagaaaccgcaaaactcgctatcgtaagccacggttcgacaaccgcgtgcggagcaagcataagggttggttggctccctccgtggaggccaaaatccaagagcatattactgctatcaaaagagcctgccgcattttgcctgtcagcaaagtggtcgtagaaaccgccgagtttgacccgcagcttatcaaagctgtcgaggaagggaaacccatcccgcaaggagaggactaccagaagggcgagatgtatggtcactacaatgtgcgccagtacgtcttgtggcgtgatggctatgtctgccaatgctgcggagcgcatgcgacccataagaaagaggtgcggctccatgtgcatcatctggagagccggaaaaccggaggcgacgctcccagtaatctcattaccctatgtgataactgccacgagaaattacacaagggcattatcacggcagtggacctcaagaagcgtaagcgccgttcctcacgggatgccacattcatgggcatcatgcggaagactttgctgcaaaggctgtgtgctgaactaaccattcctgttgccgagaccagaggctacatcacaaaggcaaccagagaaaagctattggttctgcccaagagccatactaacgacgctctggcaatcgcgcagggtccacaggggttccgcactggataccttccaagcatccgacaagcaacccgcatttataccatccgacccgtgcggcatcataaccgacagctgcacaaagcaaccatcctcaagggtggtgtgcgaaaagctaatcaggcggagaagtatgtctacggcctccgcctctacgacaaggtgctttacaacggtattgagtgctttgtttggggcaggcggagcagcggctctttcttgctacgaaggcttggtggagcaaaggtcaaggatggcgtaagctacaagcatttaaaattattagagcgcagtcagaattatctgatagcgtaa

SEQ ID NO: 1770 - DNA, 291 bp, unidentified
  misc_feature 1..291: note = human gut metagenome genome assembly, contig:NODE_2190_length_16758_cov_18.186733, whole genome shotgunsequence WGS
  source 1..291: mol_type = other DNA
gtcaataaccccacggctaaagccgggacttgtggaaacacgagccctgattgactaccctaagtgcttcgagcactacgttactcaagaatgtatgtataggcaccggtggacgtttgcccaaatctgccgctctgcggtgtgtgattaaacagctctgagggtaaggagcagtgttgcacgcaaaaaccttgagataacattggggatgggtaccttacggccaaaaggctgagcggcttaatttttagccgcaatcttgaaaaggaggaaggcatcatgccaaacaaa

SEQ ID NO: 1771 - DNA, 1314 bp, unidentified
  misc_feature 1..1314: note = Ga0137365_10001047 JGI
  source 1..1314: mol_type = other DNA
atgaaggtgtttgtactatcgaaagaaggaaagcccttgatgcccacaacgccacggcgcgcgcgggtgtggcttaaggcaaaacgtgcccgtgtcgtgcgccgagaccctttcaccattcggttgcgctttgccacccagcagcatacacaaccggcgaaggtgggcgttgacaccggctcgaaacacgtcggcatcgctgccatcaccaatggcgaggtggtattccaggccgatgtccatctgcgtgatgacatcgctgaaaagctgaagcaacggcaccggtatcggcgcaatcggcgggggcgcaagacacgctatcgtgaagcgcgttatgacaatagacgccgacctgatgggtggctgcccccttcgctgcaatccaaatcacaggcgaccgtcagggctgtgcgcttcatcgccttgttcttgccggttggccagatcacagtcgaagtcggtagttttgacacccaaaagatgcaaaagccggacatcgctgggattgagtatcagcagggcgagcttgagggctacctgctgcgtgaatatctcctggagaggtttcagagaacgtgcgtgtattgtggagcccaaggggttcctttagaaatcgaccatctgattcccaaagctcgtggagggtcgaacagagcatcgaatttgacgttgtcgtgccgtccttgcaaccagcgcaaaggtcagcaaacagcggcggagtttggcttcccgggcgtgcaggcaaaggctcgtgttccgttgaagcatgcagcgcatgtgtcttcactgaaaagcagggtgatccatgacctgcaagcgatcttcggagagagccaagtgagcatcacatacggctacgagacgaaatacaaacgcgtccaggtgatttctgcccaagtcccactcgaacgacgccgtggcgattgcctgcgagatcggcgaggtggtcaagccattggaaatagtccatcagatccgctgtctaggacggggccaatatcagcgtttcaatggtctgcacagcgagcacaagtgttgggccccgcgcactttgcgcgggttcaagctctacgaattggtaaagaccaaaggaggcgtgggttacatcgcgggacggcgggagaaaggagcgttcgtcatcaaagacgtcatcagcgggaagaaagtggtcgaggtcacgccacgcaaattggtacggctagcgcgtcccacccagggctggataattactcgactgccggtcctggagagcatcagaaaggcgagcggcgcttcctccccaagttgaaacggggggcacccgcgccgccatga

SEQ ID NO: 1772 - DNA, 306 bp, unidentified
  misc_feature 1..306: note = Ga0137365_10001047 JGI
  source 1..306: mol_type = other DNA
gtcaatgacctccctataaaacggggagacttgtgaggggttcgccccttgcaagccggattgaccagacggcacctctaagccagtcgcgccgagaaagcgagcgtcgtggctggcgctgatgaggtgagcgatagcatcaagcgttgcagttcgcacccagggatgctgccccagttcctggctctgcaacctctgacttaaagaactgcggtcgaggaacggtggtcagaggaaagtaccgggtgctatcaccgtcgaggggatcgctttcactcatctcacaagagaggagccttacctgat

SEQ ID NO: 1773 - DNA, 933 bp, unidentified
  misc_feature 1..933: note = Ga0070717_10000790 JGI
  source 1..933: mol_type = other DNA
atggctaccaacgtttttgtcatcaatctgaacgggcatgccctgatgccctgccatcctgctaaggcacgcaagctcttgcgagatggcaaagccagagttattgctcgctgcccctttaccatcaaacttctttgggactgtgaagagcaggtccaggaagtggtgctgggcctcgataagggcagccactacacggggttctgttgcactggcaaggggcagattctcttatctggcgtgattcagcaccggcaggatgtgaaagacaaaatggagaatcgttgcagcaaccggagaaatcgtcggaagaggaagtggtatcgaccggctagattcagcaatcgtggatctagcaagcggagcgggcggctaccgccttcgatcaagtcgaatgtggaagaggtgatccgtgtcgtccggcagattccacttccgatcagcaagatcacaatagaggacgtccgggtagatatcgctcgcttaaacgattccacgcttgccagaagtcgctatcaggaccccacacggctcgatgaaaatcttcgtatggcctgcctcatgcgagacggctacacctgtcagcagtgcggcaaacaaaagattcgtctcgaagcgcaccacctcatcttcagagagcggggaggaaaggatacgctgaataacctgctgactctctgtgcagcctgccataaaaagcttcatcagaacaagatccagcttaaggcgacgggggtgagtgggcgtctcgatcagatcgcccaacacactatgcaaggcaagagctatctctacgccgtccttggcacacaggcagcactctctaggctttttggctaccagacggcaactctgcgtaaagccagggatctccccaaaacacatgacgctgatgccctctgtcttgccacctacgatacggcgagacggtag

SEQ ID NO: 1774 - DNA, 242 bp, unidentified
  misc_feature 1..242: note = Ga0070717_10000790 JGI
  source 1..242: mol_type = other DNA
aatagtgcctaaaaatctggaacgtctcgtaccggattcatggcactaccagcgggcttgtttgtcagcagcagttgagatggccatgacaccaccagatgttgctccagtcgggtgcaactgtcggcatccattaagggtagcggaaacgcgaatgtgtggatgctgtaaaaagccacttcaacacccgcgaggggcatcatactcctaatcaaggagggcttaacgccatggctaccaac

SEQ ID NO: 1775 - DNA, 717 bp, unidentified
  misc_feature 1..717: note = Ga0211664_10024503 JGI
  source 1..717: mol_type = other DNA
gtgagagtcttggtgctcgacaatcagaaacaaccgctgatgccttgctgtcctgcgcgagcacgccagctcctgcgtgatggcaaagcagcggtgtttcgtcgttatccgttcactatcgtattgaaaggacgacagggcggtgagatacaacctgtttcacttaatgtcgatccgggcagcaaaaacacaggtattgcacttgttgcgttattccaaggtggccacgctgcgctctacggtcagcatattgtccatcgtggacaacaaatcagggatgcactcgaaaaccgtcgcgctacccgtcgttcacgccgcaacagaaaaacacgctatcggaaaccgcgttttttaaaccgaacccgcccatttggatggctaccaccatccctaatgtcacgagtgcacaatgtggaaacgtgggcgaaacgtctaagcaggttcgcgcctgtcacgtcagcgaatgtcgagacggtgcgctttgacatgcagcttatcgaaaaacctgacatcgtaggaatggactaccaacaaggctcactgtttggctgggagttgcgtgaatacttgctgtatcgccaccagcatacctgtgcgtactgtcacggcctaacaaaggatgcggttcttgagaaggaacatatcatcccaaaaacattaggtggctcaaaccgactggcgaaccatgtcatcagttgccgcacatgcaacgaggac

SEQ ID NO: 1776 - DNA, 288 bp, unidentified
  misc_feature 1..288: note = Ga0211664_10024503 JGI
  source 1..288: mol_type = other DNA
gtcaacgacccacgacttattcgcttagcgaattaagtcggagcatggaagcctgagttgaccagaccccatcgggtaactgatggagccgttatcggagaatatataggcaccgtgggatgacttgccagttccacgcgctgcggaaaacgattaaacaggcgtaatgggttaagccagtgtcgtttttattaaaccttcgaataacagggtcgaggcaaacataacccacttcggtggagaacgtctggtaacagacattaattttggagtttggataacgtgaga

SEQ ID NO: 1777 - DNA, 1320 bp, unidentified
  misc_feature 1..1320: note = Ga0181555_1021736 JGI
  source 1..1320: mol_type = other DNA
atgttagtttttgttctgaacaaacatggcgaacccttaatgccatgtagtaatagaaaagctagacttcttcttaaagaaggtaaggctgaaattcattcatacaaaccattcacaatccaattgaaatttggtagtagtggatatgtacaggatgacgttgaaattggtgtggatactggattcacaaacgtaggaattgctgtcactactgaaacaaaaatatttcatgctaatgagattaagtttcgtaatgacgttagcgaattattaacaactcgtaaatcttatcgcaaaggtcgtagatatcgcaaaacaagatacagacctaagtcttttgcaagaagttctaaacggattttctgcatgaaacagaaaagatggattaaggttaagattaaataccgtggatatgatgattggttgtcccctagttatttagctaaggaagctaacttaattaattgggttgagaaatacaaaaaacgtgtaccatgtagtaagctaattcttgaagttgggcattttgatgttgctaaaataattaatccagagattagtggcaaagattatcaagaggggtcacaaaaaggatttgagaatgttaaggcatatgtgcgtcatcgcgatgaatacacgtgccaacattgcaagggcaaagaaaaggacgtgcgtttagaagtgcaccacactattttcaaaagtaatggtggttcagataagccagataacttgatttgtctttgcaaaacttgtcatgataatttgcatcaaggtgtaattaagcctaaacttaagattacaaaatcttacaaagaagcaactttcatgaatatcttagcatcgagattgagagaattctacccagaggctgagttaacttttggttatgagactaagttgcaccgcatggaattaggtttgccaaaatctcatgcgaatgatgcgatagcggtaacaaacattaagtctataccgcaagaaaagattgaggttttgtacgttaagcagtgccgtaagaaaaaacgtagtcttcatgaagctaaaccacgtaaaggtagaaaagaacctaacactacgtcatcaagaaatgctaaaaacacaaaagcagttggtaacatttgtctattcgacaaagtctcgattgataatcaagttggatgggttagtgggtttacgggtgggaattgttatgtggtggattttagtgggaaatacttaagttttaaaaatactaaaggtacagattcaatacggattaacatggggcgactaaaagtaatccacagaaacaacaattggatttctgagattagataa

SEQ ID NO: 1778 - DNA, 286 bp, unidentified
  misc_feature 1..286: note = Ga0181555_1021736 JGI
  source 1..286: mol_type = other DNA
gtcaagatacccacgcccaagggcgcgggcttgtgaaagccctacttgactagattcagtgagtagatgttcttagggatatctcgaactacgttatgatagttatctatctgttggatgataccaaagtccaacactatgcaggctctgtaaacattcctctttgggtggggaaagtcatcctgaatatccttgcggatattttggaagttctcgtaacttcacagctatcataacattatcgatgggtaataaactttctttagaaaggaaaaactttatgtta

SEQ ID NO: 1779 - DNA, 843 bp, unidentified
  misc_feature 1..843: note = Chloroflexi bacterium
  source 1..843: mol_type = other DNA
atgtctgtctatgtcaaaaatcaagatggggcaacactcatgccctgcacagaggccaaagcacgcaagttgctagaagcaaagaaagccaagattgtagactatcgtcctttcaccatccaactgacttggcagtgcgaggggcggacccaagaggtgacctgtgggatcgataagggcagcagtgccacgggtctcgcctgtgtgagccatggcagagtgctgctggccgcagagatccatcatcgtagggatgtcaccgacaaaatgcaggatcggcgggatcgacgtaaaagccgccgggcacgtcgctggtatcggcctgctcgctttctcaatagggcttcaagccgacgcagcggacgcttgcctccttcgattaagaccaacgtcgaggagatcattcgtgtcgtccggcacattcctttgaccaccgtctttggctaccaaacctccgcctacaggaaatataggaacttgccaaaaacgcatatcatcgatgccttgtgcatcgcaaccatgccgaccggcgcagtggttgctgtggagccgaagaatgtgtaccacattcgatttcgtgccaggcaaacacgcaagcactatcacagtcagccgcaaaaaggcaaaggccgggttaaataccaagtcaatgaggagttacaaggctctcgcaaaggagatttggtcttggtcaaaggcaaatatgtcaagctgattcactctatctattccgacggctatttggcctttccacgtgtcaagggagaacccaataaagcactcccgcgagattgtcgcatcttagaacgagaagggacgattttatgggaaatggtgggataa

SEQ ID NO: 1780 - DNA, 249 bp, unidentified
  misc_feature 1..249: note = Chloroflexi bacterium
  source 1..249: mol_type = other DNA
gatctacaatagttcctaaaagtatggagtttacggacatcatattcaaggagctagcagcgggctaggctagtcctagcagcagtttgccaggtgatcacaccttgagatgttcgctccagtctcaagctctgtggctccagtttaagggtagccgaaaggtgaaagtgattggagcacgacaagcctgatgaacactcgcaaggagcaactcactcttgacagaggagggcttacagtcagatgtct

SEQ ID NO: 1781 - DNA, 615 bp, Moorena sp.
  source 1..615: mol_type = other DNA
gtggctacgttccgtacaggacagcagacccacccgactgtgcttcctcagcagtcggctctggaacccggctcagcagacaacctcaggagcatggacgaaacgggagccgggcgccgcgacgcggcacccggtacgggacatgtgcgaggggagacgcccggcagttcacctgccgctgggcgcgtcacctcggaccgtccggtccgggaggagggtcgtgaggcccacccatgtgtatttgtactcgacaagcacggcatgccgttgcagccgtgcagtccggcacgcgcgcgcaagctgctgcggtcgaagcgggcagttgtacaccggcacacgccgttcgtgatccagacggttcaccggttcaagaccggggacttcgttcgggcagtggttcccactggcaagaaggcgggaacccatacgggccgggtcgcggtccgcaccaagggcagcttcaacatcaccacccggcacggcattgtgcaggggatccatcaccggcacgtccgcctcctccagcgagctgacggatacgcctacaccacagagaaggaggcaggggcctccccaggcatagcctctgggaaatccgcccctcgtagcgcatga

SEQ ID NO: 1782 - DNA, 300 bp, Moorena sp.
  source 1..300: mol_type = other DNA
gtcacaggcttctccactcgaagagtgggaggcgtcggcccatggcggccgacgcctgctgtgaccagcgccagccatcaccaaataggaggtgaccttggtggctacgttccgtacaggacagcagacccacccgactgtgcttcctcagcagtcggctctggaacccggctcagcagacaacctcaggagcatggacgaaacgggagccgggcgccgcgacgcggcacccggtacgggacatgtgcgaggggagacgcccggcagttcacctgccgctgggcgcgtcacctcggaccg

SEQ ID NO: 1783 - DNA, 744 bp, unidentified
  misc_feature 1..744: note = Ga0370532_0143 JGI
  source 1..744: mol_type = other DNA
atgtccaaagtgtttgtaattgattcagaaaaaagacctttagctccaatacatccggcgcaagcaagacaactgttaagaaataagaaagcagccgtttttaaacgctttccatttactttgattcttaaaaaatccgctattgacgttactgtttcactgctcaggctaaaaatagaccctggtgctaagcatacaggaattgctttggtgaatgactcaaggggtgacgcattgggacaaaaaaatggggcaagccctaataacaacacgataaatcgtgatgcttccagatcaacgcaagagggcttgccccatttttccagtcattcccccggtgaagttgtctttgctgccgaactaaagcatagaggttttgcaatcagagagtctttggcttccaggagacagataagacgcagcagacgaaaccgtaagaccagatatcgtcaaccaaggtttttaaacagaacacgtcctaaaggttggttagcgcctagcttacaaagtcgagtcgaaaatatcaaaacctgggttaacaaactgcgcaaggtagcccgaattgaagcgattagccaagagcttgtacgttttgatatgaagaaagttggtgtgtacctcggaaggattgcaacacgtgcaacaggtagtttcaatatttcaaccaaagacggattagtccaaggaattagccacaagttttgtaaacacattcacaaaaaggatggttactcgtatgcctaa

SEQ ID NO: 1784 - DNA, 382 bp, unidentified
  misc_feature 1..382: note = Ga0370532_0143 JGI
  source 1..382: mol_type = other DNA
gtaagcaacccctgcctaaaggctaggggcttcgacaaatgttgaagcccagcttaccagactaagtacttcgtgtactacgttcagaataagtgttaaagtttctacctacaaatgcgtagctagtttgtagctctagaaccaaaagattaaacatctgtatgggttaaggaagtgtcttttggatagtaccccttcggggtatgcgcaaagcgcacggcttgaggccgaacggcagtcgctcctgggggaaaccaacgccagacacctacggagggaaaccctcctgcatggctagcgctccccaagaccgcgctgcctcagcgattctgaacattgtcaaagctaactttacccgtaaggagggacatttatgtccaaa

SEQ ID NO: 1785 - DNA, 800 bp, Moorena sp.
  source 1..800: mol_type = other DNA
atgtcaaattttgtttttgtcttggacagaaacaagcggcaacttgacccagtgcatccgggaaaagctcggcgactcctctgtacaggaaaggctgccgtatttcgccgttatccgttcaccatcattctcaaagaagcctacccagacatacccgtgcgggacctggaacttaaactcgatccgggttctcaggtcacaggaattgcgatcgtacagggcacgaaggtaatcttcggggctgagatcgaacaccgaggtcaacaaatcaaagatgcagcagccgtcaattcaacccgatgggcgttgttcaatgctctgaaacaaacaggcttgcctgtggcgacaggtacggggggacaaaccaagttcaatcggacgcgattagacctacccaaaacgcactggctagatgctgcaagggttgggaaaattgattcacttaaagtcttgaccaccaaaccgttgttaatttcagcaaaaggacatggtactcgatagatgtgcgggacggataaatatgggtttcctactcgtcatcccccctttagttccccccttaataaggggggttaggggggattcataaaagatttcagactggcgatctcgttactgccacggtcacaaaaggcaagaaaatagggtcttatgttgggcgagttctctgtcgcgcatcaggccactttgatattgtgactcgattgggtcgggtatctggaattagccacaggtattgccaacccattcacaaaagggatggttatgcttatgcgttcgctcataccataggcggctaa

SEQ ID NO: 1786 - DNA, 265 bp, Moorena sp.
  source 1..265: mol_type = other DNA
gtcagcccccccggctgaagcacgcgggcttcatgcttccagcttcagtaggggcgtttcgcgaaacgcccctacccagcctaagtcttaactgactacgtttttaaggtcatggcacctacaaatgctttccagtttggaaccctgccgttaacggttaaacagccctaggaggggtaaggcagtgccgttagcccaacaagccctaaaaacattggcgaggaaaacattacccgttttacggagaccttcaatgtcaaatttt

SEQ ID NO: 1787 - DNA, 963 bp, unidentified
  misc_feature 1..963: note = marine metagenome genome assembly, contig:NODE_793_length_18947_cov_12.879862, whole genome shotgunsequence WGS
  source 1..963: mol_type = other DNA
atgaatcattacgtttatgtacaagatcacacaggacaaccactgatgcctaccaagcgtcatggctgggtgcgtcgtgcattgcgtgatggcaaggcaaccgttgtgaaacgctcgccttttacgattaaactcacttatgaaagtggcaatgaagttcaggatgtgtcacttcatcttgatgcaggatacgctaatatcgggttttctgcacaagcagaatcaagagaattactcggcggtgttttagagttattaaaaggtatgtcagaacgcatcaaagaacgcgctatgtatcgtacacagcgtcgttctcgtttgcgttaccgcaaacctaaattcaaaaagggtggtgattttgtttctaaccgtcccgatggttggttagcgcctagtattcagcataaactggatagtcatttgaatttaattcgtaaaatccagcagattttaccaattacctctattcaaattgaaaccgcgacgtttgatattcagaaaatcaacaatcctgacatcgaaggcgctggctatcagcaaggcgaacgattaggtttctggaatcttcgtgaatatatccttcacagagataaccatacttgccaaaattctgactgtaaaaacaaaagcaaagaaaagatccttcaagtgcatcatatcggcttttggaagcaggatagaagcgaccgtccagcaaacttgattaccttatgcaccaaatgccatacgactaaaaaccaccagaaaaatggcttcttgtatggttgggaaccacgcttgaagagcttcaagcctgaaaccttcatgactacggtgcgtcgtcgtttaatcatccaagcaagagaaatatttgacttacctgttactgaaacctttggttacttaacaaaagcaagccgtattcaaaaagagttgcctaaaagccatcactatgatgcgtttgcgatgggtaacgcaattaca

SEQ ID NO: 1788 - DNA, 281 bp, unidentified
  misc_feature 1..281: note = marine metagenome genome assembly, contig:NODE_793_length_18947_cov_12.879862, whole genome shotgunsequence WGS
  source 1..281: mol_type = other DNA
gtcaactaccccgccctgaagggcggggcttgtgaaaacaagcccagttgaatagctcccttatttattaaggagacgttgtaggaggaatagataggtgttctgttatgctccacaagtagcaggtgacacggaaacggattaaaaaccactgaagggtaaggtggcgtgttcgtttcagcaaaaccttccgcaaccgagcgatgtggctctacagccgttaggctgacttatcgttaatacgaattgttattactaaaaggtaaaatatgaatcattac

SEQ ID NO: 1789 - DNA, 888 bp, unidentified
  misc_feature 1..888: note = Ga0101770_1058525 JGI
  misc_feature 358: note = MISC_FEATURE - Any "n" represents any nucleotide
  source 1..888: mol_type = other DNA
atgtatcgtagaattaggcgcaatagacttagatataggaaacctagatttgataacagaatttcatctaagaaagaaggttggttagcgccctctattaaacacaagttagattctcatgttaggtttattaattatcttaaaaagatattgcctataactaacatagtcatagaagtggcaaattttgacacacataaacttaaaaacccaaacgtagttggtgaaggttatcaacaaggtgaacaacaagatttttggaatgtaagagaatacgttctgtatagagataattatacctgccagctatgtggcaagaaaaacaccatacttgaggtacatcatataggctattggnaacaagatagaacagatagaccaggcaatctaataacattatgcaccaaatgccacaatcctaataatcataaagaggaaggtaaattgtatggaatgaagcctgttcaaaaaccattaaaggacgcaacatttatgtctactataagatggaaactggtcaatgcgctgatgtgtgactacacttacggttatattacaaaatccaaaagagtaagtcatgatttggaaaagacacattataacgatgcattttgcatagcaggtggaattaatcaacagagaatagaacctatctattttgagcaaattaggagaaacaatcgttcactcgaaaagttctatgatgcaaaatatgttgatataagagataagtctattaaaacaggacaagagcttttctgtggtagaaggacacggaacaaaaacttaaatgaagaaaatcttcataagtatcgtggagctaaaaaatcaaaaggcagaagaaatattcgtaagcaaagatacgcttatcagcctaaagatattgtt

SEQ ID NO: 1790 - DNA, 223 bp, unidentified
  misc_feature 1..223: note = Ga0101770_1058525 JGI
  misc_feature 138: note = MISC_FEATURE - Any "n" represents any nucleotide
  source 1..223: mol_type = other DNA
gtcaattacccaccgcccctagaggcgggggcttgtagaaatacaagctcggttgattagcctatgtcattagcttttgctaatgattagttatagcagaatatatagtcaccgtgggatgctccacaagtcccatgntctgagggtaatggttaaacatctctgaggggtaggagaagtgctgttaccattaaacctgctataacattggcgatgtggacct

SEQ ID NO: 1791 - DNA, 1455 bp, Moorena sp.
  source 1..1455: mol_type = other DNA
atgacggggcattcgctccgtcccatgggaacgcgtaagcgaaaggagggaaactctatggtatttgttgtatctgcaaacggaacgcccctgatgccgaccagtccttaccgtgcaaggaagctgttaaagaaggggcgcgcgaagatctaccagtaccatccgttcaccatccaggatacagaccgggaagacggggaagtacagaagatcgaatactgcacggacgtgggatatctccatgtagggatctccgtgaaatcagaaaaacatgagtatctggggctgcaggcagacctgctgcccgatgaaacggagcggcacaatgccaggcggaagtaccgccgtacccggcggaaccggaaatgctacatgaagccccggtttaataaccgtaaaagagagaaaggctggctggcaccatccatccgccataaggtcgaggcacagctgctgctgttatcgaagatcctcgctgtctgcccggtcgtatccgtgtggctggagatggggaagttcgacacgcagctgctaaaagccctcctgcgcggggagaagccgccggaaggagcggagtaccagcagggagagaggtatgggatcgaaacactccgggaagcggtctttaccagggaccgccatacctgtgtattctgtgggcgggggatcaaggaccatgccatcctgcatgtccaccatgtcgggtattggaagaaagaccgcagcaaccggcttgccaaccttgctacctgctgtgagcagtgccatacgccagcaaaccaccagccggacggcatcttatatggaaggaacccaaactttccgtctctagcaccggcaacttatatgtccatgatccggtggcagatgctcgcgatggtgaaggagatgcacgataacgtccatatcacttatggtacacggacaaagatcgagcgtaagaaacgccatttgaaaaagacgcatatcaatgatgcgtactgtattggggagttccgcccgaaacaccggacgccggacgtctatattgaaaagaaacgccggaatgaccggatcctgcagaaattttatgatgcagtctatatcgaccggcgagatgggaaggaaaagtccgggaaggagctttttaatgggagaatcagccggaaccacaagaaggattccgagaatctgcatccttatcggcagaagaagatcaaaaaaggacatctttccatacggaaaagcaggacgcagctcaaacctggaagtgttgttctctataaaaacgagaggaagatcgtacacgggacacataccaggtattacaaaccgaaaagatcaccggtcccggtgaagcgtatcaatgtgcaatttaccgaaccagcctctgatgggcagaaaagtgcagaccttacgaattgcactgtgatcggacaggaattcatccgtggctggaagcaggttatagtataa

SEQ ID NO: 1792 - DNA, 338 bp, Moorena sp.
  source 1..338: mol_type = other DNA
gtcaataaccccgcctgatttgccttcggcaaattcaggcgaggcttgcggtccgccgtgagcctgattgattagcctcagctgtcggctcattcgctgtcagctacgttaccccagaatccatcatcaggtaagacaggcaccagtggatgctcctcaagtccactgctctgcggtgtgggattaaacagtctctgagggaaggagaagtgtcccgcataaaaacctggggataacattggcgatgaggaccacccccgaaagggagaaccccatgtatgacggggcattcgctccgtcccatgggaacgcgtaagcgaaaggagggaaactctatg

SEQ ID NO: 1793 - DNA, 1590 bp, unidentified
  misc_feature 1..1590: note = human gut metagenome genome assembly, contig:NODE_3304_length_8539_cov_2.986681, whole genome shotgun sequenceWGS
  source 1..1590: mol_type = other DNA
atgcggagataccggttatctccgggatactgcatggcacattataaaaggaggcatctgatgcctgatacagattacatatatgtactcggcgttgacggtaaaccgcagatgccgacaaaacgaaagagacatgtcaaaagattacttaataccggcaaggcacgaattgcatgccatgtcccttatacaatacagttactttatgaaaacacacctgttctccagcctgtaatgctggctgaagacccgggacgcacaaatatcggcatggcgattttatccataaaaggtgaactactcatgtctgctgtcgtggaaacacgcaacagggaaatcgtaaggctcatgaatcaccgcaggggatatcgcagggcttcaagaattggtgaacgtaaggccagacagcgtcttgcaaaacgtttcggcacaatgcttaaggcaggtctgattatgcgtaaacttccaaagtttgcggctgacaagtttatcacatgccactgcatcaaaaatacggagtcgcgtttcttcaacagaaaacatccggatggatggcttacgccgacttcaaggcagcttgttgaaacacatatcaacttgatgcacaagatacagaaatacctgccggttacagacatcgccatggaagtaaaccgctttgcatttctgtcgctggaaaacccgtctgtttcgggagtagacttccagaatggaccgttaaaaggctttgacagcctgcatgatacagtaaatgaattacagcatggcaaatgcctgctgtgtgacaaaaagatagaacattatcatcatattgttccaagatccataaacggctcaaatactattggcaatatagccgggctgtgcatggaatgtcacgacaaggttcataaatgtgcagcatatcagaaaaagcttaacgatgtcaaaaagggactggataaaaagtatggtgcattgagtgccctgaatcaggcagtgccatttatctgtaaatgtcttgaagctgaatttggcagagagcatgtatcttactgtaccggccgggacactgcaaaaatgcgcagttcttttggattccaaaagacaaaggataatcagatgcatgaaactgacgcatggtgtataggaattctcgcattaaacaaaattccgaatgtggttccggattttggacagacatactgcatcagacagttcagacgtcaggacagaagccttgtttgcgcccagacagaaagagtctacaaactggacggtgtgacgattgccaaaaaccgtaaaaaacgtaccgaacagaaaacagattctctcgatgactggtacaacagacaggtgactttatacggcaaaaagaaagctgatttcatgcgcagccgattgactgtcattaagagcaaaagacgctataatgacttaacacgcgtcatgccgggagcagtattcatgtacaacggagagtgtcacgtcttaagcggacgtctcacagaaggacaatacttccgcgcagtgggtgacacaaaaacaaattatcctgcttcaaagtgtaagataatcagacacaatgaaggactggtgtttgtatgctaa

SEQ ID NO: 1794 - DNA, 801 bp, unidentified
  misc_feature 1..801: note = human gut metagenome genome assembly, contig:NODE_3304_length_8539_cov_2.986681, whole genome shotgun sequenceWGS
  source 1..801: mol_type = other DNA
ttgctcgaagaacataaggctaaagtggtgagaaaatgtccatttacaattcagcttaattatgaatgtgtaaacattattcaacctgttagtcttggtgtagacatcggatttgaaaatattggaatttctgcaacaactgaaaaagatgttctctttgaggctaaagtcaaaattagaacagatatagttaaacttctttctcaaagaatagagataagacgtacaagacgatcacgaaagacaagatatcgtaacactcggtttctaaaccgaaaatatacgaaacctaaaggatggaaagcaccttcattcagagctagactagattcacatgtagaacttattgcaaaagttcacagtattctgcctatcggcaagatcattgtggagattgcaagttttgacatacagaaaatcaagaatcctgagatcaaaggtgctgagtatcagcaaggtgaaatgcttggattcaacaatttaaaagcttatatcttatgcagagatgggcatctatgccgatgttgcaaaggtaagagtggtgataagattttaagagttcatcatcttgaatcaagattaactggtggcaatgctcctaacaatctcataactttgtgtgattcgtgtcacacgaaatatcacaacggtttgatagatttaaaagatattaaacgtggaaattgttataaaactgaatcatgtatgacatctatgaaaaatcaattgattagagatctacgatcaaagtattctgaagtatatgtaacgtttggtgacaaaaccaaatttacaatataa

SEQ ID NO: 1795 - DNA, 301 bp, unidentified
  misc_feature 1..301: note = human gut metagenome genome assembly, contig:NODE_3304_length_8539_cov_2.986681, whole genome shotgun sequenceWGS
  source 1..301: mol_type = other DNA
atcaggaaaaaataagtatctgtcataaaataacttgattatttcttgacttagtgcttagtcttagcaaagtttacttttcaaagtaaattgagctacgttatgaaagaatatatagttacgtcagaatgttctacctagttctgacctctaaggtttatgattaaacagttcacacgtttgaacagtgttgtagacaacaaaacctttcaataacattgacgaaggtagttttacagttttgcagtatctggcttatagcaataaactgtaacttttaaaaaggtttaaaatgaaattt

SEQ ID NO: 1796 - DNA, 231 bp, Ectothiorhodospira magna
  source 1..231: mol_type = other DNA
atggcgattctggtactggacaagaggaaaaagcccctgatgccctgctcggagaagcgggcacggttgctgctggagcgggaccgggccacgggcctgccggtgatcaccagtagcggtggccgcaccaaatacaatcgacagcggctgggcattcccaagacccacgccctggatgcagcttgtgtcgggccagtcactgccaccacccctggaatgtgccctccttga

SEQ ID NO: 1797 - DNA, 289 bp, Ectothiorhodospira magna
  source 1..289: mol_type = other DNA
gtcaactaccccgccctgaaggccggagcttgtgaaagcaagccgggttgaccagggtcagcggtgaaaacccgctacgtttgcaacaggtcgtcaagacccaccggcggatgctgcctcagtctgccgctctggaaggttaggatcatgctggcgaaaggtaaagcgccgaaggttccagccgccgcgtcagcgggagccggttgcagacattcccgaggggagatgaggcgcaagccctgcgtcactggacccgtaagggttctgttttaggagatttgaaatggcg

SEQ ID NO: 1798 - DNA, 1356 bp, Moorena sp.
  source 1..1356: mol_type = other DNA
atgcagaagttattggtagagtttaagaacacatcaggggatgctcctcaagtcccctgctctgtaagtggggcattaaacagagaggaaactctcagtgtgccctgcatagtactggccaataacaactccgatgaggacctacactctggcaagagtagacaggacttgagagttcctgtgttaaatatgcgtggaaaacctttaatgcctatgagacctagaaaggcaagagttttcctgaaacaggaaaaggcagcagtagttcagcgaagtccttttatcatacagttaaaatacccttcaggtgaaacaaaacaagctctaaaattaggtatagatgctggatattcaacaataggcttcagtgctataaatgacaagagtgaattactctcaggtgagttaactttgcgaaaaagaatctctaaactccttgagcagaaaaaacattacaggcgagctcgaaggaataaattatggtacagaaagccaaaattcaataatcgtagcaaacccaaaggttggtttgcaccttctatacagcataaacttgagacacatctgagattgattgaaaaactgacgaaaatactgcctgtaacaaaaataacagtagaagtatcgagctttgaccagcagaagatgcagaatccagagattaatggagtagaataccatcaaggtgaattacagagctacgaagtaagagaatatctgctggagaaatggaagcataagtgtgcttattgtgggaagagtaatacacccttagagattgagcatattatacctaaaattcgaggtggaacagatagagtttcaaatctgactttagcgtgccataaatgtaatcagaagaaaggagataaaacagcagcagaggttggatatcctgaaatacagaaaaaagcaaatcaaacattaaaaacaactgcatttatgaatatcgttagatggagactggtgaatactctgaagtgtgactggacgtatgggtatattacaaagcatgctcgaattaaattagatatggagaaaagtcatataaatgatgcttttgtgattgctggtggaacaactcaaagtaggagtaaaccttataaagtgacacaaacaagacgcaataatagaagtattcaaacaaacagaaaaggttttaaaccttctataagaaaacaaagatataaattacagcccaatgatttagtaaaatatattaaatctctatgtaaagtgaagggtgtccataattatggggaatatgtaatagtagaagggaaaatagggaaaatctttgatattaatgttaagaaagtggagttattaaaatatggaaaaggaatacaattctaa

SEQ ID NO: 1799 - DNA, 253 bp, Moorena sp.
  source 1..253: mol_type = other DNA
gtcaatcaccacccattaaaatgagtggcctgtctcgtgagagacaggggtaacaggttgattaggaggcattgaagaatgcagaagttattggtagagtttaagaacacatcaggggatgctcctcaagtcccctgctctgtaagtggggcattaaacagagaggaaactctcagtgtgccctgcatagtactggccaataacaactccgatgaggacctacactctggcaagagtagacaggacttgagag

SEQ ID NO: 1800 - DNA, 1191 bp, unidentified
  misc_feature 1..1191: note = Ga0074646_100108 JGI
  source 1..1191: mol_type = other DNA
atgaatccaaaagtatttgttttggcagaagatgggacaccattgatgcctacaactgcatcaagggctagacgaaaattgagggatggtcaagctaaagttgtgaaaagagaacctttcacaattcaattgctttacaaatcaggaatggagattcaaccaattaagttggggattgattcgggctatcaaaatataggtttttccgcaacaacagaaaaagatgaattaatatccggtgaagttaagttggataatggaatgtcaaagagaatccaagacaaagccatatatcgtaggaatcgcaggaatagacttagatacagacaatcaagatttgataatagaacacaaaaagaaaattggttgccaccatcaattcaaagaagatttgatactaatattagtcttattaacaaattgagatcaatacttcctatttctgagattattgttgaggcaggtagttttgatattcaaaagttacaaaatcctgaaattgaaagtaaacaatatcaacaaggtgaaatgtatggttatgcaaatctaaaatcttatcttttgacaagagaaaaaagtttatgtcaattgtgtggtaaagttcacaaaaagtggcagatgcatcatattattccaaggtctaaaggtggaacaaatagaccaaagaattttgcattgttgggcgataaatgtcatgataaattgcataaacaaaatttatatcacaaattaaaaaagaatagacaatttaaaggatctactttcatgtctatcattagaaagagattctatgatttcggatataacgtagtttatggttatcagacctttgtggatcgcaataaattgagtttatctaagagtcatgcaaatgatgcctttgtaatatcaggtggtataaatcaaaatagagtaaatatgttcatagtaactcaaaaaagaaaaaataatagatgtctgcaaattaatagaaagtcgggaattttgattcgtagaaagagatatagtattcgaccaaaagatttagttaaatattcaggtaagatgtttgaagtgatagggattattagtaggggattaagtgttggtctgacggatggaattaaaaagatttataaatcaccatcaaaattggatgattggatctttcatagaaagacattgatttggagaaactgtataggtcaataa

SEQ ID NO: 1801 - DNA, 249 bp, unidentified
  misc_feature 1..249: note = Ga0074646_100108 JGI
  source 1..249: mol_type = other DNA
gtcagttgtcaaggtcttaataccttggtttgttaggtgactaacaacgattaaaagagctgattagtctaagtcttaattgactacgttatcttagaatatataggtacttcagaatgcctcccaagttctgaacactacggatgatagttaaacagagttcaaagactcggtgctattattaaaaacctaagaataacattgacgatgggaatcaactccgaaaggagatttataatgaatccaaaa

SEQ ID NO: 1802 - DNA, 1251 bp, unidentified
  misc_feature 1..1251: note = Ga0318466_10004665 JGI
  source 1..1251: mol_type = other DNA
atgattttagtttatgttttgaataaagatagtaaacctttaatgccttgcaaagcttcaaaagcaagaaaattattaaaatcaaataaagcgaaagtcataaatagaactccttttactattcaattattatatggaagttcaggttataaacaacctatgatattaggagtggatacaggaagtaaaaatataggtttatctgtaacaacaaataaacaagaattattttcggctgaagttttattaagagatgatatcgtagaaaaattatcgacaagacgagaaataagacaaaatagaagaaatagaaaaacaaggtatagacagccaagatttaacaatagaattaaatcaaagaaaaaaggttggttgccaccttcttcattgcagaagataaatagtcatattcaaataataaataaagtatataaaattttacctgttacagatttaataatagaagtggcaagttttgacattcaaaaaatcaaaaatcctaatattcagggaatagaataccaacaaggagaacaattgggattttggaatacaagagaatatgttttatttagagataaccatacttgtcaatgctgtaaagggaaatcaaaagataaagttttaaatgttcatcatatagagagtcgcaaagttggtggagatgcaccaaataatttaattactctttgtgaaacttgtcataacaaatatcataaaggagaattaaatattattttaaaaagaagttcttcatctttacgagatgtggctttaatgaattcgataaaatacatattatataataaactaaaaaaaatttatccaaattgtaaaattacttatgggtatataacaaaatataaaagaataaataataatttatctaaaactcatgcagttgatgctttttgtataacaaataatctgttagcaaatagattaaattatttttatcaatataaatgtatgagaaatcataatagacaaattcataaaatgaaaatttataaaggaaatgttagaaaaccaaatagtttaggtaaatatgtacaaggatttcaagcttttgataaagtaaaaattcttaattctaacataataggatttataaaagcaagaagaaaaacaggtagttttgtaatatctgatatttatggaaatatcatacaaaatataacttataaaaaattaaaattgttagaaagtagacgaagttatttagtagaattactaataaaaggagaataa

SEQ ID NO: 1803 - DNA, 321 bp, unidentified
  misc_feature 1..321: note = Ga0318466_10004665 JGI
  source 1..321: mol_type = other DNA
gaaagttaagattattgtcacccatacatattgtggataacgagaccaaaatttcaatttaacataattgttgattgaagtttagcctcagtaaagaattttcttttactacgttactttagaatatatagttacctacaaatgttaagtccagtttgtagctctaaggttagtgattaaacatgtttttttagacaagtgttgctaatatataaaacctaaagataacattggcgagggctacctaacttactttaagtaaggattactttgttttagtaatcaaattatttttaggaaaggagtttatctatgatttta

SEQ ID NO: 1804 - DNA, 1308 bp, unidentified
  misc_feature 1..1308: note = Ga0182240_101142 JGI
  source 1..1308: mol_type = other DNA
atggtatacgtactgaattgtgaaggcaacccgcttatgccaaccaaacgtttcggcaaggtacgccgtatgttaaaagataaccgtgccagggtggtaagagctaaacctttcaccatccagttaacttacgagaccaccaactacgtacaaccggtgactcttggcatagacgccggctacgaaacagtaggcttttcggcagtcaccgaaaaagaagagctgattgccggtgagtgccagcttctgaccggccaagcagaacgtaacaaagagcgcgcaatgtaccgccgcgaacgccgcaatagattaagataccgcaagccccggtttgacaaccgcaagaagcccgcaggctggctttcgcctagcattcaacacaagctggacagccatatccggctggtgaacctggtcaaatccatactgtcggtgaccagggtagttgttgaagttgccagtttcgacatccaggccatcaagaacccgggtatccagggcaaagagtaccagcagggcgagcagtacggtttctggaacctgcgggaatatatcctgcaccgggacaaccaccagtgccagaatccagactgcagatccaaaaccccggaacttgaggtacatcatatcggttactggaaaggtgataggacagaccggccgggcaacctgattaccctttgcattaaatgccaccgcccggaaaaccacaaaaaaggcgggctactgtggggctgggaacccaaagtcaactcttttaaggcagaaactttcatgactactgtacgttggaaaatggtcaacatcctgggcagcgattatacttacggttacattaccaagaaaaaacgcatggaattaaacctgtccaagagccatattaacgatgcatttgttatcgccggtggtactgctcaaacccggtacaaaccgctgactataatccaagtgcgccgcaacaaccgtagcttgcagaaattttacgatgcaaaatacattgacatccgcactggcaagaaagcaaccggccaggacttgaactgtggcaagcgtaccagaaaccgtaaccttaacggtccgaacctgcgcatttatcgtggccaaaaattatccaaaggcagggtacaggtacgtagaaaacggcatccgttccagcctggtgatacagtaatatttcagggcaagaagtacactgtcaaaggcacccagaaccgcggagattacgtgcggctggcggagctacccaagccggtcaaggctggtttactcaatcatctgtattatggcaaaggacttcgggtagtttag

SEQ ID NO: 1805 - DNA, 311 bp, unidentified
  misc_feature 1..311: note = Ga0182240_101142 JGI
  source 1..311: mol_type = other DNA
gtcaactatccccacttaacggctaacgccgtttgaagtgggggcttgcagaagtatagcaaagatatttgccatacctgcaagcccggttgattagcctcagccaccagcgaaaagctgacagggctacgttacccgtgaatatataggcacttccgggtactccacacgctccgaaccctgcggccagcggttaaccatcgctgacgggtaggcgaagtgctgctggcgtaaaaccacgggataacattggcgaagtggaccaacagccacaaaggctgatttatctctgcaaaggagattcaaaaatg

SEQ ID NO: 1806 - DNA, 1200 bp, unidentified
  misc_feature 1..1200: note = Ga0310695_10004545 JGI
  source 1..1200: mol_type = other DNA
atgcctacagaagaccatcgtaaagtaaggttgcttctaaaatcaggtcaggcaaaggttgtccagagaacaccatttacaattcagttacttcacactactcacgtttataaacaagatattaatttaggcgtggatactggtagtaaagtaattggtttatcagcaactacttctaagaaagagttgtttgctgaggaagttactattagaaatgatattacagaattgttatctcttagaaaaatgtatcgtaaaaatagacgatggagaactactagatatagaaaagaacggtttttaaatagagttaaagtgatgaaaaaaggttgggtagcgccatctattagagctaaacttgaatatcatttaaatataattaagaaagtatacaagatattaccaataactaaattaatagtagaagttgcttcatttgatatgcaaaaaatacaaaattccgaaattgaaggtatagaatatcagcaaggttcacagtttggcttttggaatgtgagagagtatgtattgcatagagataatcacgaatgtcaatattgtcatggtaaaagtaaagacaaggtgttaaatgtacatcatattgtaacaagaaaaactggagggaattctccaagcaatttaattactttatgtagaacttgtcatcaaaagtatcatagcggagaaattaaattaaaggtaactaaaccaaaatctttaaaagatgcagcatttatgaatataatgagatggaagttatataatagtcttaaagaaatatataataatgtgtatatgacatttggatatattacaaaaaacattcgtattgaaaatagtcttcctaaagaacattatatagatgctagatgtatttctggaaatccaaaatctctttcattaggattattttatatgggcaagctagttcgtagacataataggcaacttcataaagcaacaatcgggaaaaaaggatatcgtaagagtaatcaatcgccaaaatatgtttttgggtaccaattgtatgataaagtatattgtaaaggtcaagtatgttttatattttctagaagaacaaagggatactttgatataagacatattgatgggactagagtaactgcaagtataacatataaaaaaatgaagctattggaaaaaagaaaaacgttgttacttgagattgttaaagtttaa

SEQ ID NO: 1807 - DNA, 294 bp, unidentified
  misc_feature 1..294: note = Ga0310695_10004545 JGI
  source 1..294: mol_type = other DNA
ggaaccatcaataacctataaactttagtttaagaagaaattctttattgattaccctaagtctggtttaccaggaaactacgttatcgaagaatgtataggcacctacggatgttcgtcctagtctgtagctctgcggctaatgattaaacagtcctgagaggtaggggcagtgttgttagcatataaaccttctaataacattgggtaagggcaactaacgtttacttttgtaaacgagttacttcatctggtagtgactacttttaagtaagaaggaggtaatcttacttg

SEQ ID NO: 1808 - DNA, 480 bp, unidentified
  misc_feature 1..480: note = Ga0310138_000236 JGI
  source 1..480: mol_type = other DNA
atggtatatgttatttcaaaggatggtaaaccattaatgccaacaaaaaggcatggtaaagttagaagacttttaaaacaaggtcttgctaaagttgttagaagagaaccatttacaattcaactattgtatgatactacaacatatacacaacctgttgtagttggcgtagataatcgttcactgcataaagcaaatccaattaaaggtggaaaaagaccagtaaatactgtaaaggaagttagagggtttagaagattcgacaaagtaagatataaaaatcaaattggtataatctacgggttaagaatctctggatactttgatatgcgttcattaagtggagaaaaaattcactcatcagttaagtggtcaaacctaaaacttttagaaaaagcaaaaacactaatattagaaaggagggaacagcgcattcctctccatcttaaagaagatggagtctcctgcgctggcttatga

SEQ ID NO: 1809 - DNA, 255 bp, unidentified; identical to SEQ ID NO: 909
  misc_feature 1..255: note = Ga0310138_000236 JGI
  source 1..255: mol_type = other DNA

SEQ ID NO: 1810 - DNA, 1179 bp, unidentified
  misc_feature 1..1179: note = TB_LI09_3DRAFT_1004762 JGI
  source 1..1179: mol_type = other DNA
atggtttatgttttatcaaacgatggaaaacctttaatgcctacttcaaggcatagaaaagtcagattgtggttaaaagagggaaaagccagagtcataagacgctttccgtttactatccaactattgtttgacccttgttgccaaaaaacacaaaatttaacgttaggcttagacgtcggatttaaaaccgtaggcgtcagcgttgtttctgacagggtggaagcgtttagcggtcaaattcaactccgaaacgacgtatctgccaacatgacagaacgccgtatgtatagacgtaatcgccgtaacaggttatggcacagaaaaccaagatttcttaaccgtaacaaaaagcgggttttagcgcctggcgtaaaacaaaaaatcgattctcatttacatttaattgccttattaaaattcatattgcccattacaaaagtcatcgttgaaacctgctcgtttgatccccataagctaaaaaatcctcatgttcaaggaaaggattatcagcaaggagaacaatatggctatgaaaatgtcaaagcttatgtgttagccagagacgggtatcaatgtcaggcaaatcaaaaagggcatagtcctatcctgaacgttcatcatattcaatcgagaggacaagggggaagcgataatccggataatttaataaccctttgtaaaaagcatcatgaacaattgcacgatggtaaaatcaggctacatgttaaagagggtaaaatcttaaaagccgcgacagcgatgaatatcgttagaagccaattgttaaaaaaaatgcctgaagcgattgaaacgtttggttatcttaccaaagcaaaacgtcaggaacaaaagcttcagaagagtcatgcaactgacgcgtttatcattgccggcggtaatggacaaccgagactcaacctgttggaattgttgttgaagcgtaaaaataatcgatcattgcaaaagaacagaaaaggttttagtccctctattcgagttcaacgatatgcaatacagccttatgatttagtattatttcaaggcaagcgatatagagcgataggaattcagaacaaaggggcttacttaaagatgacaaacggtattcatacattagtgaaaaatgtaaaacaaatagaagttatctatcatcaaaagactttggtttgtgtgtga

SEQ ID NO: 1811 - DNA, 308 bp, unidentified
  misc_feature 1..308: note = TB_LI09_3DRAFT_1004762 JGI
  source 1..308: mol_type = other DNA
gtcaatcacccctaagctaaagacttaggggcttgtaaggcgacttacaggatagctcaaaaaaagagtaatggttgattagggggccgaaaggcagaagttacggagtgagatacatgcacacccaagaatgctcctcaagtttttggctctgtgatttgtctttaaacagagaggaaactctcagtgaggcagatttaaaaacctccggtaacaaccccgaagaggatctacgagtttgacagttctcggcttacagcgctaaaaactgtcgtttcttcttaaaaataaggattttgatcataatg

SEQ ID NO: 1812 - DNA, 1560 bp, unidentified
  misc_feature 1..1560: note = Ga0180007_10021296 JGI
  source 1..1560: mol_type = other DNA
atgacagattctcagaaacttgagtattttaaaatgaataatgtagaaaaggtaaattatcttaaatctcaaaatgttgtcaaacatcaagaacaagaaagtcaaaaggatataaatcagaaagaaatatctgtcaaaataatcaaacaaggacaggtgtgtgtccatgtattgaacatgagaggtaaacctttgatgccaacgtctccaagaaaagcaagacttctattaaagaataaaaaagcaaaagtggttcagagaagtccatttaccattcagttgaaatatccaactggagaaaacaaacaaccaatcaaattagggttagatacaggttataaattcgtcggattttcggcggtgacaaataaaagggaattgatatcaggagaagtgattattaggactgatattcctgaaaagatgactgaaaagaagatgtatagaaggggaagacggaatagaaatactagatatagagaacctagatttgaaaatagaggtatcccagaaggatggcttcctccatcaacacaacataagttagatacctatgttagattagtcagtaagtttgacaaaatattacctataacgcatatcaatgtcgaaatagctccattcgatactcaaaagatgcagaatccagagatatctgggattgaatatcaacatggagagttgcaaggatatgaggtaaaggaatatctacttgaaaaatggggaaggaaatgtgcatattgtaaagcagagaatgtatcttttgagactgaacatataattccaacatcaagaggtggaacaaatagagtctcaaatctgacgatagcatgtcatgaatgtaatcaaaagaaaggtaatatgacagcagcagaatttggccatccagagattcaaatcctagcaagacaatcattgaaagctgcgacatttatgaatgttgtgagggcaagattagttgataatataaagaaatcgtttccagatctatatgttgataatacatatggatatattacaaaatatacgagaataaaattagatttagataaatctcatgctaatgatgcatttgcgatagcacattccaatagtaggatgagttttggtcagataagatcaaaaccttatcaggtcaaacaaattagaagaaacaataggtctctacagctaaatagaaaaggattcaaaccgtcgataagaaagaagagatataaatattctcctggagatttgataaagagaagatctgatatccaaacaactggatggggcgagaaaagagataaaaaagatagatcgatgatgtacactgtcaaaggaattttcaattatggtaaatggattagattggctaatcctatttcaggcgaaaaagatatttatattcctattgaagatgtgaaactattgaaatatggaagcgggttattatttcaattagcaaaatcaaatgaacataaaatagagaagaaggagaaggttatgaaattgaataagaaagaacagaggattatagatatgaaggagcagaaatcaatagatgatacatggagttaa

SEQ ID NO: 1813 - DNA, 292 bp, unidentified
  misc_feature 1..292: note = Ga0180007_10021296 JGI
  source 1..292: mol_type = other DNA
gtcaactaccccgccctgaagggcggggcctgtcagtgatgacaagagcaatagttgattaggaggtatacctcaaaaatatgcagacgttagaagttagaaatacatacacctcgcccgatgctccactagtcgggggaatacgtgatcctgtattaaataaagattcaagaaggcagccaaagctgtcttcaggtcttagtgtgcaggatttaaaaacttcttctaactctccgaagtggacctactcagcaatgagaagacaggactcgagagtctctgtaggtgatta

SEQ ID NO: 1814 - DNA, 1269 bp, unidentified
  misc_feature 1..1269: note = Ga0310133_003358 JGI
  source 1..1269: mol_type = other DNA
atgtcgtgcaaaccttcaaaagcaaggaaactgcttaagcaaggcaaagcaaagatagtcaaatatgaaccattcacaatccaactgttatacggcagtagtggttataaacaatgttgtactgctggtattgacgctggcagtaaaaacataggcatagcagtaacaacagatgatggcagaataatttataaagcacaagtaatattaagacaagacatcaaagaaaatattgaaacaaaacgtagacttagaagaagcagaagaaacagaaaaacacgttacagaaaaccaagatttcttaaccgcaaaaggaaaaatggttggcttccaccatccataacagcaagaattgatgcacattacaatattataaaaaagttatctaaaattatacctattacaaacatcattgtagaagtaggacaatttgatacacaggcattaataaatccaaatatacaaggtaaagaatatcaaaatggagatatgaaaggttttgacagtgttaaggaatacgtaaaaataagagacaattatcaatgtcattatgctaaattaagacctgatataccatgttcaggcaaaatgacagtagatcatataatacctaaaagtaaaggcggaacagataatccaactaatcttgtatgttgctgcgaagaacacaacagacagaaagacaatctattgtacaaagaatttactggcaaaaatccgccagcaattaggaattttaaggctactgcatttatgaatgtcttaagggattatcttgttcctaaattacaggaaatagcaccaacagaatatacttttggactatatacccgcagaaaacgcaaagaatggaatttagaaaaatcacacataaatgatgctattgctattgtggggataaaaccaagacaggaggtatcagtcagttattatatcaagcaagttcgtaaaaagaaacgcagtttacatgaagaaattccacgtaaaggaagaagtaaacctaatagagatgctaaaagaaacgaaaagaacataaagaaaatcataactaataataactgctggtgtttgtgggataaagtatatataccttcaatagataaaataggctatatatcaggttttacaggaaaatgggtatatgtacaggacatagaaggtaattatttacgaatatcagaaaaatataaacaaatcaatccgaaagaattgcagctaatttgtagaaataacaattatattagtcagcaattcatctccaccttatag

SEQ ID NO: 1815 - DNA, 246 bp, unidentified
  misc_feature 1..246: note = Ga0310133_003358 JGI
  source 1..246: mol_type = other DNA
gtcaactacccccgcttatagaagcggaggcttgaaaaagccttggttgactagcctcagccaccagcagtatgctgacagggctacgttagacaggttatgacaccttgaaatgatgctcaagtttcaagctctgtcgtacatgacctaaacagttctgtgggtaggaacagtggcttgtacgtgtaagcttgtctaacattggcgatgggcaaataactctgaaaggaggaacactttatgtta

SEQ ID NO: 1816 - DNA, 1548 bp, unidentified
  misc_feature 1..1548: note = human gut metagenome genome assembly, contig:NODE_78_length_104184_cov_6.349394, whole genome shotgun sequenceWGS
  source 1..1548: mol_type = other DNA
atgcaatatttagattttactttagtagtagataaaaataataaaccatgtgtaccgattttaaacggtagagctggttatttgcttagaaataataaagcaaaaattattaatcatgatccattagtaataaaacgaatagacgattataagagtgattttgaaaatagggatattttcgagttaaaaattgatagcggatatttgaatataggattttctgtcagtgataattatcatgagtatttagctggacaagtcgaattattaaaaggaatgtcggatagattaacaaatcgaaatggatatcgaagaacacgaagatccagaattaggtacaggaaaaataaaaatgttgattacaaaaccgtacataatccaacatataaaaatggaaatgaagaaggatggtttgctccatcaatacaacataaaattgattcacatattcgtttaatagataaaattgcgtcatgggttccagtagataaggtaattgtagaagttgctaaatttgatatccagatgataaaagctttagctgacgggaaagaaatatcaggaaaagattatcaaaatggagaaatgaaaggatatgaaaatgcagcagcttatgttagagatagagataaacatacatgtcggttgtgtggcgcaaataaaaatgttgtgattgaagttcatcatatacaaccgcgttcaaagggaggaaccgataaaccaagtaatctaatatctttatgtcatagttgtcatcggaaggtgcattccaataataacgacaataaatattttgagaaagttaagagtatgaagttatcggatacatacaaagacagtacttatatgaatatggttcgttgggaactttttgaaaggctttctggcaaatatgacgtcaaagttgggtatggatatcaaacaaaaattaatagaaggaatgccggtttaagaaaatttcattatacggatgctgtttgtattaatgattacaaggatgtgacactaacggagaatatctatattgtagatcaaaaacgatgcaatgacaggagtatggagacatttagtgatgcaaaatacatagatgtacgtgatggaaaagaaaaaagtggaaatacattatataaggaaaggcttccaaatgctccgtctaaacgagtcacgcaaaaagaatatataaacaatatgagacaatttcgtggtaagaaaattaaacctggtaaacgcacttttgtttgtaattcatattgtttgaaatgtggagatttaatttacataaatagtggaaagcatagaggaaatatcgcagaagtagaatccatgcaaaaactacctaatggtaatttcaaaatacgatttacatataaagcacaaacagtcaaatacccttctataagtataaagccagaagaatatgaattattaaagaataatttattagacaaagtaaaaattgtaagaacaaggcgtggaatgatttggagaaaatataatcgtctagaatacgaagcgacccatgcagatcaagaaggaatggctgtataa

SEQ ID NO: 1817 - DNA, 267 bp, unidentified
  misc_feature 1..267: note = human gut metagenome genome assembly, contig:NODE_78_length_104184_cov_6.349394, whole genome shotgun sequenceWGS
  source 1..267: mol_type = other DNA
gcaaatcctcaaaataaaataactctataaaattaagacgttaaataaaaatagacttagatttaatctacgttattacaagaaaatatattgatatgtaactctagtatcaaattatatcgtttagatttaaacatgcgttacgtctaactttcttgtcgcaagtgatttaagcataaaaacttgtaataacattgtcaaagagtattaccgactataagtcgagttattaattaaaaggagaaaattatgcaatatttagatttt

SEQ ID NO: 1818 - DNA, 1557 bp, unidentified
  misc_feature 1..1557: note = Ga0082212_10029072 JGI
  source 1..1557: mol_type = other DNA
ttgagtaaaagtaaagagacctaccctgaggatgcttccccagtcccaggctctagaaggaagagtagcagacaagctagtggtaagcacgaaacggattcttccaacaagcgcaagcgagcagctgatactcaacattggcgagaggagactggccgaaaggctagcgtcacagagttcctgactctgcccagtgagggtgacctcactgcccgcaagggcaaacaacccctccaaaactgcgtagcagtattggacaaaaaaggaaggccactacagccaacctcaccgcgccgagcacgcatcctgctcaaaaaaggaagagcacgagtccaccgcctctaccccttcaccatcagactagtggaccgcctccaagaagaatcaaccattgacggagtggaactcaaagttgacccaggcgcaaaaaccaccggcttagcaatcaccgtgaccaatagtcacggtgaaacaaaagccattcttctatcagaattagttcacaacggatggctcattaaaaagaatctgcagaaaagggctgctttgcggcgaggccgcagaagcagaaaactaagataccgggctccacgttggcataatcgagcacggcgtcctgtctgcggattagacgtctggctgccgccaagtattcggagtcgtcctcttgccatacttaatttgacaaagaagtgggccaaactctttcccattacttgcgtgtggattgaaaatgttaagtttgacatgcagagactacgtaatcctgcaatttctgggaaagagtatcagcagggcactcttgctggttacgagttgaaagagtacttactggaaaagtttaatcgtaagtgtgcctattgtgacaagagtggaataccgctaaatgtagatcatgtggtaccacgggctcgtgggggtactgatgctgttagcaatcttgttttggcttgtgttaagtgcaatcagaagaagagcgctaagagtttagatgaatttttggcggaagataaaacaagattggctaagattaagcggcagttgaaagtaccgctgcgcgatgctgcagcggtaaatgtggctcgcaaggttttacctatcgcattggttgaggctggttttattgtaaagcttggtagtggtgctcaaactaagttgaatcgtaagcagtttggtattcctaagtcgcatgccttggacgctttgtgtgttggcgctgacattaaagtgagtgacgagtatcctagttcaatgttggtcattacttgtcaaggtcgaggtggtcgtcagcggcagttagtagataagtttggttttcctcgtggaaaaccaaagcctaggtcgaagcaggtttttggttttgctactggtgacttggttcgagcggtagttcctaagggtaaaaaacagggtgagtatttcggcagggttgcggtgcgtagcggtggtaattttaatataaagactttgaacggtactgttcagggtattaagtattctcattgtcagctcgtgcaacgagctgatgggtatggttatcagtttagtaaaatataa

SEQ ID NO: 1819 - DNA, 211 bp, unidentified
  misc_feature 1..211: note = Ga0082212_10029072 JGI
  source 1..211: mol_type = other DNA
gtcaactaccaccacctaaaggaggtggcctgcagtgaatcagcttctgattcaccaaaagccaccgctaagtaagtgagattgcgaaagcaatcacggttgaccagcctaagacacccctgaaggaggtgactacgttgagtaaaagtaaagagacctaccctgaggatgcttccccagtcccaggctctagaaggaagagtagcagaca

SEQ ID NO: 1820 - DNA, 1290 bp, unidentified
  misc_feature 1..1290: note = Ga0247608_10014894 JGI
  source 1..1290: mol_type = other DNA
atgaaagtttatgtattagattggaaaggaaaaccaattatgcctacctctagaggaggtagagttaggtggcttttaaaaacaggaaaagccaaagtcgtgagaactattccctttactattcaattattggaagagggaaggaaatactatactcaagaaattaatctaggtataaaacccggatctaaagaattggggatatctgctacttcagaaaaagaggagctgttctgtgcatctgtaaaattgagaacagatatagtaaatctcctatctactagaagagaaactaggagaactagacgaagtagacttagatatagagagtctaggttcttaaatagagttaaaaccaaaaaacctggttggatagctccctctattcagaataaaattcaatttcatgtcaagatagtagaatttgtcaataagattttacctatatctaatatgatacttgagatagctatctttgatattcagaagataaaaaatcctagtattaatggagtacagtatcagaatggaccacagaaaggtttctggaatgtacgtgaatatgtcttatttcgagataatcatgtctgtcaatattgtcttggaaaatctggagatgaaatcctcaatgtacatcatattgtatcaagaaaaattggtggtaattctccaggaaacctgattactttatgtaagacttgtcataaagactatcatgaaggtaagattaagttatccattaaaaagagtaggtcttataaagatttaacatgtcttaatataataagagatagattatataaagagttattcaagagatatggatttatatatattacttatggttaccaaactaaatgtgatcgtatatctaagggtttattgaaaagtactgatacagatgcttatgttattagttcaggtgatactaatcctttattgagtgataccagatattgtattaatcaggttcgacgacataatagacaaatacataagtttaaaattcttaagggtggaaagctcaaaaagaatcaagctaggtataaagtatttggatatcgtcttaatgatatagttaagtatcaagggaatcgatattatataggtggtcgccgtgagagaggatctttcaatattaaatcattagagggagataagaaattagatatattatataagaaattaaaattcttatatgaacctagacgaatatttatgtataatcaaagaaggaatgttactccaattcctcccacggctaaagcagtgggtacccttggagtgtaa

SEQ ID NO: 1821 - DNA, 387 bp, unidentified
  misc_feature 1..387: note = Ga0247608_10014894 JGI
  source 1..387: mol_type = other DNA
aaaatatcagtaacccacgactgaacgatattataagaaaatatctggtcgagggcatgtaaatgccactatgctgattagtctaagtgaagtctctatgtattatagaattaatagaaagagatgaactacgttatgtgtgaatgtaatctcgagatctcgtatttctcggattatacaataggtacctacggatattcttccaagtctgtagctctacggttattgattaaacagctctgttgggtaggagcagtgttgatgacaacaaaaccatacaataacattgacgatgggagtactacctttaaagttattgatcataataatatgattagtaatgataaagtgtcttattgttaaacaatttttaaattaaaaatgaaa

SEQ ID NO: 1822 - DNA, 1284 bp, unidentified
  misc_feature 1..1284: note = Ga0373631_0015577 JGI
  source 1..1284: mol_type = other DNA
atgcataatagaatatttgttctgtctgcaataggagagaccttaatgccttgccatccagcaagagcaagggctctcctgagagacagtaaagcaaaagttgtgaaggtttatccttttacaattaagcttacagagagaaccacaggtgaattgcaacctgttcaattgaaaattgacccaggttcaagacacagtggtttagctcttgtgttaactggggaacagcacctgaaggttatcttcggtgcagttctacatcataagggtcatttgattaagcaatctcttgatggtcgtcgtagcctgcgtcgtggacgtaggcagcgtaagacaagatacagaccagctcgctgggctaataggaaaagggctgatgggtggttaccaccttcagctatgagtagagttaataatctgaaggtttggacacagaaattcagtaggttaacaacggtgagttcaatttcgtttgagaagacgaaatttgatactcaccttatggttaaccctgaagtgtctggtgtccagtatcaacagggaacattagaaggttataccgtaagggaatatcttctggagaaacacaatagaacttgtgtctattgtggggctaaaaatgtcccacttcagatagagcatatccatccacgttctcgtggtggttcaaatgctatatctaatcttactctatcttgtggtccatgcaatcagaggaaggggactcagaccttggaggagttccttcctcgtaagcctgagcttgttcgtaagataaaggctcagacaagaaagagctttgcggatgctgcacaagtgcaagcaatccgcaataagtctcttgaagttctatgtgactttggtttacctgttgaagtatcaacaggagcagaaacaaagtttaacagaactagactaggttatggtaaagaacattggattgatgcagcctgtataggctcatcaggacaacttgtttcaatccacagacctgatagcaattatgttttagacataaaggctatgggtcgtggatgtagaaatgttcttgcatgtgataaatatggctttccttcaaagaagaaacctaagactcggaaacgagtccttggttttgaaactggagattacattaagactgctattaagggtaaagccttcaaggtcagaatgagcttgaaggtttctaatagtagagcagattttgatggaacaggcaaagccttaaaagactgtaggctaattcagaagaatgatggatacagttacaatcacttacattaa

SEQ ID NO: 1823 - DNA, 229 bp, unidentified
  misc_feature 1..229: note = Ga0373631_0015577 JGI
  source 1..229: mol_type = other DNA
atgaactacgatttataagaatcttctagcaacttgttgctattggaaatagttaccgtggggtgcttctccagccccacgctctaaggttaggtgttaaacatttgtgaaacactgcacgaagtgcatctaacgacaaaccttataaatcattgtcgaggagacgttccgtaaggaacaataccgacataggattttcctattgttgagaaattcaaaaggtaacttt

SEQ ID NO: 1824 - DNA, 1293 bp, unidentified
  misc_feature 1..1293: note = Ga0194138_10000007 JGI
  source 1..1293: mol_type = other DNA
atgccctgtcatccggctagagctagagaacttctaggtaaaggtaaagcagcggtatttcgacgcttcccttttaccattatcttaaaagacccggtgggctccatccctcaacctacggcaatcaagatcgatccgggcagcaagaccaccgggatcgcagtcactgtcaaaggtaaacgcggcgaacgttgtatcatgggtgtccatctggagcaccgcggtatcacaatcaagaagaatctggtcagtcgtgctacctgccgacgtaaccgtcgtaatcgtaagacgcgttaccgtaaaccccgattcctcaaccgaactcgacccgccggatggctcccacccagtctaatgcaccgggtgctgacgactctgacctgggtgaaacgactctgtctagcgagtcctgtctccaagatcgagatcgaacatgtgtcctttgacacccagaagatgctcaacgggtcgatcaaaggcaaagggtatcagcaaggtacactgcaaggctacaagatccgtgagtacctactctatcggtacaactacatctgtcagtattgttcgggtatctccaaggataaacgtctggagactgaacatgtcactcccaaggctcaaggtggatcgaactcgatcaccaacctgaccctgtcctgccatacctgtaaccgcgacaagggcaatcgcactcctgtccagtgggaatggtccctcaagggcaaaggggatgtgctcagtgcagcgagacgcaaaggctgtcgccgagttgcccaaggtaagaaaccacctctcagagatgcagcagccgtcaacagcacagctaaacggttgatccaagaagtccgtgaaatcggactgctctcggtagaacgtccaagctacatgacgaaatacaaccgtcatcgtcaagggtatccaaaggatcactttatcgatgcagcggtactgggtggtgcctgtgacattgtatacattccgaaggggatgagaccgttgactgcaaaagcattgggacatggttcgagacagatgtgtcgggtagatcagtatggtttccctagaaccttagctaaaggtccttctatggtctgcggataccggaccggcgatatagtcgaagccaaagtacccagaggtaaatatatcggtgcgtatgtaggacgtgtagctgtaagaagtagtggccaatttgtcattacaactgacgttggtaaaatcaccacccgtcaacgtcacgtcagtcggttacagcacaatgacggttaccgctacgcgcatcaacccacataa

SEQ ID NO: 1825 - DNA, 286 bp, unidentified
  misc_feature 1..286: note = Ga0194138_10000007 JGI
  source 1..286: mol_type = other DNA
gtcaaccgccccatccttttaaccgaagataatctgctggtatagaggtttagttgaccagacccaggtttgtaatagaacctacgttacccaagaatacataggtactccgggatggccgagccagtcccggactctacgccgagctgttaaacaagcctgtgaggcagggttagtgcagtcaggatacaaaaccttgggataacatcgtcgaggctcacgttacaccgacttagatcggatagactaaggggaaaccctaatgaaggtaacacctactaactat

SEQ ID NO: 1826 - DNA, 1050 bp, unidentified
  misc_feature 1..1050: note = Ga0102947_1000378 JGI
  source 1..1050: mol_type = other DNA
atgataccagtaatagataaacaccaattacctttaatgcctacaacagaaaaaagggcaagaaagttaattgagacaagtaaagcaactcccttttggaaaaagggaatattttgtattagattaaattttgagccttctagcagaaacaaacagcaaattgttgttggaattgactcaggctcaaaaagagaagcttatacgataagaagtaaaaaacatacgttattaaacattcaaacagaaacgcctgtttgggtaaaaaagaaagttgaaacaaggcgaaatgccagaaaagcaagacggttccgaaaaacaccatgtagaaaacctaggttcaataacaaatcaaaacctaaattacctccaagcacaaaatcaagatggcaattaaaattaagaattttagattttctttccaaggcttatccaataactgatgttgtttttgaagacatcaaagcaacaacaaaaaagggaaagaaaagttggaatttaaatttctctccattgcaagttggaaaaaaatggttttgtgaacaagtaaaacaaaattataaattaactattaaagaaggttgggaaacagctgtagctagaaaagaactaggtttagaaaaaattaaagaaaagttgtccgatcgatttgaggcacattgtgttgacagctttacattgtcaagttttctatttttagataaaaagcaaccagaaaacaaaagtattttatatctaaaaccaattcaatttaacagaagacaacttcatgtttttaatttttcaaaaggaggaaaaagaaaactttacggaggaacaatgtcgcttagattcaagcgtggaagtattgtaaaacatcccaaatacaacatttgttatgttgggggaagttcaaaaggaagaataagtctacataatttagaaactggcaaaagactttgtcaaaattctaaaattgaagatttgaaatttttgagctataatagtttccagataaggaggaagccattcctcccacaggacgagcctgtgggtatcctggcttgagattaa

SEQ ID NO: 1827 - DNA, 248 bp, unidentified
  misc_feature 1..248: note = Ga0102947_1000378 JGI
  source 1..248: mol_type = other DNA
gtcaactacccccatgacaagcatgggggcttaaaaggagtacaaaagccaattggaaacaattaagactaaacagttgactagactacggaatgtacgtttgtacaagtccaaactgaatcaacttctggtggcacagaaaaaaatgtctcggatgcttcccaagtccggacctctttgttgatcagtgtcgaagggaaatatacacaaggcctttacgggcattttttataagaaacatgatacca

SEQ ID NO: 1828 - DNA, 1263 bp, unidentified
  misc_feature 1..1263: note = Ga0210402_10005866 JGI
  source 1..1263: mol_type = other DNA
atgccgtgcaatgaacgtcgagcacggctgttgttagaacgcggtcgggcacgagtacatttgcggtatccatttacgatacggttagtggatcgtgccgtggctgactccgcactacaaccgattaccgcgaagctcgacccaggttcgaaaaagaccgggttggctttagtgcggccatcatctgctactcaatcggtaaacgttttaaatctaatagaaatagagcatcgtggttcgcaaatttccgacaaccttacgaaacgccgtggccaccgtaaacatcggcgtagtaaactcaattatcgtgccccccgttttaacaaccgaacccgctcgaaaggatggctagcaccttcactacaacatcgggtagatggcatcattaatttgctagccaaattacgtaaactggcccctattacggatttagctcaagaactcgtgcgtttcgatacgcaattaatgcaaaactctgatattaaaggtatcgaatatcaacaaggcacgttacagggttacgaaatacgagagtatgtgctagaaaaatggggacggcagtgtgtgtactgtaataagcgcgagcgcatactaaatttggatcatatcgtgcctaagtcccgaggcggctctaatcgcccgtccaacctagtaccagcgtgtattaaatgtaatgccatcaagggtaatcgttcgatagaggattttcttgcccatgacccagcacgattaaaacatatcctaatttttgctaagacaccgctcaaagacgccgctgctgttaacactacacgatgggcattatggcgagcgttgacggcgactagcttacttttggtagtaggcaccggagggcgcaccaagtacaaccgacaccagtacggcgtggctaaatcacatgtaaatgatgcggtgtgcgtgggaccaatggataatgtcaccaaaatcaccggattaaatcggcccttgttagctatcaaatgtatggggcgtggttcctatcgtcgcactcgttcagatgcacacggttttcccgtgggatattgcatgcggacgaagcgagtatatggatttggtacaggcgatatagtacgtgcggtagtacctaaaggccgttaccaaggaacgtatataggacgagcagctataagagcaaatggcttatttgatattaaaacgttcaatggattaaaatttgatacatcttataaaaattgcactttgctccaaagaaatgatggatataaatatggtattaaataa

SEQ ID NO: 1829 - DNA, 306 bp, unidentified
  misc_feature 1..306: note = Ga0210402_10005866 JGI
  source 1..306: mol_type = other DNA
atcaacgaccccggctttaaaaaccggcttaccttaaataagtaagcgcgttgaacaggattagctcgcaagggctacgttgatcgggaggcaaaaactaccaacgtcagaatgcttcctcagttctgaccacttgaaatctcaatagtagacaagctacagggtatgcacgaaacggattgagatttagcggggaaccaagcgaaagcgaggtgaaccgtaaaaccgctcgacaacttttccgaggggaggcttcgtaagaggccgtaactaggcccgtaagggcacaccgaaggcaaaaaaatg

SEQ ID NO: 1830 - DNA, 1008 bp, unidentified
  misc_feature 1..1008: note = Ga0136175_10101454 JGI
  source 1..1008: mol_type = other DNA
atggttgtatttgtaataaataaaaacggaaaggcattaatgccctgttccgctagaaaagcaagaattttactaaagaaaaagaaagctcaaatttattgctacaagccatttacaataaaattgctttacggaagctacggttacactcaacctacaagaataggggttgaattaggtgctaaatgtgttggaatagctatacttcaagatgaaaacatattagcaaaaggtgaaattacgctaagaagtgatgtaaaacaaaatattcaaacacgcaagctataccgtcgcagccgaagaaacagaaaaacgaggtacagagaagagagattcttcaacaggattaagtccagaaaggacggctggttacctccaagtataagaagcaggattgagaacacttttatgtggatagacaaattcaaaaagcttgttccgaatccagtgcttagtattgagcttggcaaaaacaagaatgaatttttagaaaacaaggatactacttttatgcacattataaggaaacgcataataaggagataccctcattctgaatttacatacaaggatttgactacgctcagaagaatagaattagacctagagaagacttattataacaacgccatagctataagtggtgctgagaaaataagaagaaataaaaggaatatattcaagattgtgcagttcagaaagaaaaaaagaagtctgcacgaagcaaaccctagaaagggaagaaagacaaagaacgtattgtcaaagagaaacgaaaagaacaaaaagcaaattaaaaactggtgccttaatgatactgtaagagtattcggcaaagttggatttatatgcggtttttccggtgggagtgcttgttatgtcaaagacataagcgggaaatatatagttcctgaaggcaaaaaatacaagcagataaatttgaccagtttaaagctaatgttaagaaacaacaactggcaatacggttgcgtaccgcttagtcaataa

SEQ ID NO: 1831 - DNA, 256 bp, unidentified
  misc_feature 1..256: note = Ga0136175_10101454 JGI
  source 1..256: mol_type = other DNA
gttgattttcccgtactgccctagcagtacagccttaaaggcttaaccaactagcctaagttaattattatgctaacactgtttttaattagctacgttatttttcatacagaaacctgcgaatgataccctagtttgcagctctttcgcggctctgtaaacagctctgagggaaaggagcagtcaaccgtgtttaaaggttaaataacattggcgaagggtaaataactctaacaggagggaatacattatggtt

SEQ ID NO: 1832 - DNA, 1278 bp, unidentified
  misc_feature 1..1278: note = human oral metagenome genome assembly, contig:NODE_46_length_124855_cov_3.86146, whole genome shotgun sequenceWGS
  source 1..1278: mol_type = other DNA
atggttttagtaattgataagcgtaagaaaccttgtaatactataagtgaagcttacgctcgaatattactatttaacaaacaagcggtaattcataagagatttccgttcactataagattaaaaaacgatagtgctgtattgaaagatagagcctatactgtaaaggttgaccctggttcaagaaccactggaatagctattgttgataacaaggattcagtggttatgctagctgaaattgaacatagaggtcatattattaaaagaaacatggatagtagaaggactcttaggcgtcatcgtagacaaagaaagactagatataggcctgcaagatttctcaataggaccaaacctaaaggatggttagctccgagtgtgaagtctagagctgataatgtgataaattttattaagaaatataagaaatttttgaatattaataaagttatgattgagagtgttagcttcgatgtagctcaaatgactgcaaacaataaccttgtaggaactgcttatcagcaaggtcctttatatcaaaacaaacttagaagcttcatatttaaccgttcaaatggtaaatgtgtttactgcggagccaaagcaaccgagatagaccatatcgtaccaagagctaagggcggaactaacagcgtttacaatctagtagcatcttgcagaagctgcaatgagaaaaaatcaaacttatcactaaaagcttttggtaaattaatgggtaaagactttagtaagttagaacctaaaaaattgcctaaggatgcaagtattgttcaagcagctagaaactatatgtttcaagaaatagctaaaatcgttcctagcaccgtaggttatgatgcttggcttactaaatacaatagaaatgagctcggtttacctaaagaacattattacgatgccttatctgttggtgaaattccatctaaattcaatttcctcactgataaggtattacaaatatctgctcaaggtagaggctctagacagatgtgtagggtggacaagtacggatttccacgaacatctgctaaagcttcaaagtcagtttatggtttccagactggagatatggttaaagccatagttccaaatggattaaaaaagggagaataccttggtagagttgctgtccgctctaatggtaactttgatataaaagcaaacaaaaaaactatccaaagtataagacataaatattttcacataattcaaaaatgtgatggatatttatatagttataatgagcgatcttag

SEQ ID NO: 1833 - DNA, 314 bp, unidentified
  misc_feature 1..314: note = human oral metagenome genome assembly, contig:NODE_46_length_124855_cov_3.86146, whole genome shotgun sequenceWGS
  source 1..314: mol_type = other DNA
gtcaataacttggtaactagtttttactaagcttggttgaccagacttaggttagataacagataatgttgtcttaaactacgatagataggttatcacacccatacgatgcttctccagtctgtggctctgtgtaggctctgtaagttgggttaaagccctgtcaacctaggaacggctctagcaagcctatctatcattgtcgaggagagactaacttagaactttaattgggagcattagcttctggttaatagctgtaagttagcgtaacggtcgcaagactagattaactaaaaaaggaaaaatttatg

SEQ ID NO: 1834 - DNA, 1248 bp, unidentified
  misc_feature 1..1248: note = human gut metagenome genome assembly, contig:NODE_1068_length_23742_cov_9.115844, whole genome shotgunsequence WGS
  source 1..1248: mol_type = other DNA
atggtatatgtgttaaatatcaatggtgttccacttatgccaactgataggcacggtaaggtaagaaaactactaaaagctaaaaaggctaaagtagtcaaaagaacaccatttacaattcaattactatatgtttcaacggaatatacacaaccattaactttgggcgtggatgcaggctcgaaacatattggaatatctgttacatcaagtaacaaagaggtttattgtggtcaggttgaacctcgtcaggatgtatctaaacttttagatgcacgaagaaaaatcaggcgttcaagacgaaaccatttaaggtatagacagccgaggctcaataaccgagtggcatctaaacacaaaggttggttagcaccgtctgtcgaatgtaaaatcaacacacatattaaggtaatagaagatattacaaaaatactgcctattactaatatagctgttgaagttgcagaatttgatacacaaaaattgcttaatcctgatatacaaggtgttgaatatcaacgaggaccgttgtatcaatcaaatttaagacaatatgtgttagcaagagataattatacttgtcaatggtgtaaaggtaaaagtaaatctaaaatacttcatctacaccattggaactattggaataatgaccatagtaataaaccgtcaagtttaattactctttgtgatgtttgtaacaatagtaaaaaccataaggaaaacggtttcctttatggttggaaacctaaaattacaaataatttcagagatgccgctttaatgaactgtatgcgttgggctttatacaacagattaaaggaaatatatccaaatgtcaaaatgacttacggatatatcaccaaagctatgcgttctgaacacaatataccaaaatcacatgtaaatgatgctttatgtattaccggcaatcctgatgtaacacgaatgaatacaatgtatctttctaaaaagaacagagtacacaatcgacaaatacataaagccaacaaacttccaagaggcagattgaaacttaatcaagcaccttatattgtaaaaggttttcgattaaatgataaggttttgtataacggcgctatctgttttataacaggcagacgaaaaaccggctattttggtctaaaaaatattgaaggacaaaccttatcaaattcggccaaatggaaagatttaacattgcttgaaaaagcaaaatattactctatagaaaggatttcaaggagttag

SEQ ID NO: 1835 - DNA, 335 bp, unidentified
  misc_feature 1..335: note = human gut metagenome genome assembly, contig:NODE_1068_length_23742_cov_9.115844, whole genome shotgunsequence WGS
  source 1..335: mol_type = other DNA
gtcaactacccaccactgaagtagcgggcttgtaaagataatttacagcttttgccaagtggagaatttgatttaatcaaattccggttgattagtctaagtgttacgagcactacgttatttaagaaattaggcaccagtggatatagttccaagtccactgctctgcggtatgcaattaaacagtgactgaggggtaggaatacggtgttgcatacgttaaaccttaaaataacattgacgatggagcgtacagtatttattactgcataacaggaacttgtttcctgcattatttattaaattaaatttatagaaaggaatgcatatcaatg

SEQ ID NO: 1836 - DNA, 1395 bp, unidentified
  misc_feature 1..1395: note = mouse gut metagenome genome assembly, contig:NODE_4542_length_6004_cov_2.376702, whole genome shotgun sequenceJGI
  source 1..1395: mol_type = other DNA
atggttattactcttgataagcgcaaaaagcctttgggcttttgctctgagaaacgcgcccgcactctgcttgaaaagcggcgggcctgcgtttacaagtatttcccattcaccattattatcaaggacgccgatgtcaggaccatggaacctgttgcctcttaccgggtaaaaattgaccccggcgcaaagcacaccggcctggccatcgtccgcaattcggacaactgcgtggtgtattacctgcaggttgagcaccgtgcagaacgcatcgtcaagaatctcgaaacccgcaaagctgccaggcgaaaccgccggcagcgtgagacccgataccgcccatgcaagtggattaaccactacctgccgcagggcagcaaatacaaaacagagtctccccgcccggaagggtggcttccgccgtctgtaaaatccattggtgataacattatcaactgggtcatccgattgcggaagttagtaaacattaccacctgttcttttgaggcggtccggtttgatacccagctgctggacaatccggatatcagcggcgtggcgtaccaacaggggacactctttggttacgaaatcaaagaatacctactcgacaaatatggccaccagtgtcaatactgcggcggtgcgtccagggaccctgttttggagtgggaacacattgttcccaaatccaggggcggcagcgacagcataaaaaacgccacccttgcctgccatacctgcaaccaggcaaaggggaatctttctttagaagagtggctcgccaaagaagcggctgccgcggacggcaaagccaccaaggcaaaacaggagttagcaaaagcccgggtatcaggtatcgcccatgtcctgaaggggaaagcccccagaaaaagcaatcgctactgtgcctgggctagttcttcccgccggtatgttgagactgggctgttcagcatctttggcaacgtggaatgctcctctggcggcaggactaagttcaaccggcagatgctgaagctgcccaaggaccaccactatgacgctctgtgcgtaggggaaattccagatggtggctatacggacctgacgcatgggtactgcctgtacatcaaggctattggtcgtggcacccggttccgggggaaaatcaacaagtgcggggttatcatccaaaagctcgcaaaaacaaccaagcgcccattcgggttccagaatggggatattgttctggcaaatgccccagccggcaaatacaaaggacgccacattgggcgtgttatgaccagaaagtctggttgttttgatataaggaccacaggtgataacctggtaactgtaaaccacaagtattgcaaactcttacagagagacaacggctaccaatatcggtag

SEQ ID NO: 1837 - DNA, 338 bp, unidentified
  misc_feature 1..338: note = mouse gut metagenome genome assembly, contig:NODE_4542_length_6004_cov_2.376702, whole genome shotgun sequenceWGS
  source 1..338: mol_type = other DNA
gtcaactactcggctacaagtagccgagcttgacaaagagtaactctctttgttgagcctactgcttgtagattagttgagcagacatcagcaagtgctacgttaccaatcaggcggcccagggtgcttctccagccctggcgcggcgattcgccacgtgcggcgctacgccgcatgccgaggcatgcagtctaaacaggcaatccgagtacaatagccagtgctgcatgcgcgtaacggttgataacattgtcgaggagacggtgttctcttctctccattggggaggggagaacaccattacaagcccttaacagggactatttcttcagaaggga

SEQ ID NO: 1838 - DNA, 1500 bp, unidentified
  misc_feature 1..1500: note = human gut metagenome genome assembly, contig:NODE_2011_length_11952_cov_14.972463, whole genome shotgunsequence WGS
  source 1..1500: mol_type = other DNA
atgagatacgtatatgtactggatgtggacgggaaaccgctcatgccgacctgccggttcggcaaggtgcgccggatgcttaaatccggacaggcaaaagcagtggataccttgccgtttaccatccagcttacctatagaacaaggacccgcatccttcaaccggttactttaggccaggatccgggacgaaccaatatcggtatggctgctgtccgttccgacggaaaggaactgggccggtttcactgcataacccggaataaggaaatcccgaagctgatggcagaccgcatggcagccagaaaagcttcccgacgtggagaacgtctggcaaggaaacggctcgccagaaagctgcatacaacggcaaagcatctgaatgggaggattcttccaggatgcagcgaaccgatggcggtcaaggatatcatcaacacagaatcacggtttaacaaccgtctgagaccggagggatggctgacaccgacggccacgcagttactgagaacacacatcaacctgttcgtaagactggcaaagattcttccggtcacggacgtggccgtggaactcaacaagttcgccttcatgcagctggataatccggagatgaagaaacgggagattgatttctgccgcggtccgttacacggaaccggaggcgtggaagcggcggtaaaggaacaacagggcggcaaatgtctgttatgcgggaaagaaccaatcggtcattatcaccatatcgtgccgcgttccagaagaggcagtaacatcgttcagaacatcgccggtctttgtccaaagtgccatgaacgggtacataaggatgtggataccgcagagagactgacggagatgaaagccgggctcacaaagaagtacggtggtacatcggtattaaaccagatcatcccgaaactcgtcacacagctgtcggaattattttccggccatttctatgtgacaaacggatggaatacgaaggaattccgtgagaaacatgacctgggaaaagaccatgatgtggatgcctactgcatcgcctgcagccacctggaatcggaaggggcactgatggaaaccgaaccgtttgagatcctgcagttccggaagcatagccgggcgaggattaaccatcaaacagaacgtatttataagttgggtggaacgattgtggccagaaaccgccggaaacggatggaacagaagacggattcactggaagactggtataaggatatggtaagccaatacggaaaagtcaaagcggataccatgtgttccaaattggctgttatcaaaagtacccggtactacaacacacccggaagaatcatgccgggagctgtgttcctgtacgaagggaaacggtacgtgatgaccggccagatcacgaacggaaagtactatcgtgcttacggccaggagaaacggaatttcccggcggcaaacgtacggatactccgcaaaaataccggattggtatttgcagcatga

SEQ ID NO: 1839 - DNA, 212 bp, unidentified
  misc_feature 1..212: note = human gut metagenome genome assembly, contig:NODE_2011_length_11952_cov_14.972463, whole genome shotgunsequence WGS
  source 1..212: mol_type = other DNA
gtcaataacccatgactaaagtcacgggcctgcagatgcaggtcctgatggaagaaagggttattgagcagagcagagacatgtcattcgccgcggggtgattccaagccccgtgctccggttagacatgcccatgctatggaaactttaacggtatgtgcggttttccgtacataccggcttacaacaaataaggagctatcatgagatac

SEQ ID NO: 1840 - DNA, 1497 bp, unidentified
  misc_feature 1..1497: note = Ga0136851_10002495 JGI
  source 1..1497: mol_type = other DNA
atgaaggtacacgtaatcaataagaatggagagccattaatgccttgctcaccacgtaaggcaagattattactgaagcaaaagaaggcagtacccacaaaaggtaaaacagggtacttcacaataaagcttctgcatggttgctctggttacaaacaacctattacagttgggatagatctgggtgctaaatatgttcctatagcagcaacatctggtaagaatgtcttatacgctaaggagaagattctccgaacagacgtgaaagggcaactagaggaaagagcagctgctcgaagacgtagacgcaatgatacacgttatagacccgagaggttcaacaataggacaaagcagaagtgtaacgcatgtggagagaacaacttacctaaagtatggtcaaagacaaaaagaactaatggacgttctttaaagaatgaagctaaaggaagggcttcgctctgcagaagatgtgcagctgaaggtagaaaaggtgtaggaggtaagaagcatgtattaatgccttcagtgaaaaatagagcagagagtattattaatgatatagacaaactgtcttattctttaccaataagtgaggtagttgtagagacagtatcttttgatactcaaaagatggctaaccctgacataaaaggattagagtatcaacatgatactaaggaagggatgggattgagacaatacatctttactataaataggcacaaatgtgtttattgtggtaaaggtataagtgagagaaagaagttaaatatagaacatatcattcctatttcaagaggtggtagttctttattagaaaatctcacatgcgcttgcaaggagtgcaataggatcaagaacgcacgcactcctaaggagtggttagattttctactatacagaaagaataagggagccaaactaaacgaaacagaagttacttggataaagaatcttcctaagttatcttctattaacaaagtaggtaagacttttacctacagtgcattatctcaatcttacaaatattacttattagacgagctgagagaaagatggaacacatctaccactacaggagtagaaacgaaatgggctagatctcaactacacttagctaagtctcagattatagatgcaatagtgattgcgtctaaaggtgaagaagtagagatccctaacatctatctaaaagagaaacagatcaagaagagatacccacacgattacataggacccattaagaagaatgtaaagagacatatctatcctagagaagatgaggtatatgggttcaggttgtgggatcgagtaattgccaatcatgctaaaaaaggtagaatggaaggctatgtaacttctcgaaggaaaagtggaagctttgctattagtaacttagatggtgagctcctaataggaggaatcagttataaaaaattagaacttataagaccttcactctctaactatgtaagagagtggataaaagcttaa

SEQ ID NO: 1841 - DNA, 274 bp, unidentified
  misc_feature 1..274: note = Ga0136851_10002495 JGI
  source 1..274: mol_type = other DNA
atcgactatgctagtgagaaagtctactgtagatttacaggagtagaaagttataacttagattacgacagaaatattattactataagctctccatactataaaggagagatttcaatatctatgagatcattaagatctttagagacagcggacaaatctaagtatgtaatatacattgattgtacagaattcagttcacagaatagtgggtcatcaaacgctaaacctaatctaaaagcagtatatactaaaacaaggagggaagatgaag

SEQ ID NO: 1842 - DNA, 510 bp, unidentified
  misc_feature 1..510: note = metagenome genome assembly, contig:NODE_68_length_101563_cov_30.349657, whole genome shotgunsequence WGS
  source 1..510: mol_type = other DNA
atgacaaattatgcttttgtattagacgctaatggaaaacaattagcacctacaaaagaacaaaaagcatggtttctaattcgtaaaaaacgtgcgacattggttaataaatatccaatggtaatacaacttaatataacaattccaaatggtggagatacagctaataaacgaattgattggaatattgaaaaatcacatagcaatgctgctatttgtattaccgacttgcaaccagatgtatatgaaattaaagagtggataataaaaccaatgcgtagacaaagtaaagctaagacagataatgttttaggaattaaacatagagatttagttgaatatacatttaaaaatggagaaacgcataaaggttatgtaaccgcgttatatccaaatcaaaatgctttaaatttccaaagtccaacgaagcattgtaaaaaagtaaatgctaagaaatgtaaattactttggaaatataataaaatttattggcctgaatgtgtatcttaa

SEQ ID NO: 1843 - DNA, 286 bp, unidentified
  misc_feature 1..286: note = metagenome genome assembly, contig:NODE_68_length_101563_cov_30.349657, whole genome shotgunsequence WGS
  source 1..286: mol_type = other DNA
tattaaacataaataaaagtggacatataactttttgtttgtggcttaatagtaggtttcaagcctgagtgactgctactatcgaaagatatgttgtagatatgaactatgttagatagtaaggtaaaaacacacctttagatgtaatcttcagtctaaagctctgtgagtgccaaccaagaaacaatgctaatgtcctgcattgataacagggaaacacatattctctatctgacattggcaagaagagaaatgctccgaaagaaaggtgtcagaaatgacaaat

SEQ ID NO: 1844 - DNA, 903 bp, unidentified
  misc_feature 1..903: note = Ga0209636_10070277 JGI
  source 1..903: mol_type = other DNA
atgagggggcaacctctcatgcctaccacacaacataaaggaaagaagttattacacgaaggcaaggcaacagttgtaaaacggtgtcctttcaccattcagttgaactatgccactggagagactacacaacccattaaattaggagtggatataggttttacgaatcttggatttagcgccaagaccgatacgttagaagttattagtggaactttaaccttgcgcaaggatgtctcaaacaagcttgaagaaagacggaagtatcgtaaaacgcgtagaggtagacttgggtatcgaccacctcgatttgataaccgaacacgtcctgaaggatggttagcccctagtaatcagcataggcatgagtcacatattcgattagtggaaacacttgccacgctacttcctataaattacaaaaggatagagactgcgaatttcgacacacagaaaatgcagcagcctgaaattacaggcgtagagtatcaacagggcacacttcatggttatgaagtcaaagaatatctattggataagtggggacgaaagtgcgcctattgtggcaagaaagcgattcctttagaagtcgagcatatcgtcccgaaaagcagaggcgggacagatagagtgtcgaatttgacgatctcatgtaggaaatgtaatctaaagaagggagacaagaccgccaaggagtttgggtatccacacatccagcagcaggcaaagacgcctcttaaagcggcagcatgtatcaataatattcgctggaaattagtagagcagttaggagcagaacatacgtacgggtacgtcactaaataccagcgtaacaagttagggctgaaaaaatcacatgttaatgatgcttttgtcattgcgggaggcacaacacaattaagg

SEQ ID NO: 1845 - DNA, 289 bp, unidentified
  misc_feature 1..289: note = Ga0209636_10070277 JGI
  source 1..289: mol_type = other DNA
gtcaattaccccgccctgacggatggggcttgttccgtgaggagcgagagcaattagttgattagcctaagagaggtcatggtgaaacacacatggcgatatctgagttatcagcagagttaaagaacacaccaagggatgcttctctagtcccttgctctgtaaacggtggtttaaacagagaggaaactctcagtgatcatcgtatagtactgactgataaccttggcgaagagaaccaacctactttaacgcacgttaaaggaggagataggacttgagagtacct

SEQ ID NO: 1846 - DNA, 696 bp, unidentified
  misc_feature 1..696: note = Ga0209827_10194947 JGI
  source 1..696: mol_type = other DNA
atgactttcgtctttgtgctcgaccgcgacagaacaccgcttgacccgtgtcatccggcacgggcgcggcagttgttgcaccagggacgcgcctccgtgctgagacgctatccctttaccattatcttgcacgaccggcctgcggtgcaggcgcaggcacaacagcccttgaaagacgccgcagccgtcaacgccacccgatgggcgctataccggcaactctgcaccacgggcctgcctgtcgagtgtgggacgggtggcaggaccaagtacaaccgcacccgccagcagctgcccaaagcgcattggacggacgccgcctgtgtgggggtgagtacaccagagaccctgcgcgtctcagggttacagccactgggtatccgcgcgatgggccacgggacacggcagatgtgccggacaaataagtatggcttccctgtacagcaccgcgcacgacagaagcgctactgtggcatgcagacgggcgatctggtcaaagcggtggtgcccagcggcaagtatcaaggcgtgtggatcagccgcgtggtggtcaaggccagtgggtggtttgatctcaccattcgcggcaagaaggccagtgtgcaccagaagcattgcacgcggctgtgggctgcggatggctatacatacaccctgcctgcggtcgccggcaccgccgtttcctccccccgctga

SEQ ID NO: 1847 - DNA, 260 bp, unidentified
  misc_feature 1..260: note = Ga0209827_10194947 JGI
  source 1..260: mol_type = other DNA
ggctcagtcgacgtactcccccgactgcagtcgggggattctagggaagcctggaatcggtgtcgagcagacttagcccttcggggctccgttcagcaggtcacgataccctgaagtgcgtgccagcttcaggctctatcgtttgccgttaaaccgtcgtggcgagtaccacaccgtgcggcaagcctgacaagcctggtgaacattgtcgaggcatacgtcaccgccgcaaggcgcgtatgaggtaactcatgactttc

SEQ ID NO: 1848 - DNA, 1293 bp, unidentified
  misc_feature 1..1293: note = human gut metagenome genome assembly, contig:NODE_1604_length_6656_cov_3.864566, whole genome shotgun sequenceWGS
  source 1..1293: mol_type = other DNA
atggtatatgtattagatcttgatggacagccgcttatgcctactaacaggcatggtaagatccggcatcttctcaaagatggtctggcagaagttgtaatgcgctgtccatttaccatacggttgctgtatgacagcacatgctatacacaggaagtcgtgttaggtgtagacaccggtagtaagcatatcgggctgtcagctactacagaaaccaaagaactctatgcttctgatgtggagttgaggaatgacattgtggatctgctttctacacgcagacagagccgcaggttccgtcgtaaccgaaagacgcgctaccgaaaagcccggttcaaaaatcgggtatcttccaaaaaggaaggctggatcgctcccagtgtccagcagaaaattgatacccatctaaccgtggtatccaaagtatgcaggatgctgcctgtcaccagaattgtcgtagaaacggctgcttttgatattcagaagattaagaatccggacatccagagagctgaatatcaacagggagaccagcttgggttctggaacgtccgggagtatgttttattccgagatgagcatacctgtcagtgctgcaagggaaagtctaaggacaaaattctgaacgtacatcatattgaaagtcgtaaaactgggggtaatgctccgaacaatctgattacgctctgtgaaacctgccatacgggttatcacaaaggcaccgtacaattaccaaagaccatcaagcgaggtatgacattccgggatgctacattcatgggaatcatgcgatgggtattttataacaagctaaaggaagtttataggtcacatggagtggaagtacagatgacattcggatatatcaccaagaatacacggatcgcccaccatcttccaaaagggcattgtgtagatgcgagatgtataagcggtcatccagatgtagagccaattggtgaaatattctatcaaaagaaggttcgctgccataaccgccagattcataacctaaccattttaaaaaatggggttcggaaacggaatcaggcagactatctggtaaaaggctacaggttgtttgataaagtatcctacggaaacaaggagtattttgtttttggacgtaggcagagtggattcttcgatttaagggatctgtcaggtaacaaagtaaacaaaggaagtctcagttataagaagatcagatttctggaaccgagacaatcttatttgtgtgaaaggagaagaaaggacacacaaaggatgcgcttaattgcgatcctcccatga

SEQ ID NO: 1849 - DNA, 270 bp, unidentified
  misc_feature 1..270: note = human gut metagenome genome assembly, contig:NODE_1604_length_6656_cov_3.864566, whole genome shotgun sequenceWGS
  source 1..270: mol_type = other DNA
ctgtcaataacccatcactaaagtgacggacttgtaagcccgggattgactagcctaagtgctatgagcactacgttaagggagaatatatagtcacctgcagatgttatacctagtctgcagctctgagatccgtgattaaacagccctgctgggtagggacagtgttacggatacataaacctcccattaacattggcgaaggtatcattacaggggtgtatcccctgagttatgtgatttagttcacagaaaggagtgcctgttatg

SEQ ID NO: 1850 - DNA, 1314 bp, unidentified
  misc_feature 1..1314: note = Ga0209648_10006185 JGI
  source 1..1314: mol_type = other DNA
atgtccagggtcttggttgttgatgcagcacgtcggccactcatgcccactacccctgcaagagcacgtatactgctcaaaactggcagggcggcagtgctgcgtcgcttcccgttcatcctcattttgaaagaagcaaagcccgaagcggtggtccagcccttgcgcctgaaacttgatccaggcgcgaaaaccactggcctggccgtggtcaacgatgcttcaggagaggtcgtgtgggccgcagaaatcacgcatcgcggagaccaggtccacaaagccctgatcaagcgcgctcttgtccggcgcggtcgtcgccagcgacacacccaataccggcaagcgcgttttgcaaaccgtcggcgccccaaaggctggctcaccccctcgctgctctcacgggtccacaacgtgctcacctgggtgtcacgtctgcggcgcttctgtcccattggcgccatctcgtatgagttggtccgttttgatatggccctgcttcaaaacccaaacatcgaggggatcgagtatcaacgcggaacgctgtggggcgtggaagtgcgccagtacttgcttgccaggtgggagcatcagtgcgcctactgtagtgccactggattccccttggagattgatcacgtgattccacagagtcacggaggcagcaaccgggtggccaatctggtgatggcctgccgggcgtgtaacctggcgaaaggggacaagccgctggaagacttcctggcagaccgtcccgaggtgctcgcacgcgtccaagcgcaacgcaaagctccactcaaagatgccgctgtggtcaatagtacccggtgggcactccacaagcggctgggcgcgctgggcctgccgctcgaaaccggctctggcggcctcaccaaatggaacaggcagagcagggagcttccgaaggggcactggatcgatgcagcctgctgcggaccctcaactcctccggtgctgcgtctacaaacagtgcgtccctggctgattgaggccaagggccgacaagctcgtcagatggtcaacgttgaccatctgggattccctcgtagcaaaccaaaagggccaagccgggtacgaggatttcgcacaggcgatctggtcaaagccgtggtcccaccgcatctcggtgcgaaaggcgtgcatatcgggcgagtcctggtgcgcacgcgcggcacttttgacatacagaccaggcatggacgagtcaaagatattcctgcacgctattgtcagagtttgcatcaaaacgatgggtatgtctatcagcttggggcggcgcttcctccgcatgcctga

SEQ ID NO: 1851 - DNA, 306 bp, unidentified
  misc_feature 1..306: note = Ga0209648_10006185 JGI
  source 1..306: mol_type = other DNA
gtcagcgaccccagcgctaaaacgcggggcttgcacaggtcaagccccaatgctgagcagcctcctgcttgcttgcaggcaggagcagttaggaaggaacgtgtaggcaccggcagatggtttttccagtctgctgctctgcggccatccattaaacaggtgaacggggaagtagagccagtgtggatggcatttgaaacccttctataacgcgggcgaggaaaaccttacctgtctggcattccggtgccggacagcgttgctcccttatcggagccacagatcaggagtcaaagcatgtccagg

SEQ ID NO: 1852 - DNA, 771 bp, Moorena sp.
  source 1..771: mol_type = other DNA
atgaataaaaattccgtctttgtactggatacaaatagaaaactatctaatccagtacatccagcacgagccagaaagttattaaagcaaggtaaagcagcagtgtttcgtagatatccatttaccattattttgaaagaggaatcagcaaatgaagtaaaggaattaagactaaaactagatccaggaagtcgcttcacgggattagctttgttatcagacactaacattgtttggtgtgcacaattagaacatcgaggttttcaaatctcggaagctttaactaaacgtagaactttgagaagttctcgtagaaaccgcaaaactcgttatcgtcagccaaggtttctgaatcgtaagcatcctaaaggttggttacctcctagcttaatgtccagagtatttaacatagaatcttgggttaagaaacaaggttatcagcctttgttaattaaagctatggggcatggaagtagacaaatggtcaattcagataaatatggctttcttcgtggccagccaaaactcagacaaaaatcattctatagttttatgactggcgatattgttaaagctgatattcctaaaggtaaatatgcaggtactcatactggcagaattgctactagaagaactggaagctttaaactcaaaacatcaactcaaacctttgatgttaaccataaatattgtcgtcatatccataagtctgatggttttagctacagttttggtgaattagtcaagtacaaagtcaaaactgataactaa

SEQ ID NO: 1853 - DNA, 262 bp, Moorena sp.
  source 1..262: mol_type = other DNA
gtcagcaccccgctctaaagagacggagcttcgtgcatcgttgatttaggtatgctgacccggctaagtcttaactgactacgttattagtaagagttaaaagtcctaccttgaaatacctcacaagtttcaagctctagaatcagatagttaaacagtcctacgaggggtaagacagtgctatttgaaaagtaccgactaataacatagcttatgtgacttttaccctagcaataggagtttttcaatgaataaaaattcc

SEQ ID NO: 1854 - DNA, 1098 bp, Moorena sp.
  source 1..1098: mol_type = other DNA
atgcaacgagtaccagtgttagataaagacggcaagccgcttatgccaaccaaacccagtcgggctagacgttggcttcaagaaggcaaagccaagattgtacgcaatgacctgaatgttttttgtattcagctattagtagaaccatctggatgtggcactcaaccaatagctttgggattagacccaggtaaaagatttactggtgttggtgtccaatctgccaagttcactttgttcatggcacatctaattcttcctttttctgatgtgacaaaaaagatgtcaggaaggctgattttgcgacgtgccagacgaggtagacgcatcaaccgtaaggttgcattcaacaaaagagcgcatcatcaaaaacggtttgataaccgtaagcagaacaaattgccacctagtattcgggctaataaagaactggaattacgagttaccaaagaattggtaaaactgtttcctgttactcaaatcacttatgaatatgtcaaagccaaaggtgataaaagatttagcccagtgatggttggtcaaaaagtgatgttgcaatggttggaaaagattgcaccaaccaaaatccaagaaggttggcagacttcaatactcaggcagcaactaggtttagctaaagacaaaaaagataaatctaggcaaagtcctgaaactcatgctcatgatggagtggcgttggctgcaagcaacttcatgaagtttgagaaatttcagactgcaaatagtcgtggtcatcgctggagaggaggaatcacagtcacatctgcgccatttcgagtgattgctcgtcctaatctgtttcgtcgccaacttcattttgagaatcctgtgaaagatgcaccaggtaatagaaaacgtaaaggtgggacagtaacaccttttggttttcgctctggcgatttagtcagggctgaaaaagcgggtaagtcgtattttggatgggttggtggatatactcaaacacccaaaaccaagaatatttcggtctataaccacaattggcacaggcttggacagttcagcccgtcaaaggtgcaattaatcaaacggagtacgagattatgcgtagcatcctaa

SEQ ID NO: 1855 - DNA, 219 bp, Moorena sp.
  source 1..219: mol_type = other DNA
gtcaactacccacactgatctgagtacagatacagtgtgggcttgaaagaaccagctttcaacgcaagagatgactagccccaccagacttgttttgttacagacttccgaatgtttccttagttcggattatctctaagcctactggttgtaggcgcttgtagaaaggacatgctagacaagttgggctaagggacttattactttctcgtaaggatt

SEQ ID NO: 1856 - DNA, 1266 bp, unidentified
  misc_feature 1..1266: note = human gut metagenome genome assembly, contig:NODE_59_length_61911_cov_6.971902, whole genome shotgun sequenceWGS
  source 1..1266: mol_type = other DNA
atgatttatgtaaggagcaaggatggtaaggcattgatgccaagtgagcgtggagggaggataggctatcttcttcgccatggcaaggctcatgtagtcagccgtgttccgtttgtcgttcagttggattatgagagcaccatctacacacaggaagtgagccttggcattgatgctggctcaaagcacattggcgtttcggctagttccgagaagaaggagctgcttgcagcgcaggtcgagttaagaagtgatgttgtgaacttgctatctactcgcaaggagttgagaaggacaaggcgaaaccgcaagacacgttaccgcaaggttcgttttgataaccgcaagaagaaagatggttggctagcacctagtgttgagcaaaaggttgagagtcacttgaaggttatccgcttggttcgtaagttacttccaattacgaagaccactatagaggttgctccgtttgatgcgcaaaagattaagaatcccgacatcaagggtgatgagtatcagcaaggcgagcagatgggcttttggaacgtgagggagtacgttttggctagggatgggcacaagtgtgttcattgcaagggcaagagcagagaccctatcttgaacgttcaccatttggagagccataagactggtggtaattcccctagtaatctcgtaacgctttgcgagacctgccacaaggcttaccatcgtggggagttcgacttgaaaatcaagcgtggcacaactttgcgtgatgctgcggtgatgaacattatgcgttggtcggtgtatgaacgagccaaggctgagtttgggaatgtgtacttgacctatggttacattaccaagcacactcgcatagagaatgatattgagaaaactcatgcagccgatgctttctgcattgccaagaacgtacacgcaaggcggtcgagaactttctttatgtgtcgttgtgtacctcgccatacgagagcattgcacgttgcgaacccgaagaaaggtggtattcgtaggtcttgcattgcctctcataagataggcaagtctcgctttcagcgtttcgacatggtatggtggaaaggcaaggaatgctttatctttgggagcacgcacggaagaccaatattgcgtgatgttgaaggaaagcaaattgcaggacaaccgagtgtgaatatcaaaacgataaagtttttaaagagattaagaaataacattttagtggaagaaaggacttccgaaagttggatagaaaatgaaagttag

SEQ ID NO: 1857 - DNA, 278 bp, unidentified
  misc_feature 1..278: note = human gut metagenome genome assembly, contig:NODE_59_length_61911_cov_6.971902, whole genome shotgun sequenceWGS
  source 1..278: mol_type = other DNA
ttcaagtttcggaagcctttgattaggctacagcgattatccattcaatcgtccggagcggattagcctcagccccgaatggaattagggagctacgttaggggtgaatgcataggcacgtcaggatgtccgtccaagttctgacctctgcggttcgtggttaaaagtggcgaaagctgcggtgctgcgggcaagaaaccatcctataacattggcgatgggcgcacaaccacctttcgaggtgagatttattaatttgattaattgagttgattatg

SEQ ID NO: 1858 - DNA, 1287 bp, unidentified
  misc_feature 1..1287: note = Ga0302251_1000232 JGI
  source 1..1287: mol_type = other DNA
atgcagttggtgttcgtgctggaccggaagaagcaaccattgatgccgtgccatcccgcgcgggcgcggcaactgctgcgggcagggcgggccgtcgtccatcgcctgcgcccttttaccatccggctgaaggagcgcgtgggcggatcggtacaacccatacgcctgaagctcgaccccggcagcaagaccaccgggattgctatcgtgcgcgagtccgaggagcaagcggtcgtgctgcacctggccgagctgcaccacaagacggacatcaagaagaaattggatcaaaggcgggcctatcgccgcaaccgccgcacccggaagctccgctaccgcgctccgcgcttcctgaaccgcacccgcccggaggggtggctgccgccgtccctgcgggcgagggtggataacatcctctcttggctgcgacgctatcggcggctggcgcccgttacggccctctccctggagctggcccgcttcgacacgcaggcgctccagaacccggaaatcagcggggtacaataccagcaaggcgagctggcgggttacgaagtgcgcgagtatatcctggccaagttcggccacgcctgcgtctactgcggcgcgaccgacgtgcccctggaggtcgagcacgtcgtgcccaagtccaggggcggcagcgaccgggtgagcaatctcgccttatcctgtcacgtctgcaatcagcggaaaggcgaccgcaccgccgccgagttcggacaccccgaggtgcaggcgcaggcccgccagccgctccgcgacgcggcggcgatcaacagcacgcgctgggcgctgtggcgggcgctggcggcgacgggcttgccggtcgaggttgggacgggcgggcgcaccaagtacaaccgtactcgcctgaacctgcccaaaacccacgccctcgatgccttgtgcgtgggcttgtccacgccggagcgcgtgcgactgaatggcgcggggctactcaccatccgggcgcagggccgcgggcagtatcggcgcaccctcgtgtctgctagcggtttcccgcgtgggtacttgatgcgccacaagatggtgcgaggctttcgcactggcgacgtggtgcaggcgaccatccccaagggcaagtatgcgggtcggcacagcggcacggtgctggtgcgcgccggggggtattttgacctgaagcgcgcgggtcgcctggtggcccaggggattgccgcccgctattgcaggagagcgcaacggtcggacgggtatgggtatatgctttcgcccatccccctttag

SEQ ID NO: 1859 - DNA, 324 bp, unidentified
  misc_feature 1..324: note = Ga0302251_1000232 JGI
  source 1..324: mol_type = other DNA
gtcaatcacctcacggctggacgccgggggcttggggggcaactccataagcctgattgaccagggctagccgggaagcctgacgaacggctgtacccggctacgttggcgataggatagtagacccaccggcgggcgcttcctcaacccgccgctctggaaggactggcggcagacaggctcaggggtaagcgcgaaacgcgccagttcggggggccaccacccccacccggtcgccaacaggtccgaggggagccgcgcgggaaagtcggcccgcgcgcgtcacccgcgtaagcggggtggaggtaactccaaatgcagttg

SEQ ID NO: 1860 - DNA, 1239 bp, Moorena sp.
  source 1..1239: mol_type = other DNA
atgtctaataaatattgttttgtattagattatgatggtaaaccattatcaccaactaaagaaaacaaaggttggtttctaatacgtaaaggtaaagcaacattagaaaagaaatacccaatgaccatacgtttaaataaacgtgtagaagataaagacttagataaatcaaaaatgcatgtaggtattgatgatggttctaaacatgtagggttatctattgttcaagaaggagagactaaaaataaagtagtttttaaatctacaatagaattaagacaaaatgtaaagaaattaatggatacgagaagaggtttaagaagatacaaaagatatcataaaagatacagaccttcacgttttaataatcgtaaatcttctaggaatacaggtagattagctcctagtattaaacaaaagaaacagtctattatacgagtagttaaagagttaaacaaacacataagatttaatcgtattcatttagaagatgtagctattgatactagagctatgacagatggttacaaaccttataaatggcaatatactaagtctaatcgtttagatgaaaatatacgtaaagctgttattatcagagataataatacttgccaaatgagtggtaataaaaatgtaagaatggaagttcatcatattattcctaaacgtttaaatggttctaactctataaataacttaattactttgtgtacagaatgtcatagggaagtaacaggtaaagaagaacaatacattgattatttacaatctattgtaggaaagaaaacaaacacctttttaaatcatgcttcacatgtaatgataggtaaaacttacttaagacaagagttatctaaaattgcctccataagattaacaacaggtggggacacagcaaataaacgtattgattggaatatagaaaaaacacattctaatgatgcaatcgtaattacaaatttaattcctagtaaggatttaaatatagaagaatatgtagttaaaccaataagaagaaaaagtaaatctatttataataatgttaatggaattaagcatagagatattgttcaatatacttatagaaatggtgacacgcatataggctatgttacaggtcttatacctagtagaaaggctattaatttccaatcgtcaacaaagcattgcaaagcagtcaatgctaagaaagttaagttattatggagatttacaaatatgtattggttaacataa

SEQ ID NO: 1861 - DNA, 310 bp, Moorena sp.
  source 1..310: mol_type = other DNA
tagaagattatttaggtaagaaattagaagtttaaaataaaggacttacttatttagttggtctcaagcctcagtgactagggggttggaaacaacgtatcctagatatgaactacgttagaggataatggtaaagacttaccttcagatgcacgctttagtcggaagctctaagagtgtgaacaaagaaacacttctaagtcatttgatatgaagtgataacatggaagcacatatccaccctttgacattggcaaaaagcaaaataccacgaaagtgaggttagacagaaatgtctaataaatattgt

SEQ ID NO: 1862 - DNA, 810 bp, unidentified
  misc_feature 1..810: note = Ga0070707_100063183 JGI
  source 1..810: mol_type = other DNA
atgtcgtgtgtctttgtgctggataccgagcgccgcccgctggacccggtgcatcccggcgccgcccgccgcctgctctcccagcgggaggcggcagtgtggcgccgctctccgttcaccctcatcttgaagcaggcggtgccggaggccgccccgcagccagtgcggctcaagctcgatccgggcagccgcaccactggcctggcgctggtcaaggagccgacggcagccccggcagcggaagatacggcatcggcgccgctggccgagacggggcgggtggtgtgggcaggggagctgacccaccgggggcaggcagtccacgagaaactggcggcgcgccgagccgtgcgccgctcccgccggcagcgccacacccgttaccgtccccgccgcttcgagaaccgccgccggccggcgggctggctgccgccgtcgctggaaagccggctcgccaacgtggagacctgggtggcccggctctgccgcctgaccaacgtgacggcgatcagccaggagttggtcaagttcgacacccaggcgttgcagaatccggagatcagcggggcggaataccagcaggggacgctggcggggtatgagctgcgggaatatctgctggagaagtgggggcggcgttgcgcgtactgtcacgccacgggcgtgccgctgcaaattgagcacatcgtgcccaaaacgcgccccggcggctctgaccgtgccagcaatctcacgctggcctgcgcgccgtgcaaccagcgcaagggcacgcggaccgccgaggaattcgggcacccagaggtgcaggcg

SEQ ID NO: 1863 - DNA, 302 bp, unidentified
  misc_feature 1..302: note = Ga0070707_100063183 JGI
  source 1..302: mol_type = other DNA
gtcagatacccccggctgaagccgggggcttgcacggcggcaacgccggggaggccccacgtctgaccagcccccgctctcgcaggggagcggagccgttcggagcgaatgcataggcaccggcgggtgcttcaccagcccgccgctctgcggctagcggttaaacaggtctacggggttgtcaccagtgccgctggcaagcaaaggaaaccgctcacgaacacgggcgaggtgagcatcacccgcgcaagcggaggcccgcgagggcaccagaactgaaaggtcgttcgtgtatgtcgtgt

SEQ ID NO: 1864 - DNA, 1497 bp, unidentified
  misc_feature 1..1497: note = Ga0307376_10008654 JGI
  source 1..1497: mol_type = other DNA
gtgaagcaaagtgagagaaggccggatcagaaaccgatttttgtgatatcaaagtcgggaaggccgttggccccaacacgtcggccggggcgggttcgctacctactcaaaagcggttgtgcgcggatagtatgctatgacccctttgccgtccaactgctgtacgactgtcctgagttcgtgcagtgcgaggtcaccgtcgcaatcaaagaggattcgaaagatacgacaattgttgccgcagaacacattacaagatcggacacttgctccatagtctacgctaaagagatcttgcagcgggctggcgtttcggctcatgtgaaacgccgtacggacgcccgccgcagccgcaggaaccgcaagacccggtacagaaaaaaacggttcgacaaccggccaaaatccttatgttccatttgcggtcgaaaccacaccccgaaaacctgggcaaaagtcgaacgcaagaccggcacaagtctaaagaaggtaggagtcggtagatcggctgtttgtcgcaagtgcgaacatcaggggcttggcgagcactttgggcgtcttgccgaaaaacatctcaccccagcgctacggaacagagttgatgctaccgtacgcgaagtagggaaattgactgccatcatgccagtgacgaagataatgatggagcctacggcaccttatgcccaaataatggcctatttgaatgggcaacttaataaacctgcatcgagcaccatgtctgggcatactgttattgttagggagtaccttcttggaaaacacgggcatcagtgcgtttactgcaaaggtcaaagcggcgaccgttcgcttgtcaaggaacacgtgattccaaaatcacgcgggggaagcgatgccctatataacctggtgatatcgtgcaagacctgcaatgatgcgaagggggcgaagacggccgccgaattcggatacccggagattaacgagatggctgcgaagtttcttcgtgtcggatggggcgccattatccaaaggtaccagcggatgctctggcaggagttcgagaaatcgggcacagcggtcgaggtaccgtttggcagttgcacaaagcataacaggcttaggacaccgttgccgaaagtgatatacacaatggtggtagccgccaacggcttgaagtttgcccccccgaaggaatacatggtcgaaaagcgattaaaaataaggagtccttttcatcgatttaccaatgagaacagaaaagggtggccatgtaggaagaccctttccatgagagaagtcggtgggtttcaattgcacgacgaggtctcgtttatcgatggtaacggatcaaaaacctgctgttacattactgctttgcgtaaggacggatcggcagaagtgtctgacttggaaggaaatcttatttcaaaaaagagcttgagaaagctcacattggaacataacgtgtatcgaaaaaggtttatcgagcgtcgacgttttgaggggaataattga

SEQ ID NO: 1865 - DNA, 373 bp, unidentified
  misc_feature 1..373: note = Ga0307376_10008654 JGI
  source 1..373: mol_type = other DNA
tctacctacccagcgccctgagaccgtggttggacggaggattcttgaacgtcttcctcgtcttaaggcggagcgaaggctccataggagacagcctaagtcttaagtgactacgttcttccggttaacagacagtcagatgaaacaagacccttctccgggttagccagtctggcataactttctggaggctctgtaaaagccctttgggggatggggcagtcaacctcgggacggcccgccgttgcgggcaagccggtagaacattggcggggaagtgaacgggcggaaagcccgcattatctccctttcgggagaacaccaaaggatgctgtgagtgaagcaaagtgagagaaggccggatcagaaaccg

SEQ ID NO: 1866 - DNA, 1164 bp, unidentified
  misc_feature 1..1164: note = Ga0209096_1014402 JGI
  source 1..1164: mol_type = other DNA
ttgcagcgcgttttcgtagtggacaccaacaagaaaccattgagcccctgcacaccggccagggcgaggatgctcctgcggaagggtaaggcggcggtctatcgccgggaacccttcacgatcatcctcaagtacgggattgaagaacccgtgccgccggtagagttgcgaattgattccggcagcagaaccacggggatcgccctggtggggaagtgcaagaagggggaccaagtggtatgggcctgcgagttggaacatcgggggctggccgttagggatgctttaacttcccgcagggcaatccggcggggacgcaggaacaggcatacccgctaccgccagcctcggttcaataaccgtacccggcccgctggatggctgccgccttcccttatgtcacgggtaaataacgtcgttacgtggtcggggaagatcctcgccctggcgcctgtagcctccatcgccgtcgagaccgtccggtttgacacccaggcgctccagaatccggagatcagcggtatcgattaccagcgggggacgttgttcggttacgaggtccgggagtacctgctggagaagtgggggcggaaatgcgcctactgcggggcggagaacgttcaattggagatcgagcatattgtccccaagaaacccattcgagggccacacggtacggacaggataagcaacctcaccattgcctgtgtcccgtgcaatgaggacaagggcaacaagcctatcgaggagttcctcgccggcaagccggaggtcctccggaagatactcgcccaggccaagaagcccctgatcgacgcggcggcgatcaatgctacaaggtacgccattggcaacgcgctcaagtccctgaacgtgctggtgtccttctggtccggagggcgcaccaagttcaaccgctccaagcaggattatccgaaggcccactggatagactctgcgtgtgtgggggaggccggcgggcaagtgttcctcaagccggatatgcaagccctgaaggtgaaagcctgcggacggggcacgagacaggtggtgaaatccgacaagtacggctttcctcgtactgccgccggaagaatcaaaagggtacacggcttccaaacgggggacatggtaactctcaaccaaaccactggcaagtacgcc

SEQ ID NO: 1867 - DNA, 286 bp, unidentified
  misc_feature 1..286: note = Ga0209096_1014402 JGI
  source 1..286: mol_type = other DNA
gtccgtactgctccggcggtatggggcaactcgctcaaccagactcggcccgatagctcataacgtgttgtcgggctacgttaccggcgaatatataggcactccgggatgcttcgccagtcccggaccttgcggcaggtggtcaaacagcgcagaccagggaaatgagcagtgctgcctgcacacaaaccgccggataacattgtcgaggcgacctttaccgggggaacccgagtaaccggacgggaaaccgtccacccaatttgaaggagagattttgcagcgc

SEQ ID NO: 1868 - DNA, 1236 bp, Tissierella creatinini
  source 1..1236: mol_type = other DNA
attatggtctatgtgctaaataaagatggcaaaccattaatacctactaataggcatggtaaagtaaagcacctgttaaaagaaggtaaagctaaggtagttaaaagaacaccatttaccatacaactgctttatagtactactgaatttgtacaacctatcacattaggtgttgatgcaggtagtaagattattggtttaagtgctacaacagaagatgaagagttgttttcatccgaggtagttttaagaaatgacattgtagagctattatctacaaaaaggcaaaatcgcaggacaagaagaaaccgtctacgctacagaaagccaaggtttctaaatagagtaaaagctaaaaataagggatggttagctccatctattaggcataagatagatagtcatctaaaggttatagctaatatatataagatattaccaataagtaaccttattatagaaacggcttcttttgacatccaaaagattaaaaatccacaaataagcggcaccgattatcaagaaggtgagcagttaggcttttggaatgttagagagtatgtaatgtggcgtgatggtcatgaatgccaacattgccatggtaaatctaaagataatgttttaaatgttcatcataagataagtcgtaaaactggtggtgactccccaggtaatttagtaacactttgtgagacttgtcatagtttacaccatcaaggcaaactcacattaaagataactaaaaataagtcatacagggatgctgcctttatgggtattatgagatgggctgtttataataagcttaaagagatatatccaaatgtcactatgacatatggttatataactaaaaataatagaattactaatggcatcgagaaaactcatactgcagatgccttttgtatagctggtaatttaaaagcaaaaagaagtagcgtaatctaccttcaagcattcaaaagaaggcataatagacaaatccacaaagctaacttcttaaaaggtggtaagaaaaaactaaatcaatcgccttacatggttaaaggctttagattgtttgataaagtactgtttcaagaacaagaatgttttatctttggtagaagagctactggttatttcgatttaagaaaattggatggtacagtaattcataagagtgcaagtgttaaaagtattaaattattagaaaagaaaagcacactattaatagaaaggcaggtggcataa

SEQ ID NO: 1869 - DNA, 290 bp, Tissierella creatinini
  source 1..290: mol_type = other DNA
gtcaactaaccctcgactaaaatcgaaggcttgaagtagtacagcttttgggtctattttaagcctggttgattagcctaagtgctttgggcactacgttgtttttgtcataacacccatgggcgtttaccctaacctgtggctctgttgcttgtgattaaaagttctcgagggttaatgggaacggtgttgcaggtgtaaaaagcaatttacaacattagctaagggtatttaaccagttatttaactggcattatgtatttaactacattaaaaggagaagtattatg

SEQ ID NO: 1870 - DNA, 1503 bp, unidentified
  misc_feature 1..1503: note = Ga0208687_1000090 JGI
  source 1..1503: mol_type = other DNA
atgaagaaacgagacagaagacaaacacccatccgcgcctccctaacggctggctgggctgatgctgtacctgagagtacggaggtaaaacctgacacagctcaatgctgcgctcagcttgcgctgattacagcttctgctttttatctcgatggcgaagggacgtctagaaatttggaatcgaaagaagacaaatctaaggatactgctaggattatgtccaaacaattatctgagacgaagaaaaaagaattaaaagaagaaagaaaaaggaccaaaaacaattatagagtaccagtcttgaatccagatggaactccagctatgcctacgacaagtaggagagcgaataaatggattaaagaaaagaaagcaaagatagtcaaaaataaattaggaatatttcagattcaattacttttcgaaccaagtggaagaaagaaacaaccgatagtaatgacagttgatcctggatcagcatttacaggaataggagtcatatccaaaaagtctgtgttatatggttgtacattagaattgcctggatacaagcaaggttctaaaccaaagattgagaagaataaatttggtaagaaagttgagaaatatgcgaatgctatagttgaaggaatggataagaggagagaattaagaagaggtagaagacatagaaattgtcgaagaagagaagagagatggttaaatagaagtagatctaagatccctccttcaatacttgcgagaaaacaattagaactgaaagttgcaacaatattagcaaaaatatatccaattataatgattggttttgaagatgtagcattcgatcattttaaagacacgaaaggtgtaaaaggtcaattctttcctcatgttgaagttggtaagaattggatattgagagaactgagaaagatagcaccaagaggagttaaaataataaaaggatatgagactgctagaatgagaagtttgttattgatgaaaaaggaaggagataagactgttagatctgttgaagcccatgtcaatgattgtatagcgatgggagctatgatgtttaatggcggagttgagactaagaataaattcaaatatgatactattacaagacctaaatattcgagaagaattctacatttagaacaacctacaaaaggtggggtgagaagaagatatggaggaacgacttgcattgataaatggacaaatattaggaaaggtgactatgttgaagcaagacaaggagagaatgtgtatagatcttatgtgtctggatttactaccatgaatggtagaaattatatatacgtgtctgatttcgactggaaaggatttggtaaagatagaacacagacagcgatcgtaccgtctaatattaagatattgagtagaaatagtggattattggtaagaagtatggtaaaaattatgacaaaagatgaattatttgacaataaaactgggacagtacagatgaatattgaagatgcatgggggtaa

SEQ ID NO: 1871 - DNA, 264 bp, unidentified
  misc_feature 1..264: note = Ga0208687_1000090 JGI
  source 1..264: mol_type = other DNA
gtcaactacatcgccctagcgatcagcgctagctgagagcttatgccggcttgccggcacactaaagggcggtgcttgtatctcagaatacaacatgagagttaactagcctatcggagaaatacagaatctatgaagaaacgagacagaagacaaacacccatccgcgcctccctaacggctggctgggctgatgctgtacctgagagtacggaggtaaaacctgacacagctcaatgctgcgctcagcttgcgctgattaca

SEQ ID NO: 1872 - DNA, 1317 bp, Petrotoga mobilis
  source 1..1317: mol_type = other DNA
atggaaaaggaatctgtacaacgagtttttgtattagataaaaacaaacaaccacttatgccatgtcatcctgctagggcaagagagttattgaagaaaggtaaagcagcagtatttcgataccatccattcacaattattctaaaagatcgtgaaggcggcgacacgcaacctatacaggttaagatcgatcctggaagtaagatcactggagttactttagtaggcgattttaagaacggtaagaaagtaatttggggtgctgagattcatcacagaggtcaaagtatcaaaaaagcattagatactcgtagaggtgtaagacgttcacgaagaaaccgaaagataaggtatcgtatagcaaggtttgacaacagaaaacgttcaaaaggttggttaccacctagtcttataagccgtgtagaaaatatactcacatggattaaacgtattcgacgcttttcaccaattacaggtatttcattggaattagtacgttttgatactcaaaaactacaagatccagaaattaatggaatagagtatcaacgaggaacgttgtatggatacgaaataaaagagtaccttcttgagaaatggggtaggaaatgtgtatattgtggtaaagagaatgtaccgttagaaatagaacatatcgtacctaaatctaaaggtggaagtgacaggataagtaaccttacattagcttgccacgaatgcaatcagaagaaaggtaatcaatcaattgaagaatttttaacaaataatccagaaaggctgaaacagatcaaatcagaatcaaagagaccactcaaagatacagcagcactcaatgctacacgttggtatatattcaatcaattacgaggaaacagcctcacggcaggtaaggaagaattacctattgaagttggaacaggaggacgaacaaagtacaatcgtgagacacaaaactatcctaaaaagcattggatagatgcagcttgtgttggagaaagtggtcaaaacgttcaaattgaacctgatatgcaagttttagagatcaaagcaatgggtcatggaatgcgtagaatgtgttttgtagataaatacggattcccaaaaaaatatcgtccaaaagaacgaacatatatgggatacaaaacaggcgatatagtgttggcagttataccaaaaggaaaaaatatgggtatccatattggacgcattgcaatacgacataggccaagctttttattaaatggtgttggtgatgtacatccaaaatatcttacattactacaaaaaaatgacggttatggatatcaaatatcttaa

SEQ ID NO: 1873 - DNA, 280 bp, Petrotoga mobilis
  source 1..280: mol_type = other DNA
gtcaactacccccgtctaaagacggaggcttgaagcctcggagttgaccagcctaagttcgaagacagcctcacggcaaatttgaagaactacgttattctggtcatgacaccttggaatgctggagccagttccaagccctgtcgttcaacattaaacaggtatacggggttgaaaccagtgtgttgaatgtaaaaagccagaataacattggcgaggctcactttaacccgaaagggagaggaaggtaacttccatggaaaaggaatctgtacaacga

SEQ ID NO: 1874 - DNA, 1323 bp, unidentified
  misc_feature 1..1323: note = Chlamydiae bacterium
  source 1..1323: mol_type = other DNA
atgcgagtgttagttatagacaaaaacaaaaaaccgctaatgccttgcaaaccatcaagagcaagagagcttttaagcaagggaaaagcggctgtcattagacgatacccattcacgattatactttttgctcgtgaggagggtgccatgcaagaaacggaactaaaagtggatcctggtagcagaatttcaggaatcgcattagttgctaaatttaaacagggacgaaaggtgatttgggcatcaaacctacatcatagaggacttgcagtgagaaatgctcttgattctagaagggcattgagaagaggaagacgatttcgtaacactcgttatcgaaagcctcggtttgataaccgaacaaggccgaaaggttggctccccccttccttgcagtctcgagtaggtaacgttcatcagtgggcaaaaaaacttcaacgttttgttccgatttcatctatcgctgtagaaactgtccgttttgatacacaaaaaatgcaaaatcctgaaatatctggcattcagtatcaacagggagtattacttggatacgaaattcgagaatatcttttagaaaagtgggggagaacctgtgcttattgcgatgctaaagatgtccgcctagaaatagatcacattgttccaaaaagccgtggaggagtgagcgctgtatccaacttaacaatctgttgccggccttgcaatgagaaaaaatccaatcaatctgtccaagagtttctgaagagtaaaccaggagttttatctaaatttcagaaaaagaaccgattatctctttgcgacacggcagcggttaatgcaacacgtattgccatagggaatgctttaaggactctagaattgccgataacattctggagcggaggaatgactaaatataatcgctttctccaaggataccaaaaagatcactggatagatgcagcttgtgttggagaaagcggagaaagcgttacactttccgaaatattctcgattttagaaatctcagctacaggaagaggttcacggcaaatgtgtagagttgaccgctacggctttccaagaacattagcaaaaagcaaaaagcgcgttaatggatttcagacaggagacagagtgcatgcatttgttcctaaaggaaagaaagccggaacacatattggaaaggtgtctgttcgatcgtctggaaattttaacatcaagacatcttcgcaaacggtccaaggtgtacatgcaagatactgtaagcgactattccaagcagacggttacgaatatgtacaatttataattaaaggaggcggcgtttcctcctcggtctaa

SEQ ID NO: 1875 - DNA, 269 bp, unidentified
  misc_feature 1..269: note = Chlamydiae bacterium
  source 1..269: mol_type = other DNA
gtcaactaccctcccctaaaggggaaggcttgtatgagccttatgttgaccagccttagtttccacgaggaaactacgttaggagcgaatacataggcaccgtgggatgcttctccagtcccacgctctgcggtgagtggttaaacaggtgtaagaggttaagccagtgctgctcatatataaaccgctctataacattggcgaggagaccattacccgggaaaccggagattggcgggtaaccgcaaaaaggaaaaaagaacatgcga

SEQ ID NO: 1876 - DNA, 2229 bp, unidentified
  misc_feature 1..2229: note = human gut metagenome genome assembly, contig:NODE_192_length_38345_cov_13.286210, whole genome shotgunsequence WGS
  source 1..2229: mol_type = other DNA
atgcgcggtcagcccttgatgccgtgctcgcctgcaaaggcgaggcatctgctcaaggctggaaaagccgtggtgaagcgtcgaacgccattcacgattcaacttcgaatcgccaccggtgaaacgaagcagaacgtgacgctgggcgttgatgcaggcgcaaagcatgtcggcctttccgctacgacggaaaaggaagaggtctttgcgtccgaagtcgaacttcgacaggacatcacggggcttctggctgcccggctctcgctgcgtcgtgagcgccgccagcgcaagacgcgctaccgtgcgccgcgctttttgaaccgtgtccgatcgaaacacaagggatggcttgcaccgtccgttgaaaaccgcattcaggcgcacatgtcgcgcatcgatgcggtctgcagactgcttcccgtcaccaagatcgtgattgagacggcatcgttcgacattcagaagatcaaggatccgtctgttgaaggcacggactatcagcagggcgatcagctcggcttttggaacgtgcgtgaatacgttctctttagagacggtcacgtttgccaacactgtcacggtcatgcgaaggacaagatcctcaacgtacaccacctcgaaagccgccaaaccggcggcgatgcgcccaacaacctgattacgctctgcgagaggtgccacaaggcctgtcacgcagggaagatcaagttgaaggtcaagcgcggccaatcgttcagggaggaagccttcataggcatcatgcgttggacattgctcgatcgcgtgcgcaaggcgcatcccggcttgcctgttgagaacacctgcggctatctgacgaagaacacgcgcatcaccctgggactccccaaagcgcattgcgtcgatgcctactgcattgcgggaaacctcaaggccgtacgaagaggcgtccacctctatcagcgacaggtgcgcaagcacaaccgtcagattcacaagtgtacggtgctctcgaagacgcttaaggacggcacgaagatcggataccgaaagctcaatcaaacaccgcatctggtcaagaacttcaggctcttcgacaaggtgagatgtcttgggcaaaccggcttcatcttcggccgaagatcgtccggttgcttcgatgtccggaggctggacggcgtaaagctttcttccgacatcagctacaggaagctcacgcttctcgaaaagagaggcacccatttaaccgaacttatcaaggaggacggcgcttcctcctctgtcagaagacagaggtttctgcgccgagtttctatgaacaagccgtgcacttatcttctttccgctctgatggcgtccgccgtgctggcgcctgtcgccgcttcggccgccgacaagtccgagctcgaggtccgcatggaggcggcgcagaaggtgctcgccgaccgctcctactacgagcgctggtcgcccgaggccgccctgaagacggttgaggatgcaaaggccgccaatgaggcgggttcggccaggcagaaggagatcgacggtgcgctcgacgtcatgaaggactggtgccacacgcgcttcctcgttaacgcctgcatcaaggacgcgagggacctgcatcacgagcgtgagaaggagatccgtagcgtacgcctcaaggccgacgagatgatccgcctcgaccgcgtcgagcagcgcagggcccgtcaggaaagccagaagcagaacgtgaagcagcccatgaagctcggcggctccaccgagtctcccgaaagccgcagcgagtcgcgcgccgaggaggtgaagaccaagcagagccgcgccgaggagcgcagggcccttgaggaggcgaacgtccgtgcctacgaggaaaagcaggcgagggccgccagaaaggcggaggagcgccacgatcccatcagggtgaagagccgcgtgaaggctccgtcaagtcccattgaaggacatctcggccgtacggcggctgacgttgaggcgggcagggccgaggcggccgagcgcatggctcaggaggacgccaacattgcggccttcaatgccaagcaggccgaggcgaagaagcgccttgaggaggccgaggccaccgccgccgaacgcaaggcgagccgcgaggcgcggcaggcgaacttcaacaagacgctcgaggagcgtcgcgccgcacagaagcgctatgaggagtccagggagaacaaggactccggcctcaagaagtatttctga

SEQ ID NO: 1877 - DNA, 276 bp, unidentified
  misc_feature 1..276: note = human gut metagenome genome assembly, contig:NODE_192_length_38345_cov_13.286210, whole genome shotgunsequence WGS
  source 1..276: mol_type = other DNA
gtcaataacccctgtctgaagacagaggcttgaaagagtctttattgactagcctcagcgcccctctttcgagaggcgctacgttggttgggaatgtataggcaccgtgggatgtacatcctagttccacgctctgcggcctgtgattaaaagctctgagaggtaggagcggtgttgcaggcaccaaaccccttccaacattggcgaaggatgtcaaccggccttcgggccgtgtaagcggaacctgcgggtatccgcaaaggagatactttgaaa

SEQ ID NO: 1878 - DNA, 639 bp, unidentified
  misc_feature 1..639: note = Ga0326513_10003181 JGI
  source 1..639: mol_type = other DNA
ctgagaacagatttagttgaaaatttatcaacccgaagggaaacgagacgaacccgacgttcaaggaaattacgatatagaaaagcaagattttcgaatcggaaacgtacggaaaaatggctgcctccgtcaataaaatcaaaactggaatgccatttaacactcatagcaaaactgcacaggtttttgccgataggaaaaatcgttgtcgaggttgcgagtttcgatattcagaaaataaaaaatcctgagataaaaggagctgaatatcagcagggtgttcaatcagacttttggaatgtacgtgaatacgttttgtatagagataatcataaatgcagatattgcaaaggtaaatcaaaagacagggttttaaatgttcatcatcttgaatcacgaaaaaccggcggcaactcgcctgacaatttaattaccttatgcgaaacctgccataacatgtatcaccggggtttaataagtctggataatgtaactaaaggcagttcctatagacccgaaacatttatgagcatactgaggaaatatctgattgaaaacctcaggaaaacatataacaatgtaagttatacctatggttatgaaactaaaagtaaaagaattgcaaacaggctggagaaa

SEQ ID NO: 1879 - DNA, 271 bp, unidentified
  misc_feature 1..271: note = Ga0326513_10003181 JGI
  source 1..271: mol_type = other DNA
taattatggcttttgcttagtctaagtgatttcgctgaaaagtgaatgaactacgttatgagagaatgaatttatgcaaataaattcaaatagttaccttcggatgttcatctagtctgaagctctaaggtgtatgattaaacagtcggtaatgctgacagtgttgtacacggcaaacctctcaataacattgacgaaggtgcatttacggttttgcagagttccggctgttaacagcataaactgcagctcataaagggatttttgtatg

SEQ ID NO: 1880 - DNA, 1254 bp, unidentified
  misc_feature 1..1254: note = Ga0326511_10001255 JGI
  source 1..1254: mol_type = other DNA
atgcgcggtaaggcattaatgccaactagtaatagaaaagcacgtatactgttaaaacaaggtaaagctaagattgtatgttataatccatttacaattcagcttaaatatccaacaggtgaaacgacacagccgactgaattagggatagaacccaattataatgatttaggcatagctgttgtttcacaggaaaaagtacttcacaaatgtgagatacattttcttccaggaatgcatactaatctaaaatcaagaggtgctttgagatcagcacgacgtgcacgtaaaacacgttatcgtaagcatcgttgttcaaatcgtgcaagtcgttataacgctatgtcaccaagtagtcggaataagctaagacattatataaactggataaacaagtttaaagcattgttaccgaactgcacagtgtacattgtttgtgctgatccagcagaacagataatatctgagtctaatgatgcaacaacacaaactaacaaaaaaccatttcgtaatatacgaatgcgtgtttttgaacgtgacggttacagatgtcagatttgtggtagaactggtgtaaagcttagcttacatcacatacggtttagaagtaagaatggtagaaatgatttagataatctgatcacagtgtgtgatgattgtcattctcatgaaaatcatttaccgggaggtattttagacaatttacgacaacagaaacgtgtcagcaagtctaaatcggcaattaccgactatccgttatctcgaaaagtacatgcacagcttaaacgagcatttcctgatattgtaagtgtagctaataatgatgtactaaatagatgcacaacattaggattaacacctactgtgtataataaagcaattgcagcaacaggtataaaccagcttaaacaagacacaaatgacatattacaaatcagacagtatcgaacaaaagatagaagcatacataattctgttccaataaaaggtagaaaagaaccaaacagaaatgcaacacgtcgtaatacaaacatacgtacataccgaggatgggttaagaatgataaagttcgtgtgttcggtactaaggttggttttataacaggatttggtaattttgttgcttgtgttaaggatatcaatggtaattacataacagacccaaatagaaagaactactcagtcaatttaagtagtttaaaattaatgtgtcacaataataattggcagtatcagacagtacaatgtgagtaa

SEQ ID NO: 1881 - DNA, 317 bp, unidentified
  misc_feature 1..317: note = Ga0326511_10001255 JGI
  source 1..317: mol_type = other DNA
gtcacggtacttataataataatagtacacacaaaatcgatgcactcatggaatatacatttcaaactgtgaataacagttacatcgattactctaagttctctgagaactacgttatttatgttatcatacatacggatgattctctagtctgtattcttatgtaggctctgtaaacagttctgttgagtaggaacagtcaacctaaggtggtcgagtacgacaagcatttataacatggaggaagggaaccaaactttcacagaaaggtataccacttgcgtagtaggtatttaattatgaaatcagaaaacaga

SEQ ID NO: 1882 - DNA, 1314 bp, unidentified
  misc_feature 1..1314: note = Ga0265293_10014478 JGI
  source 1..1314: mol_type = other DNA
atggtttatgtaatttcaaaagaagggaagcctttaatgccaactaaaaggcatggaaaaattagaattttacttaaaaatagtcaagcaaaggttgttaaaagaaaccctttcactattaagcttttgtatgataccacaaattatactcaacctgtaactttgggcgttgatagtggctatacttatattgggttttcagcaacaactgaaaaagaagaactgatttcaggagaatgtactttattaaaaggtcaatccgagagactgaaagaaaaatctatgtatagaaaacaaaggcgaagtagactaaggtatcgtgctccacgctttgataatagagcaattcccaaaggttggctagcaccatccattcaacataagtatgaatctcatcttagatttatcgcctatttacaatctatattgccaatttcaaaaatcatcatagaagtagcgaattttgatgttcaaaaaattaaaaatcctaaaattgagggaaaagaatatcaagaaggtgaacaaaaagacttttggaacttgaaagaatacattttgcatcgagataatcacaaatgtcagaatccagattgcaataacaagtcaaaagataagatattggaagtacaccacattggtttttggaaaaaagatagaaccaatagaccaagtaatttaattactctttgcgataagtgccacaatccaaagaatcacaaagagggtaactttctttggggttggaagcctaaattaaagagttttaaagaagctacctttatgtcagtagttcgttggaagcttgtgaatagcttaaattgcgaacatgcttatggtttcgacacaaaatcaaaaagaattgctttgggtttagaaaaaactcattttaatgatgctttttgcataacaaatggctctactcaaaaaagagtaaaaccaatctattttgaacaaatccgcagaaacaataggtctttagaaaagttttatgatgccaaatatatagattcaagaacaaaccaaaaagtaagtgggcaagacctttttagtggtcgtagagcacgaaacaaaaatctaaattcagagaatcttcataaatatcgaaagcaaaaactatcaaaaggtcaaagaagaataagaactcaaagatacttttatcaaccaaaagatttggttaaatatgaaaacaaaatctatacggttaaaggaattcaaaataagggagcttatattaaattagaaaatttatctaagccaattaaaactgaattagtagttccatatgagtttaggaaaggcatttgcgtgatttaa

SEQ ID NO: 1883 - DNA, 299 bp, unidentified
  misc_feature 1..299: note = Ga0265293_10014478 JGI
  source 1..299: mol_type = other DNA
gtcaacgacccaccacttagcaccgtaggtgcttgaagtgggggcttgagaaaggctctgccttttgaaaagcctagttgaatagcctaagttcttcaagaactacattatgtgggaatatatagttaccctagaatgctccactagttctaggctctaaggtgtaggattaaacatctctaaagggtaggagaagtgttctacatttgaaaccccatataatattggcgaagtggacttaccactactttttattcttaaagtagtgtgaattactctatagggagttgaaatcaatg

SEQ ID NO: 1884 - DNA, 1269 bp, unidentified
  misc_feature 1..1269: note = Ga0265298_10029446 JGI
  source 1..1269: mol_type = other DNA
atggtagtgtatgtgctagacaagagcggaaagccgctgatgccgaccgataggacggcgtgggtggcctatgccttgaagcacggagaagcgaaggttgtgaggcgagagcctttcaccattcagttgctccgcgatagcacgaactatctccaagcggtaacgcttggtgttgatgtgggaagcaagcacatcgggctttctgcaacaaccgaaaagaaggaactgtattccgcacaggtggagttacgggacgatgtgactaaacttctgttggctcgcagggagtttaggagaggaaggcgagggcggaaacacaactggtacagacctgcgaggtgggctaacagagcgaacgaaaagcgcaatgcggcattgccgccaagcataataaacaaggcggacgcacacttccgcgccgtgcagttcgtgtacaaactacttcccatcagcaagacacgggttgagttgggcaagttcgacgttcagaagataaagaatccgagcatcgaaggagagaagtaccaacaaggtgtgcttgcgggctgggagaacctgaaagcctatgcaaagtaccgtgatggttacaagtgccgtgcttgtggcaagagcaagcacaaagacggagtaaagttggaagtccaccacataatccgcagggctgacggtgggactgatgttcctgagaatgtggtgacattgtgccacgagtgtcacgagaagaaccaccaaggtgagaaaaagttgagattgaggcgtccaccacagcacaaaggcgaagcgcatatgaatgctatgcgatactatttgttagatacgcttctccatacgaacaggaagatagagaggacctatggctacaagacggcgacggctcgtcgcgaacacggcatagagaagagccatgtgtcagatgcgtactgcatagcggggaacttcaaggcggagcgaagcaacgataatgtgtatctgcacaagtttgttcgccgccacaataggcagttgcataagacgaccatcttgaagggtggctgtcgcaaggcgaatcaagccccgaagtatgtgtttgggttccgcctgtttgatggtgttcgctattgcggtcaaaattgcttcgtgttcggtaggaggagcagcggttcgtttgacatacgaacactggaagggaagaagatttcggcgggggtgtcgtacaagagactcaagccattgactaaatcgacaacaatattaactgaaaggaggatgtgcgattcctcccaaccctaa

SEQ ID NO: 1885 - DNA, 303 bp, unidentified
  misc_feature 1..303: note = Ga0265298_10029446 JGI
  source 1..303: mol_type = other DNA
gtcaactacccaaccctgaatggttgggcttgtgaggggaaccgagcaagcccgggttgactaggggactgaaacggaaaggaaactagaagtggaagtagcagttaggagagaatgcataggcaccctcggatgtgagtccaagtccgtggctctgcggtgtgcggttaaacagtcctacgaggtaggggcagtgccgcacacgataaacctctcccaacgccccgatgggcacctaacacagggaggagaaatctaacctgtgacttaccgagaagtcggttaaaggaaactaagatggta

SEQ ID NO: 1886 - DNA, 543 bp, unidentified
  misc_feature 1..543: note = Ga0335394_10082827 JGI
  source 1..543: mol_type = other DNA
gtgtggggcgcagagttgacccatcgtggtcagagtattcgggacgccctcttgagtcggcgtcagcagaggcgattccgtcgtcagcgccagacgcgctatcgtgcggcgcgtttcaacaaccggcggcgtgttgcgggatggttggctccgtcgttgcaaagtcgtgtggagaacatctggacatgggtggtgcggttggcgtggcgctgccctatcacatcgatctctcaggaacttgtgaggttcgatatgcagttgatggagaacgctgaaatctctggcgttgagtaccagcaaggcgcgttgcagggctacgaagtgcgcgagtatctcttggagaagtggggccgccagtgtgcctattgtggcgcaaaagacctgccgctagagattgagcacatcattcccaagacacgcggtggttccaaccgtgtgaccaatctgtctctggcgtgccacgattgcaaccagaagaaaggcacacagaccgccgcagagttcggccatcctgacattcagaagcaagccaaagcgcccttg

SEQ ID NO: 1887 - DNA, 252 bp, unidentified
  misc_feature 1..252: note = Ga0335394_10082827 JGI
  source 1..252: mol_type = other DNA
gtaagcatccccacacctaaaggtgggggcttttagccccaatgcttaccagacttagcctgagaaggctgcgttagagacgaatacagaggcacttcggaatgcctcaccagttccgaactctgcggtgaacgattaaacagggggcttgggagccaacagtgttgttcacacaaaaccgtctcataactttgtcgaggtgaactttatccgcgcaagcggaaatatgaaaggtaactttcaatgcaacgt

SEQ ID NO: 1888 - DNA, 702 bp, unidentified
  misc_feature 1..702: note = Ga0209720_1016953 JGI
  source 1..702: mol_type = other DNA
atgttagtatacgttttaaataagcatggtaagcctttaatgccttgcaaaccatcaaaagccagaaaacttttaaagcaaggcaaagcaaaaataacacaaagagaaccattcacaattcaacttatttatggtagtagtggatacaaacaacctattgcattaggtatagatgctggaagcaaatttatcggagtgtctgctacaacagaaacgcaagaactattttcggcagaagtagaactaagaaacgatatagtacaattattatcagaacgtaggcaatatcgtataagtaggagatatagaaaaacaagatatagaaaaccacgatttttaaatagagtacgaagtaaaaataaaggttggttagcaccttctgttgaaaataaaatacaaacacatttaaaaataatagaaaaagttcataagatattgcctataactaaaataattatagaagtagcttctttcgatatgcaaaagattaaaaatcctaatatagaaggcgtagaatatcaacaaggtgaacagttaggattttggaatgtaagagaatatgttctttggagagacaatcatacttgtcaaatttgtaaaggtaagagcaaagacaacaggttaaatgttcatcatatagaaagtaggcaaacaggtggaaatgcacctaacaacctcataactttgtgtgaggtctgccac

SEQ ID NO: 1889 - DNA, 236 bp, unidentified
  misc_feature 1..236: note = Ga0209720_1016953 JGI
  source 1..236: mol_type = other DNA
gtcaactaccccaacctatagaggttggagcttgtaaaagctcaagttgactaccctaagtccttcgaggactacgttatatatgtcataacacctacgggcgtttctcctaactcgtagctctgttgcttaactttaaacaatcctgtgaggtagggatagtgagttaagtgtaaaaagcctatataacattggggaaggagacattactccaaaaggaggtatactttatgtta

SEQ ID NO: 1890 - DNA, 1419 bp, unidentified
  misc_feature 1..1419: note = JGI12150J12686_102082 JGI
  source 1..1419: mol_type = other DNA
atgcagaagttacgcggaagaaatacatacacccccacgagtgctgctcaagcttgcggctctgtggcaggatggttaaacagttctgagagggtaggaacagtgcggtccagcttaaaaactccgcataacaactccgatgagcacttactccaaccagcgggagggcataaagccgatacgctggtatatgtgattaataagaacggaagaccattaatgccgtgtaaacctgcaaaagcgagacatctgctggaagcaggtaaagcagaagttgttcagcggacaccatttaccatacgccttctttgggattgtgaagaaatcacacagaacatcaccctcggcattgacgcagggtacacaacaatcggtttcagtgctgtaaccacagataaagaactaatcgcgggagaactcgaactccgcaacgatgtcaaaagactgcttgagaagcggaaagcatacaggcgcacgcgaagaagccgtaagtggtacagaaaaccgcgattcaacaaccgtggaaagaaaggttggcttgcaccgagcatcaaacacaaactcaatagccatatcaagcttatcgaaaaactgaagaaaatcctaccgatcacgcgaatcatcgtagaggttgcttctttcgacacacagaagatgcagaacccggaaatctctaacatcgaatatcagcaaggtgaactgcagggatatgaggtcagagaatacctgctcgaaaagtggggtaggaaatgcgcttactgcagcaaaaagtacgttccactggagatagagcacatcgtaccgcggtcgagaggtggttcggatcgagtctccaatctcacgatagcatgtcacgagtgcaaccagacagcagaggagttcggacacccgcagatacaggctaaagcagagaagtccttgaaagcaactgcgtttatgaatatcgtgagaaatagaatcgttgatatactgggttgcgatcagacttatggctatatcacgaaacatgaccgcatagaactctatctgaagaaatcacacgcgaatgatgcttttgtgatcgctgacggaaatgatcaggaacgcgctaaccacattcacatcggtaagcaggtaagacgacagaaccgatcattgtttaaagctaacttcttcaaaggaggaaagttaaaaagaaacactgtgaaagaagttaaaggattcaggaggtttgataaagtgaaatacgacgacaaagaatgttttatacacggactgcggagttccgggtacttcgatcttcggacaatcactggagatcgaatcggaacgtctgtgaacagcaagaagctaacgcttctggaacgagcgagaggaattatacaggagatgtgcgcaattcctccccgcgcttgcggacggggtctccttgcacggtga

SEQ ID NO: 1891 - DNA, 255 bp, unidentified
  misc_feature 1..255: note = JGI12150J12686_102082 JGI
  source 1..255: mol_type = other DNA
ccccttgaccctaacgggaccgaggaatgggctttttaagccccttagttgatcaggaggcatagaaatatgcagaagttacgcggaagaaatacatacacccccacgagtgctgctcaagcttgcggctctgtggcaggatggttaaacagttctgagagggtaggaacagtgcggtccagcttaaaaactccgcataacaactccgatgagcacttactccaaccagcgggagggcataaagccgatacgctg

SEQ ID NO: 1892 - DNA, 1320 bp, unidentified
  misc_feature 1..1320: note = Ga0137378_10002753 JGI
  source 1..1320: mol_type = other DNA
atgtcacacgtgtttctggtggacgcccacaagcgcccacttgctccggtacatccggggcgagcacggctcttgctcaaggccggcagggcggcggtcttcaagcgattccccttcaccctcctgctcaaagagcccggagcgcaagccgccggcgagccgctccgtttgaagatcgacccgggaagtcgcaccacgggtctggcgctggtaggagagacgagtggcgaggtggtgtgggcgggggagctcacccatcaaggagagacgatcgtggagcgcttgcgcaaacggcgagccgtgcgccgaggacgcaggcagcggcatacgcgctaccgacaagcgcgcttcgcgaaccgatgcaggtcggaaggctggctcccgccttcccagaggagccgcgtgcaaaacgtggtgacctgggtcgaacggctgcgcaggctgtgtcccatcacggcgctctctgtggagttggtgcgctttgatacgcaagccatgcaggcaccgggcatcgagggcatccagtaccagcaggggacgctggcgggctacgagaccagggaatatgtgctggagaagtgggggcacagatgcgcctattgtgatgcgacgggcgtgcctctggaggtggaacacattcgacccaggagccgtggggggagcagccgcgagagtaatctgacgctctcctgtgtgccgtgtaaccaggccaaggggacgcaggacatccgcgtgtttctggcacatgatccccagcggctcgtgcacattctggcacaggcgaaggcctcgctgcgggatgtggcagtggtcaatgcgacccgctgggcgctctatgaacggttggcagccttcgggctccccgtagagggggggagtggcgggcgcaccaaatacaaccgcagccgccagggcattccgaagacccattggacggatgccgcctgcgtgggcgccagcacccccgaggagttgcggaactggcagaccgtgcgacccttgctgattactgccaccggcaggcaatgccgtcagatgtgcaacatgaataagcgaggctttccgcgtggcaagccaaaggggccgagccgatcacacgggttccgcagcggggatatgttgcgggccgtagtcacgaaaggcgtgcacctgggcacctacgtgggacgtgtggccatcaagtccgatggctactttaaactcacgaccggggccagggtggtggaaggcatccatgcccgctattgcaccccactccatcgtggcgatggctatgggtacgcatgtgggagtccggcagcgcttcctccccaggcctga

SEQ ID NO: 1893 - DNA, 315 bp, unidentified
  misc_feature 1..315: note = Ga0137378_10002753 JGI
  source 1..315: mol_type = other DNA
gtcagcgaccccacggggaaacccgggggcatgttcttgagaaagggtgtgccctgatgctgaccagcccccctgagtgctcttgaggagagagcggccagggaaccgttcgttgggagcgccaaaagtcggaccctgagatggcctttccagtcccaggcgcttcaatcccgctgttaaacaggtgcacggggaagcagagccggtgcagcgggaagacggccgccaacgaaccagggcgaggaaaacatgacccgcgcaagcggaggccccaagcggggcagacaacgaaaggaagcagtaggtatgtcacac

SEQ ID NO: 1894 - DNA, 1296 bp, unidentified
  misc_feature 1..1296: note = SMTZ23_10055571 JGI
  source 1..1296: mol_type = other DNA
atggtttttgttctgagcaaaaccaaaaaaccactaatgccctgccatccagcaagggcacgagaactgctcaagaaaggtcgagcggttgtccacaaggtctatcccttcacgatccgtctcaaggatagggtcgagggggacgtacaaccgatcagggagaaggtagaccccggcgctaagacaacgggtattgctctcgaatcagaagggaagagagttcttttctttgcagagcttaaccacaaaactacgattcatgacaacatgagaaaacgagccaattaccggggtagacgaagaagtgcaaacctcaggtaccgagcaccaagattcaacaatcgcacacggccaaatggatggttgccaccgagtctccaatcaagggttgatgctattacgtcatggactgtgcggttcaagaaactatgcccggtcaccgattgctcggttgagaccgtacgatttgatacgcagaagctccaaaatcctgagatcaatggtgtcgagtaccaacagggagaactattcggatatgaagtgcgggaatacctgttggagaaatggggtcgaaaatgtgcctactgcgggaaagaaaatgtacccctggagatagagcatatcattccgaagtcgaggggtggtacaagtcgagtatcgaacctaacccttgcgtgttacacgtgtaacgagaagaaaggtaataagaccgcagcggaatttgggtatccagaagtccaaaagaaagccaaggttcccctgaaacaggcagctattgtcaatgcaacacgaaatgctctctacagggaactgagtaaactgttcataaaatgggttgaggtatctacaggaggccgaacgaagtacaacaggacaaggctcggattgcccaagacccactacttcgatgctctatgtgttggtaaatcaacaccaacgcagcccggtagtttcaggaacatagattcaacgccggtgctatcaatcacctgtaagggcaagggacaatatcgaagaacgaatgtgaataaatatggttttccgagactatatctcatgcggcagaagatggtcaacggattccagacgggggatatggtgaaaacagtcataccaaaaggaaaatattctggcaggtatcgaggagtcttggccgttaggaaaaccgggtacttcggtttgtatcgtaataagaaattggttgctgagggagtcaaagctcccaataccctattggttcaaagattcgatgggtacacatactctttacagagtcccgattcctcccccacttaa

SEQ ID NO: 1895 - DNA, 306 bp, unidentified
  misc_feature 1..306: note = SMTZ23_10055571 JGI
  source 1..306: mol_type = other DNA
gtcaatgacccccacttaaaagtgggggcttgctctacggggcaagcctcaaattgaccagcgctcagcaccggagccaacgacacggctacgatggtgctacgttagtataaggtacaagacccactccgggatgcttcctcagtcccggacactggaagtttcagcagcagacaaagttaggggtcgtacacgaaacgggctgaaacgatacgccgtatactaacattgccgaggggagatttcaggaaatgtcgatcctgaaacgttaccggcgaaagccgagaaaccaggaggtaaacaatg

SEQ ID NO: 1896 - DNA, 1356 bp, unidentified
  misc_feature 1..1356: note = human gut metagenome genome assembly, contig:NODE_117_length_59318_cov_12.435854, whole genome shotgunsequence WGS
  source 1..1356: mol_type = other DNA
atgtcagttgcagtcattagtaaaacaggcgaaagattgatgccaacaagtgaatacagagcacgtaagctgctcaaatcaggtaaagcaataaaatatagttatcatccgtttaccatacagctcactgaaagaaaaactggaaatattcagccaatagagctttgtatggatacgggatatatacatattggaatatctgtaaagtcagagaagcacgaatatctgacagaacagattgacacattaacagacgaaagaagcaggcataatgcacgccgtatgtataggagccagagacgaaacagaaaaagataccgccagccgcgcttcaacaatagaaagaaagataaaggctggattgccccgtctttggaacacaaaaagaatatacacgttcaggcaatttcacgcatcaacaatgtcatgcctcttacagatattactatggaaatgggaaattttgacactcaggtattaaaagctaaagaggaaggaagaccattaccgcaaggtgtagattatcaacacggtgaacgctacagtatcgcaacgcttcgtgaagcagtttttgcccgtgatggttataaatgtcaatgctgcggcagaacaataaaagatggagcgatactccatgttcatcatattaaatacagaagccagggcggaactaatagtatatcaaatctggctacagtatgtgataaatgtcatacaccgaagaaccataaaccaggtgggaaactatatggctggaagccaaaacttccatcatttaaaggtgcaactttcatgaccacgatacgatggcagctttacaacgaggctaaggctttattccctgatattgatattcacattacatacggagcagcaacaaaagaacggcgccgagagctgaatatcgataaatcacatatcaatgatgcgtttgttatggggcagtttcatccgagacaccgtataaaagcggttctttataagaaaaaacgaaggaataacagatgtcttgagaagttctatgatgcgaagtatattgacagccgcgacggaaagaaacgaagcggtcaggaattatttaacggtaggattaatcgtaatcataagaaggattctgaaaatctgcatcagtatcggttacaaaaagtaaccgcaggaaaaagaactgttaggaaacaacattacagtgtccagcctcacgatatcatcatatacgaaagcagaaagcgtgaaactacaggatgccactgtaatggagcacgggtgatgctactccctgataaaaaatctgtatctattaaaaaaatcaaaatatacagatatgctggcggttattttaaatcaacatttaattaa

SEQ ID NO: 1897 - DNA, 526 bp, unidentified
  misc_feature 1..526: note = human gut metagenome genome assembly, contig:NODE_117_length_59318_cov_12.435854, whole genome shotgunsequence WGS
  source 1..526: mol_type = other DNA
gtcaataacccgcgcccgaggtaaacctcggacggggcttgcaaaagaataagttttcttatttccacttttgtttagccccgttacagtttacggaaggctgttggctgtaaagccttattgatagcgccggggtcacccgtcgttaccacataaggcttacagccttattgattagccttggtagtaaagaagccggccaaaccaggtcaggtaaatctttaactgctacgttaccggtaaaataggcaccgtgggatgctcctcaagtctcacgctctgcggtatgctgttaaacatctcttagggtaggagaagtgcagtatacgctaaactatcggataacattggcgatgaggacaaccgattctgactaggcgccggcttgccggagccgaaaagatagagaacctgtatggactgcttttaaatatcttcggatgtttggaagcggttggtgcagaagacgtaagtcatcccggcttgccgggaaaatataagaataaaaggagggcagcttatgtca

SEQ ID NO: 1898 - DNA, 1362 bp, unidentified
  misc_feature 1..1362: note = human gut metagenome genome assembly, contig:NODE_3680_length_4513_cov_6.120682, whole genome shotgun sequenceWGS
  source 1..1362: mol_type = other DNA
gtgccgccggcaacaaaccccttccaacattggcgaaggatcttaaccggtcgaaagaccgaggtaacaaacttgagagtatttgttttaaacaaacgcggaaagccgctgatgccgtgttcaccggcaaaggcccgcattctgctcaaagagaaaaaagccgtggtgacaaggcgcatgcctttcactatccggttgacaatcgccaccggcgaaaccaagcagccggtgacgctcggcgttgatgccggatacaaacacgttgggctttcagcttgtactgaaaaggctgagctgtatgcatctgaagttgaactccgacaggacatcacggagctgctctctgcgcgcttggcgctgcgtcgcgctcgccgaaaccgccagacgcgttatcgcgccccacgctttgacaatcgcgttcgcagcaaacacaaaggttggcttgctccttcggtcgagaaccgtatcaacgcgcatctttcacgcattgacgcagtacttcgcattttgccgatttcaaaaatagtcatcgaaacggcagcctttgatacgcagcttttaaaggataccaacattgaaggcgcaacctatcaacaaggcgaacagtttggtttttggaatgtacgcgaatacgtgctctttcgagacgggcacgtttgtcagcattgtcacggcaagtccaaagaccctgtactcaatgttcatcatctggagagtagacgtacaggaggcgatgcgccgaacaatctgatcacgctatgcgaaacgtgccacaaagcgctgcatcaaggcaaacttacgctcaaagtaaagcgagggttcacttataaggccgagacctttatgggaattatgcgatggacggtgcaggatcggctcaagacagcctatcccgacattgagattcgcaacacctacggctatctcaccaagcattcgcgtatttcacatgggattgccaagtcccattgcgccgatgcgtattgcatcgccggtcatcttaaggcaaaacgtctggccggttattactatcaaaagcaaacccgtcgacacaatcggcagatccataagctgacgattctgaagggtggcttgagaaagagaaatcaggcagcttacgaaatcaaaggctttcggctttttgacaaagtgaaggttcttggagaagaaggcttcatattcggtcgaagggcttcttactttgatgttcgcaagcttgacggaacacgtatttcagcgggcatcagtagcaaaaagctgactctgctggaaaaacgcaaaacctatttaacagaatacagaaaggaggcggcacttcctcctctgaatgaattcagaggtttccgcgccgatgttctatga

SEQ ID NO: 1899 - DNA, 259 bp, unidentified
  misc_feature 1..259: note = human gut metagenome genome assembly, contig:NODE_3680_length_4513_cov_6.120682, whole genome shotgun sequenceWGS
  source 1..259: mol_type = other DNA
gtcaactagccataccccgctctaaagagcgaggctggataaaagccttggttgactagccttggtgatcttccttttgagaggtgaactccgttggttgggaatgtataggcaccgcgcaatgtcgttcctagttgcgcgctctgcggtcggtggttaaaagttctgagaggtaggagccgtgccgccggcaacaaaccccttccaacattggcgaaggatcttaaccggtcgaaagaccgaggtaacaaacttgaga

SEQ ID NO: 1900 - DNA, 1344 bp, unidentified
  misc_feature 1..1344: note = human gut metagenome genome assembly, contig:NODE_128_length_79994_cov_7.882986, whole genome shotgun sequenceWGS
  source 1..1344: mol_type = other DNA
atgatggtatatgtcttagatgtaaacggccagccactgatgccaacagaaagatgtggctatgtacgcaaaccgctgaagagcaataaagctcaagtcgtaagtggcaatccgtttacaatccaattgctttatgagacggaaaacaatacacaagacattgatctgaaaatcgatgctggttatcagcatattggcatttctgcttgtactgataacaaagaattgttttccggtgaattaaagcttttagaaaaccaatccaaacgattagacgaccggcgagcatatcgtcgcacgcgtcgcaatcgtttgagatatcgcaagccaagatttgataatcgcagaagaccggatcaatggttggcacccagcattcagcataagctggacagccacaaaaaggtcattcgaaagttgatgtgccttcttccgattacaaaaatctatgtggaaacagcaaatttcgatattcaagcattaaagaaaccaagcatatccggtgagaaatatcaaaagggaaaaatgtacgacttccgaaatttgcgtgagtacactttctacagagacggatacacttgccagatctgtggtaaaaatgctttccgagatggtgcagtgcttcgcatgcatcatatcggatattggaaaaacgatcattcaaatacgcctgcaaatacattaacgctatgtagcaagtgtcatacgtcacgtaatcatcaaaagaggcagattttgtatggtctgcaaccaaagcaaaagtctttcaaaccggagacatttatgtctacggtcagacgaatgctaatcactcagctgcgtgatgaatacacaattccggttgtagagacgtttggctatttgacaaaatccaaacggatagatttgcagctggacaaaacacattacaacgatgcgtattgtatcggcgacaaacagccaaagcaccggtgtaaaccggtgttctggcaagagaagcgtaagaataatcgttgtcttgtaaagttctacgatgccaaatatgtggatgcaaggacgggtcaaaaggctaccggtaaagaattatttaacggtcgaacaactcgcaacaaaaacctgaatggtgagaacttgcatccatacagacagcaaaagatttccaaaggcaggatgtctgtcagaagacaacgatatccgtaccaaccgcatgatacggtgctttggcgtaacagaacatttgaagtggttggcgcacaaaaccgtggcgcttacgtatctatcaaaaataacgatttcaaaaaagttgtaagtaccaagcgattacagccattcaaatacgcgaaaacagtttataatacagcatag

SEQ ID NO: 1901 - DNA, 326 bp, unidentified
  misc_feature 1..326: note = human gut metagenome genome assembly, contig:NODE_128_length_79994_cov_7.882986, whole genome shotgun sequenceWGS
  source 1..326: mol_type = other DNA
gtcaattaccccagactgaccgtaaaacagtcagtcggggcttgtgagtaattacaagtccatagttgattagtctaagcacttcgagtgctacgttatgttttaatggcagcttcggctgccaaataggtaccaaggggtgctccacaagccccttgcactacggtgtattgttaaaaatctttgatggggtcgaagacgtgcagtacacaacaaacaattcataacattgacgatgtgggtttaccacagaccgggcctttggctccgtctgcgcgctggtcattccagaccaaatttattgaaaggagccatatcttatgatg

SEQ ID NO: 1902 - DNA, 759 bp, unidentified
  misc_feature 1..759: note = human gut metagenome genome assembly, contig:NODE_1355_length_19542_cov_13.053583, whole genome shotgunsequence WGS
  source 1..759: mol_type = other DNA
atgccctgttcaccggcaaaagcgcgccttctgcttaaagagaagaaagctattgtgaagaggcgaacgcctttcactattcagctgacgattgcaacgggtgagtccaaacagccggtgactctgggtgttgatgccgggtacaaacatgtcggcctttccgcatcaacggaaaaggctgagctttatgcatcagaagtcgaactccgtcaggacgtctctgatctgctctctgctcgtcgtgcgttacggcagtcccgccgtaaccgcaaaacgcgctaccgcgcgccgagattcaacaaccgtctccgcaccaagcgcaaaggctggcttgctccgtcggttgaaaaccgaatcaacgcgcacttgtcgcgcatagaagcggttcttcgactgctgccggtcacaaagatcaccgtggaaacggcgtctttcgacttgcagctgctgaagaatcccgacatttcagggaaagaataccaggagggagaacagctcgacttctggaacatccgcgagtatgttctttgcagagacgggcatgtttgccagcattgttacggcagatcaaaagacccggtgcttaatgttcatcatttggaaagcagacgtacgggcggagattcacccggcaacctgattacgctctgtgagacgtgccataaggcccttcatcgcagtgaaatcacgctgaaggcaaagcgcggacaatcgttccgcgctttgccttcatgggaattatgcgctggaaggtgctga

SEQ ID NO: 1903 - DNA, 247 bp, unidentified
  misc_feature 1..247: note = human gut metagenome genome assembly, contig:NODE_1355_length_19542_cov_13.053583, whole genome shotgunsequence WGS
  source 1..247: mol_type = other DNA
gtcaactacctcggcctaaaggccgcggcttgaaaaagcctctagttgactagcctcaggccgtcatttggcggactatgttggtcgggattttataggcaccgcgggatgcagatcctagtcccgcgctctgcggccgatggttaaaagctctgagaggtaggagcggtgctgtcggcttgaaaccccttccaacattggcgaaggatcacaaccggtcgaaagaccgaggagataaaacttgaga

SEQ ID NO: 1904 - DNA, 675 bp, Moorena sp.
  source 1..675: mol_type = other DNA
atgaaaagaaaggagtacagaagaacaagaagataccgcaaaagaagatatagaaaaccacggtttctaaatagacgcaggcgtgaagattggcttgctccaaatatacaatggaaagttaatgcacatataaaaattattaacttcatagcaaagatactaccagtcaaaaaagttgtggttgaaatagcaccgtttgatacacacaaaatagttaatcctgatgttaaaggtaaagaatatcaagaaggtcagcaaaaaggtttttgggatgttagagagtactgtttgtggcgtgcaggatacaaatctgagacatcaggtaaaaaaggtatattggaagtacatcacgtcataccaagaagccaaggcggaactgataatccttccaatttaatagttttaactgcagaagaccacaaagctattcatgaagataaacttaaaatttcaagtatcagacttaagaaaattaaaatcctaaaagatgcgagtcatgtttcaacaatagtctggttcattgtgaaccacttaaaacaaaaatatgatgttggtataacatatggtagtgctacaaaatctaaaagaatagaaataggattggagaaaacacataggaacgatgcttttgtcatttctggaggaaataattttattaaaaaattagaccgttga

SEQ ID NO: 1905 - DNA, 254 bp, Moorena sp.
  source 1..254: mol_type = other DNA
gtcaattaccgccaacctatagaggtggtggcttgtaaaagccatagttgactaccctcagccaggggaagttaatcttcctatcgggctacgttagtctggtcataacaccctgggatgctgctcaagttccaggctctgttgtctgtcattaaacaatcctgagtggtagggatagtgcggcagacatggcaagccagtctaacattggggatgagcacctaactccaaataaatgaggcttacctcatatg

SEQ ID NO: 1906 - DNA, 1233 bp, unidentified
  misc_feature 1..1233: note = JGI25616J43925_10007359
  source 1..1233: mol_type = other DNA
atgatgtgtgtgtatgtacgtaatcacgatggggcggctctcatgccttgcacaccagccaaagcacggaaattgttacgagcaggcagagcgaaggtcgtagcctaccgaccctttaccattcaacttacctggcagtgcgaggggaaggtccaggagatcacctgtgggattgataagggcagcagcattacaggcgtagcttgtgtaggcaatggcaccgtgttgctcgcagcagagatccatcatcgtcgcgatgtcaaagacaaaatggaggatcggcgtgaccgacgcaagagtcgtcgagcacgcctctggtatcgcccggcccgctttctcaatcgtgcgtcgagtaagcgcagtgggcgcttgccgccctcgatcaaaaccaacgtcgaagaggtgatccgggtcgtccggcagctccccttacccatcagcgccctggtgattgaggatgtccaggtggacatcgcaagactcaacaaccccaccttacaggggccacagtatcaagacccgacgcggctggatgagaatctgcgcattgcctgtctgatgcgcgacgggtatgcctgccagcactgcgggaaacgggggacgcgtctggaggcccaccacctgatctttcgtcaaaacggaggcaaggatacgcttgccaatttgctgaccttgtgtgagggctgtcaccaccggctgcacgaaggaaaaattaccctgaaggcgacgggagtgggcgggcacctggatcagatagcccaacgcactatgcaaggaaaaacccatctctatgcagcactgagcgcgttcgcacctctgacaaccgtgtttggctatgaaacatctgcataccggaaatatcgtaatttgccgaaaacccatatcattgatgcactgtgtattgccacgcttacgaccggcgaagtggttgctccgccagagcgcaatatctaccacatcagctttcgccccaggcaaacgcgcaagcggtatcacagcttgccgcagaaagggaaaggccgcgtgaaatatcaggtcaatggcgaactgcaaggctttcgcaaaggcgatttggtgctggtcaaggagaagtatatgaagctggtcaattccatttattcgactggctatctggcctttccgcgcgtcaagggggaacccaatgctgcccgtccccaagactgtcgaatcttagaacgagagggaactgtgttgtggaaaaatgtggaataa

SEQ ID NO: 1907 - DNA, 245 bp, unidentified
  misc_feature 1..245: note = JGI25616J43925_10007359
  source 1..245: mol_type = other DNA
gatagagatatagttgctaaaaatatggcgaaatcttccgccgtattcatggaactaccagcgggcctcttcggaggcagcagttcgatgagcgatcacaccttgggatgtttgctccagtctcaagctctgtgggtatgcattaagggtagcggaaacgtgaacgtgtgcctaccgtaaaaacgtcgtcgaacagtcgcgaggagcaattcactccgacaggagggcttatagccatgatgtgt

SEQ ID NO: 1908 - DNA, 966 bp, unidentified
  misc_feature 1..966: note = Bacillus sp. AFS014408
  source 1..966: mol_type = other DNA
atgcgtgtatttgtcaagaatgtaagaggagaaccgctcatgccttgcagtaatcgcaaggcacggcttcttctcaaacaaggaaaagcaaaaattgtgaagtacacaccatttacgattcaactcctatatgccaccggtgaaacggtgcaacccgttacaattggcgttgatagcggagcaaagcatatcggtattgcgattactactgcagataaagtgctagcaaaaggaaccacccagctgcgtcaagacgtcaaagaaaatcttatactaagagctacattacgcagaggtagaagacaacgaaaaacaagatatcgagaagtacgttttctcaaccgaaaaaagaaagaaggatggttaccgccatcgattcaaagcagagtggataaccaaattcattggattgaaacatttcgctcgttattaccatctccaaaagtgattgttgaagtaggggaatttgatgcacaaaagctaaaaaaccccaatatacaaggaacagaatatcaacaaggagatacttttggcttttggaatacgagatactacgtatttgcgagagacaactacacctgtcaaatttgtaagaaaaaaggtggtattttgcatacgcatcatatcattgaacgatgcaatggcggttcgaatatggcagataatcttgtaaccgtgcatgatgaatgtcatcaaaaacttcatcaagggaacatcaaacacagtttcaagaaagtcaaacaatataaagaaactgcttttatgaatatattgcggctgcaaatcatgaatcgtttagattgtgacattacgtatggtagctacaccacaccaaagagaaaagaacttggattagccaaaacacatgcaaatgatgccattgcgattaccaatcccatacaactacaagaatacgatcaaagcggtgaattttgcatcaagcaatttagaaagaaaaaacgctcc

SEQ ID NO: 1909 - DNA, 265 bp, unidentified; identical to SEQ ID NO: 573
  misc_feature 1..265: note = Bacillus sp. AFS014408
  source 1..265: mol_type = other DNA

SEQ ID NO: 1910 - DNA, 1380 bp, Paenibacillus wynnii
  source 1..1380: mol_type = other DNA
atgcgtgtattcgtcaaaaacaaaagaggagaggcactcatgccctgctcggtaagaaaagctaggcttttacttaagcaacaaaaagcaataattgtcggttatcaaccgtttgcgattcaattgactatagccacaggcgagactgttcaagaacttcacgtcggtgtcgatactggcgtaaaacacctcggcatcgctgtcatcagcgaagataaaattttcgctcatggcgaaattgaattccgtcaagatgttagttcgctgctcgaaactcgcaaaacgtatcgccgtagccgtagaaatcgaaacacgcgctacagacgctgcaaatacaaatttaataccaaacgtgtttttgataagaaaaagaagaagtggataaaaccctccatttcgctcacgtccaaacgtccagaaggctggttaccgccttcgcttgaaaaccgcatccagcatacctttcggtgggtggacacctttacgaagctgttaccacatccaaagcttcatcttgaagtcgggaaatttgatgtgcagaaaatgatgaatcctttgatccaaggcaaagaatatcaagaaggagaaaccttcagctaccacgaggttcgctattacgtgtttgctcgggaccactatacgtgccaagtctgcaaaaagaaaaacaaaatcctaaacacccaccatatcatctaccgttcgcataaaggtagtgatcgcgccgataatctcataacggtgtgtaccgattgccatacgcatgagaatcatcaagaaggtgcgattttgtggacgtggatgatggctaaaaagaaagtgaagcaatataaggaaccgccctttatgcatgtcttgcgcaaacgaatcttttcccgttaccccgaagcacgcattacgtatgggagtgaaacgactccccaccggaaaacattggcgctcgaaaaaagccatcaaaatgatgcgatcgcgatcataggcatatctaaaatcaatgaacacccttgctcgcacttccgcatcgtacaatttcgaaaaaagaaacgttcactgcatgaagcaacggctcgaaaaggtcgaaaagagcccaattgtttgcaaaaaagaaacgccaaaaacacgaaagaatccttaggattccttctgaatgatcaagtttgcatccatggacagcgtggttttattacagggttcacaggaccatacgtccaaacaattgaaggaaagtatattacactgccaggaaaatcgtacaaacaagtgcctttgagagaactgcgccgaatggcacatcacaacaactggcagtatacgatccaaattgagacacgccctattcatgccccacctattaaggacggggaattacgggcaatttgttaa

SEQ ID NO: 1911 - DNA, 243 bp, Paenibacillus wynnii
  source 1..243: mol_type = other DNA
gtcaactccccaccacttaaacggtaaagcgttatgaagtgggggcttgaaaaagccctagttgtctagccttagctttaagctacgttgggcatgtcaatacggcttggtgtaattccctagcaccttttgtcgttcaggcgctgtaacagttctgttgggtcggaacggtcaacctgaggcacgaagcatgtccaacattggcgaagggaaacaaactctaaggagggacgaaacatgcgt

SEQ ID NO: 1912 - DNA, 1281 bp, unidentified
  misc_feature 1..1281: note = human gut metagenome genome assembly, contig:NODE_5646_length_3670_cov_1.870263, whole genome shotgun sequenceWGS
  source 1..1281: mol_type = other DNA
ttgagagtatttgttttaaacaaacgtgggcaaccgctgatgccgtgctcaccggcaaaagcaaggttacttctcaaagagagaaaagcaatcgtcaaaaggcgcacgccttttacgattcaactcacgatcgcaacgggcgaagcaaagcagcctgtaatgcttggcgtggattccggctacaagcacattggtctttcggccacaactgaaaaggccgaactctatgcttcggaagtcgaactgcgtcaagacattacggatcttttgtctgcgcgtcttgctttgcgccgctctcgccgcagccgcaagacgcgctaccgtgcgcctcgtttcgacaaccgggtggcaagcaagcgcgaaggctggctagctccttcggtggaaaaccgcattgcggcgcacatgtcgcgcgtagaagcggtcatgcaggtcttgccggtgactgccataaccgtcgaaacagcggcgtttgatacgcaactgctgaagaacccggacattatcggagcggcgtaccaacaaggcgaacagctcggattttggaacgtgcgggaatacgtgcttttccgggacggacacgtttgtcagcaccgccgcgggaagtccaaagatccgatactcaatgttcaccacattgagagccgtcgaaccgggggcgatgcgccgaacaatctcatcacgctgtgtgagacctgtcacaaggcattgcaccgcggcgagatcaagctcaaagtcaagcgaggcaagtcgttcaaagcggaaaccttcatgggaatcatgcgttggacgttctttgaacgtttgaaaaaggctcacccagaactcaatgttcgcaacacctacggttatctcacaaagcacaagcgcatctcatacgggatcgcaaagagccactgtgcagacgcgtactgcattgcggacaaccttggtgcaaagcgcctggagggctttttctttcaaaagcaaacccgaaagcacaatcggcagattcacaagctgtcaattctgaaaggcggattgagaaagaagaaccaggcaccctacgaagtcaaaggcttccggctttttgacaaagtgatgtgcaaaggcgaagaagccttcatctttgggcgaaggacttcgggaagttttgatgtgcgccgtcttgacggtactcggatttccgccggtatcaactacaaaaaattgaggctgctggaacctcgaactacctacttaacagaatttagaaaggaggcggcgcttcctcccctgcatgaatgcaggggtttccgcgcc

SEQ ID NO: 1913 - DNA, 249 bp, unidentified
  misc_feature 1..249: note = human gut metagenome genome assembly, contig:NODE_5646_length_3670_cov_1.870263, whole genome shotgun sequenceWGS
  source 1..249: mol_type = other DNA
gtcaacaacccctgcctaaaggcagaggcttgataaaagccttggttgactagcctcagaccgcccaaaaggcggactacgttggttgggaatgcataggcaccgcgggatgtcaatcctagtcccgcgctctgcggttcgcggttaaaagctctgagaggtaggagcggtgccgcgaacaggtaaaccccttccaacattggcgaaggatttcaaccggtcgcaagaccgaggagacaaatcttgaga

SEQ ID NO: 1914 - DNA, 687 bp, Anoxybacillus flavithermus
  misc_feature 230..329: note = MISC_FEATURE - Any "n" represents any nucleotide
  source 1..687: mol_type = other DNA
atggtcgaggagaatatgacctgctttatgcagaggaaaggggagaaccctatggtttttgtgttagacacaaacaaacgtccgcttgctccttgtcacgaagcagttgcaagaaagctgttgaaacaagggaaggcggcgatttacaggcgatttccatttaccatcatcttgaaaaaatcagtagacgaatcagaaattaaagcaacatatcggctaaaaatcgactnnnnnnnnnnnnnnnnnnnnnnnnnnnnnnnnnnnnnnnnnnnnnnnnnnnnnnnnnnnnnnnnnnnnnnnnnnnnnnnnnnnnnnnnnnnnnnnnnnnncgaaagacacaacaaatcacttatatttacaaacaaaagaagtgtatttatcaaggcaaaagggcgtggtagtcgctctcgtacaaacctagatagatatggcttcccaagaggttatcttgcaagacaaaaattcttctttggttttcaaacaggggacatggttaaggctgttgtcccaagagggaaatatcaaggcgtttggtttggcgaagtcgcatgtagaaagactggaagtttcgatattaaaggcaaggacggaaagcgtatcgcacaaggaataaattatagatatgtccaagtcattcagcgatttgacggatatgcttatggaaagggggtggcggaacttgcgtaa

SEQ ID NO: 1915 - DNA, 244 bp, Anoxybacillus flavithermus
  source 1..244: mol_type = other DNA
gtcaacaacccaatgactaaaatcatgggcttgtaagccccatgttgatcagaccaaggcttgaaacagagcctacgttatagatgtcatgacacgttcgggtgcttctccatcccgttcctctgtcgtgcaaggttaaacaagcgtggtgggtagcgctagtgtcttgcacataacaagcatctataacatggtcgaggagaatatgacctgctttatgcagaggaaaggggagaaccctatg

SEQ ID NO: 1916 - DNA, 1410 bp, unidentified
  misc_feature 1..1410: note = Ga0121719_100007 JGI
  source 1..1410: mol_type = other DNA
atgccccgtaaagtggatgtaaacaacggttatattttagtggttgaccagcatggtcagccgttgatgccgtgtttgtcgtcacgagctaaaaaattgcgtgaccagaaacgcgctcgaatttacagcatgcaaccgttcaccattcagatattggaccgatcggttaatagcagtgtcttacaagagagcgaattgaaattggatccgggcagcaaaaccaccgggatggccttgtgtgtcaaaggggatatccgagggtggttcgtggccatggccatccatattgaacaccgaagtcatcatatccgtgatgcgttaatctcgcgaagtcaaatccgacgttcgcgacgcaaccgcaaaacccgttaccgcccaccacggttcaaaaatcgttcaagaaaagccagaacagcacaaggttacaatgtatggttccccccgtccttggtgtcacgaattgaaaacattgtcaatctggtaatcaagtttggcaaatatttccccgtaacacagattgcgggagagtttaacaagtttgacacgcacaaaatgcataatcctgaggtcaatggtattgaatatcaacgcggcacattgtatggggttgaagtgcgagaatatctgttgcaaaagtaccaatatacctgtgtgtactgtcagaagtgtgcatttcaaaataataaatccacgggtttaaaattggaaattgatcacgtggtgccccgttccaaaggcggcagtgatcaagtgaacaatttggtgttggcgtgtcacagttgcaaccaaaacaaaggcaatcaatccctccaagaatttctcaaaagaaaaccgtctgtgctcaagcgtattcaagagagtttggggaaaccattgaacttacaagacgcagctcagatgaacaccatgcgcaaagagttgtatcaggtgttgaaaaaacggaccgggttgcctgtgaaaacctatacagcgtctcaaaccaagttcaaccgcgtgcagcagaaacaccacaaagaccattggattgatgcagcctgtgtaggtgagagcggaaaccaggttaatattcagcacatctctcatattattgtttggaaagcagtggggcgcggcaatcgtcagatgtgcttaatggatcgctatgggtttccccgaaccaaagcaaaaacagtcaagcgctacatcacgtccatgggtcaaggtttccaaaccggtgatatagttcgacttaagcagccttcggggaaataccaaggaacacatatcggtactgtttcgatccgtgccagaggtcaacttgatatcaccacacaaaacgggcgaaaaatcacatcccattggaaaaattttcgaataatctcccggctcaacggctatcacgttaacccaaaacgagtatcttatggttga

SEQ ID NO: 1917 - DNA, 196 bp, unidentified
  misc_feature 1..196: note = Ga0121719_100007 JGI
  source 1..196: mol_type = other DNA
ctcaaccagcagatatgttgaataaaaaaggagggaaattaaaacaacatatcaacgttatacatgaatatataggtacctgtctgtgcttcaccagcaagcagctctacggcccacagttaaacagaatttcctcatgtggaaacagttgtatgcgtcgacaatgcttttgtattggtaaaccaagacaacgcgt

SEQ ID NO: 1918 - DNA, 1254 bp, unidentified
  misc_feature 1..1254: note = Ga0307928_10003230 JGI
  source 1..1254: mol_type = other DNA
atgcaaaaagtatatgtacaaaacaaggatggagaatctttaatgcctactgaaaggtatggtgcagtaaggagatggcttagagacaacaaagcaactgttgtaaacctaactccttttacaatcaaattaaactttgattgtgagaacaacacacaagaagtagttgtaggtttagatactggtgcagttaatattggttgttcagcagtaaacaacaatgggtgtttgtatgcttccgaaacaaaactaagaacagacatacataagaaaatgcagagaagagttatgtacaggaaaactagaagagttagaaaattgagatatagacagccaagatttcataataggacaagacctaaaggctggctgccgcccagcctaaaaagtaagttggactcaactgttaaggtaataaggcaattagcagagatcctaccaataagtaaggtgagagttgagattgctaagtttgacacgcagaaattgcagaacccagagattcaaggtaaagggtatcagaaaggggttactgaaggatatgataatgttcgggcttatgtgtttgagagggataagtatacctgccaaatatgtaagaaacgagaaggaatcttgcaaactcaccatatcatacaaagaaaagatgaaggaagtaatagacctgataatcttgccactgtccacaagagttgtcattctgattttcacaaaggattaattcaacacaagtttagaaaaccaaaggcatataagatgcaatcccaggtaacaatcttaaaagatttcatcgttagtgaactaaagaaaaacttcaaagttgaagttactttcggtcatataacaaagagaaataggatgagattaaacttgccaaaatctcattgttttgatgcagttgcaatatgtaatcctaaaaagattgaaaggctaactcatatattcaaaaggaaatgtataactcaaagaaggtatcagatgactaaaggcataagaagtgagaagaagttgcctaaaggagaattgtttgggttcaggcaatgggataaggttaagattaataatcgggttggatttatcaaaggtaaaagaagttcaggattttttgacgtttgtgatattgatggaaacaacatatcacattcaattaaatacacaaacctacaaagattatgtgggaataatataatggaggtaagcgtttctcctcccacgactaaagtcatgggtatccgaaatgcaaaagttttatga

SEQ ID NO: 1919 - DNA, 267 bp, unidentified
  misc_feature 1..267: note = Ga0307928_10003230 JGI
  source 1..267: mol_type = other DNA
gtaacacattcccaccctctaaagaggggggcttttaggtaactaagcctgtgttaccagacttagcaaaggaatttgctacgttatttgagatgtagaaacccaacaatttgctcagttgttggctctttcgtggcactgtaaaagtcttgagggattcgagacagtcaaccacattgcgaagctcggataacattgttgagagcaacataacagtttgaaggaactggcttacagcaaaaatccttcataaacaaaatgcaaaaa

SEQ ID NO: 1920 - DNA, 267 bp, Bacillus selenitireducens; identical to SEQ ID NO: 1919
  source 1..267: mol_type = other DNA

SEQ ID NO: 1921 - DNA, 235 bp, Bacillus selenitireducens
  source 1..235: mol_type = other DNA
gtcaacaacccaacgactaaagtcgtgggcttgtaaaagcccctgttgactagcctaagtctttcgaggactacgttggatcggtcaagacaccttacggtgcggattctagctgtaagccctgtcgcttgtgattaaaagtccgaacgggttgtgggcggtgttgcaagcgtaaaagcctttccaacattggcgaagaatacctgactcctgaaaggaggtacacgttatgttc

SEQ ID NO: 1922 - DNA, 1311 bp, unidentified
  misc_feature 1..1311: note = Ga0393278_0005903 JGI
  source 1..1311: mol_type = other DNA
atgttagtctttgttctgaataagtatggaaagccacttatgccttgtgaaccaagcgaggcaagaaggcttcttcgagatggtaaagcaaaagttaagagccggataccatttacgattaaattactttatggctcttctggttacaaacaacaaatttcattaaaagtagattctggttctaaggttgtaggatgtgcagcagtaagaagtgatggggaaacattatatgcaagtgaggtggaaactagaaaagatattcataaaaggatgacgcgacgttcttcttatagaagaactagaagaggtaggaaaacgtgttatcgtcaagcaagatttagtaatcgttgtagatcaaaaggttggcttaccccaacattaagatctaaaattcaaactcatttgaaagaaattaattatgtaaaatcaattttaccaataagtgaattgattattgaaacggcatcttttgatattcataaaattataaatcccgaagtaaatggaattgggtatcaacaaggtcaacaaaaaaattattataatgtaaaagcatttgtatttcatagagacaaatatgtttgtcaaaaatgtaaaaacaaaaaaaataatgtaaaattaaatgttcatcatattatatttcgctctgataatggaacaaattctccggataatttaattacattatgtgaaacctgtcatgataaaatacattctcatattgatgcaaaaaaagaatctttaaaattacaaaagaaaagaaaaattaatacaaccgatgctacacaagttttaataatttgttcttatttaaaaaagcatctgcaattcaaagaagtttttggttatgaaactaaatttaatagagaaacaattggattacccaaagcgcattttgtagatgctatgtgtattggattgactgatggtgaggttgtcaaaatgccaacttatgtttttaaaaaaattagtattaacaaaggagattatcaaagaaccaaaggaatcagatcagaattggaaatcccaatgggaaaaataatgggatttaaaaaactggatagggttaagtattttaaaactacagcttttgttaaaggtagaatgtcaacaggttatgcaattttaatagacatttatggaaatgaattaaattttggacatattccaaaacttgattctatgaaaagatttggagctaggaaaacatgtcttacaaatcaaattttcatagaaagtttcacatcaaatatcatattatattctgttgtaaatatagaaaaaacatcttcaaagaaaaaaaaattatag

SEQ ID NO: 1923 - DNA, 253 bp, unidentified
  misc_feature 1..253: note = Ga0393278_0005903 JGI
  source 1..253: mol_type = other DNA
tgaagcctcccctagactaaagatctaggggcttccaaagaaaggagaaagacaagggaagctacttcaccagaacaccaacagagaggatctaaaatgttggtaaacgatagggtagaatatataggtacttcagaatgcctactcagttctgaactctacggatgtaatttaaaagtgacgagaggagttgcggtgattacattttataaacctacccatatccgttcgagagtaagtcgtgttgaaatta

SEQ ID NO: 1924 - DNA, 1401 bp, unidentified
  misc_feature 1..1401: note = Ga0209719_1005600 JGI
  source 1..1401: mol_type = other DNA
atgcagaagttatcagagagacaattaattaacacacctacgagtgcttcactagctcgtagctctgtggttccgtctttaaacagagaggaaactctcagtgagcggagcttctcgacctctgataacaatcccgaagtgaacaacgcccacatacaggcggtcttaaagacaaatgtgtatgtattagcagtagatggcaaaccattaatgccatgttcaagagcgaaagctagaaagttattaaagagcaacaaagctacaattgttaaacataatccattcactataaaactaacttttgaatgtgaaaaccaaattcagtctattacattaggagtagatactggatatcaacatataggattatctgctaaatcagaaaaggcagagtattggtcttcagaagttgtattgcgaaacatttctcctttattaacagaaaagaaaatgtatcgtcgcggaagacgcaataaactgtggtatagaaaaccaagattcttgaatagaaaacgtaaaaaaggatggttacctccaagtattgattaccgcataaattctcatatcaaaatcattgagaaagtatgttctttgttaccaattacttccattatagttgaagtagcaaactttgacatacagaaactcaagaatcttgaaataaaaggggtaggttatcaacagggagatctatatggatatgaaaatataaaatcgtatttaatcgaacgcgaacacgccagatgtcaactatgccatgaaagatcaacacgtactaattcattcagagtgcaccatataatacaaaaaagtaaaggtggcacggacaaacctgacaatcttgctttgcttcacgaaaaatgtcatactaaattacacaaagagaatttaggacacctattaaccaagaacaaacaatacaaagcagaaacctttatgtcaattatgaggaatacgcttgtaactgaactaagaaatacgcatacggtaatggaaacctttggtcatattacaaagatgagaagaaacacattgaacattgaaaagtctcatattaatgatgcttttgtgatagccaagggcagtaaccaagtccgttctgcgcctctgactataattcagaaacggcataacaataggtgtcttcaattgaacaggaagggcttcaaaccttcagttagacaccagagatatccctaccaacccaaagacgtagttatgattcaaggtgtctattatgatgttactgggacttttaacaaaggttcttggatacgggtaacaaaagcaggaacagtgttcaacttttctacaaagaaggttgaaagacattatgtaactaacggttgggcaattcatccacaccctgaaggatgtggtcttcttgccccacagggataa

SEQ ID NO: 1925 - DNA, 259 bp, unidentified
  misc_feature 1..259: note = Ga0209719_1005600 JGI
  source 1..259: mol_type = other DNA
gtcaactaccacgtcctaaagggcatggcttgaacggtgacgttcgacgcaagagttgattagggagcttaggtgaaaatctatgcagaagttatcagagagacaattaattaacacacctacgagtgcttcactagctcgtagctctgtggttccgtctttaaacagagaggaaactctcagtgagcggagcttctcgacctctgataacaatcccgaagtgaacaacgcccacatacaggcggtcttaaagacaaat

SEQ ID NO: 1926 - DNA, 1035 bp, unidentified
  misc_feature 1..1035: note = Ga0394882_0003342 JGI
  source 1..1035: mol_type = other DNA
ttgggttacgacaccctgggatgcgtagctagtcccctgccctgtcatctgcaattaaacagttctaaggtcactggagcagtgttgcaggtcgaacaagcccagataacaaggtcgaagctaacgttacgagcaatcagaaaggacgcaacaatgtctaatttcgtttttgtactcgacaccaatcgcaaaccgctctcaccctgcaaaccaggggtagcgagatctttgctaaatgctggcaaggcggcggtattccgtcgatttccgttcacgattattttgcacaaggaggtagaggcaacgcctgaacctatcgaacttaagttagatcccggttctaaaacaactggaatcgctctaaaacaaggcaacaaaatcattgttggcgcagagctaacccatcgggggcacgccatcaaagccagtcttgattctcgtcggtcattgcgccgggggagacgttctagacatactcgctatcgtcaagcacggttcctgaatcgcacccgtcccgatggttggttagccccaagtctgaagcatcgggtagaaacaacgttgacctggtttgagcgattctgcaaagttgcaccgattggctcaattgttcaagaactggtacggttcgacctacaacagaggtcgaaccctgaaatctcaggcgttgaatatcagcagggcgaattgcaaggttacgaggtgcgcgagtacctgctgaacaaatgggatcggaagtgtgcttactgtgctaaagcaacggggcatggtactcggcaaatgtgtcgcaccgataagtatgggttcccttctcggtatgcgcctcggctcaagtttgttcaaggctttcagacaggcgacattgtgaaagcagttgtcaccaccggcaagaaggtcggtgaatacgtcggacgagttgcagtccgatcagtcggttcgttcaacatctcaacatctcaaggattagtgcaaggcatcaatcacaagtactgcaaatcaattcaacgaaaggatggctatagctatggcttttga

SEQ ID NO: 1927 - DNA, 270 bp, unidentified
  misc_feature 1..270: note = Ga0394882_0003342 JGI
  source 1..270: mol_type = other DNA
gtcactaacccccgactaaagttcgggggcttgcagactgcccgacgctaacgcgcgggacttgcaagccgtagtgaccagaccacccgaaagggtagccgttatttgggttacgacaccctgggatgcgtagctagtcccctgccctgtcatctgcaattaaacagttctaaggtcactggagcagtgttgcaggtcgaacaagcccagataacaaggtcgaagctaacgttacgagcaatcagaaaggacgcaacaatgtctaatttc

SEQ ID NO: 1928 - DNA, 1347 bp, unidentified
  misc_feature 1..1347: note = Ga0334896_1003582 JGI
  source 1..1347: mol_type = other DNA
ttggtatttgtgctaagtaaaaacaaaaaaccacttaatccttgtaataatgcagtagccagaaagctactaaaacaagggaaagcagttattcataagaaatatccttttactattaggcttaaatatataattaatgagcctaagttaaaggaatacactttaaaattagatccaggagctaagattactggcgtagccattgtagaaaataagcctaaccatgctaaagtagtttttctagctaatttagagcatagacaaaatattaaatctatattagatgatagaagagcatttagaaggactaggcgaaatagaaaaactagatatagaaagccaagattttcaaatcgaacaaggactgagggttggctaccaccttctattcagtcaatagtcggtaatattgagtcttggactaaaaagataaagaaattatgcaatatcacagcgatagctgttgaaacagtacgctttgacactcaattaatggacaatcctaatattgagggtgttgaatatcaacaaggtacgcttttagggtacgagcttcgtgagtacctattatataaatatgggcatgagtgtcaatattgcaaaggcgaatcagaagacagcgttcttaatatggaacatatgatttctaaggctaatggaggtagtaatagagtatctaatttaactttgtcctgtcggacttgtaatgaggataaaggtccacttaatttatctaattggttagatattttaaaaacacaatctaagacaaagttaaataaagagagaattaaaaacatagaagttatccttaaaaaaggacttcctaagtcctttaaagatgctgctaaggttaattcatcaagaaaagctacctatagagtgttaagtaattatacttcagatttagaagtatcatcagggggcaggactaaatttaatagaactacttcaaatttacctaaaactcactattttgatgcgctatgcgtagggaagaatacttctgatagttttacattcccaaaagcattgaaagtgctaaatattaaagctataggcagaggttcaagaagtcgtactaacttaaataaatatggcttccctagaagctacttaccaagacaaaagtatttcttcggtttccaaactggagatttagtaaaagctgaaatcccaaatggcaagtatcaaggcgtgtattatggctctgtagcttgtcgtagtaaaggtagctttgacattaaaactactgatgggaagagaataagcactaactacaaatacttttcattaatacaaagacttgatggttacaactatggtgttgaggatattgctctttaa

SEQ ID NO: 1929 - DNA, 267 bp, unidentified
  misc_feature 1..267: note = Ga0334896_1003582 JGI
  source 1..267: mol_type = other DNA
gtcaacttctccacgcttaaaagcgggagctttttgtaaaagaagctcatagttgaccagtctaagtctttaatgactatgttatttaggttatgacaccatagggtacttctctagctctatgcaactgtcgattagtcttaaacaactcctgcggagagaagagtagtgtgctaatcttaaaaagcctttataaccttgacgaagagagactgtctttgagacagcgttacctacattttgtagaggaaggagtttttacctttg

SEQ ID NO: 1930 - DNA, 1386 bp, unidentified
  misc_feature 1..1386: note = Ga0101770_1016828 JGI
  misc_feature 434: note = MISC_FEATURE - Any "n" represents any nucleotide
  misc_feature 436: note = MISC_FEATURE - Any "n" represents any nucleotide
  misc_feature 438: note = MISC_FEATURE - Any "n" represents any nucleotide
  misc_feature 440: note = MISC_FEATURE - Any "n" represents any nucleotide
  misc_feature 445: note = MISC_FEATURE - Any "n" represents any nucleotide
  misc_feature 816: note = MISC_FEATURE - Any "n" represents any nucleotide
  misc_feature 825: note = MISC_FEATURE - Any "n" represents any nucleotide
  misc_feature 834: note = MISC_FEATURE - Any "n" represents any nucleotide
  misc_feature 840: note = MISC_FEATURE - Any "n" represents any nucleotide
  misc_feature 1290: note = MISC_FEATURE - Any "n" represents any nucleotide
  source 1..1386: mol_type = other DNA
ttggtattcgtgctggacaaacacaagaaacccctgatgccgtgcaccgagaagcgtgcgcggctgctgcttcaaagaggccgcgcggtggtgcacaggatagcgccctttaccattcggttaaaggaccgggtggcagaagaaagcgcgctgcagccgttgcggttgaaagtcaagcctggcgcaaaagagaccgacatggcagtcctgcgggaagagaccacaggcgaatccgaagctgtcatgctgcttgaactccgccacaagcccggcataaaacagagccttgacagccgcagggccatgcgccgcagcaggagaaaccgcaagacccgttaccgcaggccccggttcgacaaccgcaatcctgcgaagtgcgccgcctgcggcaggaacgcgagacatggcaaccgttactgccgtccttgcgaganancnanaaacnttgtcgataacggttaccgtgagaagcggctgccggcttccctggaagcccgtgcgaaccagatcatgaacacagtcaagagactgaccaggctgctccctatagcgtcgatatcatacgaaaacgccaaattcgacacccaactgctgcagaaccccgagattgccggggttgagtaccagcagggcgagctttttggctatgaagtcagggaatacctgttagagaagtggggccgccagtgcgcctactgcggcaaaaacggcgtgccgttagaaatcgagcacatcgtgcccaaatccaggggcggcaccgacagggtgtccaaccttaccctggcctgtaaagactgcaaccaggagaaggggacnctgacggcngaagaattnggccancccgaggtgcaggccgaagccaggcggccaatgaaagaggaagcgatagtcaacgcaacccgctggaagctgttcaaccagttaaagaatatcggccttcctctggaatgcggcacggcggccctcacgaagaagcagcgcattgagcatggtttgccgaagagcaaatattacgaagcctgcgtagtggggaagagtacgcccggcaaactggctatcaggcagaaatacgttcaggtctggacagcagtgggccgcggcagccggaagatgtgcaacacagacaagtacggttttccggtcagccaccgggccaggcagaagatgcgctttggttttatgaccggggacttggtggtggccgagatacccaaaggaaaatacgctggtcgctgggttggcagggtggccgtaaggtcgagcggctacttcgacgtaaaagacggcgcnggcaggcgggtgtgccagggagtgtcccacaggcatttccgcctgttacagcgtgccaacggttggcaatacgaaaaggaaaaattagcgggctga

SEQ ID NO: 1931 - DNA, 350 bp, unidentified
  misc_feature 1..350: note = Ga0101770_1016828 JGI
  source 1..350: mol_type = other DNA
gtcatagaccccacgcctaaaggagggggcttgctgggaataactcccggcaggtctccgttttaagcggaaagctgctcttctgggcggcgctatgacccgccccagcgtgggagccgatggaccaggcgtatgaaccacgctacgttaaggaggtcatcacatcttggaatgcttctctagttccttgccctgtggtgcggcattaaacagcgagcgggggtgtcagcgagcagtgtgccgcacgcaaaaagcctccttaacattggccaggagagacgcccgggcgagtccggcccgggagcgtcacaagccccgtaaggggtctccggaaggagatgctcaaattg

SEQ ID NO: 1932 - DNA, 1527 bp, Moorena sp.
  source 1..1527: mol_type = other DNA
gtgcctcctcagcagcttgctctggaattcgagtcagcagacaaccccgggaacagggacgaaacgggactcgaacaccgcgctgcggtaccgggcgcggaacctgtgcgagaggagacccgcaccgcttcacctggcgatgcgggcatcacccccaaccacccggttggggagaagccgcgtgagcggcacccattcgtgttcgtcctcgacaagcacggcacaccgttgcaaccctgcactgcggcccgtgcccgcaaaatgctcaagaagggacgtgcggttgtccaccgtcacaccccattcgtcatccgcctcaaagaccgcaccgcagcccagtccgagacagacggggtggagatcggtatcgacccgggcagcaagcacaccggtatcgccctgttcaccgcccgcgcgggggagcgccgggcccggtacagcgtgcagctcgaccaccggggcgcgacgatccgcaagaagctggagcagcgtgccgcctaccggcgcggacgccgcacccggaacctgcgttaccgcgcaccgaggttcctcaaccgcgcccggcgcgagggctggctgccgccgtcgctgcggcaccgggtggacaccactgtgtcgtgggtatcccgtctggcccgctgggcaccggtgagggccgtgcacgtggagcgggtggcgttcgacactcacgcactcgcggccggtcgcccgctggaaggcgccgagtaccagcggggcaccctgcacggctacgaagtccgcgaatacctgctcgccaagtggaaccggacgtgcgcctactgcggcgcgaccggcgtgccgctgaacatcgaccacatccacccccgctcacgcggcggctccgaccggatctcgaacctggccctggcctgcctgccctgtaacgagaccaagtcgaaccggcttgtggacgagttcctggcccacaagccgaacctcctggctcgcatcaaggcacaggccaaagcaccgttgcgggacgcggcagcggtacagtccacccgcacggccctatggcgcgccctggacgcccgctggcccacgcacaccgcctccgggggccgcaccaagtggaaccgcacccgctgccacctggccaagacccacactctcgacgccctcgccgtaggcacgctcgacacaatcgcagaaaccgtgaccacggtcttgctcgccggatgcatcgggcgcggtacccatacccgcacccgcacgaacaagcacggcttcccccgcttgcgcatgccccgccgcaagcggttcttcggcttcgccaccggcgacctcgtcaccgcccacgtacccaccggcaagaaggccgggacacacaccggacgggtagcagtccgcaccaccggaagcttcaacatcaccacccgccacggcaccgtccaaggcatccggcacaagcacgtccgtctcctccaacaagcagacggatacgcctacaccacccttcccgagcattccacagcgataccccgacgcaccgcgccggaggactga

SEQ ID NO: 1933 - DNA, 338 bp, Moorena sp.
  source 1..338: mol_type = other DNA
gtaaccggttcccccgcctgagggcgggggctttcagccgaactggctgaggcccgtgtgttaccagcaccagccaacacctttggaggaggtgaccgaagttggctacgttccgcgcacgacagaagacccaccaggctgtgcctcctcagcagcttgctctggaattcgagtcagcagacaaccccgggaacagggacgaaacgggactcgaacaccgcgctgcggtaccgggcgcggaacctgtgcgagaggagacccgcaccgcttcacctggcgatgcgggcatcacccccaaccacccggttggggagaagccgcgtgagcggcacccattc

SEQ ID NO: 1934 - DNA, 927 bp, unidentified
  misc_feature 1..927: note = Ga0334813_001619 JGI
  source 1..927: mol_type = other DNA
ttgacaagggggcctgcgaaagcgggcagaagttgttttggtcgcgacaccatgggatattccgcacgtcccatgcaactgtcgccggtggttaaaagtcctgagggcaagggacggtgctgccagcacgacaagcctttacaacaaccccgatgcggctctaacctctcgtcggagagagaaaggaactttatgttagttccagtattaaacaaagacggacggtccctgatgccctgccacgccgctaaagcaaggcggatgctcagggaaggcacggccaccgtagtcaaacgaacgccgtttgtgatcaagcttgtatacggcagttccggctataggcagccgatgacgctgggagccgacagcggttatttgcatgtcggcatttccggggtaacggacggaaaagaggtctatgcggcggatgtgggtctccggaaagacatggtaaaactcaacgcggagagaaaccactatcgcagaggccgaagacagcggcatacgtggtatcgcaaaccccggttcgacaaccggaagaaacccgaaggctggcttgcgccttctattcagaacaagctggacacccaggtaaaacttatcgagaaaacagcgcgcattctgccgatcacacgcgtagtcgtggaagtcgcggcattcgatatccagaagatacaaaacccggatatcgaggacactggataccagaacggagcgcagaagggattctggaacgtccgtgagtatgtcatgcacagggacgaccatacctgtcagcagtgcaagggtaaatcgaaagaccctgttttcacggtccaccacatcgaaacccgtcagaccggtggaaaccggccggacaatctcgttacagtgtgtaaaacctgtcacgggaagatatcaaggggagagatcgcccccgaatttaag

SEQ ID NO: 1935 - DNA, 321 bp, unidentified
  misc_feature 1..321: note = Ga0334813_001619 JGI
  source 1..321: mol_type = other DNA
gtacaagactcgggaaaggcgttatcctgggaggacaggcaggtctcgttggccacatcgacctcggcgatcatgtcatggttggcgcccagtcgggtgttcatgacgacgtccccgcaaaccaggttgtgtccggttcaccccataggccccacagacaatggctgcgcgcagaggcatgcgtttcacaacttccggagatgcggaaaaacgtagcctccatgttgaaaaggctcgagaaactggaaagggacaaaaaaaataagacccacagcaccaaatcctgagtgctcgactgcgtcagaatccaaatacatagaa

SEQ ID NO: 1936 - DNA, 1116 bp, unidentified
  misc_feature 1..1116: note = Ga0209617_10003712 JGI
  source 1..1116: mol_type = other DNA
atgcgagtacctgtaatttcagtagacaatattccattaatgccagccaaacctagtcgcgctagacgttggattaaagaaagtaaagcaattggtaaattcaacaagttaggtattttctatgtccagttaatagctgaaccatctggcatgaaaactcaagaaatagtaattggattagacccaggcaaaatgttttctggtgtagcggttcaatctcaaaaatacaccttacaaatgttgcacttagttttaccattcaaaactgttaaagacagaatggaacaacggtctatgttgcgacgcggtagacgtggtagacgagttaaccgaaatttttctttcaataaacgtagtcaccgtcaagctaggtttgataatcgtcgggggtctaaacttcctccaagtattcgagcaaacaaagatttagaatatcggacaatcacacttctttgtgatatttacccggtaaaaacaattgtcgctgaagaggtagaagcaagaggaaataagagttttagtccagtaatggtaggtcaaagatatcaaattaaccgattatctgaactagcaaaagtagaattaagaaaaggatgggaaacatcgaatcttcgtaaacacttgggtttacacaaagcaaagtctgataagtctctacaaatcccagagactcacgcagttgacgctgtgacactagcgtgttccgaatttgttaaatacaagtcgtgggaaggtgctaaaactcatggtgctagttgggtgggaaatgcaattattaccaattctcaatttacgattttacgccgtcctccaatcagtcgcagacagctacacttaatggttttctcaaaaggtggaaatagacgaaaatacggaggtactgtgaccagacatggctatagtaaaggtgattatgtcgaagctactcaaggcaataaaacatatagaggctgggtaagtggagacacaaaaactcaagtttcagttagtgattttaactggaaacggttagggcaattcagtaaaaacaaagtccgactaattagacgctctattggactaattatcactgcggttaaaaccgctcgcgtcgcttccctctcagcactaaagtga

SEQ ID NO: 1937 - DNA, 219 bp, unidentified
  misc_feature 1..219: note = Ga0209617_10003712 JGI
  source 1..219: mol_type = other DNA
gtcaataactcagggttgaagccactgagcttgtaagaaacaagtcttacgtgtttgactagctcattgagatgcagtttggtacgaacttccgaatacttccccagttcggattatcttcaaactatcttgttaatagtgttgctttgggcaagacatcttaactgcgttgagcgaggggacttaaacttttactccaaggattatctctttatgcga

SEQ ID NO: 1938 - DNA, 747 bp, unidentified
  misc_feature 1..747: note = Ga0133913_10206209 JGI
  source 1..747: mol_type = other DNA
atgaacagagtttttgttttagatacaaataaacaaccactagctccctgcacaccagcaagagctagacagttgttagataacaataaggctgctgcctatcgatataatccattcacgattatattgcatagagaagtagaattagatgcacaagataactattctattaacttagacccaggtgcagtgactaccggattagctattatcggtcatttccctaaacaaggtgatgttgtgatttttggtgcagaaattacccataaatctaaagctattaaagctaaattatatgcccgtagcagttttcgttctaatagacgtagccgtttgcgtcacagagaaccaagatttgataatagaactagaaaagatggatggttaccaccatccctcgaatcacgggtgaattgcattactcatttcgttaataaatttaaacatttaatatctaatgctaatatgtgcaatattgaattaccaaaattcgatacacaaaaaatgaataatcctaatatcaaaaattatcaatataaacaagggggtatgactaattttgataatacaaaagattatttaatccatagagatggggaatcttgtttctattgtggtgctacagatattaaattatttaaagaacatgttgcgcctcgcgcaacaggtggtaattcagttaataatctggtgttatcatgcctagcttgcaatacaaaaaaatctaataacccagttgatgatttc

SEQ ID NO: 1939 - DNA, 269 bp, unidentified
  misc_feature 1..269: note = Ga0133913_10206209 JGI
  source 1..269: mol_type = other DNA
gatgcaataataagttttgttaggatggtttttaaactatcttaatgttcaaccagactaagttattagatttatctaataactacgttatgaagaaaagttaaagacttacctatgggtgcttctccagcccgtagctctaagagtacagaactaaacaggggctaaatcgatggcaaccgtgggtgtacatgaacttctttataactttgtcgaggagaccgttactaggtgggagaccacatttacacaggattcacatgaacaga

SEQ ID NO: 1940 - DNA, 1350 bp, unidentified
  misc_feature 1..1350: note = Ga0265319_1000103 JGI
  source 1..1350: mol_type = other DNA
atgcagcagttaaaacagagaactaaaaagaacacacctacgaatgcttcacaagttcgtagcaactgtggtttactattaaacaaagaggaaactcttagtgtagtagactcaaaaacctgttttaacaatcccgatgtgaatcaagttcaacatacagaacggtcattaaaaccaactgtgtatgtaattaattataatggcaaaccactaatgccttgtagttatgctaaatctaaaagattagtgaaaaaaaatgctgcaagtgtaattaagttatacccgtttacaattaaacttaaatttgaatgtaaaaacaaggtacaaccagttacgttaggaattgatagtggttataacaacattggtttctcttgtactagtgaaaaatctgaattaatctctggaactcttgttttagatgataaaacatctaaaagattgacagagagaagaatgtatcgtagaaatagaagaaataaactatggtatagaaaaccaaaatttttaaatagaaagaagaaagaaggttggttagcaccatcaatccaaagaagatatgatactcatttatctttgattaaaaaattaaaatctatattacctatagcagaggtgattatggagaccgctaatttcgatatacaaaagatcgaaaatcctgaaataacaggaattgattaccaacaaggtaatatgtataattatcaaaatgttagaagttatttaatggctagagaaaagggattgtgtcagttatgtaataaagaatttacaaaaggtaactcaagtcatatacatcactgtaaaccaagaagcaaaaatggatcaaatagggcaaagaatcttgcattattacatgaaaaatgtcataccaaacttcataaacaaggattaaaactaaaacctgctaaaatttataaatcaaatacgtttatgtcaatcatccgtaagaggttttggaatgatatacttgatttgaaagttacttatggttacataacctttttaaaaaggcaagaatttggaataaataaaagtcataataacgatgcttttatcattgcaaatggatcaatacaagaaagaataaaatcaattaatattaaacaaaaacatagaaataatagagcaattcaattaaacagaaagggatttaaaccctctatacgcaaacaaagatatgcaatacaaccaaaggacttaatttggatatgtaacaaaagatatgttgttattggtatacaaaatagcggagcttatattaaggttgaaaattgcaagaaaattttacctgtaagccagattataaagatttataactttggaagtttaacatacaataattaa

SEQ ID NO: 1941 - DNA, 272 bp, unidentified
  misc_feature 1..272: note = Ga0265319_1000103 JGI
  source 1..272: mol_type = other DNA
gtcaatcgccctttagctaatgaagtaaggggcttgaaccgtaaggtttaagggtaacgggttgattagggggcaaaaaattaaaaaataatgcagcagttaaaacagagaactaaaaagaacacacctacgaatgcttcacaagttcgtagcaactgtggtttactattaaacaaagaggaaactcttagtgtagtagactcaaaaacctgttttaacaatcccgatgtgaatcaagttcaacatacagaacggtcattaaaaccaactgt

SEQ ID NO: 1942 - DNA, 1062 bp, unidentified
  misc_feature 1..1062: note = Ga0207156_10850 JGI
  source 1..1062: mol_type = other DNA
atggcagtatttgtattagacaaaaaacatcaacctttaatgccctgcactgagaaacgggcccggctattattaaaaaaaaggaaggctcggatccattctatgtatccttttacgattcgactgattaaccgaactgttcaggaaagtgtcctacaacctttgcgttgtaagatcgatccaggaagcaaagtgacaggtattgctattgtacgagaagacttcgaacaacaagtagttatctctcttgtagaattaactcatcgtggatcagtcattcgcgaagcattgcaagcacgtgcgggtaagcgaagacgaagacgttcttcactaagataccgctccccacgctttgcaaatagaactaaacccaacggatggctcccgccctctttgcgccatcgcatagagactgtgatgagctgggttcatcgattaaaagccagagcttgcattacagccattacatgcgagagggttagttttgatacacaaaaaatgacctctccagaaatacagaatgttgaatacagccaggggactcttttgggatacgaaattcgggagtatttgcttgaaagatggggacggaagtgtacttattgcaatgttcaaaatgtgcccttgcaaatcgaccacatagttcctaaaagttgtggaggctccaatcgcattgataatctcaccttagcctgcgcctcttgtaatcagaaaaaaagcaatctacctctcacaatatttaatcccaaactagcgcaaaagttaccttctataacacctctgcgagatgcagctgcagtaaatagcacacgtaatgccctatggcagcaactgatcaagcttttactcccttgtgaggcgggtactggagggcaaacaaaatataatcgcaatcgtttaggaatcccgaaaacacatgctttagatgctgcctgcacaggcaccacttttcagatccaaaattggcaaattcccactctacagatccgttgcaccggaaggggttcttaccaaagaactcgtacagatcgctttggctttcctcgaggatttcttctccgc

SEQ ID NO: 1943 - DNA, 279 bp, unidentified
  misc_feature 1..279: note = Ga0207156_10850 JGI
  source 1..279: mol_type = other DNA
gtcaactacctctccctaaagggagaagcttgaaagggaactaacaagcttggttgaccagggaaagcggtaaccaacccgctacgttataacaaggtttaagacccactccggagtgcttcctcagctccggactctggaagcagcggttgcagacaaccgattgggtaaggacgaaacggatcgctgcaaatcgccgtgttataacattcccgaggggagcaagccgaaaggctccgttacaaggcccgtaagggcattttttagagaattatggca

SEQ ID NO: 1944 - DNA, 984 bp, unidentified
  misc_feature 1..984: note = Ga0187869_10014458 JGI
  source 1..984: mol_type = other DNA
atgccatgccaccctgcaagagcaagggaacttgttcgtgcaggaaaggcaaagcgtcggttcaacaagggtctgttctacatcctcctcactaaaaggtcggacggattcaaacagccagtggcacttggaattgatacaggttcgaagtgggaaggtttcacggtcaaatcagaagcccatacttttgagaatctgaacgctgatgcagtcacgtgggtcaaagataaaatagagactcgcaggaatatgcgtcggtcacggcgtaatcgcaaaactccatatcgtcaatgccgttggaatcgttcaaccaaagcgaactacgacggattcagacttgcaccttcgacccatgcacgttgggattggaaactacgtctcgcaaagtggctcagcaagttgtatcccatctcgtgcttcgtcgtagaagacattaaagccgaaactaagaagggctgtaagaagtggaatacctcctttagtccgatagagaatggcaagaagtggttttatcaggaactcggaaagttagggcgtgtagaaaccaagcaaggctatgaaactttcgagatgcgaaatcagatgagtctcaagaaactaaaggacaagaagtccaagagtttctatgctcactgcgtagactcgtggactcttgccaactggtttgtcggtggacatacaaagcctgagtttgagcatgtcacttgcgtcactccgtttcagtggaagcgacgacaattgcacaaactccaaaagtctgctggtggtattcgaaagagggagggctctaccaatagtctcggattcaaacgaggcagtttggtcaagcatgtcaaggtaggcttggcttatgttggggggtttatcaaaaacagaatcagtctgcactccgttcagacaggcgaacgtttaggacaaaacttcaaaccagcagattgcaagtttcttgcccacagcagttggagggtttatgcaccagcataa

SEQ ID NO: 1945 - DNA, 240 bp, unidentified
  misc_feature 1..240: note = Ga0187869_10014458 JGI
  source 1..240: mol_type = other DNA
gtcaataccccacgcctaaaggcgggggcttgaaagtcaaaacctaaccagttctggcaatcaagttaaacgttgtctagacaagtctcgcaatcgaaagattggagcaacaagttgtctgtacgtggtagtacgggttatgtcgaggatgttccgctagtcttcgacctctaagacagcctgtgtcgaagcggttattagccgtccttcgggacgagaaaaacgtaggttaactttatg

SEQ ID NO: 1946 - DNA, 1527 bp, unidentified
  misc_feature 1..1527: note = Ga0207639_10055049 JGI
  source 1..1527: mol_type = other DNA
ttgcgttacgcatttgttttagacaaacatcaacagcctctcatgccctgccatccagccagggcaagacaattgttgtcccaaggcaaagcggctgtatttcgtttgcatccctttaccattattctcttggaaagagattctggggaatgttctggccttgatttgaaatacgatccaggcagcaaaacgacaggcgttgttttaaccgttgatcggaaaaaaacaggtccaacggtactttgggcggctgagttacatcatcgtggtcaagcgattatggaaaatttgcgtgctcgcttggccattcgtaggggaagacggcatcgaaaaactcggtatcgagcgcctcgtttccttaatcgttgtcgggcaacgggtaaattagcgccttccctgcaatctagagttgacaatgtgaacaacttaacgctgaaattaagacgaatcgctcccatccatcgtatttggttggaacgagtcaaatttgatacccaaaaactgcaatctccggaagttcatggcattgaatatcaacagggaaccttgtttggttatgaacttcgagaatatcttttggaaaaatggcaacgaaagtgcgcctattgcgatgtgactcaggttcctctggaaatagatcacatggttccccgcgctaagggtggcagtgatcgcgtctcgaatcttaccttagcctgtcggagctgcaaccaaaaaaagggtgcccaaatactcgacttttttctggctaaagaaccggcacgtctgaagaagctcaaaagcacagctcaagctcctctacgagatgctgctgccgtcaacaccacccgaaaagccttacaaaactgcctatctgccttacccataccggtcttgaccgctaccggtgctgaaaccaagtataaccgttgccaacaaggctatcccaaagcacattggattgatgccgcctgcgtgggcagccaagggtattcggtttttttaccgcctcaaattcgtcctctgcaaatccaggccatggggcgaggttcaaggcaaatgtgccgcgtgaataaagcaggcttccccagaacgagcgcaaaatcagccaaacgcgttcaaggttttcaaacaggagattgggtagttgctatggtgcctacaggaaaaaaagcaggtatgcacagaggccgagttgccgttcgggctactggaaatttcaatatcaagacctctttaggggttattcaaggggtatccgcccggtattgtcaggtccagcatcgactggatggatactattatcaatataccgctatagacgcgcttcctccccctgctgaagcagggggtctccgcgcgaggtcttatgaacgaggcgagctagctggctttgctggactccggcgctctacatcctcagcaacagaagccgcaggcggaatgagatccttgtcaggatttgaatcttgcatggcgtttgaatatccaggcaatacgggcctatcaaagcgtctctcttccagatcggcgattggttgcggctga

SEQ ID NO: 1947 - DNA, 345 bp, unidentified
  misc_feature 1..345: note = Ga0207639_10055049 JGI
  source 1..345: mol_type = other DNA
gtcaactacctcccgttaaagcgggaggcttgcagggaacctttggtaacccgtaagcctctgagttgaccagactcagtccctactctctttgattcttctgggtcagggcggtagggattaccttaaggcagaatctgctctgttcagagcagcgagataggtaccctgggatgcttctccagtcccaggttctacggtttagagttaaacaggcataagaggtggaagccagtgctctaaacaaaaacctgccattaagtttgtcgaggagaccgttacctgcgaaagcagagcgcctggtaacaggcacttttttagaaggagttaagcccattgcgttac

SEQ ID NO: 1948 - DNA, 1056 bp, unidentified
  misc_feature 1..1056: note = Ga0315282_10012226 JGI
  source 1..1056: mol_type = other DNA
atgcactaccgcaggaaaaggttcaacaaccgaaagcgatctaaaaactggcttgctccaacgctaaggagcaaaaaagatgctatagtcaatgctgtaaagcggatagcaaagatacttcccgtaaagaaagtaacgattgaaacagcttcttttgacactcaggcaataaaaacaggacataagataccgaactggttataccagaaaggtccgctatacgatgaagagaacataaaagcatacgtaaggaagagggatgattatacctgccaatattgtggccaagaccttcacggcaaacgttgtgaagtagaccacataaagccgaagtcaagaggcggcacagatgtacctgacaatatggtggcatcttgtgaagactgcaataaaagtaaggataatttgactctggacgaatgggtaaagttattggaggctcatccaacggaaatcaacaaaaagcgattaaggcgggtaccgaagataagagagcaggtaaaaatatcgctggtaggatccgcccatgtccaaagtatgaagaatgcattggttaaggaaataagcgaacattttccagttcaagagaccaacggtgttactactaaactgatgcgggaaagcataaacctacctaaaacacactgcaatgatgcgatagcgatagcattggacacgtctaaagaaatagtaccgcttgacctaatgtatcgaataaagcaggttaggaagaaaaatcgcagtcttcatgaagcaatacccaggaaagggaggggcaagcctaatagagaggccaagcgcaacaggaagaacataaaagagattgtgataaacaacaagaaatggtgcctatgggacaaagtatatataccacagaaaggtaagattggatatataatcggctttacaggcaagtgggtatatatccaggacataggcggtagatacatccaattatcatccaaatacaaacagatcaatccgaaagaggtaaaactgatatgcaggaacaacaattatgttatagaaaatatgtcgctttcatctctccaatga

SEQ ID NO: 1949 - DNA, 245 bp, unidentified
  misc_feature 1..245: note = Ga0315282_10012226 JGI
  source 1..245: mol_type = other DNA
gtcaactacccgcctctaaagaggcaggcttgaaaaagcctcaagttgactagcctcagccagggcagaaatgccatcgggctacgttatccgtgttatgatacctttagatgataccctagtctgaagctctatcacctataatccaaacagttccaggggtagggacagtgatatgggcatgtaagcatggataacattggcgaagggcaaataactcccgaaaggagatacactggatgtta

SEQ ID NO: 1950 - DNA, 1362 bp, unidentified
  misc_feature 1..1362: note = Ga0395714_000473 JGI
  source 1..1362: mol_type = other DNA
atgcagaagtttaaagtaaagttaaagaacgtacctacagatactccacaagtctgtagctctacaaattctgtattaaacaaagaccaaagtcttagtgtacaggataaagtactgactttaaacaacctcgatgtggatctactccaacataagggaggacagggcttgagagttcctgttattgcttatgtacttaatcaacggggtaattcgttgatgccttgctctgcaaggaaagcaagattacttctaaaaaggagagatgcccatgtcgtaaaaactaatccattttttgttattcagttaaatcgcgcaagtggagaacaagtccaagaatgttcacttggtatcgattcaggttctaagaatatcggattttcggttattacaaacaaaaaagaaattgacagtggtacattgattttagataataaaacatccgacagactcactgaacgcgcaatgtaccgaagaggacgtagaaataaattgtggtatcgtaaaccaagatttaataatagaaagatagagaaaggttggctaccaccgtctgcacagagaaagtttgatactcatattacattaataaataaacttaaaaagttattaccaatcaaaaatattacaattgaagttggtaattttgatattcaaaagatagaaaatccagatattgcaggtatacaatatcaacaaggttcaatgtttgaatatcaaaatatgagaagtttcttgttagcaagagaacaaggtaaatgtcaattgtgcaataaagagtttagtaaaggtaattcttcgcacattcaccatataatacaaaaaagtaaaggcggtactgatagggaaaagaatttagcattacttcacgaatcttgtcataaaaaattacataaaaaccgatcttttagtttgctgaaaaagaataaacaatataaagatacaacatttatgaatataattcgatggagatttagaaaaatatttcctgattgcaaattaacttatggtaatgaaacattcgttaaaagaaataatttgagattagaaaagactcattacaatgatgcctttgttatcgctggtggaaatagtcaaactaaagttcaacctattattttaaaacaaaaacataaaaataacagagttcttcaacttaatagaaaaggctttaaaccatcaataagaaggcagaggtattctattcaacccggagatataatttggataaaagataaaaaatatattgttaagggttgtcattgttatggaaaatggatcctttgtacaaataatattaaaaattttgattttagtattaaaaaagtagaaaatgtttttcatacacaatcaatctattaa

SEQ ID NO: 1951 - DNA, 268 bp, unidentified
  misc_feature 1..268: note = Ga0395714_000473 JGI
  source 1..268: mol_type = other DNA
gtcaactacctacttctaaagaagtaggcttgaatcgtgaggttcaacgtaagagttgattagagggcaaaggttaaatcttatgcagaagtttaaagtaaagttaaagaacgtacctacagatactccacaagtctgtagctctacaaattctgtattaaacaaagaccaaagtcttagtgtacaggataaagtactgactttaaacaacctcgatgtggatctactccaacataagggaggacagggcttgagagttcctgttatt

SEQ ID NO: 1952 - DNA, 1281 bp, unidentified
  misc_feature 1..1281: note = Ga0137369_10007808 JGI
  source 1..1281: mol_type = other DNA
gtggttttcgttctctcaagtgacggccagccgcttgacccgtgccacgaggcgcgggcgaggaagctgctggcagcgggagaagccgtcgagtatcgccgttatccctataccattcggctgctccaccgcagagcagccgaatcgacgacgcacccgcaccggctcaagctcgatccgggcagcaaaacgaccggcctcgccatcgtgcaagaggatcagccccgcgtggtgtgggctgccgaactcgcccatcgcggccagcagatacgcgatgcactcttggcccggcgggcgctccgccgcagccggagacaacgcaaaacgcgttaccggcctgcacggtttctcaaccggcggcgcaaagacggctggctccctccatcgcttctgcatcgagtgctgactacgctgacctgggcaagaaggctgcggcggttgtgtccgatcggtgccatcagcatggagttggtgcgcttcgacacccaggcgctccaaaatcctgaaatcgcaggagtggcataccagcgcggcacattattcggctgggaggtctggaattacctgctgatgaagtggggccatcgctgcgcctactgcggcgcgactaacatgcggctggagcaggagcacctgatcccccgcacccggggtggcagcgaccgcatcacgaacctcaccatcgcctgccggccctgcaacgagcgcaaaggcaacctgactgccatcgagttcggctttccgcagcttatggcccaggcgaagcggccgctcaaagatgtcgctgcggtgaacagcgcgcggtgggcactctatcagcgcctactagcgacggggctgcccgtcgaggtgggcactggcggcaggacgaagtggaatcgcgcccggctcggctgggacaagagccattggcgtgatgcggcagtggtgggagcgagtacgccggacacgctccacgtggcggtaggaagcgtgctgctcatcgccgctacaggccatggccgccgccagatgtgccggacaaacaagtatggcttccccacgcgccatgtaccgcgccggaaacgccaccttggcttcaaaacgggcgatctggtgcgtgcggtactcccgagcggaaagcacgtaggaacgcacgtcgggcgggtcgccattcgcagtacgggcaagttcaatattgctacgcctgctggattggtacaaggcatccaccaccgtcattgtcagatcatccagcgtgccgacgggtacgcctatggctatcgaaaggagagcgcgtaa

SEQ ID NO: 1953 - DNA, 274 bp, unidentified
  misc_feature 1..274: note = Ga0137369_10007808 JGI
  source 1..274: mol_type = other DNA
attgttgtcaggaaccgcacggctcttgccggcggcttgcgatccgtcgtaagcccgtcctgaccagccccagctcgggcaaccgagctacgcccgtcgagtcacgacacctccggctgcgcgggccaggccggagccctgtcgcctgtcagaacgttcgcctggggcaaaggcggcatctggcgggcgcgacaagctcgacgcgcatgggcgaggcccactctaaccgccgcaaggcgagatgcacccgtaaggggcaaaggtatcatttgtg

SEQ ID NO: 1954 - DNA, 972 bp, unidentified
  misc_feature 1..972: note = human gut metagenome genome assembly, contig:NODE_4586_length_3121_cov_1.805284, whole genome shotgun sequenceWGS
  source 1..972: mol_type = other DNA
gtgtgtcttattgcaaacctcttattaacattggcgaaggtgtcatatacggctcgatatgtgccggcttaccgctttaagcatatcacaaaaaaggaggtgccttatatggtatatgtattagatatcgatggacagccacttatgccaacttcaaggcacggaaaagtaagaaggctgttgaatagtcatcttgctaaagtagtaaagcgttgtccatttacgatacagcttttatatcaaagtacaaaagaaacacagcctgtatctcttggtgtagacgcaggaagtagacatgttggtctgtctgctacaacagagcgggaagttgtctatcaggaagaacttgttcctcgcaatgatattgtaaaactgttatcagcaagacgagcattgcgccgttctcgaaggaatcgaaagacgagatacagaagggttagattcaacaatcgtgtgcattctaaacacaaaggatggctggctccatctgtagaagtcaagatacaggagcacatcacagccaccaagagaatctgtcaaattctgcctatatttgatattcatgtagaaacagcagaattcgatcttcagcgtctaaaagcgatggaagaaggaaggctacttcctgctggtacagattatcagcttggggaacagtacgatttctataacacaagacagtatgtgcttcatcgagatgaatatacttgtcagtgttgtggtacgcatgataacaatgtaaaactacatgtgcatcatgtcgaaagccgtcagacaggtggagaggcacctaacaatctgattacactttgtgagcactgtcataaatcgatacatgccgggaagatgatgctgccaaaaggcaagaaacgaggcaagtcctatcgtgatgctgcttttatgggtatcatgcgtaatactctgctagaacgtttaagaaaagaagtaaatgttccagtgacgatgacatat

SEQ ID NO: 1955 - DNA, 276 bp, unidentified
  misc_feature 1..276: note = human gut metagenome genome assembly, contig:NODE_4586_length_3121_cov_1.805284, whole genome shotgun sequenceWGS
  source 1..276: mol_type = other DNA
gtcaactacccgccaatgaattggcaggcttgtaaaagcctaagttgactagcctaagtgttttgagcactacgttaagagagaatatatagttacccgtggatgtaacacctagtctgcggctctaagaagatacattaaaaagttctgtagggtaggaactgtgtgtgtcttattgcaaacctcttattaacattggcgaaggtgtcatatacggctcgatatgtgccggcttaccgctttaagcatatcacaaaaaaggaggtgccttatatg

SEQ ID NO: 1956 - DNA, 1467 bp, unidentified
  misc_feature 1..1467: note = human gut metagenome genome assembly, contig:NODE_15547_length_4308_cov_2.449800, whole genome shotgunsequence WGS
  source 1..1467: mol_type = other DNA
atggtacggctgtctgacgggaggcgtaagccggaaaggaaacttatggtagcagttgtcacgaacactgggaagcccctgatgccgaccagtacataccgggcacggaagctcttaaagggcggacgtgccgtgatctataaataccgtccttactttaccatcatgctcgtggaccgggcagaaggggaagtacaggatatcgagtacaagtctgataccggctccaaacatgccgggatcagtgcctgtacagagaaacaggaacttttaagcgaacagcgtgaccttccggataaggagccggaacaccacaaagaacagcagcgttaccgccgcgggagaaggaacaggaaacggtaccggaagccgaagttcgataaccggaagaagaaaccgcaggaaggccatgaaaaatggctggcaccgacaaacctccacaagctggagatccaggtaaacctgttcaaagacttctgccaggtagttccggtaacctctgcttactttgaaatgggaaagtttgatacccaggtactgaaagcagtcctggaaggaagaccaataccacagggtgaagattaccagagaggggagcagtacgggacggatacgttacgtgctgccgtcttcctcagggatgactacacctgcaggatctgcgggcggaccattaaggacggtgccatcctccatgtacaccatgtggggtactggatgcaggaccggaccaaccgccctgcaaaccttgccacggtatgtgagcagtgccatacgcctgcgaaccatggcaggaacgggatcctgtatggaaggaaacctgagcatgggactttaaaggatgcctcctatatgacatcggtccgctggatcatgctgaaggaattaaaggatgccgccccggaagtgagtatccatgttacctatggggtcaccacaaagaggaagcgccagggcctgcaccttccaaagagccatgtcaacgatgccttttccatggggcggttccatccaaagaaacgggcggatactgcttactggaagaagaccatccggcatgaccgttccctgcagaagttctatgatgccgtatacctggataccagggacggcagagagaaaaagggcagtgaactttccaacggaaggatcagccggaaccacaaaaaggacagtgagaacctgcataagtaccgcgggcacaaggtgtcaaaaggccatgtttccatccgcagggacgggaacaaactgaagcctggaagcgttgtcctctataacggggaaaggctgacggtacacggcactcatacatcctacaggaaaaataaaaagggcgaagaggtcaagaacgtcaatgtccagtttacaagaccggcatctgacggaaagaagtctgcttcactgaaaaaatgtaagatcgtaacaaggaactataacacgggctggaaacgataccggcctgcataa

SEQ ID NO: 1957 - DNA, 375 bp, unidentified
  misc_feature 1..375: note = human gut metagenome genome assembly, contig:NODE_15547_length_4308_cov_2.449800, whole genome shotgunsequence WGS
  source 1..375: mol_type = other DNA
gtcaattacccacggtcatatcctgacggaatggccggggcttgctgatggaaggtaactttttgccggatatctgccagcccggttgattactctaagccggtccggtaagtcttttttgatactgccgggtaacggctacgttacactggaatatacaggcaccaggggatctttcttcaagtccctgctctgcgggctgtctgttaaacatccctttttgggtacggggaagtgcgtcagccgccaaaaccctttgtaacattgaggttggagaacacttgctatgtaaagaagccgcaggacacaggcagctgggaggctgccgccgtacatggtacggctgtctgacgggaggcgtaagccggaaaggaa

SEQ ID NO: 1958 - DNA, 1224 bp, Succinivibrio dextrinosolvens
  source 1..1224: mol_type = other DNA
atggtttatgttttaaattgcgaaggtgtaccaatcatgccgactactcggcacggtatggtaagacgtttgctcaaagaacataaagcaaaggtagttaaaagatgtccatttacaattcagcttagatatgagtgtgcaaacattacccaatctatcacacttggtgtagacacgggatatgaaaatgttggtatttctgcatgtactgagaaaaaggttctttttgaagctaaagctaaaatcagaactgatatggtaaagctcttgtctacaagaagagaaacaagacgtactcgtagatcaagaaaaacaagatatcgcaaagctcgtttttttaaccgaagtattgaaaaaggttggctacctccatctatcagagctaaagtagaatctcatttaagattagttgcaaaggttcacgaaattttgcctatagacaaaattgtcgtagagattgcaagttttgacattcagaaaatcaaaaatcctgatatcaaaagtgctgagtatcagcaaggtgatcaattaggattcaagaatatgaaagcttatgtcttatgtagagatagatgtacttgtagatgttgcaaaggtaagtctaaagacaaaattttgcgagttcaccatcttgaatcaagacttataggtggtgatgctcctaacaatctcgtgactttgtgcaattcgtgtcacacgaaatttcacaaaggtttgatttctttagatgacattaaaagaggaaaatctttcaaagctgaaactttcatgggattgatgcgaaatttctttttcaaagaactttgcgataaatatccatgtgttaaatgcacctatggttacataaccaagcatttaagagagaaatatcatttaaagaaagatcatcatgccgatgctcggtgcatttgcggtacaccgcaagctttaccaagtgatgtctatctgatgaaaaaggtaagatgtcataatcgacagactcataagtttactaccttaaaaggaggtcgaagaaagttgaatcaagcaccgtatacggtaaaaggtttcaggcttttcgacaaggttaaagttggcgatcaaattggatttatttttggaagaagaacaagtggacagtttgatatacgcaccgtatacggtgaacgtatcaatggatcaataagttataaaagacttcaattgattgaaactagaaaaagttggttaattgaaaaatgttaa

SEQ ID NO: 1959 - DNA, 359 bp, Succinivibrio dextrinosolvens
  source 1..359: mol_type = other DNA
ctctgcagacagtattgatgatattttcattatagatatcatgagagagaatattaaaaagctctgatgtagatgagtattgatatacggaatctgcaactaaagcttagtctcagcaaaatttactttcaaaagtagattaagctacgttatgaaagaatagataacaatctaaatagttacgtcagaatgttctacctagttctgacctctaaggtctatgattaaacagttttcattgaaaacagagttgtagacaacaaacctttcaataacattgacgaaggtagcattttacagttttgcaggatctggcttacagcaaaaaaactgcaactttttaaaggaattaaattatg

SEQ ID NO: 1960 - DNA, 948 bp, unidentified
  misc_feature 1..948: note = Ga0311329_10041539 JGI
  source 1..948: mol_type = other DNA
atgccgtgtactccgaagcgagcgcgcaagctgctcgaagcgggtcgtgcacgcgtacatcagctgattccgtttgctattcgactcactgaccgtgttgcacaaacatctaactttcagcccttaaaaataaagctggacccaggtagtaaggcatcaggattagccgtttgtcgtgtgtcagaaaaaacggatggcgacggtgttgttcaaccgacgatgcatatcctgtttttaatggaactggtgcaccgaggcgcagcaattaaaaaatcattgcaggctcgagcagcaatgcgtggacgtcgtaggggtaatctgcgctatcgcgcgccgcggttcaataaccgcacgaaatcgaaaggatggctgccgccttcccttcaacatcgggttgacaccttatcttcttgggttaaccgaataggcaggttggcgcccattactcatctagcccaagaactggtgcgattcgatatgcaactgatgcaaaacgccgaaatatccggagtggcctaccaacaaggcgagctggcaggctacgaagtacgcgaatacctgctagctaaattcaaccgaacttgtgcctattgcgatgcaacggaggtaccgctgcagatagagcatatccaagcaaaagcaaacgcagggtctaatcgggtcagtaacttaacgctcgcctgcaagaagtgtaatcaggcaaaaggttccttggatattcggacctttttagccaaagacccggcacgtctggcgcgaatactaaagcaggttaaagcaccgttacgagacgccgcggccgtaaatgcaacgcgctgggccgtctttaacatgctaaaacaaaccggtcttccggtcgaaaccggcagcggcggtcaaactaaatacaatcgcactcgcttaggcgtgattaaaacgcatgctttggatgcggcttgtgtgggacaa

SEQ ID NO: 1961 - DNA, 376 bp, unidentified
  misc_feature 1..376: note = Ga0311329_10041539 JGI
  source 1..376: mol_type = other DNA
gtcaactaccccgccctaaaggatggagcttgaaaagcgaaagccgattaagctcaggttgacccgagaaaggattgagtaacggaagttactgagtactacgttgtaagtaggtacaaaaccgacgccgggatgcttttccagttccggatagaaattcgtaagagtttccttcgaagttgcggtagcagacaagctacagggtatgcacgaaacggaccgcaacaaaacagcaaggtatcgctgttgaagccggcttacaacattctcaaggaaagcgggaccggaaggtctccgtcacaaggcgcgtaagcgcactgttttaccaataagaagtgattttacttaacgaaagaaagaacgcaattacgtgaaa

SEQ ID NO: 1962 - DNA, 1272 bp, unidentified
  misc_feature 1..1272: note = Ga0210051_1023303 JGI
  source 1..1272: mol_type = other DNA
atgaaaaatacacaacagaagttaggaaagagaaatacatacacacctacaaatacttcacaagtttgtagctctgtggttgtgtctttaaacagagaggaaactctcagtgagcatggcttaaaaacctttccaaacagcctcgatgtgaacaaacagtctggcaagactggacaggatttgagaattcctgttttaaatatacgtggaaaacctttgatgccaacaacaccagcaaaagcaaggcatttgttagaacaaagaaaagcaaaagtaatcaaaagaaaaccatttgttatacaattgacaatagcaacgggagagactaagcaaaagattacattaggaatagatagcggatatagtcaagtaggattcagcgcaaagacagaaaaagaagaattgatattaggagaactaactttaagaaaagatgtatccaaaaagttagaagaaagaaaaaggtatagaaaacagaagagaaataagttatggtacagagaagcaagatttgataaccgagtaatttcaaaagaattgttagcaccaagcatacagcacaaattggatacacatgttagattgattgaaaaaatcaaaagtttacttccaatcacaaaaacaataattgaaatagccaactttgatacacagaagatgcagaatccagaaatatcaggaataaaatatcaacaaggtgaattacaagggtatcatatacgagaatatcttttagacaagtttggcaggaaatgtgcttattgcaatcaaaagggtgttcctttagaggttgaacatattattccaaaatcaaaaggaggaagtaacagagcatctaaccttacaatctcatgcagtaaatgcaatttagaaaaaggtacattaacagtagaagagtttggtttccataacattcaaaaattagcaaaacaatccttaaaagcaacagcatttatgaatgttgtaaggaagagactgactaggcaggtaaatgcagatgaaacatttggctatatcacaaaatatagaaggattagatataacttaaacaaaagtcatgtcaacgatgcttttgtgattgctgagggaagtaatcaggcaagatgtcaaccatccattgtaacacaaataagaaggaataatagatgtttacaaatgaatagggatggatacaaaccatcaataagaatacagagatacaaattacaacctaatgatttagtaagatataatggtcaatcacaaaaaatcaaaggagtattcaattatgga

SEQ ID NO: 1963 - DNA, 279 bp, unidentified; identical to SEQ ID NO: 1486
  misc_feature 1..279: note = Ga0210051_1023303 JGI
  source 1..279: mol_type = other DNA

SEQ ID NO: 1964 - DNA, 1257 bp, unidentified
  misc_feature 1..1257: note = Ga0307377_10002004 JGI
  source 1..1257: mol_type = other DNA
atggcgacaacagcaagaagggcaaggttacttttaaaagaaggcaaggcaacagtaatcaaccgtacaccatttattatacgtttacttattgctacaggagaaacaaagcaaccaataatattaggtgtagatgcaggtagcaagacaattggattatcagctactatagaaaacgaagaactgttctctgcagaggttcagctaaggactgatattgtagaattattatctacaagaatggaaaacaggtgtaccagaagggctagattgaggcatagggaaccaagatttttaaatcgagttaagggtaaaaataagggttggcttgcaccgagtatagagaacaggattcagacacacctaaaaatggtggatagagtatgtagtattcttccaatatcaaagattattgttgaaacagcatcctttgatatacagaagattaagaatccagttatcgaaggtactggataccagcaaggagagcaactagacttttggaatgttcgtgagtatgttctgtttagggatagacaccaacgtaagggtaaaaagggatgcaagtgtaaaattctcaatgtgcatcacattgagagccgtaaaactggtggagatgcaccaaataacttgattaccttatgtgaggattgccatgacgattatcacaatggcaagttgaaattaaacatcaagcgtggtaattcatttagggatgttgctttcatgggtattatgcgttgggcattttataacagacttaaagagaaatattccaatgtacaaaacacatttggatatataacgaaaaacacacgcataactaacaatttaccaaaagagcatagaatagatgctttgtgtataacgagtaatcctttggtaataaggtgtagcgattggtatttgttaaaacaagtacggaaacacaatcgccagatacacaagtcaaatattctcaggggcggagtaaagaaactcaatcaagcaccatacctagttaagggttttagattatttgacaaggtgaattacaaaaatcaagaatgctttatctttggtagaagagctacgggctatttcgacttgcgtaagttagacggtacagttattcacagaagtgcaagctataaagatttagaattattagaaataagaaaaagtctattaacagaaaggaggaagcaggagcaaggaatgagtgagcattcctccacgaacctaaaagtatcgtggtttcctgccaagtttttatga

SEQ ID NO: 1965 - DNA, 239 bp, unidentified
  misc_feature 1..239: note = Ga0307377_10002004 JGI
  source 1..239: mol_type = other DNA
gtcaattaccactaccctaaagggatagtggcttgtaggaaactacaaaccataagttgactagactaagcgaaagctacgttatataagccatcatacccgtggatgtaaatcttagtctgcggctctatggtttaacattaaacaatcctgtgtggtaggggtcgtgtgttgagcataacaaacttatataacattgtctaaggattataactctgtaaggaggacgtaacttgaga

SEQ ID NO: 1966 - DNA, 1104 bp, unidentified
  misc_feature 1..1104: note = Ga0182238_1001861 JGI
  source 1..1104: mol_type = other DNA
atgcaacatcaaagagtctttgttctggacacgaaccgtaaaccgctcatgccctgtcatccggccagggcacggcggctgctaaagacaggccgtgcatcggtgtttcgtaaaacacccttcaccatcatcattcatgacagggacggaggcgaaacccaggacacagaactgcggatagatcccggttccaaggctaccggttgtgctttggtggtcagcggccacaacggggaccgggctgtggccgggatcgagattgggcacagaagccagcaaataaagcagaacctggaaaaacgccggggtgtgcgtagaagtaggcgcaaccgcaaaactcggtatcgtgccccacgctttaacaaccggcttcgcccaaagaactggtttccgcctagccttcaaagccgggtggagcatgtgcggacctgggcgaatcgtttctgcaaattatctccggtatcgagcattgccgtggagacggtgcgctttgatacacagaagatgcaaaacccggaaatatccggggtggagtatcagcaaggggagcttttcggctacgaggtccgggagtaccttttggagaagtggggacgaaaatgcgcctattgcggcaaggaaaatacacctttggaggtagagcacattgtgcccaagtccaggggcgggagtaaccgggtgtccaacctcaccctgtcctgcacggactgcaaccaagacaaagggaacaggactgcggctgagtacggtttccccaagatccaggcccaggccaaagctcccctgcgggacgctgcggcggtaaacgctacccggtacgccatcgggaatatgctaaaaggtttgggcctcccggtatccttttggtctggaggtaggactaagaagaatcggatcgggcagggatttgagaaggcccattggatagatgccgcttgcgtagggaagaaagggggaacggtctatattccaaggataattcctcttgtggccaaagctatggggcatgggagtaggcagttttgtcgggtggaaggcatatcctggaagtattgttctattttgcagcaagcagacgggtataccttttccttcccggcctga

SEQ ID NO: 1967 - DNA, 265 bp, unidentified
  misc_feature 1..265: note = Ga0182238_1001861 JGI
  source 1..265: mol_type = other DNA
gtcatctaccccgccctaaagggcggagcttgtaagctctgaagatgaccagccttagtcacattaaaagtgtgactacgttgggagcgaatatataggcactccgggatgccccgctagtcccggacactgcggcaaacggttaaacaggcatacggggttgaagccagtgccgtttgcaataaaccgctctacaacattggcgaagcggacgtaaccggcctttgagccgagaaaactaaggtaactcatgcaacatcaaaga

SEQ ID NO: 1968 - DNA, 702 bp, unidentified
  misc_feature 1..702: note = human gut metagenome genome assembly, contig:NODE_3471_length_5924_cov_5.665020, whole genome shotgun sequenceWGS
  source 1..702: mol_type = other DNA
atgtcaacaacagttttcgtattggacaagaagcaccggcccctgatgccgtgccgcccggcaagggcgagacggcttctgcgggcgggccgcgcacgggtggtgaagcgcttccccttcgtcatccggctcgtggaccgcactgtggagcagtccgaggttcaacccgtgctcatcaagctcgatcccggctcaagggagacgggcgccgccgtcgtgcgggatgacgggaagaagcggcatcatgcgctcgcgttcttcgtcatcaagcatcggggcggcgccatccgcgacgcgctcaaggcgcgaagcgcatttcgtcgccgccgcaggtcgcagaatttccgctgtcggtcgccgcgctttctgaaccgcgtcaagcccaaggggtggctcccgccttctctgcggcaccgcgtggaaacgaccctttcgttcgtgaggaggatgtgccggtacctgccggtaagcggcatcgcgacggagttggtgaagttcgattcgcaaaagctccagaacccggaggtctcgggggtcaagtatcagcagggcacgctctttgagtatgaggtgcgcgaataccttcttgagaagttcggccggaagtgcgtctattgcggcgccgaaggcgtgccgctcaacatcgaccatgtggttccccgcgccaagggcggctccaaccgggtctccaacttggtgctc

SEQ ID NO: 1969 - DNA, 293 bp, unidentified
  misc_feature 1..293: note = human gut metagenome genome assembly, contig:NODE_3471_length_5924_cov_5.665020, whole genome shotgun sequenceWGS
  source 1..293: mol_type = other DNA
gtcaactaccccggcctaaaggccgaggcttgtgaaagcaggtctggttgaccagcctaagtttttcgagaactacgttgcagacaggttcaagacccacctcggaatgcttcctcagttccgagctctggaagcctcagaagcagacaagcattgggtacgcacgaaacggtctgaggcaaaatgccggtctgttcaacattggcgaggggaattgctccgcccgcaagggcggagcatgtcacgggcatcagcccgaagaatcgtaaggttcatttttcatgtcaacaaca

SEQ ID NO: 1970 - DNA, 1101 bp, Moorena sp.
  source 1..1101: mol_type = other DNA
atgcgtgtacctgtaattaactacgacagcgagccgttaatgcctaccaaacgaagtcgcgctcgacgttggataaaagaaggtaaagctataggcaaatggtctaaactaggcattttctacattcaattattaacacccgctagtggggataaagcccaagatattgctgttggaatcgacccaggcaaacaatttaccgggatcgcagttttatctcacaaaagcactttactgactattcacgttgatttaccctttaaaaatataactaaaagaatggctcaacgtgccatgatgcgacgttgtagaagaggtagaagaattaacaaaaaaataccctttaaccaacgtagtcatcgtcaaactagattcgataaccgtagacagaaaaaattacccccaagcataaacgcgaataaacaactagaaagacgaatactaggattaataattaagttatttccagtatcaaaggttgtttacgaagttgtaaaagcgtcggggaacaaagggtttagtccggtcatggtaggtcaaatagaccaatgcaaaaaattaagtaagcttgattatttatttgatttcaaaactcttcaaggttacgaaacttatcaaatccgcgaacacttaaagcttgaaaaagagaaaagtgataagtctttaaaaattcctcaaacccatgctgtagatggaattgccttagctgcttctaactggatgaattacggaattgttgacaataattcgatgggatggcgaggagagataaccttaactgattcaatatttctggttatttctagacctcctatcagtcgtagacagttacatttaatggttccaaacaaaggaggtaaaagacgtaaatatggtggtagtgttacacagcacggatatcgtaaaggtgataatgtcgaagctgttaaagctaataaaacttaccgtggatgggtaagtggagatactaatacccaagtttctgttagtaatgcaaactggaaacggcttggacagttctctaaaaataaagtgcgattaattcgacgttctactggtttaatcatcacatctcgaaaatatctagctaaaggcacttaa

SEQ ID NO: 1971 - DNA, 214 bp, Moorena sp.
  source 1..214: mol_type = other DNA
gtcagtaactcccggctaaaagccgggagcttgcaagaaccaaattttgcgtgtctgactagcccgtgagccatcaatcggtaaagacttccggatgcttccccagtccggattatctctaaaactgtttggtcagttgcttgtagaaaggacatcttattgatggtgggcgaggggacttaaactttacacgaaggattatctctttatgcgt

SEQ ID NO: 1972 - DNA, 1344 bp, unidentified
  misc_feature 1..1344: note = Ga0119972_1000501 JGI
  source 1..1344: mol_type = other DNA
atgtctaactttgtatttgttttagataccaataaacaacctctagaaccctgttcgccaacaatagctaaaaagctactaaaagcaggtaaagctgctgtattcagacagtatccgtttacaatcattcttaagaaagtagtagatggaaaggatgtccaacaatgtcaacttaaactagatccaggttctaagactactggaatagcaatacttcaaggaaataaactaatctgggcagcagaacttactcatcgaggtcaacaaattaaagacgaccttgaatcccgtcgatctttaagacgtggacgcagaggaagaaaaactagatatagacaaccccgatttctgaatcgaaccagagccaagggttggttgccaccaagtttagaacatcgcgttttaacttgccagacttgggttgaacgattgattaggctctgtcccattagctctatagctatggaattagttaggtttgatactcaaaagatgcagaaccctgaaatgtcaggcactgaatatcaacaaggtactctttatcaatacgaagtacgagaatatttactagaaaaatttaaccgaacctgtgcttattgtggggcaaaaaatacacctttagaagtagaacatattgttgccttatctaaaggtgggtctaaccgagtatctaacctaactattgcttgtgtaccttgtaaccaatctaaatctaatcttgatattaaaaagtttctagccgacaaaccatcagttctcaaaaaggttttagctacagctaaagccccgcttaaagatgctgctgcggttaattcaacacgctggaaattgtttaatagcttaaaagaaactggtttaccaataattactggtacaggtagtcagactaagttcaaccgaactcaacaaggactcaaaaaaactcattgggtagatgctgcttgcgtcgggaatactccaaaacttgaaatattaaccagtctaccattacgggttcaatgcgctggttatggtaacagacaagtaatccatgttgataaatatggttttcctagaagaagcaaatctggaagtttggtcagaaaatctgctcgagttaaacaagttaaaggtttccagactggagatatcgtcaaagcagtggttatcaaaggcaagaaaatcggttcttatttgggcaaagtagctgttcgctcaagtggttcatttaatatcaaaactgtttcagaaacagtacaaggcattagttacaaatactgtaaacaaattcatcgtaaagatggctatgtttatgggtttcacggacagttaaaactgtcccacgattgttcctccgcgctttaa

SEQ ID NO: 1973 - DNA, 269 bp, unidentified
  misc_feature 1..269: note = Ga0119972_1000501 JGI
  source 1..269: mol_type = other DNA
gtcagaaatctcgtagaaagtaactccgctttaaaaagacggagcttgcaaacctagtatctgaccagtcctagtctttcacagactacgttaacggcaagagttaaagacctaccttggagtgcgtgccagctcgaagctcctagaaccaaaaagttaaacagacttatcgagattaaatcagtgctttttggatagtaccgaccgttaacttggacgaggcaaacattatcctttattggagaaaagacgcaaaaatgtctaacttt

SEQ ID NO: 1974 - DNA, 1392 bp, unidentified
  misc_feature 1..1392: note = SL_8KL_010_SEDDRAFT_10003558 JGI
  source 1..1392: mol_type = other DNA
atgtttaaaaaaacgttacaagtaaagttaaagaacacacttcaggatgctccactagtcctgaaccctgtaagttctgtattaaacagagaggaaactctcagtgtacaggacaaagtactggcttgtaacagtcccgaagtggatctactccaacatacaggagatcagaacttgagagtctctgatactgtgtatgtattaaacataaaaggatttcccttgatgcctactttttgtagaaaagccagactactgttaaaaacagggaaagcagtagttgtcagtagattcccttttactatacagttaacgtatcagacaggagaaaataaacaagaaattactttaggagttgatcctggatacaagaatgtaggattttcttgtattacagaaacaaaagagttgatttgtggaacagttgagttagataataatacttcaggcagattgacagaacgtagttcttacagaagaaacagacggaacaaattgaggtatcgtgaacctagatttaacaatagaataaggaagttgggatggcttcccccttcagtagaaagaagatatcaaactcatttgtctatagtgaataagttaagaaaaatattacctattcataagattattgttgaatcttgtaattttgatatacagaaacttaataatcctgaaattaaaggaaaagagtatcaagaagggaatctgttaggctattttaattctaaatcatatattttatcaagggagaatcattgttgtcagttgtgtggtaaatctgattctaaaacagatagttggagactgcatcacattattgagaggtctaaaggtggaaccgataaaccagataacttagctttgttacataaatcttgtcataaaagactacataaacaaggtttaaaacttaagaagaataaacaatataaagattctacttttatgaatattattaagaatagattacaaaaagaattaaattgtgatacaacttttggatatattacgcattttaaaagaaatgagttagaactagaaaaaactcattttaatgatgcttttattatagcaggtggaatttgtcagaaaagaatttctgattgttttgtagttcaaaaaaggaaaaataatagaagtatccagttaaacaggaaaggttttaaaccttcaattaggaaacagcgatataagttacaacctaaagatttagtaaaagttttagataggatttttgaagtagttggaacacattgtagaggtaaaaatgttgtgttaaaaaataatggaaagaatgttagtatttctattaagaagataagttggtattttaatgttaaaactttaatttggaatatgggaggaagtgtcaattcctctccctgctaa

SEQ ID NO: 1975 - DNA, 271 bp, unidentified
  misc_feature 1..271: note = SL_8KL_010_SEDDRAFT_10003558 JGI
  source 1..271: mol_type = other DNA
gtcaactacctgaagctaaagcattcaggcttgaatagtgatattcaacgtaagagttgattagggaaaattttaaattatgtttaaaaaaacgttacaagtaaagttaaagaacacacttcaggatgctccactagtcctgaaccctgtaagttctgtattaaacagagaggaaactctcagtgtacaggacaaagtactggcttgtaacagtcccgaagtggatctactccaacatacaggagatcagaacttgagagtctctgatact

SEQ ID NO: 1976 - DNA, 822 bp, unidentified
  misc_feature 1..822: note = Ga0255345_1030292 JGI
  source 1..822: mol_type = other DNA
atggtatatgtaattagcatcactggtaaagtattaatgccaacgtcaaatgcgaaagctagaatattactcaaacaaggtaaagcaaaagtggttacgattagaccgtttactattcaattgacctataagacgacggaatatacgcaaccaataacattggggattgatagcggttatttgaatattggtttcagtgcggtcactgaaaagaaagaattgattggtggtgaagttaaacttcttcaaaacatgagtcaacgaattcaagatagagctatgtatagaaccactcgaagacagaggttgagatatcgtaaaccacgtttcaataataggaaaaaagaaaaaggttggttagcaccaagcattcaacacaaattgaatagccacattagatttgttgagaagttgaagaaaattttgcctatcacgaaagtgatagttgaagtagcaagttttgatattcagaaaattatgaatccagatattcaaggtaaagaatatcaacaaggtgagcaactaggttattataatgttagagaatatgtatttcatagagacaatcacacatgtcagaatccgaattgtaagaataaagatgtggaaaagtatcttcaaacacatcacattgtatttagaagtaatggaggaacagatagacctaataatttaattactctttgttcacaatgccacacaccagaaaatcatttagaaggcgagtttttatataagtggcaaacagaaaagcctaaacttcgtgattttaaagaagctacatttatgtctattgtaagatggcgtttggttgatttgttg

SEQ ID NO: 1977 - DNA, 258 bp, unidentified
  misc_feature 1..258: note = Ga0255345_1030292 JGI
  source 1..258: mol_type = other DNA
atcaatagccaactatcctaaagggtagaggtttgtaggggaactacaagctggttgattagcctaagtcttaagtgactacgttatgtgagaatgatatagttaccttggaatgcttcactagttccaagctctaagggtagtgattaaacatctctaatggcaggagaagtgttgctgctaaaaacctcatataacattggcgaagtgaacctaccaccgtaaggtgcgttatatccgaaaggattgatttctatg

SEQ ID NO: 1978 - DNA, 1290 bp, unidentified
  misc_feature 1..1290: note = Ga0172372_10005216 JGI
  source 1..1290: mol_type = other DNA
atgactactaattcagtgttcgttttggacactaccaaaaaaccgcttacgccatgctcaccggcacgggcgcgggcattattaagggatggcaaagccgcggtttggcgtaccgcgcctttcacccttattttgaaggttgccatgcccgatgctgtcgtaaaaccgataaccgttaagatcgaccctggcagcaagcaaacaggtttggcgcttgttgatgctgatggccgtgttgtgtttgcagcggtacttgagcatcgtggcaaagccatcaaagcaggacttgagtcccgcaggtcgcttcgccgtggccgtcgcggacgtaacactcgttatcgtgcggcacggtttaacaatcgcattcgtcctgaaggctggttgccaccgagtttgcatcaccgtgtcgaaaccacattgacatgggttaatcgtttcagacgttggtgcggcgttgagaaaatttctgtcgagcgggttaaatttgacatgcaattgatgcgtaaccctgaaatatcaggcgtcgaatatcaacaaggcacgctagccggatatagttgcagagcgtatttgctggaaaaatggcagcgcaaatgtgcttattgcggtgctgaacacgttcccttgcaggttgagcatatccattctaaagccaaaggcggcggcaatgcggtttctaacctggcgttggcttgcgatccttgcaacaagaaaaaaggcacactggatataaccgttttcctgaaaaataaacctgaacaacttaagaaaatcctgtctcaagcgaaacgatcgttaagcgatgcggcgacggttaatgcaacacgtaataagttgtttgtcgaactgctgaacaccggcttacccgttgaagccggaaccggcgcacaaacccaattcaaccgaacccggcgggagtatccgaaggcgcattggatcgacgcggcttgtgtgggtaaatccggagcaactgttacgcttgatcctgatatgaagccgctgcttattaaagccaccggacacggaacacggcaggtggtgcgaactgataaatatggcttccctcgcaataaggccggacgagtcaaacggattcatggctttcaaacaggtgatctggttaagctcaagcaaccgaaaggcaaatacgcgggtgatcatattggacgcttagcgggcattcgcgctacggggcaattcgatattgctgctacggttggtaagataacagcaaaattcagcaatttcacactcattcaaagaggtgatggctatgcttacgcacactga

SEQ ID NO: 1979 - DNA, 320 bp, unidentified
  misc_feature 1..320: note = Ga0172372_10005216 JGI
  source 1..320: mol_type = other DNA
ttgtctaaattcgattcatcagttgagtgtccggcttgactgatttcaagcgcacgtcctgtgcgctcttatcagtcatttttgtcagtgtgcttacgcctactgatgatgctcaaccaggctcggtctctccaaagagactacgttatttaggtcatgacacctgcaaatgcttcaccagtttgcagctctgtcgttaaccattaaacagcacagaccggaacaatgggcagtgtgattaacatgacaagcctttataactttgccgaggtgacaattacgggtgaaagcccaggagaagttttatgactactaattca

SEQ ID NO: 1980 - DNA, 1020 bp, unidentified
  misc_feature 1..1020: note = Ga0334826_004099 JGI
  source 1..1020: mol_type = other DNA
atgatgatgttagtaggtgttgtatataatggaagtgctttgatgccttgttgccctgcaagggcaagaagactcattgcgtccagaaaagcaacacctttcatccataaaggtgtgttctgtatcaggttgaatcagtcaccttctgataataaaatacaacctatatcaatcggggtagaccccggatcaaagaaagaagggatatcaatagtaactgaaaagaaaactgtaattaacattcagttggatgctgtcacttgggttaaggatggtgtagaatcacgaagaaatgctcgcagagcgagaagatttcgtaaaaccccttgtaggaagccaacatcagataattatactcgtgataattggttgcctcctagcacaaaggctcggtggcaatccaaattgaatttgattcgttcgttacatcagatatttcctatgtccatatgtgtagtcgaggatatttgtgctgtcacaaaagaaggacaacctaaatggaataaatctttcagtccaatagaagttggtaaatcatggctttatacacaacttcaaaccgaaggtttcagtgtcgtgttaaagaaaggatttgaaacatccgagttgcgtaaacgactcggactgcataagtccactgataagttatctgataaatgggatgctcattgtgtcgatagttgggtactagctgcatctgcgatgcaaacactcccgttaattgacaagagcatgatattaatcaaaccaatgcaatttcatcgtagacaattgcatgcattccaacccgccaaaggcggggttagaagactatatggatctactagatcaatgggatttcgtagaggatcaatcgtatcacatcctaaattcggaatcgccaccataggtggcaattccaaaaataaattaagtctacactctataaaaacaggtaaaaggttaactcaaaatgctaacatcaaagatgttaaattcaaatcattcaacaattacaacgttttcactccccgaagctaa

SEQ ID NO: 1981 - DNA, 284 bp, unidentified
  misc_feature 1..284: note = Ga0334826_004099 JGI
  source 1..284: mol_type = other DNA
gtcaatcacccctgaactgaaagattcaggggcttgcgactgggaagattagtcatctttgtaaaagaagcgagatatattgaactgattgaactagcctatgcgagttttgttccgcaaggaacaaaatatagcaaactgaattatctatccgtgacagggtaagacatctactggtgctcgtctagctggtagctctgtgatggtcagtggcgaagatgtatatataccccagtaatgggagtgcccttacgggcaaattttagaaaggaatgatgatgtta

SEQ ID NO: 1982 - DNA, 1287 bp, unidentified
  misc_feature 1..1287: note = Ga0310786_10002951 JGI
  source 1..1287: mol_type = other DNA
atggtctatgtactgaacagatacggtaaacctctgatgcctaccacccggtacggcagggtccgccgtctgctcaggaaaggactcgcggtcgttgtcgattaccgtccattcacaatccagcttacttacgacacgccgaacggcgtgcaggaggtcagtctaggcgtagacgcgggaaccaagcacgttggtctctccgccactaccaagaagaaggtgctattcgaagcagaattacttttaaggtcggatatcgtggataagatctccacgcgaagggagttccgtcggaccagaaggaacaggaagactcgctaccgcaagtccaggttcctgaacagggcccgctccaagaagccgggatggcttgcaccttccgtacggcagaaggttgattctcacatctactggatttcgaagatacgcaaattcttgcctatcaagaagataaccgtggaaaccgcgcagtttgatacccagctgatgaaggctcaggaacaggggcttccgttgccacagggcaccgactaccagaagggtgaacagctcggattctggaatgtgcgtgaatacgtgctgttccgggacggccataaatgccagtgctgcaaggggaagtccaaggacagtaaattgcatgtccaccatatcgagagtcggaagacaggcggcgatgcgccgaacaacctcatcaccctgtgctcgaaatgccatgagaagtaccatcttggagaaatcgaactgccgaagaccgcaaagcgtggtacctcgctgcgtgacgcggcacagatgggtatcatgcggaagtccctattcatccggctgaaggaagaaattggaaacgaaattccttgctacgagacgtacggatacatcaccaagaatattcgcaccacggcaggcctaccgaaggaacatgtgaatgatgcccactgcatcagcggcaatcccggtgcatgttctgatggcaagtacttgatcatccgcaagttgcgtgcgaacaacaggcaactgcaccgtgcaaccattatgccgggcggaaagcggagaaacaaccagtcaccccgtgaagtaaggggcttccggctgatggattccgtcaggtatgcatacagggagtgctttctgagcggacgtaggatgtcaggctcgttttccgttgcggatatcaccggaaaagttctggcagattcggtcagttacaagaagctgacattaagacatcacaacaacacttacattatggaggaagcagcgctcctctcacccactaaagatgggtga

SEQ ID NO: 1983 - DNA, 294 bp, unidentified
  misc_feature 1..294: note = Ga0310786_10002951 JGI
  source 1..294: mol_type = other DNA
atcaactacccacgggctaaagacccgtgagtttggggtaactcaggctcatagttgattagactcagtgatgcaagtagaaatacttgctgaactacgttaggaaggtcacggcaccctgggatgtacggtcaagtcccccgccctgccgagcgtcattaaacagtcctgatgggtagggacagtgtggcgttcatgacaagcctccctaacattgtcgatgaccacccacagggagtaatccctgcattacctattaagttaggttaaaacataaaggataacgactagatg

SEQ ID NO: 1984 - DNA, 1359 bp, unidentified
  misc_feature 1..1359: note = Ga0393278_0000470 JGI
  source 1..1359: mol_type = other DNA
atgcagaagttagaaaaaagaaatacatacacacccacaaatacttctctagtttgtggcaactgtgattttttattaaacagagaccaaaatctcagtgtaaaaaattcaaaaactttttctaacaatctcgaagagactcaatcccaacatagagggaaacagggcttgagagttcctgttgttgtctatgtacttaatatgaggggagaacctctaatgccaacaacccctagaaatgcaaagaaatttctaaaagaagaaaaagcaaaggttgttaaacgatgtccttttacaattcaattgctcattcaaacaggagaatcaaaacaagaaattacatgtggaatagattctggttataataagatagggtatgattgtttaacaaagaaaaaagttttaatcaatggtgaattaaaattagatcagggtatgaagaaaagacttgatgaaagaaaaaggtatcgcaaatataaaagaagtaaattgtggtatcgtaaacctagatttttaaacagagcaaaaccaaaaggttggctttcaccatctattcagagaaaatttgatacccacatttctttaattgaaagattaaagaaaatacttcctatcacaagagtggttgtggaagtaggacagtttgatattcagaaaatagataatcctgatatccgagcaatagaatatcaacaagggaatctatataactatacaaatgtaaaaggttatatcttttcaagagaaaatgggacatgccaactgtgtaaaaagaaagacggtaagtttcaattacatcatataactccaagaagcaaaggtggaacagacaggcctagcaatttggctttacttcataaatcttgccatgataaattacataggaaacatttagaacattctttaagtaatagtaggcaacataagaccagttcgtttatgaatattatttgcaaaaaatttaaagatttaaatttcgaaattacatatggatatattacatttgtgaatagaaataatttaaatttagaaaagtcacatgcaaatgatgcttttgtgattgctggtggaacaactcaagagttcactaggccatatctaattattcaaaaaagaaaaaataatcgtagtttgcaaactaatagaaaaggttttaagcccagcatcaggagaagtcattatatttatcaacctcatgatcttgttatgtttaaaggagagatttgtgaagttgttggcacgcatagttatggaaaagcgatattggttaaaaataatttagggcaaaaatttggcgttaggattaaaaaaatagtttctttatttcacacgaatggtttaatatggagatatgagtaa

SEQ ID NO: 1985 - DNA, 264 bp, unidentified
  misc_feature 1..264: note = Ga0393278_0000470 JGI
  source 1..264: mol_type = other DNA
gtcagatacccatgtgtaaaaccatgggctttgtccgagagggctaagggcaactagatgattagagagcttggaaaggagaacttaccatgcagaagttagaaaaaagaaatacatacacacccacaaatacttctctagtttgtggcaactgtgattttttattaaacagagaccaaaatctcagtgtaaaaaattcaaaaactttttctaacaatctcgaagagactcaatcccaacatagagggaaacagggcttgagag

SEQ ID NO: 1986 - DNA, 1407 bp, unidentified
  misc_feature 1..1407: note = Ga0207870_100010 JGI
  source 1..1407: mol_type = other DNA
atgcagcagagagtgttggtcgtaggaagggacagaagtccgctcatgccgtgcagtcccgcccgagcccgaatgcttctgagaggcggtcgggcggcgatcctgcggcggtatcctttcacgatcatgttgagggatagagaaagcggtgaggttcagccggtcgcggtgaagtgcgatcccggttcggagaccacgggcatggccttggtggctgagtttggcaggcgggggccaaccgcggtctgggcagcggagatccaacaccggggcaaacaggtccggaaggcactcatgaaaaggcgggttctccggcgagccaggagaaatcggaagacgcggtaccggaagccgcggttcctgaaccggaatccgcaaaaatgcgacggatgcgggaagaacgctaagcacggcagccggtactgtcgcgcctgcggggcgggagacgggcatgggttccgggacaaacgcttgcccccttctctggaaagccgggtcgaaaacgtcgttacttgggtgaaccgtctctgccgatatgcgccggtttccttgataacggttgaacacgtcaaattcgacacgcagctgctccagaaccccgatatctcgggcgtggaataccaacgaggcacccttttcgggtatgagttgcgggagtacctgctggagaagtttggccgccagtgtgcgtactgtgggggagcatcgggagacgaagtgctgaacatcgaccacgtggtcccgaggtcgcgaggcggcagtgacagggtgagcaacctggcggtggtctgccggacgtgcaacgaggcgaaaggaaaccggatgccggaagaatggctggaggagttacatgcatcggtccggccgcttgatctcattcgggcgcagcgttttcccgaagcgctgaaaaggctcaaacagcctctccgggatgcagcggcggtgaacacggtccgatgggtgatcgttgagcggttgaagagactcggtttgccgttggagctgggatcgggcggtcagacgaagcgcaaccgttcgagccgaggttatccgaagaaacactggatcgacgcggcttgtgctggggaatcaggggagtgtgtgcggcttgacccggacatgcgaattttgcggatcgaggcaaaggggcatggaacgcggcgccggtgcgggacggacaagtacgggtttcccatacggcacgcgcctgctgcgaagtcgtacatggggtttcgaacgggggaccttgtgcgggctcatatcccgcgagggaagtatgcgggcacgcacgttggacgcattgctatccggcaccggccgagtttcaggctcaacgggttcgacgtgcatccgaaacacttgaaacttttgcagcgaggtgacgggtatgcgtacaacatgggataa

SEQ ID NO: 1987 - DNA, 287 bp, unidentified
  misc_feature 1..287: note = Ga0207870_100010 JGI
  source 1..287: mol_type = other DNA
gtcaaccaccccatggctaaagccaggggcttgtgaagaacaagcccggggttgaccagccgaagtccggaggcccattgccttgcggggctacgttattccggtcatgacaccttggggtgcgcgagccagctccaagccctgtcgcgggcggttaaacaggcatacggggtcgaagccggtgccgttcgcatgacaagccgggataacatcggcgaggctcacttgaccgtccaggggcgtaagcccgggacgagggaggaggcgtaagtcccatgcagcagaga

SEQ ID NO: 1988 - DNA, 1299 bp, unidentified
  misc_feature 1..1299: note = Ga0224415_10011456 JGI
  source 1..1299: mol_type = other DNA
atgccgacctttaatttcaggaaagtgcgcaggctccttaagagcgggcgggcggatatcttctgccatgagccctttacgatccggcttctgtacgccgaaaagcttgacacacagccagtagaactgtgcattgacgccggggacaggcacatcggcatatccgtaaagagcgaaaagcacgagttcgtccacgcccagtacgatcctctaagggatgagaaggaaaagcatgatgacaggcgcatgtaccgaaggacgagacgaagccgcagacggcacagaaagtcccgcttcgacaacaggaagaagccggaagggtggctcgctccgacggtggagcacaagaaggacctgcacatcagcattacgcagatgtacatcagggtctgccccgtaaccagcatcacggtagaaacggcatcctttgacacacaggccctggaagccatagaaagaggactgccgctgccgaagggaaaggactaccaaaagggtcctcggtacaggatgaacaccctgcgggacgccgtgttttaccgtgacggccacagatgccgcttgtgcgggaataatggcgtgctcagggtacatcacatcggctactggaagggcgaccgttccaaccgcatggggaaccttgctgcggtctgcacgggatgcaatacgcccgcaaaccacaggaagggcggaaggctctacggctgggagccggagatcaaaccccttaaaggcgcggcctttataaacgcggtgagaaagaggctggcggaagaactgagagaaagaacttctcttcccgtgacagagacaaacggcagcgccacaaagacggccagaaagcgcttctgcatagacaagacccacgcgaacgacgcttttgtcatgggaaaatttcacccgaggcacaggcggcaggagcaggtctggcagaagcgcaggagaaataaccggatcctgtcaaagttctatgacgccaggtatgtggacatccgcgacggaaaggtaaagtccggacaggagctgtcctacgggaggctgaaaaggagcgaatccagaaattctgaaaagaacatgcgtccgttccgaggccgcaaggtgaggaaaggccgtgtcagtacaaggaggcggcgctatgccataaggcccgggaccatagtcgtatacgatggacagaaacagtccgtcaagggcatccactgtggcggaacaagggcggttttagaaaacggaaagagcgtatccgtcaaaaaaatcaggggactgaggttccccggcgcatggatgcgcatatcgtaa

SEQ ID NO: 1989 - DNA, 503 bp, unidentified
  misc_feature 1..503: note = Ga0224415_10011456 JGI
  source 1..503: mol_type = other DNA
gtcaactacccaccgcttaggttctgatgagccttgaagcgggggcttgtagaaagagggaattgtttcttttctattgcaagcccggttgattagccgtgcggatgcaggtccaaaaagggaaaccgcatccgctgcgcggggaaacccgcacaagtgaccccggcatatgccgggagggaactacgttccgggagaaggtatgtaagtgaggcagtctctgccatcaccgcatacgcaggcaccatgggatactccacacgtcccatgcagctgcgccgcagcgttaaacatccctgagggtaaggggaagtgcgctgcgggttgaaaacctcccatgaacatcggcgaagtggatcacccactaaaaaggagaatccgcaggcgacaaactgtaccacgtacagtaaaaggctgcggaaggcgtaagccataacaagaaacattaacactatcgcctgcgggcatggccggaagcacgaatacggctatgggccgcagag

SEQ ID NO: 1990 - DNA, 1545 bp, Moorena sp.
  source 1..1545: mol_type = other DNA
atggctacgttccgcacagggcagaagacccaccaggccgtgcttcctcagcggcctgctctggaatcggagtcggtagacacgccccggatcgggcacgaaacgggacttcggcaccaccccagggtggtatccggtgcggaccatgtgcgaggggagaccaccctcatctcacctgatgtcggtggcgtcaccacccggcctttggctggggagaggccgcgtgagcggcacccatccgtcttcgtcctggacaagaaccagattccgctccagccctgtcacccggccagggcccgcaaactgttgaacaagggtcgggccgtggtggcccggcacacccctttcaccatccggctcaaggaccgcaccatcgccgagtccgaggtggacggtgtccaggtcgggatcgacccgggcagcaaacacaccggtatcgcggtgttcacccagcatgccggggaacgacgcggccggtacgcgatccagctcgaccaccgtggtgcgcgaatccgaaagaaaatcggccaacgctccgcctataggcggggtcgtcgcttccggaacctgcgccaccgcgcaccccggttcgccaaccgcacccgcccccaagggtggctcgcgccgtccctgcgacaccgggtggagaacaccaccggttgggtggaccggctcacccgatgggcaccggtcaaagcggtgcacgtggaacgggtcgccttcgacacccacgccctgtccgccggcaagcccctagagggcgtggagtatcaacggggcaccctgcacggctatgaggtacgcgagtacctgctggccaagttcgaccgtgcctgtgtgtactgcggggccacgaacacaccactcaacctggaccacgtccacccccgctcccgaggcgggtccgatcgggtgtccaacctggtgttggcgtgcgtgacctgcaaccaggccaagaacaaccggcccgtcgaagagttcatcaccaacaagcaggtcttggctcggattctggctcgggccaaggcacccttgcgagacgcggcggcggtgcagtccacccgatgggcgctctggcgcgctctgaacgaacggttgcctactcatgtcggttcgggtggtcggaccaagtggaaccggacccgcaaccacctaccgaaaacccacactctggacgccctatctgtgggcaagatcgacaccatcacccagaccaccaaccgggtcctggtcgccggatgtgcgggccggggctcctacgcccgcacccgccccgacaagcacggattcccgaggctgcgcctgccccgaaccaaggagttcttcgggttctccaccggcgatctggtccgggccgtggtcccccagggaaagaagaccggcacctataccggccgggtcgcggtacgcgcctcgggcagcttcaacatcaccaccacccaaggcaccgtccaaagcatccgttacaagcacatgcgtctactccaacgagcggacggctatggctacacctggaagggagagggcgtttcctcccggtcctga

SEQ ID NO: 1991 - DNA, 300 bp, Moorena sp.
  source 1..300: mol_type = other DNA
gtaaagggatctcggtcctgaaggaccgggcttttcagccccttgtggctgagagccgtctttaccagcaccagccatcgcctacggggaggtgacctcgatggctacgttccgcacagggcagaagacccaccaggccgtgcttcctcagcggcctgctctggaatcggagtcggtagacacgccccggatcgggcacgaaacgggacttcggcaccaccccagggtggtatccggtgcggaccatgtgcgaggggagaccaccctcatctcacctgatgtcggtggcgtcaccacccg

SEQ ID NO: 1992 - DNA, 1356 bp, unidentified
  misc_feature 1..1356: note = Ga0118657_10064171 JGI
  source 1..1356: mol_type = other DNA
gtggcaatctttattttagattgcacagaaaaggagttaaatgtgaaagtatttgtgcgaaacaggcagggacaaccgttgatgcccactacaccccgcaaggcgcgtttgttgctgaaggcgggcaaggccgagattgtcgggcgggaacccttcaccatccggttgctgtacggctcaagcggatacaggcaggacgtaacgctgggcattgatgccgggtacaagatgataggctatagcgccgtcaccggccagcgggagttgatcggcggtgaggtggtgatgctgaaggggatgtccgagcggctcaaggaacgggcgatgtaccgccggggcagacggaaccggaagcggtatcgccagccacgatttgacaaccgcaagcggcctgccgggtggcttgcgccgtccattcagcacaaactggatacgcaccggcggttgatagcgcgcattgagtctgttttgccggtgacaagaacgatcatcgaggtggcgaactttgacattcaggccatcagggaccccagtattgagggcaaggcgtatcagcaaggggaacaggcgggcttctggaacttgagggagtacattctgcatcgggacaagcaccaatgccaaaatccggcttgcggaaacaaggccaaggataaggtgctggaagtgcatcacatcgggtactggaagaaagaccggtcggacaggccgggcaacctgagcacgctttgtacgaagtgccacaccccgaggaaccatcaacccggcggtttcctgtacggctggcaacctgcactcaaatcgttcagaccggaaacgtttatgagtaccgtccggtggcggctggttgagggcgagggaacaagccatacctacggctatcgcaccaagtcggggcgcattgcgctggggcttgagaagtcacaccacaacgacgcctttgtgattgcgggcgggcgagagcaggaacgaactgaagcaattgactttgaacagatcaggcgaaatgaccgcagcttgcagaagttctatgacgccaaatacatcgacattcgcacggggcgggaagtgaaaggggctgaactctcatcaggccgaaggacgcgcaaccgcaacctgaacagcgagaacctacggcgataccgaggtccgaagaaacctggccgtctgcaaatcagacgcaggcggtatccctatcagtcgaatgacctgattatggtaggaggcgagaagtaccacagcaagggtacgaaagactacgggcgatacatcgttgttgacgggttgcagaaggcggtcagggctgcgctggtgaccccggttcggtggcgaaaagggctttgcacggcaatctga

SEQ ID NO: 1993 - DNA, 286 bp, unidentified
  misc_feature 1..286: note = Ga0118657_10064171 JGI
  source 1..286: mol_type = other DNA
gtcaactacccatgctttgaaagtgtgggcttgcggtagcgcaagcccggttgattagcctcagccaccacccgcaagggtgacggggctacgttaaggatgaaaacataggtacttcgggatactctacacgtcccgaacactacgggtcaggtctaaacatcgctgagggtaggcgaagtggcttgactgtatacaaccatctttaacattggcgatgtagaccacaccggaaacggtggcaatctttattttagattgcacagaaaaggagttaaatgtgaaa

SEQ ID NO: 1994 - DNA, 750 bp, unidentified
  misc_feature 1..750: note = Ga0120401_1023611 JGI
  source 1..750: mol_type = other DNA
atgagagttccagtagtatctaaagatgataagccacttatgccaactaagccagctaaggcacgtaaaatgatagaaggtagagtggctaagaagtgttggtcgaagactggcgtattctacatacaaatgttaatacctgtgggcaaaaaagttcaggatatgttcgcttcgctcaccgacgacttcgtcttacgggcactggcaatagaccctggcagtaaatacgatggatatgccgtgtctggtgagaaagatgtggcactcaaaacgatggcaataatgccacagaaggtacaaaagaaagtaactgagcggcgtcaattaagacgcagtagacgttatcgtaatacgagacgcaggaaggcacggtttgacaacaggaaacgcaaagctgggtggatagcgccgtcacaattggctaaagtgcagttccgcattaaggtagtacaagatttagccaagatgttccccctcaactatatcgctgttgaggatgttaggttcaaccattacaagaagcgatggggtaagcatttctctacagtggagataggaaaggcgatgttgtacgaggaattggaacgacatggcaaagtgataaagtacgctggttggcaaacggcagaagcacggaagtattggggcattaagaaatcaagcgctaaagatgctctgataccttcttcccatgccaatgatgctcttgcgatgctcaatgaagtattcggggataatgtggataattca

SEQ ID NO: 1995 - DNA, 268 bp, unidentified
  misc_feature 1..268: note = Ga0120401_1023611 JGI
  source 1..268: mol_type = other DNA
tcagtcaatgacccctcctgaatcatagattcagaagggcttggagatgcaggactctaagggtaactcttgactagagggcttaggtaatcctaagcaggcgcactgcgatggtacatacgtcagagtatttcgcaagctctgacctctataagctgcctcttgcgggtagcggggaaggacccgacatctttcgcagttgcaatctcgatgcgacctttactttatgtcccgaatatcgggactccgaaaggagacagcaatgaga

SEQ ID NO: 1996 - DNA, 1284 bp, unidentified
  misc_feature 1..1284: note = human gut metagenome genome assembly, contig:NODE_564_length_37814_cov_32.665907, whole genome shotgunsequence WGS
  source 1..1284: mol_type = other DNA
atgagagtatttgtattcaatatgcgtggcagaccattaatgccatgctcacaaagaaaagccagattactcctaagggaaaataaggctatgatttataaatatcatccatttacgattcagctgacttatacaactggagaaacaaagcaggactgtcatataggtatagacacaggttctaaatatataggagctgctgtcagatcagaggataaggttttttggaaaggcgaaatcgagcttcgacaggatatcaggtcaaatcttgatacgaaacgtatttatcgcagaagcagacgaaatcgtaaaacaagataccgaaaaccaaggtttttaaatcgtaagagaagagatgaatggcttccacctagcttgcaaagcaggataaatcatacgtttcattggattgacacattgagtagtttggttccaaaccccattcttcacatagaagtcggtaagtttgatgtagcaaagatgataaatcctgaaatccatggagttgactatcaacatggtcagacatatggtttcttcgatgaaaggtattttgtttttgcaagagataactacacttgtcagtgctgtggaaagtcaaaaaataagattttgaacacacatcatatcatctaccgcagtaatggcggaacaaacagagttgataatcttattacagtttgcacagattgtcatacatcgcagaatcacaggaaaggtggaatattctatcaatggcaggagcagcataaaaaggtaaaacaatacaaagaaccgccgttcatgaataccttacgtaagaggatatttgtagcgtatccagatgctgagatcacatatggatctgaaacaacaccaaaacgtaaggcgatgaaattggataagacgcactataatgatgcgattgtcattagtggtatcaatgaaatcaatgaaatcaaagaaaatcctgaagaatggttactgataaaacaattccgcaaaaagaaacgctctttacacgaggctaccgcccgtaagggaagaaaaaagccaaacagaaatcagacgcgtaacagtaagaatacgccttattataaaggattttatcttaacgataaggtttcagtttttggaaagagtggatatattacaggatttacgagcaatgcggcatatataaaagatgagaacaatgactatattactctgccaaacaaaacctataaacaggtcagcatcaataaaatgaagttggaatgtcataacaacaattggcagtacataataaaaaatgctgtgtaa

SEQ ID NO: 1997 - DNA, 286 bp, unidentified
  misc_feature 1..286: note = human gut metagenome genome assembly, contig:NODE_564_length_37814_cov_32.665907, whole genome shotgunsequence WGS
  source 1..286: mol_type = other DNA
gtcaataaccccgacctacagtaataactgttgaggtcggagattgtaaaagctcatattgactagcctaagttcttcgagaactacgttgtttatgttatcacacctgcgaatgataccatagtttgcagccttgtgtaggctctgtaaaagttctgtgaggtaggaacggtcaacctagtatgttcgatcacgacaagcatttacaacattggcgaagggtaacaaactttcaaaagaaagggacagcacttgagagtagctgtcaaaggtaaaaactatgaga

SEQ ID NO: 1998 - DNA, 714 bp, unidentified
  misc_feature 1..714: note = Ga0392328_0075420 JGI
  source 1..714: mol_type = other DNA
atgagtgtatctgtctatgtgttgaacatgagggggaaacctctcatgcccacaacaccaccaaaagcaagaaaattaattaaaaatgaaaaagtaaaagtaaagcaaagattaccatttattatccagttaaaatatgttactggagaaacaaaagaaccaattaccttaggaatagactctggttatcaatttgttggcttttcagctaatacagagaagaaagaattaatatcaggagaactagaacttagaaaagatatttcaaagaatcttactcaaaaaagacaatatcgaggaaccagaagaaatagattatggtaccgtaaaccacgctttaataatcggggttctaagaaaaaaagctggtttgcaccaagtattaagcacaagttaacctctcacaagaaactgattgaaaaacttgagcaaatacttccaataaccagaataattattgaagttgctacttttgatgcccataagatgaagaagccggaggtaacgggtgttgaatatcaacagggtgatcttcaaggttatgagatcagagaatatttgcttgaaaaatggaagagaaaatgtgcttattgtgacaagaaaaacgtgaaattggagatcgagcatattattcctaagtcaagaggaggaagtaatagagtagataacctaactatttcatgcagaaaatgcaatcttaaaaaaaggaaataa

SEQ ID NO: 1999 - DNA, 289 bp, unidentified
  misc_feature 1..289: note = Ga0392328_0075420 JGI
  source 1..289: mol_type = other DNA
gtcaatcacccactatcacccttcggggtgagacggggcttgtggagtgatctacaagagtaattggttgattagcctaagaggagtatgaaaatatgaaatctaagttatcagtaaagttaaagaacacaccaaaggatgcttctcaagtcctttgctctgtaagcggtggattaaacagagaggaaactctcagtgttcaccgcaaagtactggctgataaccttggcgaagagaacctacttcttaaatttttaaagtttaaggaggacagaacatgagtgtatct

SEQ ID NO: 2000 - DNA, 1290 bp, unidentified
  misc_feature 1..1290: note = Ga0207193_1000100 JGI
  source 1..1290: mol_type = other DNA
atggtatatgtattaaataaagatgggaaaccactcatgcctagcattagacatggtaaaatcagaagaatgttgaaagagaagaaagctgtagtagttaaaactactcctttcacagttaaactcttatacactcctaagacaaatgtaatacagaatctagttctaggaatagaccctggaagtagaactctgtcaactgtagttagagttgagaaaactcctaaactagtctatgtttctgaagttaaagttagaactgatattactagtaagttgaaaaagagaagttcctacagaaaaactaggagaaatcgtaaaactagatacagagaatcacgtttcttaaacaggaaaaggaaagagaaatggctaccacctagtgttgtttctaaacttaattctcacaagaaagagataaagtttatctttaacatcttacctgtctctagagtaatcctagagagaaatacttttgatactcataagttaaagaatcctagtatcagtggtaaaggatacaaacatggtacactctactcttatgagaatcacagacagtacgttttaactagagataagtactgctgtagaagttgtaaaaagaagaatgtagttctcaacactcatcacattacgtttaaaagtaaaggaggaaaagatcactactctaacctagttaccctttgtgaaacatgccacaagaaagttcacagtggaaagttaaaactacataagaaacttctagctagtctaggaacaagtgtaaacacattagatgctactcacgctacaatcatttctaagagactagaagaatttctcttaaaacacaaagacagaagaaattataaatttttaactacttttgggtatgagacagtagtaaaaagaagaattctaaagttaaagaaaactcactacaatgatgcaatttctatatcctatcctattaaaacctcttactctaagactagagcagaatttatgtttagaaagatatcggtgagtaaaggagactaccagcagactaaaggtgtaagaagtcaggtaaagatacctacttgcaagattcatgggtttaggaagtttgacattgtacagtatcttggaaagtattacattattaaaggtagaatgagttctggttacgcaattcttatgaattctaagttaaaaccagtaaattttggaactaatggtaagagtaaacctactgtgaactttaaacttttgaaaagaattagttctagaagaagtactcttataatagaagttagaaaacactag

SEQ ID NO: 2001 - DNA, 308 bp, unidentified
  misc_feature 1..308: note = Ga0207193_1000100 JGI
  source 1..308: mol_type = other DNA
gtgagctacgtcgggctaaagcactggcgcttctctaaggagatgcagtagttcaccagactcaggttagagaaatctaaactacgttgaagaagttaccacacctaagaatgccgcctcagttcctagctctgtgtaggctctgtaagaagggatgcaaaacccggtcaacctaagttcgatgtcccaaggacacaagctttttcaacattgtcgagaggaagttggaagatttcaatggttatagctgaaattagtacacgttacatcgaaagatggcttatagcaaactttaaaggtaatttatg

SEQ ID NO: 2002 - protein, 7 aa, Simian virus 40
PKKKRKV

SEQ ID NO: 2003 - protein, 16 aa, synthetic construct
  REGION 1..16: note = Synthetic nucleoplasmin bipartite NLS
KRPAATKKAGQAKKKK

SEQ ID NO: 2004 - protein, 9 aa, Homo sapiens
PAAKRVKLD

SEQ ID NO: 2005 - protein, 11 aa, Homo sapiens
RQRRNELKRSP

SEQ ID NO: 2006 - protein, 38 aa, Homo sapiens
NQSSNFGPMKGGNFGGRSSGPYGGGGQYFAKPRNQGGY

SEQ ID NO: 2007 - protein, 42 aa, Homo sapiens
RMRIZFKNKGKDTAELRRRRVEVSVELRKAKKDEQILKRRNV

SEQ ID NO: 2008 - protein, 8 aa, Homo sapiens
VSRKRPRP

SEQ ID NO: 2009 - protein, 8 aa, Homo sapiens
PPKKARED

SEQ ID NO: 2010 - protein, 8 aa, Homo sapiens
PQPKKKPL

SEQ ID NO: 2011 - protein, 12 aa, Mus sp.
SALIKKKKKMAP

SEQ ID NO: 2012 - protein, 5 aa, Influenza virus
DRLRR

SEQ ID NO: 2013 - protein, 7 aa, Influenza virus
PKQKKRK

SEQ ID NO: 2014 - protein, 10 aa, Hepatitis D virus
RKLKKKIKKL

SEQ ID NO: 2015 - protein, 10 aa, Mus sp.
REKKKFLKRR

SEQ ID NO: 2016 - protein, 20 aa, Homo sapiens
KRKGDEVDGVDEVAKKKSKK

SEQ ID NO: 2017 - protein, 17 aa, Homo sapiens
RKCLQAGMNLEARKTKK

SEQ ID NO: 2018 - protein, 4 aa, synthetic construct
  REGION 1..4: note = Synthetic
GGGS

SEQ ID NO: 2019 - protein, 5 aa, synthetic construct
  REGION 1..5: note = Synthetic
GGGGS

SEQ ID NO: 2020 - protein, 9 aa, synthetic construct
  REGION 1..9: note = Synthetic
GGSGGSGGS

SEQ ID NO: 2021 - protein, 15 aa, synthetic construct
  REGION 1..15: note = Synthetic
GGGGSGGGGSGGGGS

SEQ ID NO: 2022 - protein, 5 aa, synthetic construct
  REGION 1..5: note = Synthetic
GGGGS

SEQ ID NO: 2023 - protein, 10 aa, synthetic construct
  REGION 1..10: note = Synthetic
GGGGSGGGGS

SEQ ID NO: 2024 - protein, 20 aa, synthetic construct
  REGION 1..20: note = Synthetic
GGGGSGGGGSGGGGSGGGGS

SEQ ID NO: 2025 - protein, 25 aa, synthetic construct
  REGION 1..25: note = Synthetic
GGGGSGGGGSGGGGSGGGGSGGGGS

SEQ ID NO: 2026 - protein, 30 aa, synthetic construct
  REGION 1..30: note = Synthetic
GGGGSGGGGSGGGGSGGGGSGGGGSGGGGS

SEQ ID NO: 2027 - protein, 35 aa, synthetic construct
  REGION 1..35: note = Synthetic
GGGGSGGGGSGGGGSGGGGSGGGGSGGGGSGGGGS

SEQ ID NO: 2028 - protein, 40 aa, synthetic construct
  REGION 1..40: note = Synthetic
GGGGSGGGGSGGGGSGGGGSGGGGSGGGGSGGGGSGGGGS

SEQ ID NO: 2029 - protein, 45 aa, synthetic construct
  REGION 1..45: note = Synsthetic
GGGGSGGGGSGGGGSGGGGSGGGGSGGGGSGGGGSGGGGSGGGGS

SEQ ID NO: 2030 - protein, 50 aa, synthetic construct
  REGION 1..50: note = Synthetic
GGGGSGGGGSGGGGSGGGGSGGGGSGGGGSGGGGSGGGGSGGGGSGGGGS

SEQ ID NO: 2031 - protein, 55 aa, synthetic construct
  REGION 1..55: note = Synthetic
GGGGSGGGGSGGGGSGGGGSGGGGSGGGGSGGGGSGGGGSGGGGSGGGGSGGGGS

SEQ ID NO: 2032 - protein, 60 aa, synthetic construct
  REGION 1..60: note = Synthetic
GGGGSGGGGSGGGGSGGGGSGGGGSGGGGSGGGGSGGGGSGGGGSGGGGSGGGGSGGGGS

SEQ ID NO: 2033 - protein, 32 aa, synthetic construct
  REGION 1..32: note = Synthetic
LEPGEKPYKCPECGKSFSQSGALTRHQRTHTR

SEQ ID NO: 2034 - protein, 20 aa, synthetic construct
  REGION 1..20: note = Synthetic
PKKKRKVEASSPKKRKVEAS

SEQ ID NO: 2035 - protein, 21 aa, synthetic construct
  REGION 1..21: note = Synthetic
GGSGGSGGSGGSGGSGGSGGS

SEQ ID NO: 2036 - DNA, 27 bp, synthetic construct
  misc_feature 1..27: note = Synthetic
  source 1..27: mol_type = other DNA
ggtggtagtggagggagcggcggttca

SEQ ID NO: 2037 - DNA, 72 bp, synthetic construct
  misc_feature 1..72: note = Synthetic
  source 1..72: mol_type = other DNA
ggtggaggaggctctggtggaggcggtagcggaggcggagggtcgggtggtagtggagggagcggcggttca

SEQ ID NO: 2038 - DNA, 48 bp, synthetic construct
  misc_feature 1..48: note = Synthetic
  source 1..48: mol_type = other DNA
tcgggatctgagacgcctgggacctcggaatcggctacgcccgaaagt

SEQ ID NO: 2039 - DNA, 192 bp, synthetic construct
  misc_feature 1..192: note = Synthetic
  source 1..192: mol_type = other DNA
gtggataacaaatttaacaaagaaatgtgggcggcgtgggaagaaattcgtaacctgccgaacctgaacggctggcagatgaccgcgtttattgcgagcctggtggatgatccgagccagagcgcgaacctgctggcggaagcgaaaaaactgaacgatgcgcaggcgccgaaaaccggcggtggttctggt

SEQ ID NO: 2040 - DNA, 108 bp, synthetic construct
  misc_feature 1..108: note = Synthetic
  source 1..108: mol_type = other DNA
ggtggttctgccggtggctccggttctggctccagcggtggcagctctggtgcgtccggcacgggtactgcgggtggcactggcagcggttccggtactggctctggc

SEQ ID NO: 2041 - protein, 400 aa, synthetic construct
  REGION 1..400: note = Synthetic
MSTDATLIRTTPSHAEADATDTLVATPLMPPRRVISPWPGPGEGQSLMRIPVVDIRGMALMPCTPAKARHLLKSGNARPKRNKLGLFYVQLSYEQEPDNQSLVAGVDPGSKFEGLSVVGTKDTVLNLMVEAPDHVKGAVQTRRTMRRARRQRKWRRPKRFHNRLNRMQRIPPSTRSRWEAKARIVAHLRTILPFTDVVVEDVQAVTRKGKGGTWNGSFSPVQVGKEHLYRLLRAMGLTLHLREGWQTKELREQHGLKKTKSKSKQSFESHAVDSWVLAASISGAEHPTCTRLWYMVPAILHRRQLHRLQASKGGVRKPYGGTRSLGVKRGTLVEHKKYGRCTVGGVDRKRNTISLHEYRTNTRLTQAAKVETCRVLTWLSWRSWLLRGKRTSSKGKGSHS

SEQ ID NO: 2042 - protein, 432 aa, synthetic construct
  REGION 1..432: note = Synthetic
MQPAKQQNWVFQINGDKQPLDMINPGRCRELQNRGKLASFRRFPYVVIQQQTIENPQTKEYILKIDPGSQWTGFAIQCGNDILFRAELNHRGEAIKFDLVKRAWFRRGRRSRNLRYRKKRLNRAKPEGWLAPSIRHRVLTVETWIKRFMRYCPIAWIEIEQVRFDTQKLANPEIDGVEYQQGELQGYEVREYLLQKWGRKCAYCGTENVPLEVEHIQSKSKGGSSRIGNLTLACHVCNVKKGNLDVRDFLAKSPDILNQVLENSTKPLKDAAAVNSTRYAIVKMAKSICENVKCSSGARTKMNRVRQGLEKTHSLDAACVGESGASIRVLTDRPLLITCKGHGSRQSIRVNASGFPAVKNAKTVFTHIAAGDVVRFTIGKDRKKAQAGTYTARVKTPTPKGFEVLIDGARISLSTMSNVVFVHRSDGYGYEL

SEQ ID NO: 2043 - protein, 461 aa, synthetic construct
  REGION 1..461: note = Synthetic
MAVFVIDKHKRPLMPCSEKRARLLLERGRAVVHRQVPFVIRLKDRTVQHSAVQPLRVALDPGSRATGMALVREKNTVDTGTGEVYRERIALNLFELVHRGHRIREQLDQRRNFRRRRRGANLRYRAPRFDNRRRPPGWLAPSLQHRVDTTMAWVRRLCRWAPASAIGIETVRFDTQRLQNPEISGVEYQQGALAGCEVREYLLEKWGRKCAYCGAENVPLEIEHIVPKSRGGSDRVSNLALACRACNQAKGNRDVRAFLADQPERLARILAQAKAPLKDAAAVNATRWALYRALVDTGLPVEAGTGGRTKWNRTRLGLPKTHALDALCVGQVDQVRHWRVPVLGIRCAGRGSYRRTRLTRHGFPRGYLTRNKSAFGFQTGDLIRAVVTKGKKAGTYLGRIAIRASGSFNIQTPMGVVQGIHHRFCTLLQRADGYGYFVQPKPTEAALSSPRLKAGVSSAGN

SEQ ID NO: 2044 - protein, 439 aa, synthetic construct
  REGION 1..439: note = Synthetic
MTTNVVFVIDTNQKPLQPCSAAVARKLLLRGKAAMFRRYPAVIILKKEVDSVGKPKIELRIDPGSKYTGFALVDSKDNADFIIWGTELEHRGAAICKELTKRSAIRRSRRNRKTRYRKKRFERRKPEGWLAPSLQHRVDTTLTWVKRICKFVPIMSISVEQVKFDLQKLENSDIQGIEYQQGTLAGYTLREALLEHWGRKCAYCDVENVFLEIEHIYPKSKGGSDKFSNLTLACHKCNINKGNKSIDEFLLSDHKRLEQIKLHQKKTLKDAAAVNATRKKLVTTLQEKTFLNVLVSDGASTKMTRLSSSLAKRHWIDAGCVNTTLIVILKTLQPLQVKCNGHGNKQFVTMDAYGFPRKSYEPKKVRKDWKAGDIIRVTKKDGTMLMGRVKKAAKKLVYIPFGGKEASFSSENAKAIHRSDGYRYSFAAIDSELLQKMAT

SEQ ID NO: 2045 - protein, 419 aa, synthetic construct
  REGION 1..419: note = Synthetic
MPNKYAFVLDSKGKLLDPTKSKKAWYLIRKGKASLVEEYPLIIKLKREVPKDQVNSDKLILGIDDGTKKVGFALVQKCQTKNKVLFKAVMEQRQDVSKKMEERRGYRRYRRSHKRYRPARFDNRSSSKRKGRIPPSILQKKQAILRVVNKLKKYIRIDKIVLEDVSIDIRKLTEGRELYNWEYQESNRLDENLRKATLYRDDCTCQLCGTTETMLHAHHIMPRRDGGADSIYNLITLCKACHKDKVDNNEYQYKDQFLAIIDSKELSDLKSASHVMQGKTWLRDKLSKIAQLEITSGGNTANKRIDYEIEKSHSNDAICTTGLLPVDNIDDIKEYYIKPLRKKSKAKIKELKCFRQRDLVKYTKRNGETYTGYITSLRIKNNKYNSKVCNFSTLKGKIFRGYGFRNLTLLNRPKGLMIV

SEQ ID NO: 2046 - protein, 1409 aa, synthetic construct
  REGION 1..1409: note = Synthetic
MLFNKCIIISINLDFSNKEKCMTKPYSIGLDIGTNSVGWAVITDNYKVPSKKMKVLGNTSKKYIKKNLLGVLLFDSGITAEGRRLKRTARRRYTRRRNRILYLQEIFSTEMATLDDAFFQRLDDSFLVPDDKRDSKYPIFGNLVEEKVYHDEFPTIYHLRKYLADSTKKADLRLVYLALAHMIKYRGHFLIEGEFNSKNNDIQKNFQDFLDTYNAIFESDLSLENSKQLEEIVKDKISKLEKKDRILKLFPGEKNSGIFSEFLKLIVGNQADFRKCFNLDEKASLHFSKESYDEDLETLLGYIGDDYSDVFLKAKKLYDAILLSGFLTVTDNETEAPLSSAMIKRYNEHKEDLALLKEYIRNISLKTYNEVFKDDTKNGYAGYIDGKTNQEDFYVYLKNLLAEFEGADYFLEKIDREDFLRKQRTFDNGSIPYQIHLQEMRAILDKQAKFYPFLAKNKERIEKILTFRIPYYVGPLARGNSDFAWSIRKRNEKITPWNFEDVIDKESSAEAFINRMTSFDLYLPEEKVLPKHSLLYETFNVYNELTKVRFIAESMRDYQFLDSKQKKDIVRLYFKDKRKVTDKDIIEYLHAIYGYDGIELKGIEKQFNSSLSTYHDLLNIINDKEFLDDSSNEAIIEEIIHTLTIFEDREMIKQRLSKFENIFDKSVLKKLSRRHYTGWGKLSAKLINGIRDEKSGNTILDYLIDDGISNRNFMQLIHDDALSFKKKIQKAQIIGDEDKGNIKEVVKSLPGSPAIKKGILQSIKIVDELVKVMGGRKPESIVVEMARENQYTNQGKSNSQQRLKRLEKSLKELGSKILKENIPAKLSKIDNNALQNDRLYLYYLQNGKDMYTGDDLDIDRLSNYDIDHIIPQAFLKDNSIDNKVLVSSASNRGKSDDFPSLEVVKKRKTFWYQLLKSKLISQRKFDNLTKAERGGLLPEDKAGFIQRQLVETRQITKHVARLLDEKFNNKKDENNRAVRTVKIITLKSTLVSQFRKDFELYKVREINDFHHAHDAYLNAVIASALLKKYPKLEPEFVYGDYPKYNSFRERKSATEKVYFYSNIMNIFKKSISLADGRVIERPLIEVNEETGESVWNKESDLATVRRVLSYPQVNVVKKVEEQNHGLDRGKPKGLFNANLSSKPKPNSNENLVGAKEYLDPKKYGGYAGISNSFAVLVKGTIEKGAKKKITNVLEFQGISILDRINYRKDKLNFLLEKGYKDIELIIELPKYSLFELSDGSRRMLASILSTNNKRGEIHKGNQIFLSQKFVKLLYHAKRISNTINENHRKYVENHKKEFEELFYYILEFNENYVGAKKNGKLLNSAFQSWQNHSIDELCSSFIGPTGSERKGLFELTSRGSAADFEFLGVKIPRYRDYTPSSLLKDATLIHQSVTGLYETRIDLAKLGEG

SEQ ID NO: 2047 - protein, 1053 aa, synthetic construct
  REGION 1..1053: note = Synthetic
MKRNYILGLDIGITSVGYGIIDYETRDVIDAGVRLFKEANVENNEGRRSKRGARRLKRRRRHRIQRVKKLLFDYNLLTDHSELSGINPYEARVKGLSQKLSEEEFSAALLHLAKRRGVHNVNEVEEDTGNELSTKEQISRNSKALEEKYVAELQLERLKKDGEVRGSINRFKTSDYVKEAKQLLKVQKAYHQLDQSFIDTYIDLLETRRTYYEGPGEGSPFGWKDIKEWYEMLMGHCTYFPEELRSVKYAYNADLYNALNDLNNLVITRDENEKLEYYEKFQIIENVFKQKKKPTLKQIAKEILVNEEDIKGYRVTSTGKPEFTNLKVYHDIKDITARKEIIENAELLDQIAKILTIYQSSEDIQEELTNLNSELTQEEIEQISNLKGYTGTHNLSLKAINLILDELWHTNDNQIAIFNRLKLVPKKVDLSQQKEIPTTLVDDFILSPVVKRSFIQSIKVINAIIKKYGLPNDIIIELAREKNSKDAQKMINEMQKRNRQTNERIEEIIRTTGKENAKYLIEKIKLHDMQEGKCLYSLEAIPLEDLLNNPFNYEVDHIIPRSVSFDNSFNNKVLVKQEENSKKGNRTPFQYLSSSDSKISYETFKKHILNLAKGKGRISKTKKEYLLEERDINRFSVQKDFINRNLVDTRYATRGLMNLLRSYFRVNNLDVKVKSINGGFTSFLRRKWKFKKERNKGYKHHAEDALIIANADFIFKEWKKLDKAKKVMENQMFEEKQAESMPEIETEQEYKEIFITPHQIKHIKDFKDYKYSHRVDKKPNRELINDTLYSTRKDDKGNTLIVNNLNGLYDKDNDKLKKLINKSPEKLLMYHHDPQTYQKLKLIMEQYGDEKNPLYKYYEETGNYLTKYSKKDNGPVIKKIKYYGNKLNAHLDITDDYPNSRNKVVKLSLKPYRFDVYLDNGVYKFVTVKNLDVIKKENYYEVNSKCYEEAKKLKKISNQAEFIASFYNNDLIKINGELYRVIGVNNDLLNRIEVNMIDITYREYLENMNDKRPPRIIKTIASKTQSIKKYSTDILGNLYEVKSKKHPQIIKKG

SEQ ID NO: 2048 - protein, 1365 aa, Streptococcus pyogenes
KYSIGLDIGTNSVGWAVITDEYKVPSKKFKVLGNTDRHSIKKNLIGALLFDSGETAEATRLKRTARRRYTRRKNRICYLQEIFSNEMAKVDDSFFHRLEESFLVEEDKKHERHPIFGNIVDEVAYHEKYPTIYHLRKKLVDSTDKADLRLIYLALAHMIKFRGHFLIEGDLNPDNSDVDKLFIQLVQTYNQLFEENPINASGVDAKAILSARLSKSRRLENLIAQLPGEKKNGLFGNLIALSLGLTPNFKSNFDLAEDAKLQLSKDTYDDDLDNLLAQIGDQYADLFLAAKNLSDAILLSDILRVNTEITKAPLSASMIKRYDEHHQDLTLLKALVRQQLPEKYKEIFFDQSKNGYAGYIDGGASQEEFYKFIKPILEKMDGTEELLVKLNREDLLRKQRTFDNGSIPHQIHLGELHAILRRQEDFYPFLKDNREKIEKILTFRIPYYVGPLARGNSRFAWMTRKSEETITPWNFEEVVDKGASAQSFIERMTNFDKNLPNEKVLPKHSLLYEYFTVYNELTKVKYVTEGMRKPAFLSGEQKKAIVDLLFKTNRKVTVKQLKEDYFKKIECFDSVEISGVEDRFNASLGTYHDLLKIIKDKDFLDNEENEDILEDIVLTLTLFEDREMIEERLKTYAHLFDDKVMKQLKRRRYTGWGRLSRKLINGIRDKQSGKTILDFLKSDGFANRNFMQLIHDDSLTFKEDIQKAQVSGQGDSLHEHIANLAGSPAIKKGILQTVKVVDELVKVMGRHKPENIVIEMARENQTTQKGQKNSRERMKRIEEGIKELGSQILKEHPVENTQLQNEKLYLYYLQNGRDMYVDQELDINRLSDYDVDHIVPQSFLKDDSIDNKVLTRSDKNRGKSDNVPSEEVVKKMKNYWRQLLNAKLITQRKFDNLTKAERGGLSELDKAGFIKRQLVETRQITKHVAQILDSRMNTKYDENDKLIREVKVITLKSKLVSDFRKDFQFYKVREINNYHHAHDAYLNAVVGTALIKKYPKLESEFVYGDYKVYDVRKMIAKSEQEIGKATAKYFFYSNIMNFFKTEITLANGEIRKRPLIETNGETGEIVWDKGRDFATVRKVLSMPQVNIVKKTEVQTGGFSKESILPKRNSDKLIARKKDWDPKKYGGFDSPTVAYSVLVVAKVEKGKSKKLKSVKELLGITIMERSSFEKNPIDFLEAKGYKEVKKDLIIKLPKYSLFELENGRKRMLASAGELQKGNELALPSKYVNFLYLASHYEKLKGSPEDNEQKQLFVEQHKHYLDEIIEQISEFSKRVILADANLDKVLSAYNKHRDKPIREQAENIIHLFTLTNLGAPAAFKYFDTTIDRKRYTSTKEVLDATLIHQSITGLYETRIDLSQLGGD

SEQ ID NO: 2049 - protein, 463 aa, synthetic construct
  REGION 1..463: note = Synthetic
MSRVLVVDADRRVLAPCTARRARLLLSGGKAAVLRRYPFTIILKQSYPTASPRPVRLKLDPGSKTTGIAVVTEATGEVVWAAELQHRGQLIKDALESRRSLRSSRRNRKTRYRPPRWRNRKRTGPPVLSSAGEVNQLGKWLAPSLQHRIEVIMTWVHRLRRYLPITAISQEIVRFDMQKMQNPEISGVEYQQGTLFGFEVREYLLDKWHRRCGYCGAQNTRLEVDHIVPRSHGGSDRVSNLTLSCEPCNKKKSNRPAALFLAKKPEVLQKLQRQAKAPLKDAAAVNSTRYALLERLKATGLPVEIASGGRTKFNRFERQIPKTHWLDAACVGASTPEVLQWEAVRPLAIKAMGHGKRQVTNVDAYGFPKGKPKGIPVHPFRTGDVIRAEVPVGKFAGNYVDRIVAIRTDQTRVSLPLRSQEKGKKKVPFLFQTKYITAKLFSADGYDYGFLQPPEPRTQRTES

SEQ ID NO: 2050 - protein, 463 aa, synthetic construct
  REGION 1..463: note = Synthetic
MSRVLVVDADRRVLAPCTARRARLLLSGGKAAVLRRYPFTIILKQSYPTASPRPVRLKLDPGSKTTGIAVVTEATGEVVWAAELQHRGQLIKDALESRRSLRSSRRNRKTRYRPPRWRNRKRTGPPVLSSAGEVNQLGKWLAPSLQHRIEVIMTWVHRLRRYLPITAISQEIVRFDMQKMQNPEISGVEYQQGTLFGFEVREYLLDKWHRRCGYCGAQNTRLEVDHIVPRSHGGSDRVSNLTLSCEPCNKKKSNRPAALFLAKKPEVLQKLQRQAKAPLKDAAAVNSTRYALLERLKATGLPVEIASGGRTKFNRFERQIPKTHWLDAACVGASTPEVLQWEAVRPLAIKAMGHGKRQVTNVDAYGFPKGKPKGIPVHPFRTGDVVRAEVPVGKFAGNYVDRIVAIRTDQTRVSLPLRSQEKGKKKVPFLFQTKYITAKLFSADGYDYGFLQPPEPRTQRTES

SEQ ID NO: 2051 - protein, 445 aa, synthetic construct
  REGION 1..445: note = Synthetic
MSKVFVVDKERRPLAPCTPRRARLLLSECKASVLRQYPFTIILKESHATATPRPLRLKIYPASKTTGLAVINESTAEVVWAAELKHRGHLIKKALESRRSLRRGRRSRKTRYRPARWLNRVRKPPVFTNTEGVVVTGKWLPPSLQHRIEVVMTWVERLQHYLQITAISQEVMRFDTQKLQNPELSGVEYQQGTLHGYEVREYLLEKWSRKCAYCGARDTRLEISHLIARSRGGSDQVSNLTLACKACRDQKGDSNLEKFLATKPKILKKLQSQARVSLKDVAAINSTRLALLERLKATGLPVEVSSGGETKYNRNQQQIPKSHWLDAVCVGASTPENLEWQQVKPLAIKAMGHGKRQMVNVDAFGFPRGKPKGIPVHPFRTGDIVRVTIPKGKYAGEYEERISSIKTSETRVGIPNKKEKGTIYLQTKYITAKIFSSDGYDYDYL

SEQ ID NO: 2052 - protein, 449 aa, synthetic construct
  REGION 1..449: note = Synthetic
MSQVFVVDKERRPLAPCTPRRARLLLSECKASVFRRYPFTIILKESHATATPRPLRLKIYPASKTTGLAVINESTAEVVWAAELKHRSQLIKKALESRRSLRSGRRSRKTRYRPARWLNRVRNNPVFTNTEGAVITGKWLPPSLQHRVEVVMTWVERLQRYLPITALSQEIMRFDTQKLQNPEISGVEYQQGTLHGYEVREYLLEKWSRKCAYCGARDTRLEINHIVARSRGGSDRVSNLTLACRSCREQRGASNLEEFLATRPALLMKLQSQAQVSLRDVAAINSTRFVLLERLKARGLPVEVSSGGETKFNRNQQQIPRSHWLNAVCIGPNTPENLKWDQVQPLAIKAMGHGKRQMVNVDAFGFPRGKPKGTPVHPFRTGDVVRAAIPKGKYVGEYEERISSIKTSETRVGIPNKKGQGTIYLQTKYITTKIFSSDGFDYEFLTSES

SEQ ID NO: 2053 - protein, 449 aa, synthetic construct; identical to SEQ ID NO: 2052
  REGION 1..449: note = Synthetic

SEQ ID NO: 2054 - protein, 457 aa, synthetic construct
  REGION 1..457: note = Synthetic
MSRVLVVDANRCPLAPCTPRRARLLLNSGKAAVLRRYPFTIILKQSYPTANPRPVRLKLDPGSKTTGIAVVTEATGEVVWAAELQHRGQLIKNALESRRSLRRGRRNRKTRYRPARWLNRKRTGPPVLSSADTVSTLGKWLAPSLQHRIEVIMTWVHRLRRYLPITAISQEIVRFDMQKMQNPEISGVEYQQGTLFGYEVREYLLDKWQRQCGYCGAKDKRLEVDHIVPRSHGGSDRVSNLTLSCEPCNKRKNQRPAAVFLAKKPEVLQKLQRQAKAPLKDAAAVNSTRYALLERLKATGLPVEIASGGRTKFNRSERQIPKTHWLDAACVGASTPEVLQWKAVKPLAIKAMGHGKRQVVNVDAYGFPRGKAKGIPVHPFRTGDIVRAEIPKGKYVGTYVSRIAETTTSKPLAGFKSKTGKRIQCHTKHMTKLFNSDGYGYGFLKAPEPRQTVISES

SEQ ID NO: 2055 - protein, 457 aa, synthetic construct
  REGION 1..457: note = Synthetic
MSRVLVVDADRCPLAPCTPRRARLLLNSGKAAVLRRYPFTIILKQSYPTASPRPVRLKLDPGSKTTGIAVVTEATGEVVWAAELQHRGQLIKNALESRRSLRRGRRNRKTRYRPARWLNRKRTGPPLLSSADTVSTLGKWLAPSLQHRIEVIMTWVHRLRRYLPITAISQEIVRFDMQKMQNPEISGVEYQQGTLFGYEVREYLLDKWRRQCGYCGAKDKRLEVDHIVPRSHGGSDRVSNLTLSCEPCNKRKNQRPAAVFLAKKPEVLQKLQRQAKAPLKDAAAVNSTRYALLERLKATGLPVEVASGGRTKFNRSERQIPKTHWLDAACVGASTPEVLQWEAVRPLAIKAMGHGKRQVVNVDAYGFPRGKAKGIPVHPFRTGDIVRAEIPKGKYVGTYVSRIAETTTSKPLAGFKSKTGKRIQCHTKHMTKLFNSDGYGYGFLKAPEPRQTVISES

SEQ ID NO: 2056 - protein, 448 aa, synthetic construct
  REGION 1..448: note = Synthetic
MSKVFVVDKERRPLAPCTPRRARLLLSECKASVLRQYPFTIILKESHATATPRPLRLKIYPASKTTGLAVINESTAEVVWAAELKHRGHLIKKALESRRSLRRGRRSRKTRYRPARWLNRVRKPPVLTNTEGVVVTGKWLPPSLQHRIKVVMTWVERLQHYLQITALSQEVMRFDTQKLQNPEISGVWYQQGTLHGYEVREYLLEKWSRKCAYCGARDTRLEISHLIARSRGGSDQVSNLTLACKACRDQKGDSNLEKFLATKPKILKKLQSQARVSLKDVAAINSTRLALLERLKATGLPVEVSSGGETKYNRNQQQIPKSHWLDAVCVGASTPENLEWQQVNPLAIKAMGHGKRQMVNVDAFGFPRGKPKGIPVHPFRTGDIVRVTIPKGKYAGEYEERISSIKTSETRVGIPNKKEKGTIYLQTKYITAKIFSSDGYEYYFYPNK

SEQ ID NO: 2057 - protein, 457 aa, synthetic construct; identical to SEQ ID NO: 2055
  REGION 1..457: note = Synthetic

SEQ ID NO: 2058 - protein, 9 aa, synthetic construct
  REGION 1..9: note = Synthetic
IEVMYPPPY

SEQ ID NO: 2059 - protein, 432 aa, Ktedonobacter racemifer
MNVVYVLSPERTPLMPCQPAIARLLLKQGKAKVRHRTPFTIQLLAQPEHVYTQPLTHGVDTGSSIIGSAVANEHGHVVYLSEVEIRNDIANTMKERARARRNRRQRKTRYRPARWLNRKKSIKTGRFSPTMRSKIDTHLREIRFIRSLLPITSTILETGSFDPYALRNPEVLQKKWLYQRGINYGFANTKAYVLTRDGYLCQQCKGKSKDRRLEVHHIIFRSRNGSDEEANLLTLCKTCHDGLHAGTITLKLTGKKKGTLQHATQMNSIRIQLLKRVEAEETWGFVTKEHRLLVGLPKEHIFDAAVIATRGVKPTFYTTSVLSKHCVSDGDYKQTKGKHGQQRVNTGKIMGFRKFDKVYYLGKEYFIKGRMSTGYAILMDIDGNKIEFKPLPKFDKMKRVSARSSWMMKQRTTPNPSFSITSSLSASAGKNV

SEQ ID NO: 2060 - DNA, 322 bp, synthetic construct
  misc_feature 1..322: note = Synthetic
  source 1..322: mol_type = other DNA
gtgaactaccactgagctgaagacgcagtggcttcttcggaagtcactgaagacgcagaccaggagctccttcggaagcttgagttcaccagactcgtttccagaaatgggaacagcgttcgattggtcatgacacctgcggttgacgcatcagaccgctgctctgtcgctgagggttaagtaggcttgaggaaagggccggtgctctcagcgcaaaaagccttttgaacactgtcgagatgaagccggattcccttcgtggtcacagcgaagggatacgcaccacccggcgcttgccggagcattttccgaaaggagtttt

SEQ ID NO: 2061 - DNA, 37 bp, synthetic construct
  misc_feature 1..37: note = Synthetic
  source 1..37: mol_type = other DNA
gaagaagaggccgcacccgtttgaggccgcaccaaat

SEQ ID NO: 2062 - DNA, 37 bp, synthetic construct
  misc_feature 1..37: note = Synthetic
  source 1..37: mol_type = other DNA
caagctttttaacagtggccttattaaatgacttctc

SEQ ID NO: 2063 - protein, 496 aa, unidentified
  REGION 1..496: note = IscB protein sequence
MMAVVYVISKSGKPLMPTTRCGHVRILLKEGKARVVERKPFTIQLTYESAEETQPLVLGIDPGRTNIGMSVVTESGESVFNAQIETRNKDVPKLMKDRKQYRMAHRRLKRRCKRRRRAKAAGTAFEEGEKQRLLPGCFKPITCKSIRNKEARFNNRKRPVGWLTPTANHLLVTHLNVVKKVQKILPVAKVVLELNRFSFMAMNNPKVQRWQYQRGPLYGKGSVEEAVSMQQDGHCLFCKHGIDHYHHVVPRRKNGSETLENRVGLCEEHHRLVHTDKEWEANLASKKSGMNKKYHALSVLNQIIPYLADQLADMFPGNFCVTSGQDTYLFREEHGIPKDHYLDAYCIACSALTDAKKVSSPKGRPYMVHQFRRHDRQACHKANLNRSYYMGGKLVATNRHKAMDQKTDSLEEYRAAHSAADVSKLTVKHPSAQYKDMSRIMPGSILVSGEGKLFTLSRSEGRNKGQVNYFVSTEGIKYWARKCQYLRNNGGLQIYV

SEQ ID NO: 2064 - DNA, 206 bp, synthetic construct
  misc_feature 1..206: note = Synthetic
  source 1..206: mol_type = other DNA
ggctcttccaactttatggttgcgaccgtaggttgaaagagcacaggctgagacattcgtaaggccgaaagaccggacgcaccctgggatttccccagtccccggaactgcatagcggatgccagttgatggagcaatctatcagataagccagggggaacaatcacctctctgtatcagagagagttttacaaaaggaggaacgg

SEQ ID NO: 2065 - DNA, 13 bp, synthetic construct
  misc_feature 1..13: note = Synthetic
  source 1..13: mol_type = other DNA
gaacatatgagtg

SEQ ID NO: 2066 - DNA, 15 bp, synthetic construct
  misc_feature 1..15: note = Synthetic
  source 1..15: mol_type = other DNA
gttaacatatgagtg

SEQ ID NO: 2067 - DNA, 17 bp, synthetic construct
  misc_feature 1..17: note = Synthetic
  source 1..17: mol_type = other DNA
ggtttaacatatgagtg

SEQ ID NO: 2068 - DNA, 19 bp, synthetic construct
  misc_feature 1..19: note = Synthetic
  source 1..19: mol_type = other DNA
gaagtttaacatatgagtg

SEQ ID NO: 2069 - DNA, 21 bp, synthetic construct
  misc_feature 1..21: note = Synthetic
  source 1..21: mol_type = other DNA
gacaagtttaacatatgagtg

SEQ ID NO: 2070 - DNA, 23 bp, synthetic construct
  misc_feature 1..23: note = Synthetic
  source 1..23: mol_type = other DNA
gaaacaagtttaacatatgagtg

SEQ ID NO: 2071 - DNA, 25 bp, synthetic construct
  misc_feature 1..25: note = Synthetic
  source 1..25: mol_type = other DNA
gacaaacaagtttaacatatgagtg

SEQ ID NO: 2072 - DNA, 27 bp, synthetic construct
  misc_feature 1..27: note = Synthetic
  source 1..27: mol_type = other DNA
gacacaaacaagtttaacatatgagtg

SEQ ID NO: 2073 - DNA, 24 bp, synthetic construct
  misc_feature 1..24: note = Synthetic
  source 1..24: mol_type = other DNA
gatgtcttcctgggacgaagacaa

SEQ ID NO: 2074 - DNA, 13 bp, synthetic construct
  misc_feature 1..13: note = Synthetic
  source 1..13: mol_type = other DNA
gtaggcatatgtc

SEQ ID NO: 2075 - DNA, 15 bp, synthetic construct
  misc_feature 1..15: note = Synthetic
  source 1..15: mol_type = other DNA
gtctaggcatatgtc

SEQ ID NO: 2076 - DNA, 17 bp, synthetic construct
  misc_feature 1..17: note = Synthetic
  source 1..17: mol_type = other DNA
gattctaggcatatgtc

SEQ ID NO: 2077 - DNA, 19 bp, synthetic construct
  misc_feature 1..19: note = Synthetic
  source 1..19: mol_type = other DNA
gaaattctaggcatatgtc

SEQ ID NO: 2078 - DNA, 21 bp, synthetic construct
  misc_feature 1..21: note = Synthetic
  source 1..21: mol_type = other DNA
gcaaaattctaggcatatgtc

SEQ ID NO: 2079 - DNA, 23 bp, synthetic construct
  misc_feature 1..23: note = Synthetic
  source 1..23: mol_type = other DNA
gaccaaaattctaggcatatgtc

SEQ ID NO: 2080 - DNA, 25 bp, synthetic construct
  misc_feature 1..25: note = Synthetic
  source 1..25: mol_type = other DNA
ggcaccaaaattctaggcatatgtc

SEQ ID NO: 2081 - DNA, 27 bp, synthetic construct
  misc_feature 1..27: note = Synthetic
  source 1..27: mol_type = other DNA
gaagcaccaaaattctaggcatatgtc

SEQ ID NO: 2082 - DNA, 24 bp, synthetic construct
  misc_feature 1..24: note = Synthetic
  source 1..24: mol_type = other DNA
gatgtcttcctgggacgaagacaa

SEQ ID NO: 2083 - DNA, 13 bp, synthetic construct
  misc_feature 1..13: note = Synthetic
  source 1..13: mol_type = other DNA
ggagtgaacgaga

SEQ ID NO: 2084 - DNA, 15 bp, synthetic construct
  misc_feature 1..15: note = Synthetic
  source 1..15: mol_type = other DNA
gaagagtgaacgaga

SEQ ID NO: 2085 - DNA, 17 bp, synthetic construct
  misc_feature 1..17: note = Synthetic
  source 1..17: mol_type = other DNA
gaaaagagtgaacgaga

SEQ ID NO: 2086 - DNA, 19 bp, synthetic construct
  misc_feature 1..19: note = Synthetic
  source 1..19: mol_type = other DNA
gcaaaaagagtgaacgaga

SEQ ID NO: 2087 - DNA, 21 bp, synthetic construct
  misc_feature 1..21: note = Synthetic
  source 1..21: mol_type = other DNA
gatcaaaaagagtgaacgaga

SEQ ID NO: 2088 - DNA, 23 bp, synthetic construct
  misc_feature 1..23: note = Synthetic
  source 1..23: mol_type = other DNA
gtcatcaaaaagagtgaacgaga

SEQ ID NO: 2089 - DNA, 25 bp, synthetic construct
  misc_feature 1..25: note = Synthetic
  source 1..25: mol_type = other DNA
gcatcatcaaaaagagtgaacgaga

SEQ ID NO: 2090 - DNA, 27 bp, synthetic construct
  misc_feature 1..27: note = Synthetic
  source 1..27: mol_type = other DNA
gagcatcatcaaaaagagtgaacgaga

SEQ ID NO: 2091 - DNA, 24 bp, synthetic construct
  misc_feature 1..24: note = Synthetic
  source 1..24: mol_type = other DNA
gatgtcttcctgggacgaagacaa

SEQ ID NO: 2092 - DNA, 17 bp, synthetic construct
  misc_feature 1..17: note = Synthetic
  source 1..17: mol_type = other DNA
gaaaagacgaggatgaa

SEQ ID NO: 2093 - DNA, 17 bp, synthetic construct
  misc_feature 1..17: note = Synthetic
  source 1..17: mol_type = other DNA
gagacagcttaacagaa

SEQ ID NO: 2094 - DNA, 17 bp, synthetic construct
  misc_feature 1..17: note = Synthetic
  source 1..17: mol_type = other DNA
ggtttaacatatgagtg

SEQ ID NO: 2095 - DNA, 17 bp, synthetic construct
  misc_feature 1..17: note = Synthetic
  source 1..17: mol_type = other DNA
gcctaaggccccttttc

SEQ ID NO: 2096 - DNA, 17 bp, synthetic construct
  misc_feature 1..17: note = Synthetic
  source 1..17: mol_type = other DNA
gagaaaaagaacctgaa

SEQ ID NO: 2097 - DNA, 17 bp, synthetic construct
  misc_feature 1..17: note = Synthetic
  source 1..17: mol_type = other DNA
gccccggttggtcttac

SEQ ID NO: 2098 - DNA, 17 bp, synthetic construct
  misc_feature 1..17: note = Synthetic
  source 1..17: mol_type = other DNA
gaaaagagtgaacgaga

SEQ ID NO: 2099 - DNA, 17 bp, synthetic construct
  misc_feature 1..17: note = Synthetic
  source 1..17: mol_type = other DNA
gatagagcaagacaaga

SEQ ID NO: 2100 - DNA, 17 bp, synthetic construct
  misc_feature 1..17: note = Synthetic
  source 1..17: mol_type = other DNA
gggaggctcaaagaggc

SEQ ID NO: 2101 - DNA, 17 bp, synthetic construct
  misc_feature 1..17: note = Synthetic
  source 1..17: mol_type = other DNA
gcccttcagatcagctt

SEQ ID NO: 2102 - DNA, 17 bp, synthetic construct
  misc_feature 1..17: note = Synthetic
  source 1..17: mol_type = other DNA
ggctgttcaggtctctg

SEQ ID NO: 2103 - DNA, 17 bp, synthetic construct
  misc_feature 1..17: note = Synthetic
  source 1..17: mol_type = other DNA
gaaggccgcacagctag

SEQ ID NO: 2104 - DNA, 17 bp, synthetic construct
  misc_feature 1..17: note = Synthetic
  source 1..17: mol_type = other DNA
gaatggtggaaacacag

SEQ ID NO: 2105 - DNA, 17 bp, synthetic construct
  misc_feature 1..17: note = Synthetic
  source 1..17: mol_type = other DNA
gggacatggcagataat

SEQ ID NO: 2106 - DNA, 17 bp, synthetic construct
  misc_feature 1..17: note = Synthetic
  source 1..17: mol_type = other DNA
gcctgactctgcaaagc

SEQ ID NO: 2107 - DNA, 17 bp, synthetic construct
  misc_feature 1..17: note = Synthetic
  source 1..17: mol_type = other DNA
gaatagcagattattcc

SEQ ID NO: 2108 - DNA, 17 bp, synthetic construct
  misc_feature 1..17: note = Synthetic
  source 1..17: mol_type = other DNA
gctagtcccttcccttt

SEQ ID NO: 2109 - DNA, 17 bp, synthetic construct
  misc_feature 1..17: note = Synthetic
  source 1..17: mol_type = other DNA
gagctttttccctgcag

SEQ ID NO: 2110 - DNA, 17 bp, synthetic construct
  misc_feature 1..17: note = Synthetic
  source 1..17: mol_type = other DNA
gtattatacctgcacga

SEQ ID NO: 2111 - DNA, 17 bp, synthetic construct
  misc_feature 1..17: note = Synthetic
  source 1..17: mol_type = other DNA
gagaataagttgagaaa

SEQ ID NO: 2112 - DNA, 17 bp, synthetic construct
  misc_feature 1..17: note = Synthetic
  source 1..17: mol_type = other DNA
gcttccttccaaggtca

SEQ ID NO: 2113 - DNA, 17 bp, synthetic construct
  misc_feature 1..17: note = Synthetic
  source 1..17: mol_type = other DNA
gtttctatctgtaaaat

SEQ ID NO: 2114 - DNA, 17 bp, synthetic construct
  misc_feature 1..17: note = Synthetic
  source 1..17: mol_type = other DNA
gattttacctttttcaa

SEQ ID NO: 2115 - DNA, 17 bp, synthetic construct
  misc_feature 1..17: note = Synthetic
  source 1..17: mol_type = other DNA
gaatttactttttgaaa

SEQ ID NO: 2116 - DNA, 17 bp, synthetic construct
  misc_feature 1..17: note = Synthetic
  source 1..17: mol_type = other DNA
gcaaagcccaaagtggt

SEQ ID NO: 2117 - DNA, 17 bp, synthetic construct
  misc_feature 1..17: note = Synthetic
  source 1..17: mol_type = other DNA
gagtgaatcacgtaaag

SEQ ID NO: 2118 - DNA, 17 bp, synthetic construct
  misc_feature 1..17: note = Synthetic
  source 1..17: mol_type = other DNA
gttacaaaattctttgt

SEQ ID NO: 2119 - DNA, 17 bp, synthetic construct
  misc_feature 1..17: note = Synthetic
  source 1..17: mol_type = other DNA
gattctaggcatatgtc

SEQ ID NO: 2120 - DNA, 17 bp, synthetic construct
  misc_feature 1..17: note = Synthetic
  source 1..17: mol_type = other DNA
gcaaggcagagccacgg

SEQ ID NO: 2121 - DNA, 17 bp, synthetic construct
  misc_feature 1..17: note = Synthetic
  source 1..17: mol_type = other DNA
gattcaattactaccca

SEQ ID NO: 2122 - DNA, 17 bp, synthetic construct
  misc_feature 1..17: note = Synthetic
  source 1..17: mol_type = other DNA
gtttctatgacatatgc

SEQ ID NO: 2123 - DNA, 17 bp, synthetic construct
  misc_feature 1..17: note = Synthetic
  source 1..17: mol_type = other DNA
gataattgtttctattc

SEQ ID NO: 2124 - DNA, 17 bp, synthetic construct
  misc_feature 1..17: note = Synthetic
  source 1..17: mol_type = other DNA
gaggaggctgtaaatct

SEQ ID NO: 2125 - DNA, 17 bp, synthetic construct
  misc_feature 1..17: note = Synthetic
  source 1..17: mol_type = other DNA
gcataaagtaacaaaac

SEQ ID NO: 2126 - DNA, 17 bp, synthetic construct
  misc_feature 1..17: note = Synthetic
  source 1..17: mol_type = other DNA
gatgttcacaagatagt

SEQ ID NO: 2127 - DNA, 17 bp, synthetic construct
  misc_feature 1..17: note = Synthetic
  source 1..17: mol_type = other DNA
gagtctggcaaggcaga

SEQ ID NO: 2128 - DNA, 17 bp, synthetic construct
  misc_feature 1..17: note = Synthetic
  source 1..17: mol_type = other DNA
gacctgccctagaaata

SEQ ID NO: 2129 - DNA, 17 bp, synthetic construct
  misc_feature 1..17: note = Synthetic
  source 1..17: mol_type = other DNA
gctaaaactaacctgcc

SEQ ID NO: 2130 - DNA, 17 bp, synthetic construct
  misc_feature 1..17: note = Synthetic
  source 1..17: mol_type = other DNA
ggcagtgcatttcacta

SEQ ID NO: 2131 - DNA, 17 bp, synthetic construct
  misc_feature 1..17: note = Synthetic
  source 1..17: mol_type = other DNA
gttaatggttttcacat

SEQ ID NO: 2132 - DNA, 17 bp, synthetic construct
  misc_feature 1..17: note = Synthetic
  source 1..17: mol_type = other DNA
gagtggaagaaggagat

SEQ ID NO: 2133 - DNA, 17 bp, synthetic construct
  misc_feature 1..17: note = Synthetic
  source 1..17: mol_type = other DNA
ggctctgcaggaacagg

SEQ ID NO: 2134 - DNA, 17 bp, synthetic construct
  misc_feature 1..17: note = Synthetic
  source 1..17: mol_type = other DNA
gtaaaataaatttgctc

SEQ ID NO: 2135 - DNA, 17 bp, synthetic construct
  misc_feature 1..17: note = Synthetic
  source 1..17: mol_type = other DNA
gagaaggcagctttctg

SEQ ID NO: 2136 - DNA, 17 bp, synthetic construct
  misc_feature 1..17: note = Synthetic
  source 1..17: mol_type = other DNA
gtctggcagaagacact

SEQ ID NO: 2137 - DNA, 17 bp, synthetic construct
  misc_feature 1..17: note = Synthetic
  source 1..17: mol_type = other DNA
gccagatttcttttctc

SEQ ID NO: 2138 - DNA, 17 bp, synthetic construct
  misc_feature 1..17: note = Synthetic
  source 1..17: mol_type = other DNA
gaaaagacgaggatgaa

SEQ ID NO: 2139 - DNA, 17 bp, synthetic construct
  misc_feature 1..17: note = Synthetic
  source 1..17: mol_type = other DNA
gagacagcttaacagaa

SEQ ID NO: 2140 - DNA, 17 bp, synthetic construct
  misc_feature 1..17: note = Synthetic
  source 1..17: mol_type = other DNA
ggtttaacatatgagtg

SEQ ID NO: 2141 - DNA, 17 bp, synthetic construct
  misc_feature 1..17: note = Synthetic
  source 1..17: mol_type = other DNA
gcctaaggccccttttc

SEQ ID NO: 2142 - DNA, 17 bp, synthetic construct
  misc_feature 1..17: note = Synthetic
  source 1..17: mol_type = other DNA
gagaaaaagaacctgaa

SEQ ID NO: 2143 - DNA, 17 bp, synthetic construct
  misc_feature 1..17: note = Synthetic
  source 1..17: mol_type = other DNA
gccccggttggtcttac

SEQ ID NO: 2144 - DNA, 17 bp, synthetic construct
  misc_feature 1..17: note = Synthetic
  source 1..17: mol_type = other DNA
gaaaagagtgaacgaga

SEQ ID NO: 2145 - DNA, 17 bp, synthetic construct
  misc_feature 1..17: note = Synthetic
  source 1..17: mol_type = other DNA
gatagagcaagacaaga

SEQ ID NO: 2146 - DNA, 17 bp, synthetic construct
  misc_feature 1..17: note = Synthetic
  source 1..17: mol_type = other DNA
gggaggctcaaagaggc

SEQ ID NO: 2147 - DNA, 17 bp, synthetic construct
  misc_feature 1..17: note = Synthetic
  source 1..17: mol_type = other DNA
gcccttcagatcagctt

SEQ ID NO: 2148 - DNA, 17 bp, synthetic construct
  misc_feature 1..17: note = Synthetic
  source 1..17: mol_type = other DNA
ggctgttcaggtctctg

SEQ ID NO: 2149 - DNA, 17 bp, synthetic construct
  misc_feature 1..17: note = Synthetic
  source 1..17: mol_type = other DNA
gaaggccgcacagctag

SEQ ID NO: 2150 - DNA, 17 bp, synthetic construct
  misc_feature 1..17: note = Synthetic
  source 1..17: mol_type = other DNA
gaatggtggaaacacag

SEQ ID NO: 2151 - DNA, 17 bp, synthetic construct
  misc_feature 1..17: note = Synthetic
  source 1..17: mol_type = other DNA
gggacatggcagataat

SEQ ID NO: 2152 - DNA, 17 bp, synthetic construct
  misc_feature 1..17: note = Synthetic
  source 1..17: mol_type = other DNA
gcctgactctgcaaagc

SEQ ID NO: 2153 - DNA, 17 bp, synthetic construct
  misc_feature 1..17: note = Synthetic
  source 1..17: mol_type = other DNA
gaatagcagattattcc

SEQ ID NO: 2154 - DNA, 17 bp, synthetic construct
  misc_feature 1..17: note = Synthetic
  source 1..17: mol_type = other DNA
gctagtcccttcccttt

SEQ ID NO: 2155 - DNA, 17 bp, synthetic construct
  misc_feature 1..17: note = Synthetic
  source 1..17: mol_type = other DNA
gagctttttccctgcag

SEQ ID NO: 2156 - DNA, 17 bp, synthetic construct
  misc_feature 1..17: note = Synthetic
  source 1..17: mol_type = other DNA
gtattatacctgcacga

SEQ ID NO: 2157 - DNA, 17 bp, synthetic construct
  misc_feature 1..17: note = Synthetic
  source 1..17: mol_type = other DNA
gagaataagttgagaaa

SEQ ID NO: 2158 - DNA, 17 bp, synthetic construct
  misc_feature 1..17: note = Synthetic
  source 1..17: mol_type = other DNA
gcttccttccaaggtca

SEQ ID NO: 2159 - DNA, 17 bp, synthetic construct
  misc_feature 1..17: note = Synthetic
  source 1..17: mol_type = other DNA
gtttctatctgtaaaat

SEQ ID NO: 2160 - DNA, 17 bp, synthetic construct
  misc_feature 1..17: note = Synthetic
  source 1..17: mol_type = other DNA
gattttacctttttcaa

SEQ ID NO: 2161 - DNA, 17 bp, synthetic construct
  misc_feature 1..17: note = Synthetic
  source 1..17: mol_type = other DNA
gaatttactttttgaaa

SEQ ID NO: 2162 - DNA, 17 bp, synthetic construct
  misc_feature 1..17: note = Synthetic
  source 1..17: mol_type = other DNA
gcaaagcccaaagtggt

SEQ ID NO: 2163 - DNA, 17 bp, synthetic construct
  misc_feature 1..17: note = Synthetic
  source 1..17: mol_type = other DNA
gagtgaatcacgtaaag

SEQ ID NO: 2164 - DNA, 17 bp, synthetic construct
  misc_feature 1..17: note = Synthetic
  source 1..17: mol_type = other DNA
gttacaaaattctttgt

SEQ ID NO: 2165 - DNA, 17 bp, synthetic construct
  misc_feature 1..17: note = Synthetic
  source 1..17: mol_type = other DNA
gattctaggcatatgtc

SEQ ID NO: 2166 - DNA, 17 bp, synthetic construct
  misc_feature 1..17: note = Synthetic
  source 1..17: mol_type = other DNA
gcaaggcagagccacgg

SEQ ID NO: 2167 - DNA, 17 bp, synthetic construct
  misc_feature 1..17: note = Synthetic
  source 1..17: mol_type = other DNA
gattcaattactaccca

SEQ ID NO: 2168 - DNA, 17 bp, synthetic construct
  misc_feature 1..17: note = Synthetic
  source 1..17: mol_type = other DNA
gtttctatgacatatgc

SEQ ID NO: 2169 - DNA, 17 bp, synthetic construct
  misc_feature 1..17: note = Synthetic
  source 1..17: mol_type = other DNA
gataattgtttctattc

SEQ ID NO: 2170 - DNA, 17 bp, synthetic construct
  misc_feature 1..17: note = Synthetic
  source 1..17: mol_type = other DNA
gaggaggctgtaaatct

SEQ ID NO: 2171 - DNA, 17 bp, synthetic construct
  misc_feature 1..17: note = Synthetic
  source 1..17: mol_type = other DNA
gcataaagtaacaaaac

SEQ ID NO: 2172 - DNA, 17 bp, synthetic construct
  misc_feature 1..17: note = Synthetic
  source 1..17: mol_type = other DNA
gatgttcacaagatagt

SEQ ID NO: 2173 - DNA, 17 bp, synthetic construct
  misc_feature 1..17: note = Synthetic
  source 1..17: mol_type = other DNA
gagtctggcaaggcaga

SEQ ID NO: 2174 - DNA, 17 bp, synthetic construct
  misc_feature 1..17: note = Synthetic
  source 1..17: mol_type = other DNA
gacctgccctagaaata

SEQ ID NO: 2175 - DNA, 17 bp, synthetic construct
  misc_feature 1..17: note = Synthetic
  source 1..17: mol_type = other DNA
gctaaaactaacctgcc

SEQ ID NO: 2176 - DNA, 17 bp, synthetic construct
  misc_feature 1..17: note = Synthetic
  source 1..17: mol_type = other DNA
ggcagtgcatttcacta

SEQ ID NO: 2177 - DNA, 17 bp, synthetic construct
  misc_feature 1..17: note = Synthetic
  source 1..17: mol_type = other DNA
gttaatggttttcacat

SEQ ID NO: 2178 - DNA, 17 bp, synthetic construct
  misc_feature 1..17: note = Synthetic
  source 1..17: mol_type = other DNA
gagtggaagaaggagat

SEQ ID NO: 2179 - DNA, 17 bp, synthetic construct
  misc_feature 1..17: note = Synthetic
  source 1..17: mol_type = other DNA
ggctctgcaggaacagg

SEQ ID NO: 2180 - DNA, 17 bp, synthetic construct
  misc_feature 1..17: note = Synthetic
  source 1..17: mol_type = other DNA
gtaaaataaatttgctc

SEQ ID NO: 2181 - DNA, 17 bp, synthetic construct
  misc_feature 1..17: note = Synthetic
  source 1..17: mol_type = other DNA
gagaaggcagctttctg

SEQ ID NO: 2182 - DNA, 17 bp, synthetic construct
  misc_feature 1..17: note = Synthetic
  source 1..17: mol_type = other DNA
gtctggcagaagacact

SEQ ID NO: 2183 - DNA, 17 bp, synthetic construct
  misc_feature 1..17: note = Synthetic
  source 1..17: mol_type = other DNA
gccagatttcttttctc

SEQ ID NO: 2184 - DNA, 20 bp, synthetic construct
  misc_feature 1..20: note = Synthetic
  source 1..20: mol_type = other DNA
cggttccgcaggacccaggg

SEQ ID NO: 2185 - DNA, 20 bp, synthetic construct
  misc_feature 1..20: note = Synthetic
  source 1..20: mol_type = other DNA
cccccttccctatgggaata

SEQ ID NO: 2186 - DNA, 20 bp, synthetic construct
  misc_feature 1..20: note = Synthetic
  source 1..20: mol_type = other DNA
agtggtgcctggaaaataaa

SEQ ID NO: 2187 - DNA, 20 bp, synthetic construct
  misc_feature 1..20: note = Synthetic
  source 1..20: mol_type = other DNA
actacagtggtgcctggaaa

SEQ ID NO: 2188 - DNA, 20 bp, synthetic construct
  misc_feature 1..20: note = Synthetic
  source 1..20: mol_type = other DNA
cccccttccctatgggaata

SEQ ID NO: 2189 - DNA, 20 bp, synthetic construct
  misc_feature 1..20: note = Synthetic
  source 1..20: mol_type = other DNA
atgcatataccagtttgtgg

SEQ ID NO: 2190 - DNA, 20 bp, synthetic construct
  misc_feature 1..20: note = Synthetic
  source 1..20: mol_type = other DNA
accgggaagtgaatggacgt

SEQ ID NO: 2191 - DNA, 20 bp, synthetic construct
  misc_feature 1..20: note = Synthetic
  source 1..20: mol_type = other DNA
acgaatttctgcaaacagaa

SEQ ID NO: 2192 - DNA, 20 bp, synthetic construct
  misc_feature 1..20: note = Synthetic
  source 1..20: mol_type = other DNA
ctccaaggacaaatctttat

SEQ ID NO: 2193 - DNA, 20 bp, synthetic construct
  misc_feature 1..20: note = Synthetic
  source 1..20: mol_type = other DNA
tttattttagctgaagggaa

SEQ ID NO: 2194 - DNA, 20 bp, synthetic construct
  misc_feature 1..20: note = Synthetic
  source 1..20: mol_type = other DNA
ccaagcaagaagtgaagccc

SEQ ID NO: 2195 - DNA, 20 bp, synthetic construct
  misc_feature 1..20: note = Synthetic
  source 1..20: mol_type = other DNA
tttatttcccttcagctaaa

SEQ ID NO: 2196 - DNA, 20 bp, synthetic construct
  misc_feature 1..20: note = Synthetic
  source 1..20: mol_type = other DNA
tcccaaagatgcccacctgc

SEQ ID NO: 2197 - DNA, 20 bp, synthetic construct
  misc_feature 1..20: note = Synthetic
  source 1..20: mol_type = other DNA
gagagcaaaagatacatctc

SEQ ID NO: 2198 - DNA, 20 bp, synthetic construct
  misc_feature 1..20: note = Synthetic
  source 1..20: mol_type = other DNA
atcaaaaagagtgaacgaga

SEQ ID NO: 2199 - DNA, 20 bp, synthetic construct
  misc_feature 1..20: note = Synthetic
  source 1..20: mol_type = other DNA
atttgtaccggtttttgtat

SEQ ID NO: 2200 - DNA, 20 bp, synthetic construct
  misc_feature 1..20: note = Synthetic
  source 1..20: mol_type = other DNA
tggtggtctggataaaagaa

SEQ ID NO: 2201 - DNA, 20 bp, synthetic construct
  misc_feature 1..20: note = Synthetic
  source 1..20: mol_type = other DNA
tgtgcccattggtggtctgg

SEQ ID NO: 2202 - DNA, 20 bp, synthetic construct
  misc_feature 1..20: note = Synthetic
  source 1..20: mol_type = other DNA
cgcagagagtcgccgtctcc

SEQ ID NO: 2203 - DNA, 20 bp, synthetic construct
  misc_feature 1..20: note = Synthetic
  source 1..20: mol_type = other DNA
tattcctgacactgccagga

SEQ ID NO: 2204 - DNA, 20 bp, synthetic construct
  misc_feature 1..20: note = Synthetic
  source 1..20: mol_type = other DNA
tttaaagaaaaagcagcttt

SEQ ID NO: 2205 - DNA, 20 bp, synthetic construct
  misc_feature 1..20: note = Synthetic
  source 1..20: mol_type = other DNA
gggacagaaaacctagaaaa

SEQ ID NO: 2206 - DNA, 20 bp, synthetic construct
  misc_feature 1..20: note = Synthetic
  source 1..20: mol_type = other DNA
tctgtccctccctcagtagt

SEQ ID NO: 2207 - DNA, 20 bp, synthetic construct
  misc_feature 1..20: note = Synthetic
  source 1..20: mol_type = other DNA
tttaagagcatcgaacaata

SEQ ID NO: 2208 - protein, 386 aa, synthetic construct
  REGION 1..386: note = Synthetic
  REGION 1..2: note = MISC_FEATURE - Xaa represents any naturally occurring amino acid
  SITE 4: note = MISC_FEATURE - Xaa represents any naturally occurring amino acid
  REGION 7..11: note = MISC_FEATURE - Xaa represents any naturally occurring amino acid
  REGION 16..20: note = MISC_FEATURE - Xaa represents any naturally occurring amino acid
  SITE 23: note = MISC_FEATURE - Xaa represents any naturally occurring amino acid
  REGION 26..27: note = MISC_FEATURE - Xaa represents any naturally occurring amino acid
  SITE 31: note = MISC_FEATURE - Xaa represents any naturally occurring amino acid
  REGION 33..36: note = MISC_FEATURE - Xaa represents any naturally occurring amino acid
  SITE 41: note = MISC_FEATURE - Xaa represents any naturally occurring amino acid
  REGION 43..50: note = MISC_FEATURE - Xaa represents any naturally occurring amino acid
  REGION 52..54: note = MISC_FEATURE - Xaa represents any naturally occurring amino acid
  SITE 57: note = MISC_FEATURE - Xaa represents any naturally occurring amino acid
  SITE 59: note = MISC_FEATURE - Xaa represents any naturally occurring amino acid
  REGION 63..64: note = MISC_FEATURE - Xaa represents any naturally occurring amino acid
  REGION 66..78: note = MISC_FEATURE - Xaa represents any naturally occurring amino acid
  REGION 80..82: note = MISC_FEATURE - Xaa represents any naturally occurring amino acid
  REGION 84..85: note = MISC_FEATURE - Xaa represents any naturally occurring amino acid
  REGION 87..89: note = MISC_FEATURE - Xaa represents any naturally occurring amino acid
  REGION 91..92: note = MISC_FEATURE - Xaa represents any naturally occurring amino acid
  REGION 94..96: note = MISC_FEATURE - Xaa represents any naturally occurring amino acid
  SITE 98: note = MISC_FEATURE - Xaa represents any naturally occurring amino acid
  SITE 101: note = MISC_FEATURE - Xaa represents any naturally occurring amino acid
  REGION 103..104: note = MISC_FEATURE - Xaa represents any naturally occurring amino acid
  REGION 108..109: note = MISC_FEATURE - Xaa represents any naturally occurring amino acid
  SITE 112: note = MISC_FEATURE - Xaa represents any naturally occurring amino acid
  REGION 115..118: note = MISC_FEATURE - Xaa represents any naturally occurring amino acid
  SITE 122: note = MISC_FEATURE - Xaa represents any naturally occurring amino acid
  REGION 125..143: note = MISC_FEATURE - Xaa represents any naturally occurring amino acid
  REGION 146..154: note = MISC_FEATURE - Xaa represents any naturally occurring amino acid
  SITE 157: note = MISC_FEATURE - Xaa represents any naturally occurring amino acid
  REGION 159..169: note = MISC_FEATURE - Xaa represents any naturally occurring amino acid
  SITE 172: note = MISC_FEATURE - Xaa represents any naturally occurring amino acid
  REGION 174..176: note = MISC_FEATURE - Xaa represents any naturally occurring amino acid
  REGION 174..179: note = MISC_FEATURE - Xaa represents any naturally occurring amino acid
  REGION 180..181: note = MISC_FEATURE - Xaa represents any naturally occurring amino acid
  SITE 185: note = MISC_FEATURE - Xaa represents any naturally occurring amino acid
  REGION 187..192: note = MISC_FEATURE - Xaa represents any naturally occurring amino acid
  REGION 194..195: note = MISC_FEATURE - Xaa represents any naturally occurring amino acid
  REGION 197..202: note = MISC_FEATURE - Xaa represents any naturally occurring amino acid
  REGION 204..206: note = MISC_FEATURE - Xaa represents any naturally occurring amino acid
  REGION 209..213: note = MISC_FEATURE - Xaa represents any naturally occurring amino acid
  REGION 216..220: note = MISC_FEATURE - Xaa represents any naturally occurring amino acid
  REGION 223..225: note = MISC_FEATURE - Xaa represents any naturally occurring amino acid
  REGION 223..228: note = MISC_FEATURE - Xaa represents any naturally occurring amino acid
  REGION 230..256: note = MISC_FEATURE - Xaa represents any naturally occurring amino acid
  REGION 258..274: note = MISC_FEATURE - Xaa represents any naturally occurring amino acid
  REGION 276..277: note = MISC_FEATURE - Xaa represents any naturally occurring amino acid
  REGION 280..281: note = MISC_FEATURE - Xaa represents any naturally occurring amino acid
  REGION 283..288: note = MISC_FEATURE - Xaa represents any naturally occurring amino acid
  SITE 290: note = MISC_FEATURE - Xaa represents any naturally occurring amino acid
  REGION 292..293: note = MISC_FEATURE - Xaa represents any naturally occurring amino acid
  REGION 296..319: note = MISC_FEATURE - Xaa represents any naturally occurring amino acid
  REGION 321..322: note = MISC_FEATURE - Xaa represents any naturally occurring amino acid
  REGION 324..331: note = MISC_FEATURE - Xaa represents any naturally occurring amino acid
  REGION 333..336: note = MISC_FEATURE - Xaa represents any naturally occurring amino acid
  SITE 338: note = MISC_FEATURE - Xaa represents any naturally occurring amino acid
  REGION 340..342: note = MISC_FEATURE - Xaa represents any naturally occurring amino acid
  REGION 344..349: note = MISC_FEATURE - Xaa represents any naturally occurring amino acid
  REGION 351..354: note = MISC_FEATURE - Xaa represents any naturally occurring amino acid
  REGION 356..386: note = MISC_FEATURE - Xaa represents any naturally occurring amino acid
XXVXVLXXXXXPLMPXXXXXARXLLXXGKAXVXXXXPFTIXLXXXXXXXXQXXXLGXDXGSKXXGXXXXXXXXXXXXXEXXXRXXIXXXLXXRXXXRXRRXRXXRYRXXRFXNRXXXXGWLXPSXXXXXXXXXXXXXXXXXXXPIXXXXXEXXXFDXQXXXNPXIXGXXYQXGXXXGXXXXREYXLXXXXXXCXXCXXXXXXLXXXHIXXXXXGGXXXXXNLXXXCXXCXXXXXXXXXXXXXXXXXXXXXXXXXXXRXXXXXXXXXXXXXXXXXGXXTKXXRXXXXXXKXHXXDAXXXXXXXXXXXXXXXXXXXXXXXXRXXGXXXXXXXXGXXXXDXVXXXGXXXXXXGXXXXGXXXXXXXXXXXXXXXXXXXXXXXXXXXXXXX

SEQ ID NO: 2209 - DNA, 40 bp, synthetic construct
  misc_feature 1..40: note = Synthetic
  source 1..40: mol_type = other DNA
gcaaagcatcatcaaaaagagtgaacgagactagaagtct

SEQ ID NO: 2210 - DNA, 36 bp, synthetic construct
  misc_feature 1..36: note = Synthetic
  source 1..36: mol_type = other DNA
gcaaagcatcatcaaaaagagtgagactagaagtct

SEQ ID NO: 2211 - DNA, 36 bp, synthetic construct; identical to SEQ ID NO: 2210
  misc_feature 1..36: note = Synthetic
  source 1..36: mol_type = other DNA

SEQ ID NO: 2212 - DNA, 35 bp, synthetic construct
  misc_feature 1..35: note = Synthetic
  source 1..35: mol_type = other DNA
gcaaagcatcatcaaaaagacgagactagaagtct

SEQ ID NO: 2213 - DNA, 34 bp, synthetic construct
  misc_feature 1..34: note = Synthetic
  source 1..34: mol_type = other DNA
gcaaagcatcatcaaaaagagagactagaagtct

SEQ ID NO: 2214 - DNA, 34 bp, synthetic construct; identical to SEQ ID NO: 2213
  misc_feature 1..34: note = Synthetic
  source 1..34: mol_type = other DNA

SEQ ID NO: 2215 - DNA, 33 bp, synthetic construct
  misc_feature 1..33: note = Synthetic
  source 1..33: mol_type = other DNA
gcaaagcatcatcaaaaagaagactagaagtct

SEQ ID NO: 2216 - DNA, 32 bp, synthetic construct
  misc_feature 1..32: note = Synthetic
  source 1..32: mol_type = other DNA
gcaaagcatcatcaaaaagagactagaagtct

SEQ ID NO: 2217 - DNA, 31 bp, synthetic construct
  misc_feature 1..31: note = Synthetic
  source 1..31: mol_type = other DNA
gcaaagcatcatcactcgagactagaagtct

SEQ ID NO: 2218 - DNA, 31 bp, synthetic construct
  misc_feature 1..31: note = Synthetic
  source 1..31: mol_type = other DNA
gcaaagcatcatcaaacgagactagaagtct

SEQ ID NO: 2219 - DNA, 28 bp, synthetic construct
  misc_feature 1..28: note = Synthetic
  source 1..28: mol_type = other DNA
gcaaagcatcatacgagactagaagtct

SEQ ID NO: 2220 - DNA, 27 bp, synthetic construct
  misc_feature 1..27: note = Synthetic
  source 1..27: mol_type = other DNA
gcaaagcatcatcgagactagaagtct

SEQ ID NO: 2221 - DNA, 27 bp, synthetic construct
  misc_feature 1..27: note = Synthetic
  source 1..27: mol_type = other DNA
gcaaagcatcatcgagactagaagtct

SEQ ID NO: 2222 - DNA, 25 bp, synthetic construct
  misc_feature 1..25: note = Synthetic
  source 1..25: mol_type = other DNA
gcaaagcatcatcaactagaagtct

SEQ ID NO: 2223 - DNA, 23 bp, synthetic construct
  misc_feature 1..23: note = Synthetic
  source 1..23: mol_type = other DNA
gcaaagcatcagactagaagtct

SEQ ID NO: 2224 - DNA, 65 bp, Ktedonobacter racemifer
  misc_feature 1..65: note = MISC_FEATURE - Any "n" represents any nucleotide
  misc_feature 48..55: note = MISC_FEATURE - Any "n" represents any nucleotide
  source 1..65: mol_type = other DNA
cttgcgggatgaagaagaggccgcacccgtttgaggccgcaccaaatnnnnnnnnatcgtccatt

SEQ ID NO: 2225 - DNA, 65 bp, Ktedonobacter racemifer
  misc_feature 11..18: note = MISC_FEATURE - Any "n" represents any nucleotide
  source 1..65: mol_type = other DNA
aatggacgatnnnnnnnnatttggtgcggcctcaaacgggtgcggcctcttcttcatcccgcaag

SEQ ID NO: 2226 - RNA, 47 nt, Ktedonobacter racemifer
  source 1..47: mol_type = other RNA
gggaagaagaggkccgcacccgtttgaggccgcaccaaatgtgaact

SEQ ID NO: 2227 - DNA, 65 bp, synthetic construct
  misc_feature 1..65: note = Synthetic
  misc_feature 48..55: note = MISC_FEATURE - Any "n" represents any nucleotide
  source 1..65: mol_type = other DNA
atgattacgccaagctttttaacagtggccttattaaatgacttctcnnnnnnnncccgggtacc

SEQ ID NO: 2228 - DNA, 65 bp, synthetic construct
  misc_feature 1..65: note = Synthetic
  misc_feature 11..18: note = MISC_FEATURE - Any "n" represents any nucleotide
  source 1..65: mol_type = other DNA
ggtacccgggnnnnnnnngagaagtcatttaataaggccactgttaaaaagcttggcgtaatcat

SEQ ID NO: 2229 - RNA, 46 nt, synthetic construct
  misc_feature 1..46: note = Synthetic
  source 1..46: mol_type = other RNA
ggcaagctttttaacagtggccttattaaatgacttctcgtgaact

SEQ ID NO: 2230 - DNA, 46 bp, Allochromatium warmingii
  source 1..46: mol_type = other DNA
tttaacagtggccttattaaatgacttctcatgagatcatcgtcca

SEQ ID NO: 2231 - DNA, 46 bp, Allochromatium warmingii
  source 1..46: mol_type = other DNA
tggacgatgatctcatgagaagtcatttaataaggccactgttaaa

SEQ ID NO: 2232 - DNA, 46 bp, Allochromatium warmingii; identical to SEQ ID NO: 2230
  source 1..46: mol_type = other DNA

SEQ ID NO: 2233 - DNA, 46 bp, Allochromatium warmingii; identical to SEQ ID NO: 2231
  source 1..46: mol_type = other DNA

SEQ ID NO: 2234 - DNA, 46 bp, Allochromatium warmingii; identical to SEQ ID NO: 2230
  source 1..46: mol_type = other DNA

SEQ ID NO: 2235 - DNA, 46 bp, Allochromatium warmingii; identical to SEQ ID NO: 2231
  source 1..46: mol_type = other DNA

SEQ ID NO: 2236 - DNA, 46 bp, Allochromatium warmingii; identical to SEQ ID NO: 2230
  source 1..46: mol_type = other DNA

SEQ ID NO: 2237 - DNA, 46 bp, Allochromatium warmingii; identical to SEQ ID NO: 2231
  source 1..46: mol_type = other DNA

SEQ ID NO: 2238 - RNA, 25 nt, Allochromatium warmingii
  source 1..25: mol_type = other RNA
ggccttattaaatgacttctcgtca

SEQ ID NO: 2239 - DNA, 46 bp, Allochromatium warmingii; identical to SEQ ID NO: 2230
  source 1..46: mol_type = other DNA

SEQ ID NO: 2240 - DNA, 46 bp, Allochromatium warmingii; identical to SEQ ID NO: 2231
  source 1..46: mol_type = other DNA

SEQ ID NO: 2241 - DNA, 46 bp, Streptococcus pyogenes
  source 1..46: mol_type = other DNA
tttaacagtggccttattaaatgacttctctggttaatatcgtcca

SEQ ID NO: 2242 - DNA, 46 bp, Streptococcus pyogenes
  source 1..46: mol_type = other DNA
tggacgatattaaccagagaagtcatttaataaggccactgttaaa

SEQ ID NO: 2243 - RNA, 26 nt, Streptococcus pyogenes
  source 1..26: mol_type = other RNA
gggccttattaaatgacttctcgttt

SEQ ID NO: 2244 - DNA, 46 bp, Streptococcus pyogenes; identical to SEQ ID NO: 2241
  source 1..46: mol_type = other DNA

SEQ ID NO: 2245 - DNA, 46 bp, Streptococcus pyogenes; identical to SEQ ID NO: 2242
  source 1..46: mol_type = other DNA

SEQ ID NO: 2246 - DNA, 28 bp, unidentified
  misc_feature 1..28: note = Human gut metagenome
  source 1..28: mol_type = other DNA
tcatcaaaaagagtgaacgagactagaa

SEQ ID NO: 2247 - DNA, 30 bp, unidentified
  misc_feature 1..30: note = Human gut metagenome
  source 1..30: mol_type = other DNA
tcatcaaaaagagtgaacgcgagactagaa

SEQ ID NO: 2248 - DNA, 31 bp, unidentified
  misc_feature 1..31: note = Human gut metagenome
  source 1..31: mol_type = other DNA
tcatcaaaaagagtgaacgacgagactagaa

SEQ ID NO: 2249 - DNA, 32 bp, unidentified
  misc_feature 1..32: note = Human gut metagenome
  source 1..32: mol_type = other DNA
tcatcaaaaagagtgaacgaacgagactagaa

SEQ ID NO: 2250 - DNA, 15 bp, unidentified
  misc_feature 1..15: note = Human gut metagenome
  source 1..15: mol_type = other DNA
tcatcgagactagaa

SEQ ID NO: 2251 - DNA, 20 bp, unidentified
  misc_feature 1..20: note = Human gut metagenome
  source 1..20: mol_type = other DNA
tcatcaaaacgagactagaa

SEQ ID NO: 2252 - DNA, 22 bp, unidentified
  misc_feature 1..22: note = Human gut metagenome
  source 1..22: mol_type = other DNA
tcatcaaaaagagagactagaa

SEQ ID NO: 2253 - DNA, 27 bp, unidentified
  misc_feature 1..27: note = Human gut metagenome
  source 1..27: mol_type = other DNA
tcatcaaaaagagtgacgagactagaa

SEQ ID NO: 2254 - DNA, 17 bp, unidentified
  misc_feature 1..17: note = Human gut metagenome
  source 1..17: mol_type = other DNA
tcatcacgagactagaa

SEQ ID NO: 2255 - protein, 199 aa, unidentified
  REGION 1..199: note = Ga0207030_1011_-_->_pfam14239(3,96)[74.0]
MSVFVLDKKKNPLMPCSEKRARLLLQRGRAVVIRVYPFTIRLKDRVGGETQDLRLGIDPRSKTTGLMLARECEKIDSESGEIKRTRLTARGFPRGYLLRKKSVNGFQTGDMVIADIPKGVKSGVHVGRVAIRSSGYFNIQSTKNVIQGVSHRHCKMMQRADGYGYSIVAQQKEVSGNLGHASRAALSIPGMNAEVSRAI

SEQ ID NO: 2256 - protein, 325 aa, unidentified
  REGION 1..325: note 0137383_10000411_-_->_IscB_BH_Trimmed_Muscle(80,148)[57.0]
MVFVLDRHKKPLMPCTPRRARLLLARRRAVVHRIRPFVIRLRDRRTQDSVLQESVLKIDPGSRTSGMTLVRAEETPAGEVHHALFCSEVQHRGELVHRGKQTQSNARRRRRSATLRHRAPRFDNRAVAKGWLPPSMCSRVGNILTWARRYSRWVPVGTWTGGRTRWNRARLGIAKTHANDALCVGEIAGVKLLRLKTLRIKATGRGEHCRTNWTAEGFPRGYKMRQKQVRGFKTGDLVRAEVPEPLTTAGIHLGRVAVRASGSFRVGKVDGIHARYGVLVQRADGYEYEWTEQQNRRLFPTPAPRKGTPASSPSLKSGASAGGDW

SEQ ID NO: 2257 - protein, 325 aa, unidentified
  REGION 1..325: note = Human gut metagenome
MRVFVLNKRGQPLMPCSPAKARLLLKEKKAIVKRRTPFTIQLTIATGEARQPVTLGVDSGYKHIGLSATTEKAELYASEVELRQDITDLLSARLALRRSRRSRKTRYRAPRFDNRVASKREGWLAPSVENRIAAHMSRVEAVMQVLPVTAITVETAAFDTQLLKNPDIAGEAYQQGEQLGFWNVREYVLFRDGHVCQHCRGKSKDPILNVHHIESRRTGGDAPNNLITLCETCHKAFHRGEIELKVRRGKSFKAETFMGIMRWTLFERLKKAHPELRVRNTYGYLTKHKRISHGIAKSHCADAYCIADNLGAKRLEGFFFQKQTR

SEQ ID NO: 2258 - protein, 475 aa, unidentified
  REGION 1..475: note = 335256_-_->_IscB_BH_Trimmed_Muscle(70,169)[47.7]
MKPVYVVGYNGQGLMPTTPRKARKLVESGRAVVLFKTPYTIKLLYKTGVNTQPTFEGTDTGSQHIGVAVTTDEKVLSKEEYALRSTMDKRALIETRASYRKGRRYRKTRYRHPKFRPHTKRVYVEKPVRYNKHLTHWKKCKNVFASSKKKGWLPPSIQSKCDMTMQIIDRYKMILPPKTRFRHEVGRFDIARIKDPSIHGEMYQYGRLYDEENVRAYVFERDGYTCKVCKKKAGSKRKDGSTVKLAAHHIDFRSKGATDNPDRMITVCDGCHTTVNHQKGGILYQWMLDEKKVARGYRDETFMNIIRRKLFKEFPNDEFTYGNFTAADRKTLGLEKTHANDAVAIACQGRPVKDNPDTTYYQQVRHNKRSLHEATARKGRKEPNRRQIRNAKNTKSVTIGRYNSKKTFYVYDKVSYKGQVGWISGFTKTAAYVKDKDDNYIKYPDKSYNQINLSDLSVISHNDNWLIGAVSPIGK

SEQ ID NO: 2259 - protein, 463 aa, unidentified
  REGION 1..463: note a0210056_1025515_-_->_IscB_BH_Trimmed_Muscle(124,198)[77.1
MQKLLVELKNAPTDVPQVCSSVSPVLNSPCEVMDSVQDIQLANNNSDVDQLGNRRNTLLVVFTLNKNGKPLMPCKPAKARHLLKEGKAKVVRGQPFTIQLLYGSGTAIQPIILGIDPGYDKIGFSAITDKKELISGEVRLRKDVSAKLTERRMYRRNRRNKLWYRKPRFLNRVSKKENWLAPSIRYKLDSHISLINKIKEILPISDTIVEIASFDAQKIVNPEISSIKYQQGELQGYEIREYLLEKWGRKCAYCGKKDIPLEVEHIIPKSRGGTDRVSNLTLSCQKCNLKKGNRTAKEFGYPEIQKQGKESLKATAFMNNVRWRLVNILNCKWTYGYKTKHDRIKLGLEKSHSNDAFTIAGGNKQLGSVQYIGNRYRRNDRSLQLNRKGFTPSIRRQRYNLQPHSLVKWNNQLLRIRGISCKGARVVLENKKSVKIDSVQLYKYMRGWQLFPDINDGVSLLQN

SEQ ID NO: 2260 - protein, 435 aa, Moorena sp.
MSNFVFVLDTKRQPLAPCHPARARELLAKGKAAIYRRYPFTIVLNRAVGDVPPSYQLKIDPGSQTTGLALVNRSQLVWGAELQHRGARIKAKLATRRVCRRNRRNRKTRYRKPRFLNRTRPKGWLPPSLNHRVETTMTWVNRLRKLCPIVCVSQELVRFDTQKLQNPEVSGIEYQQGELLGYEVREYVLQKWGRKCVYCGVENVPLEVEHIQPQSKGGSDRVSNLTLACRPCNQSKGNRDVREFLLEKPSVLERILRQAKTPLKDAAAVNATRWQLYQRLKETGLPVEVGTGGLTKFNRTRLGLPKAHWLDAACVGETPSLHLATETPIAILSKGHSTRFRTLIDRYGFPRAVRQTKAQVNGLQAGDIVRAIVPNGKYRGQWTGAIAGVRKKRPPALRPFGKKQIDLTAQTQIQIVHKQDGYEYDINSCGHSSRR

SEQ ID NO: 2261 - protein, 277 aa, unidentified
  REGION 1..277: note a0307954_1000334_-_->_IscB_BH_Trimmed_Muscle(72,144)[89.7
MAVFVLDRQKNPLMPCSEKRARLLLTRRRAVVVRAYPFTIRLKDRAGGAVQKVVLKIDPGSKETGLAVSRVSAQGEHVLCLIELTHRGHQISKALDQRRGFRSRRRGQLRYRAPRFSNRTKPKGWLAPSLQHRVDTTASIVNRLCTLVPVSSISQELVRFDLQQMENPEISGVEYQQGTLLGYEVREYLLEKWGLECAYCAVTDTPLEIEHIVPKSNGGSNRISNLTLACHDCNQEKGSQTLAEFFQTSSRLKDKQPRMDNVLIQCKRPLRDAAAVN

SEQ ID NO: 2262 - protein, 216 aa, unidentified
  REGION 1..216: note = a0373633_0030533_-_->_pfam14239(5,83)[54.9]
MVLSVFVLDNRGVAVMPCTQKRARLLLARGRARVHRLVPFVIRSVDVKAQDCSLQPLSLKIDPGSKTMCQRPMRWMRRVSVRWTGYRPSLHIKSTGRGSYQRTRLDAFGFPRGYLMRNKSVKGFATGDLVKATVTHGKKQGGYRGRVAIRATGSFNIQTREGVVQGVSHRHCTLLQRGDGYGYQQQSKSDAGRDRASHDALCLPGMNAGVSRAIQG

SEQ ID NO: 2263 - protein, 424 aa, unidentified
  REGION 1..424: note = a0376687_0042770_-_->_pfam14279(13,65)[44.2]
MLRTVRQPGNGALIRGHRKESPMVFVLDQHKKPLMPCTPRRARLLLARKRAVVHRLSPFTIRRHRTAASRRARCNRWSSRSIPVRRPPAWPWRGSRRRMRGRCTTRCILPSSPIGEKRSASVCANGRSIAAAGVRPTCATGQPASSTVAVRPAGFLRRCAHGSTTSCPGLPATGAGSRWCAWRSSASSSTPRGSQNPEISGVEYQRGELAGWEVRSYLLEKFEHRCAYCGRTDTPFELDHIQSRSRGGSDRVSNLALSCHACNVAKGDHTAAEFGHPEVAAQAKQPLRDAAAVNATRVALCDELRKLGLPLTSLVWRTHALEPGALRDPQDPRTGCGCRVGALAGVSASRHKTLAIKATGRGRYSRTNVDEHGFPVGYLMRHKQVMGIKTGDRVLQFADGYDYALVDTGSEHVAVAPPPTLCPP

SEQ ID NO: 2264 - protein, 278 aa, unidentified
  REGION 1..278: note = 0172375_10015289_-_->_cas9(114,151)[29.3
MASRRSLRRGRRTRKTRYRQARFLNRKRNQGWLPPSLESRVLNVNSWVNRLRRLAPVSSISLELVKFDTQKLQNPEVSGVEYQQGELLGYEVREYLLEKWGRKCAYCKTANVPLQIEHIVPKIRGGTNRVSNLTLACESCNQAKGNLTAAEFGHPGIQSQARMPLKDAAAVNATRWALFNQLKGLGLPVEMGSGGRTKFNRVRQGYPKAHWIDAACVGESGSKINIPSWAIPVQIKAVGHGSRQRCGTDKYGFPVRHAPKAKSFMGYQTGDIVQANIP

SEQ ID NO: 2265 - protein, 486 aa, unidentified
  REGION 1..486: note = a0180732_1000856_-_->_pfam14239(3,210)[179.7]
MKVYVISKSGKPLMPTERFGKVRRLLKSGKAKVVHRKPFTIQLLYETTEIVQPLILGVDTGANDIGVVVTKEDGEPVFLGELETRTIEVAQNMKDRCEHRRARRRHRREKRKRRAKAAGTIFEKKKYHINGCEEAITCKLIKPGMVRFENRKRADKWLTPTCTHLLQTHINFIKKIAKILPIAIVNFEYAKFDLHKINNPDVKGKDYQNGRKKGYVNTAEYVLCRDKHSCQLCKVKSGKMRVHHVIWQSENGSDTPENLVTLCEKCHEKVHNNQKADKKIKGLFEGIKKKYVHATILNSVLPKLFQWLKSTFENVNKTYGYETKEKRWEYNLPKSHVVDAYLIAIGDNPPHDLTSCESFLFKQFRRHNRANIKRQEDRKYYIGKKKVAVNRNKRTGQTFDSLKDLVTKCAEHETVLNLLTVKPATRPKRSTKPFGMGDVVKFRGGIHIVKGFTGNYLGFVDAADGKYNKNIKEAELVIKNQGIVCI

SEQ ID NO: 2266 - protein, 441 aa, unidentified
  REGION 1..441: note = Human oral metagenome
MSMSLTYVLDKNGQPLMPTQRCGKVYRLLKSGKAKVVQREPFTIKLLYEPETHIVQDLTLGVDTGSSKIGTAVVDNDANVYYASKVTIRNDISNKMSRRRIYRRARRTRKLRYRPVRFSNRKNSTKKDRFSPTMVSKINSHIREIEFVKSILPVKTLVIETGTFDPHLLEHIEDGIAFNKHWGYQKGSNYGFANSREACLNRDNYTCQCCGAKNTRLEVHHIIYRSKGGSDELVNLITLCEKCHKLLHDGKLKEFESKLSGKRKGILKHATQMNSIRIQLLRHYPEAIETFGFMTKENRQSSDLEKSHVNDAIIISTGCITKPKYKTEVYYKKKCIPRGDYAVTLYAGQGKKNKLGKTTKPRNTRPVYGFRKHDKVEYCNTICFLKSLRFAGNGPLMDIDGNILKFRERYGKADTTSVKNLKRISARKNCLCTKVTFLCTS

SEQ ID NO: 2267 - protein, 496 aa, unidentified
  REGION 1..496: note = a0307930_1006096_-_->_COG1403(194,267)[37.8]
MIYIVDARNKIGHPTKKHDMVGRLIRNERAKIIKRLNKDVMIVQLLTKVFSKSETIDCEFRIGIDPGYANIGFAVFKIHGNIITKLIKGEACLRTKKIKEGLDAKRMYRRSRRYLARKNIKKKYGTGRAKFKHPAWKNRSKHKFQPTHLHVIQSHENVLAKLLKLIPIEQVKIHLEYNNFDIHKMINPKIQSFWYQKGLQFGFENVKSYVRNRDNYQCQICKKDVGSIRNEVHHIKWKSTGGSDRPENLILLCEVCHNKVHKKGLNCPDKSISVNGYRNAGVLNSVMGTIWSRFENQCPVQDTYGYITSGVRNRDNIIKSHASDASVIAFNDSLGSQNIEDYSWKDYNSKLNMNQFPRHTRSFTLRHTDRRYTILNSNLPGKKKTVVAWNRKRRAGQDPKKQSLAELKQSLMIDGTLNSTVIVAIPGQKVMRSLITDYTIRKGDVVNVGSMIKVCKGVQNKGTVVTFENDLNPKKLDTFGTKKCHKIINNCGLVTY

SEQ ID NO: 2268 - protein, 442 aa, Moorena sp.
MSKVLLLDMTKQPLDPVHPGRARLLLKEGKAAVYRRYPFTLILKTQVDSPAVSALRLKLDPGAKTSGLALVDDASGEVVWAAELGHRGASIKKRIDARRGVRRKRRSRFTRYRKPRFHNRRSSRRKGRLPPSLESRVANMLTWVGRLRRLCPIEVISMELVKFDMQAMQNPEITGAQYQQGERMGYETREYLLAKWGRRCAYCGAEDVPLEIEHILCRARGGTHRVSNLTLACEPCNVKKGTQLIEDFLNKKPDVLARILAQAKTPLKAAAAVNATRWHLFERLKATGLPLETSSGGLTKYNRAKRHLPKTHWLDAACVGQSTPKPLETSQVVPLLIEATGHGNRQMCGVDEHGFPIRHRQRKKVHFGYQTGDLVRAVVPTGARAGTHVGRVLARASGSFDLRTKAGRQAGISYRYCRPIHRNDGYRYQQGGRHAVPATQST

SEQ ID NO: 2269 - protein, 528 aa, unidentified
  REGION 1..528: note = a0182741_1016627_-_->_pfam14239(1,185)[194.8]
VLPQPRTLETAPADTAGVATKRGAVDGIRPTTGVQHGRGETTREGGGTPDPVPAGRAAGAGDRTITSRVFVLDRKGRPLMPTHPARARELLRKGRARVHRLTPFTIRLVDVDATDPGVVVDGVELGIDPGSKTTGMALFVTDASGNRTAVSLIELVHRGLAIKMSLSKRAALRRGRRSRNLRYRAPRFDNRTRKPADGLDVWLPPSVRHRVVTTVAWLDRLARLAPITRVHVESARFDTHLLHEPEVSGVGYQQGTLAGTEAREYLLAKYQHRCVYCDATGVVLNLDHVRPRSRGGSNRVSNLVTACVPCNEAKDNLPVEQFLAHDPARLARVLAGLKKPLRDAAAMNSTRHALVGAIASRGFDPVTATGGRTKWNRTRFGVPKTHALDALCVGEVGGVSGWPSTTLAVTATGRGSYARTRSDRHGFPRLRLTRVKRHHGFATGDLVRAVVPTGKKAGTHFGRVAVRATGSFNITTSAGTVQGIHHRHVRLLQRADGYTYATMKEGVGTRGSAYPSPRLKPGVSRRTR

SEQ ID NO: 2270 - protein, 436 aa, unidentified
  REGION 1..436: note 0164242_10000581_-_->_IscB_BH_Trimmed_Muscle(77,145)[73.6]
MSVFVLDKKGRALMPCSEKRARLLLTRRKAFVKVMQPFTIQLKERLLEDSELQSVELKLDPGSRHTGMALVRDAEGIKYCLNLYQLDHCGQMIHRKLLRRAMYRKQRRSRKTRYRQARFLNRRKPKGWLAPSLMHRVNSTLSWALKFQRWVPLTKLVVERNRFDIQKLQRPEIKGIEYQRGTLFGMEVWEYLLEKWGHRCVYCEAPDRKLTIDHVTPRSRGGSDRVSNLVPACEYCNQFKGNKPVQEFLKRHPDRLKRILEGLKQSLKDAAAVNSTRYKLIEVFEQLKLPIETDTGAMTKWNRRRLNVPKTHSLDALCVGDVRSVSDWIGKPTQVIACYGRGRYQRVILDRFGFPKANLTRIKRPYGFGTGDIAQVFSEAHVKRQFPFQISKMHRLTVKIDGFFQLARRKKIVKLSYRYLKMKQRNNGYFITLQRF

SEQ ID NO: 2271 - protein, 289 aa, unidentified
  REGION 1..289: note = 0209697_10006283_-_->_pfam14239(21,196)[157.5]
MKISRDKQQVADKPEQKTAVVFVRNMWGKAINPTKPGKAYRLVRDGKAVPVCAKPYTIQMLGHCGGSVQPYRLGLDSGYSNVGASVINERTGVEVLSMEIELQKGQKDRNTDRKTRRHGRRNKKCRHRAARFDNRRRAKGKLAPSIQHKLDTHVRIATALINEKFVPISRAVVEGAQFDIQKIKNPNIEGVDYQQGDQAGFWNLREYVFHRDEHKCQNPDCKHKKEKNLPLQVHHLGFWKGDSTDRPGNLITLCVHCHRPQNHAKKGFLYGWEPKLKNFRPETFMSTIY

SEQ ID NO: 2272 - protein, 117 aa, unidentified
  REGION 1..117: note 0137371_10000193_-_->_IscB_CTerm_Trimmed_Muscle(18,110)[84. 4]
MPCQPRKARLLLKGGKAKVVKMVRRNNRQLHKATIRKGGKRQRNTAPKYVHGFRLFDCVKHQGQTCFVFGRRSSGYFDLRTLDGAKVHASASYKKLAVVQKASALLVERRAAFPPVS

SEQ ID NO: 2273 - protein, 511 aa, unidentified
  REGION 1..511: note = Human gut metagenome
MYVVYVLDEEGKPLMPTKRFGKVRRMLRDKLAKVVSVKPFVIQLLYKPKTHITQPLHGGTDPGRKNIGMSVINDKGEILYSSTTESRNQEIPKLMAERKAHRQASRRGERLRRKRRAKKYKTTTTFPEGRKLLGYENGVLALKDIINTQARFNNRKRPENWITPTVRQCIQTHISLVRQICRFLPVTDWSIEHNKFAFMKMEDGTVKGTDYQNGRLKTYKNVNDYIWHLQNGKCAICDSKIEHYHHIVQRTKGGSNRPDNIIGLCESCHAKVHSGETSLKEIGEKKKYAHLSVLNQAIPFICSELEQLFGEDNLYTCSGYETYTYREMYKLDKTHDIDAACIAAIPHNIETPIQKVKTYKIKQYRNHNRQIIHCQKERTYKLGKEKIAKNRKRRTDQKELSFNEWYKIQKKNCSKTELAEIMKKLTVIKSIRAYNNMKRLKPGSVFIYAKPETKKAEKPEQKHKQAINHSGKYILRGAITNGKYYKAEDYNKNNFSAKNCRFQYFKSLLYI

SEQ ID NO: 2274 - protein, 565 aa, unidentified
  REGION 1..565: note 0079226_10027342_-_->_IscB_BH_Trimmed_Muscle(155,257)[71.7]
MHTGEQTDLGVLPQLQALEPASADTAGVASKRGAGDGGRARSTTGVQHGRGETGRKAGVAPSGAAREGNPTTGVAVVFVVDKHHKPLQPTTERRARKLLKAGRAVVHRRYPFVIRVKDRTVGGSCVDGVQVGIDPGSRHTGIAVFTEKATSKGVVRTGLWLGELDHRGQRISRNLSSRAALRRGRRSRNLRYRKPRFLNRHPAPCDSCGANAQSGKRLCRPCQNLPRAERERGARPARLAPSLRHRVDTLASWANRLQRWAPVTGWHQELVRFDLHAMQRPGITSVEYQQGTLAGFEVREYLLSKWNHKCAYCGASGVGPGSVPLNIDHIHPGSKGGSNRISNLALACVACNQAKSNMPVEDFLVGKPAVLARVLAQAKAPLADAAAVNTTRWAVFHMLADTGLPVTAASGGRTKYNRTVTGTPKAHALDALCVGVLDRVKSYPSTTMVIGCAGRGTYARTRSDKHGFQRLHLTRTKRHYGFQTGDLVTAAVPTGAKAGIHIGTVAVRARGMFNITTAAGTIRDIHHRHVRLIQRADGYTYHSTSTPRVRLLSTANDRVPAGQKK

SEQ ID NO: 2275 - protein, 388 aa, unidentified
  REGION 1..388: note 0315295_10106663_-_->_IscB_BH_Trimmed_Muscle(182,248)[71.0]
MATTTTRQKTHQSVLPQRAALESLSADTVGVTTKRGREAHVTGNRGVAAGSDHGRGETVRDDRRRVRRHGQPGHTGSSVTGGGDPTTTTTESTTEQVRFTAGKVFVLDRHGEPLMPCHPARARQLLDKGRARVARMYPFTIRVVDRTVADSEVDGVVVKLDPGSKATGISVARVDIDGGITGLVAVEVRHRGHQIHQKLVARAALRRGRRTRNCRHRAPRFLNRARPKGRLAPSLQHRVDNVTGWVDRFRRLAPVTGIAMELVRFDTQLLENPNISGVEYQQGTLAGFEVKEYLLEKWGRKCAYCDITGVALNVDHIHPRSRGGSHRISNLTLSCVPCNQDKDNQPVEQFVTDPARLARILAAAKRPLRDAAAVNTTRWALWRKLAAT

SEQ ID NO: 2276 - protein, 459 aa, unidentified
  REGION 1..459: note = 0265297_10033497_-_->_pfam14239(2,190)[93.4]
MYFIVDGRNNLQHPTKKHDMIIRWISTGKAKFIGRDIVQVFKKFDRSKTIDCRFIIGLDPGYKNIGYSVFKIYKNQIQNILNGEVLTRTSEITKLISERRMYRRSRRSKHRENILRKFGRAKFKAPRWKNRKKKPWAPTHMHLFQSHLNLLQCIFNRIDYNQSEIVLEHFKFDSQKALDSTVSSWKYQKGPQFGFENVKAYVRARDNYKCQICGEKLLSLSVHHIQERADGGSDRPENLVTLCQSCHLLLHQTLAECPRPSKASPMRDSGVLNSCMNYLVNYISPAYTITGSDTAALRHYYNIEKSHVNDAKVIALSKLDLENFNCQDLSNTVNLKQFRRHTRNCVQRYEDRKYICDGFTVAWNRKSRSTQAESKPSLQEFKQEYPEEKVVAKPGRIIYFRTNSQAKFRPGDIFKHQNINYVLKQWASTQGTVTSETEIKFKIRNCRKIRNNSGLVTTR

SEQ ID NO: 2277 - protein, 327 aa, unidentified
  REGION 1..327: note = a0256842_1000027_-_->_pfam14239(2,168)[177.4]
MVFVLSKNKTPLAPTSEAKARILLKKGKAIVHKVYPFTIRLKENKECKKIFEIKFDVGASVTGVAIVDAVKCFFFAEIVHRGAVIKKAMDSRRAIRRSRRNRKTRYREPRFDNRTRPEGWLPPSVKSRADNVINFAKKYAKLIPIFSVAVEKDLSHLKPKKTPKQASIVQSARTYTIKELSRNFDVIVGEGWETYANRKELGLPKQHYYDAMCIGKEYKYEIVTDKVLEIKAQGRGSRQMCRMDRFGFPRTKAKSSKIVKGFQTGDIMKAIVSKGKKIGTYLGKVAVRASGNFNITTTKTTIQGINYKYCRTIQKGDGYAYAISTIK

SEQ ID NO: 2278 - protein, 426 aa, unidentified
  REGION 1..426: note = a0209123_1000186_-_->_pfam14239(4,178)[206.9]
MNGVFVISNSKQPLMPTSPARARKLLSGGKAAVFRSYPFTIILKDRAIGVIQPVRVKIDPGSKETGIALVNEVTMKVVFVMVLVHRGLAISTILASRRVLRSGRRNRNTRYRKPGLANTTKPEGWLAPSLLHRVHTTMTWVRRLSCLAPVAAISQELVKFDLQKLENPDISGIEYQQGTLAGYEVREYLLEKWHRTCSYCDAKDIPLQIEHVKAKTNGGTNRISNLTLACEPCNTAKGKLSIEVFLAGKPDRLKKIKGQLRQPLKDATAVNATRWRLFESLKLTGLPVETGSGGRTKFNRTIQGYGKAHWIDAACVGVSGASVIIPSGLHPLVAKASGHGNRQMCGTDKFGFPIRHRTAQKQFFGFQTGDMVTANVPKGKKIGIHTGRVLVRANGNFDIQTGTGRVAGIGHRHCTMVHQKDGYAYQ

SEQ ID NO: 2279 - protein, 649 aa, unidentified
  REGION 1..649: note = a0373956_0001933_-_->_pfam14239(3,165)[122.1]
MFVPVVDQNQQPMMPTTPARARRWIASGKATAFWRGGLFCVRLNQEPSSRVVQPVAVGIDPGSKREGYSVISAAHTYLNIQAKARVGVKEAEEQSTRMRRTRRNRKTPCRQPRPNRRQSKKTLPPSTRARWQWKLRVARFLCSLFPVSIIAVEDVAAATRPGKRRWNRSFSPLEVGKHWFYEEIRALAPLELVHSYETKAVREQLGLKKTSKKLAEVWEAHCVDAWCLAYRAVGGNTAPDHRGVVVFAPLIWHRRQLHRFQLEKGGMRKPYGGTLSQGIKRGTLVQHPRWGKALVGGTMDGRLSLHDPGTYKRLTQGAKVAECHVVTVLRWRTCLLPLHPLPKKRRASSPASKARVLGKSRLMSVTLLREGEREASMQKLAGASSLSFAHKRVWTSKTASRLFTVLAPVLLGMVLLGGWYFSTSRGLVATYELPPPSDVWTSLSVGFGSGLFLHMAWVTLQESLGGFLLAVMIALPVGFGLAKWRLFAATIYPYLAAGQAIPAIVIAPFLVVWMGYGMGPTVVLCLLVVLFPMIITTALGFQTLDQALVDAARVEGASLWPMLTRIELPLALPAIMAAVRTGLTLSVVGALVGEFVTNTDQGLGALVQIAKNQYDVPLMFATVLVLAIMAGVFYGITWGLTRISEILST

SEQ ID NO: 2280 - protein, 244 aa, unidentified
  REGION 1..244: note = 316622_100118550_-_->_pfam14239(3,174)[185.2
MLVYVQDQEGKPLMPTRRCGAVRRWLKSGRARVVRREPFTIRLVDRAGGYTQHLQAGVDLGTAHVGVAVVSAQEEVFSGEFRLRTDVSGLLTERRQFRRARRSRKCRHRPPRFRNRRRRDELAPSVRAQVAETLRVVRLVEGLLPVAAWTFEIGNFDPHQLVHPDVRGVGYQQGEQYGFANAREYVLWRDRHTCQACRGQSGDPRLTVHHLRQRQERGSNRPANLITLCRTCHQRHHQGPPLPL

SEQ ID NO: 2281 - protein, 438 aa, unidentified
  REGION 1..438: note = 0209048_10010134_-_->_pfam14239(4,179)[225.1]
MSQVFVLDANEQALNPIHPGRARLLLKQGKAAVHRRYPFTIILKRVVEQPTLHPLRVKIDPGSHTTGIALVNEHTGEVVWAAELTHRGEQIKRDLDKRRAVRRSRRQRKTRYRKPRFANRRKRTGTLPPSLESRVCNVLTWVRRLMQICPVTAISQELARFDTQALEHPDIEGVDYQRGQLAGYEVREYVLLKWNHQCAYCDAREVPLELDHVQPRSKRCLDRVSNLTLSCRSCNQRKGNRDVREFLHDDPARLARILAHLKSPLRDAAAVNTTRWALNARLKLFGVPVESGSGGLTKYNRVMRGLDKTHWLDAANVGRSTPASLIIKGIVPLHIIATGHGSRQMCRMDKYGFPRTGPKQRKRVQGFQTGDLVRAVVTSGTKQGTYVGKVAVRTRGVFNITTAQGVVTDIHHRYCTLIARADGYTYRRPKEVALSPIA

SEQ ID NO: 2282 - protein, 428 aa, unidentified
  REGION 1..428: note = Oscillatoria sp. pcc 10802
MKVFVLDTNRRPLDPTTPRRARKLLKGGKAAVFRLYPFTVILKRAVDSEPVQPLRLKIDPGSKTTGLAIVSERTGAVVWAAELTHRGFQIREALNSRKVKRRNRRYRKTRYRARRFNNRLRKAGWLPPSLNSRVENIVAWVRRLRRFAPISAISQELVRFDTQVIQNPEISGVEYQQGELQGCEVREYLLEKWGRKCAYCGAKETPLEVEHIYPRSKGGSNCVSNLTLACHPCNEKKGNRDVADFLSGKPDLLQRILSAAKAPLKDAAAVNSTRWALYEGLKNTGLPVEAGSGGLTKYNRKRLGLPKTHWLDAACVGESTPENLDASKIEKPLLIKATGRGCRQRVNPDKNGFLISHKSRAKTYQGWATGDIARADIPKGKYTGIHRGRIAIGQDGQFKIQVAHKKRFSVNYKYLTPIQKGDGYGYSF

SEQ ID NO: 2283 - protein, 236 aa, unidentified
  REGION 1..236: note Ga0101763_1138_-_->_IscB_BH_Trimmed_Muscle(33,66)[28.8]
MGNGVDSHRATNKDCTRKSSSCSSQSAQSKNAIEKPRFKNRKRPEGWLPISLMHRVFGVKTWADRLTRLAPVGSVVQELVRFDTQKMQNPELSGVEYQQGELFRYEVREYLLEKWGRKCAYCSVSDVPTGTGAQTKFNRCRLNLPKEHWIDAACIGQVDTVKLATTQPLLIKSTGYGSHQVIQIDKYGFPRKGYQVKLPVKDWKTGDIVNVVADKNAGLRGVRLKTVRAKTLAASG

SEQ ID NO: 2284 - protein, 494 aa, Nitrospira sp.
VQTRHGWPRNGPASYAGLQHGRGEMCREAHVTAERREQRSNPIQSQVFVLNQEGQPLMPCHPARARQLLKKGRAVVHRAVPLVTRLKNRTKAIVQPVRLKVDPGSKATGMALVRHQPSDSITVLSLFELQHRGHQISESLTARRHMRRRRRGNLRYRAPRVLNRARSAGWLPPSLQHRIDTTLAWVKRLQRFAPIKNISCELVRFDMQAMQNPEIDGTAYQQGTLTGYEVREYLLETFGRQCVYCEAKDTPLQIEHIQPKALGGTNRISNLALACRSCNQKKAAQAIETFLADKPEIPRHIRKQAERPLKDAAAVNSTRWALTQALRSTGLPLELASGGRTKYNRERLNVPKTHALDAACIGEFRVLKGWRRSTLHLRCTGRGRYQRTRLSKDGFPVGYLMRHKRVNGFQTGDLVEAHVPSGKKAGTYQGRIAVRVSGSFNIRTDEEVIQGISYRYCKLIQRGDGYGYIVRPQMTSHKAQSMRPALNAALFHPQ

SEQ ID NO: 2285 - protein, 463 aa, unidentified
  REGION 1..463: note = a0209639_1000561_-_->_pfam14239(3,180)[219.8
MHVFVLDTNKKPLSPCHAAVARKLLRQGRAAIYRQYPFAIILREIKQCAEPTKLRIKIDPGSKTTGLVVLWERNNTGIVIWAVELKHRGHAIKKLLDKRRANRRSRRNRKTRYRACRFLNRARAGGWLPPSLQSRVQNTLTWVNRLCRLAPISSCSMELIKFDTQLIQSPEISGVEYQQGELQGYEVREYLLEKFGRKCVYCGETDVPLQVEHVIPKHPAVGPIGTNRVSNLTLACEVCNKAKGNSQPNDWLEKLQQSTIAKDKIRAGNLPKVLKQLKQPLKDAAAINSTRWALYRVLEQLGLPLEVGSGGLTKFNRTQRNLPKTHWLDAACVGKSTPEQIVFSDGPILAISATGHGKRQRCVTDKYGFPIKHAPRAKSFMGFQTGDIVNAVIPKGKYKGMHTGRVAIRFRPSFKLNGFDVHTKYLRIIHRADGYAYEFALGVQVSSPQMNLGAPTWRLIGGD

SEQ ID NO: 2286 - protein, 419 aa, unidentified
  REGION 1..419: note = a0209347_1003246_-_->_pfam14239(3,182)[202.7]
MLVYVINKHGKPLMPCKPKKAKRLLQEGRAKVVRRTPFTVQLLYGSSGYRQRVRVGVDTGAKYVGVAAVRTDEKGRAKNTLLQGECHLRADIRGKMDRRRAYRRARRGRKTRYRKPRFDNRRRWEGWLAPSIQSRVDGTLKVMELLRQLLPVASVEVETAQFDTAAMARGVLRLRPWQYQRGEQYQFENVKSYVRHRDGYQCRQCKAKGRPLAVHHLRQRADGGTNRPANLITLCEECHDRVHTGGIKLTAVPGRTNLRYAAHTQAGKTALMTALREQLPTSETTGAVTKVDRLEMGLSKTHANDALAIAATGVPVEPVDTQFFMRCVPKGNYRLFKGARSHIRNQSARELFGFRRLDKVCLPGGQEGFVKGKRSSGYFNVSTLDGTVISASISYKRLRLLEKQTSLLVERRQAVSSPD

SEQ ID NO: 2287 - protein, 492 aa, Moorena sp.
MALEFESADNPGIRDETGLGRRKASGVEHVRGEITGSAPTAGGVTPDHQVREPGREADPAVFVLDKHGTPLQPTSPARARKLLVSGRAVVARHTPFVIRLKDRTADASEVDGVELGIDPGSKHTGLAVFTARDGERRGRFAVQLDHRGAAIRKKLEQRSAYRRGRRTRNLRYRAPRFLNRTRPKGWLPPSLQHRVDTTMSWTGRLARWAPVRTVHVERVAFDTHAISAGKPLEGAEYQHGTLHGTEVREYLLAKFGRACSYCGATGVPLNIDHIRPRSRGGSDRVSNLTLACIPCNQAKGHRPVEEFAPKQAADILKRAKAPLRDAAAVNATRWALWRALDARLPTRTASGGRTKWNRVRCALPKTHTLDALAVGDLDTVTAWPRTVLVVKATGRGTYARTRADKHGFPRLRLPRTKQFFGYATGDLVRAVVPSGKNAGTHTGRIAVRSSGSFAVRTAGGLYTARYKYFRLLQRADGYAYTTQPEGGPSDAP

SEQ ID NO: 2288 - protein, 297 aa, unidentified
  REGION 1..297: note = Lachnospiraceae bacterium UBA2891
MMPTNAYRARKLLKSGRAGIECYKPVFTIRLTDREEGAVQPVEYTCDTGYQHVGISIKSEKHEFVHNQYDMLKDETERHNDCRKYRRVRRNRKRYRKPRFDSRSKKNKDMAPSLRHRMENQIRLFESFCRVLPITTATFEMGKFDTQLLQAIAEEKPLPKGRDYQHGSKYLYQTERMAVFGRDHYTCQICGRSVRDGAILHTHHIGFWMSPPYRSGRISNLLTVCEKCHTAWNHKPGGRLWGIKPKLTNLTAATYMSTVRWAMYRRLVKTHPDVDIHIQYGAKTGITRQERHIAKTH

SEQ ID NO: 2289 - protein, 333 aa, unidentified
  REGION 1..333: note = metagenome
MVPVLDKNRIPLMPCSEKRAKKLMDRGDARPFWCKGVFCIILQREPKSRHMQDIAVAIDPGSKFNGYTVKSEAHTLLNVQAHAITDVKKKMEERAMLRRGRRGRKTPYRKCRFNRSVKERLAPSTKARWQQHLNIVKWFGKMYNIKHIVVEDIAAKTLKGAKKWNKTFSPLQVGKKWFYDTVESLGYLLHKFKGYQTALIRNSLGLKKNSKKDKKCFYGHCVDTFCLATQVIGGSGVPDNLFVKFIKPLRCYRRKLHEILPKKNGLRRNYGSTLSLGINRGTLVEHIKYGICLIGGTSKGRLSLHDLATNKRLCQNAKKEDIKILTQMRWNIY

SEQ ID NO: 2290 - protein, 511 aa, unidentified
  REGION 1..511: note = a0257069_1000440_-_->_pfam14239(12,221)[152.1]
MKHKQKERVNIVYVVDKNGRPLMPTKHFGKVKHMLRDGRATIYLHRPFTIRLCYETPGKTQSVVIGVDPGRTNIGLVSVSQKGEVLYAAKVETRNKDVSKLIAERAVHRRASRIGERQRRKRRARKHGTTTKFPNGRKLPGYKDGVLELKDIINQEARFNNRKRAAKWLAPTARHLLQTHQNLLLHVRRFLPITAVAIEHNKFAFMLLEDGTVRGADFQNGRLKGYESVAVYVRARQNDKCEICGAPIEHIHHIQARSENGSNLPENLVGLCSKCHEAVHVGKKEINIKGFAKKYASTSVLNQALPHFLFWLETAFGDGNVRTCAGWETKVERKRLGFSKDHHYDAVSIISACGHPVDLNLGGGRILVHTPHLIMQFRHHDRQIIHCQFERTYKVVGDNGKLISVVKNRKPRFEQPKSMPALNVWYDDEVKRSGQHKARLALSQLVVVKSNRRYKNPARVMPGTVFRYEDDLYVMQGSVSYGQYFCAIGQGKRMFSSKKCEVLCRRGLIYL

SEQ ID NO: 2291 - protein, 420 aa, unidentified
  REGION 1..420: note = Human gut metagenome
MVYVISKRGKPLMPCTNVIARLLLKQDKAKVKRRCPFMIQLTYDATQYIQDCTLGVDTGSAHIGAAVVDADKRVLYMSETKIRNDITQKMDRRRAYRKVRRYRKTRYRKTRWMNRKNSKRENRFSPTMVSKLHSHQKEIEFVKSILPITRLVIETGTFDCHLMKNPMLYNQKYRHWGYQQGPDYGFANTKAKVLNRDSYTCQCCRGKRKDSKLEVHHIVYRSKGGSNEEDNLITLCHTCHSALHHGMMKLKVNGKQKGNLRYATQMNSIRTQLLKLYPEAIETFGYVTKENLQLSGLPKTHCNDAVMIASGGNTVNFKTHSLCRKKCIPKGDYQQTKGIRSEQPLITKKIYGFRKFDKVQYLGKEYFIKGRMSTGYTVLMDIDGNKVDFSYMPKGYKTPKLKNCKRITARNGWMIQEIAI

SEQ ID NO: 2292 - protein, 434 aa, unidentified
  REGION 1..434: note Ga0310136_005540_-_->_IscB_BH_Trimmed_Muscle(85,158)[95.2]
MTLARPTLPPKGEIAEMYVFVVDAERKPLAPCHPAVARKLLKQGRAAVLRKYPFTIVLKETKETHPQDIRLKIDSGSKATGMIILHKNKVIWAAELEHRGHKIRERLLERRQLRRSRRYRKERYRKPRFDNRRRPEGWLPPSLESRVANIITWANRLIKLCSISAISLELVKFDTQKLQNPEITGIEYQRGELYGYEVREYLLEKWGRKCAYCGRNDVPLELEHIVPKSRGGTDRVSNLTLACHDCNQKKGNLTAEEFGYSEVQKKAKVPLKDVAAVNATRWALYGRLKETGLPVECGTGGMTKYNRSKLGLPKEHWTDAACVGASTPENLRVSINSVLQVKAVGHGRRQRCITDKYGFPKAYANRQKTYQGFATGDIVRAVIPKGKYAGSHIGRIVIRHRPSFGLNGFDVHPKYLTILQRGDGYDYSLLAIER

SEQ ID NO: 2293 - protein, 451 aa, unidentified
  REGION 1..451: note = Human gut metagenome
MFVAVISKTGVRLMPTSEYRARKLLNSGKAIIYGYRPFTIQLTERETGALQPVELCVDTGYIHIGVSVKSEKHEYLELQVDTLTNEKKKHDERRMYRKQRRNRKRYRKPRFDNRKRESGWLAPSLRHKKEVHLQVITKICDVYPIADITLEMGNFDTQVLKAQEKGKPIPQGTDYQHGERYGIATLREAVFTRDEYKCQCCDRGIKDGAILHAHHIQYRSHGGTNRMSNLITVCEKCHTPANHKPGGKLYGWKPKAASFKGATYMTIVRWQLYNKVKEALPVIGVKITYGAETKERRRSMDVKKSHVNDAFVIGRFHPKHRSSPVLYKKKRRNNRCLENFYDAKYIDSRNGKKRSGQELFSGRISRNHKKDSENLHRYRKKKVSRGKRTIRIQRYKIQPHDIVLFDGKKYETTGCHNKGTRAILLPEKKSKSVDKLTIYKYAGGYYPSKFA

SEQ ID NO: 2294 - protein, 516 aa, unidentified
  REGION 1..516: note = a0187878_1000231_-_->_pfam14239(86,272)[124.3]
MNTRDRRLTPTNASLIAGWDEAVHREGTELKADTASAFYLDGEGTSKNSKESKDIARLIPNKDLKILENSRINKKIKISKKNNYRVPVLYPDGKPGMPTSNKRANKWLKEGKAEKVRNKLNVFAIKLKFWPIYRNLQQIVLLIDPGSTFTGIAVMSKKCILISYMLELPGYKKGSKPFTVINRHRKKIEKYHNTIVDRITDRRRLRRSRRHRNCRRRDERWLNRTKKGKIAPSMLAKKQLELEAVNELSKLYPITIIGFEDVAFNHWGDKDGTKGQYFSQVEIGKNLLLDRLKKIALIQIIKGYETARRREQLKLPKEGDKTKRSIKSHVTDCIAMGSIILNTNQSSSNKFHFNVISRPKYSRRVLFAEQPNKDGITERAGGHIPHTPIFKGLRKGDYVEANAPNLKKIYRGWISGYTDDRIYISDFDWNQSPSFSVDNIRLLDRNHGLINLRLGWIKDTIDICQFGSKQIDAENKIINMKVINNIIEMKKKAEKDAIKESNKQDKTIQRGIDDAW

SEQ ID NO: 2295 - protein, 381 aa, unidentified
  REGION 1..381: note = a0268280_1010517_-_->_pfam14239(63,233)[209.7]
MQKLQAKLKNIPTDTSLVCSSINSVLNKDQSLSVQNKVLTCNNSEENLQKHKSGSDLRVLNIVYVLNKRGLALMPSCQSKARRLLRLGKAQVVKMYPFTIQLANASGEAKQEIVLGVDVGYKHVGISAISQNKELYSAEVVLRTNISELLSERKMYRRNRRNKLWYRKPRFNNREKGKGWLSPSVQHKIDSHIRIIDNIKKLLPITKIIIETAKFDIQKINNPEICNIEYQNGVQKDFWNVREYVLYRDNHTCQNCKKNNKVLNVHHLETRKTGGNRPDNLITLCVECHKKYHLGKIKLDIKIKNNFSSETCMSIIRNRLIDKLRLKYNIEETYGYITKSKRMENKIEKSHINDAFIISGGINQFRVSSYLVTQKRKNNRG

SEQ ID NO: 2296 - protein, 419 aa, unidentified
  REGION 1..419: note = 0326511_10041793_-_->_pfam14239(2,174)[194.4]
MVYVQDINGKALMPTERHGKVRKLLRDGMAVVVMREPFTIRLTYESTSFIQEVSLGIDAGSRHIGVSATTADRELFSAQVELRTNIQKLLANRMELRRTRRSRKTRYRKPMFDNRRHDNGWLFPSTRQKVDTHLRVIRMVMDILPISKTTIEVAKFDVQKIKNDAIAGIEYQQGEQFGFYNVREYVLTRDGYQCQHCKGKSKDPVLNVHHIESRKIGGNAPNNLVTLCKTCHKKYHKGEITLRFMRGVSFRDAAAMNAMRWCVYNSAKDEFRNVHLTYGYITKHTRIRNGIKKSHTADARCISGHPLAVAQTDVYIFKQRRRHNRQIHKCAILSGGYRKLNQAPYLVKGYRLFDKVSFNGQEAFITGRRQSGSFAIKTIDWKSLSEGVSAKKLSFLNISRGFLISNKKSLTNYNKSTNE

SEQ ID NO: 2297 - protein, 145 aa, unidentified
  REGION 1..145: note = a0334886_1000752_-_->_pfam14239(3,84)[88.9]
MLVYVLNRHGKPLMPCKPQKARRLLKEQKAKVVKRTPFTIQLLYGSSGYKQDVILGVDAGSKTIGVSASTENKEVFDEVEYQGEPCFIFGRRNSGYFDIRKLDGTKVHASASYKKLKLLSKTTSLLCERRQAVSSPQLKQGVSAD

SEQ ID NO: 2298 - protein, 442 aa, unidentified
  REGION 1..442: note = Proteobacteria bacterium
MSHVFVLDRARTPLDPCHPARARELLQHGRAAVFRRFPFTIILRDRKRAESVVHDHRLKIDPGSKTSGLALVQDQRVVWAAELTHRGQRIRDALESRRGLRRSRRQRQTRYRQPRFLNRTRPSGWLPPSLGSRIAHTMTWVERLARSCPITALSQELVRFDTQMMQDPEMAGVAYQQGELAGYEVREYLLEKWKRTCAYCHKTGVPLQVEHLIPKARGGSDRVSNLTLACGPCNQQKGTQTAAEFGFPAIQAQAKQPLKDAAAGNATRWGLYRALATTGLPVETGTGGRTKYNRTRLNIPKSHWGDAACVGASTPEALRVAGIQPLGIRAMGHGTRQMCRTEAHGFPKAHRTRQKKYGGMQTGDLVQAVVPKGKYAGTWVSRVVVRASGWFDLVIHGKKASVHHKHCTRLWAADGYTYTLPAGAGTAVSSPHSSEGSPQRNL

SEQ ID NO: 2299 - protein, 414 aa, unidentified
  REGION 1..414: note = Human gut metagenome
MPCSPAKARLLLKEKKAIVKRRTPFTIQLTIATGETKQPVGLGVDAGYKHVGLSASTDKAELYASQVELRQDITDLLSARRALRRARRNRKTRYRAPRFNNRIRTKRKGWLAPSVENRINAHLSRIETVLRMLPVTKITVETASFDMQLLKDPDISGKEYQEGEQLGFWNVRECVLFRDGHVCQHCHGRLKDPVLNVHHLKSRRTGGDSPGNLITLCETCHKALHRGELTLKAKRGQSFRAEAFMGIMRWEVLNRLKASHPELEVNNTYGYRTKHARISNDIAKSHCADAFCVAGNLGAKRLCEFFFQKQTRWNNRQIHKLSVLKHGLRKRNQVPFEVNGFRLFDKVACKGEEGFIFGRRSSGYFDVRKLDGTRISAGISYKKLHLLEKRQTYITEIRKEKALPPLPEGRGLRA

SEQ ID NO: 2300 - protein, 337 aa, unidentified
  REGION 1..337: note 0172375_10009941_-_->_IscB_BH_Trimmed_Muscle(68,138)[50.4]
MFIPVVSKKGKPLMPTTPYRARKLIKAGKAIKKFKKGLFYILLTERMIGKTQDIAVGIDPGIKKEAFTIKSNSHTYLNIQIDAINWVKDNVKTRSLLRRSRRQRKTPYRKCRLNRKKSKNLQPSIKARWQWKLRIINFLVSIFPITYFIVEDIKAKSKKNCKKWNMSFSPLEDGKNYFYTELRKQGNVELKMGYDTAELRNNLKLEKSYNKNSNKFEAHCIDSFVLANWFVGGHLTPDNKNILLIKPIELHRRQLHRLQPSKKGIRRRYGSTNSLGFKRGSLVKHVKYGLCYVGGYLKNNISLHNIENGKRITQKAELKDCICLNFNAWKISYLFNK

SEQ ID NO: 2301 - protein, 423 aa, unidentified
  REGION 1..423: note = Human gut metagenome
MKQDQKYAFVQDNRGVVLSPTKIEKAWYLIRHNKATLVKTEPMVIRLNRKQNNTDMSFMKVGLDPGDTTGVAIVQESHLNMSKNKAVFKANIQHRNDIKSLVESRREYRRLHRYNKRYRQARFNNRASSRRKGKVAPSIKNKKDEILRVLRYLSKYVCIDGIYIEDVSFDIRALTDEYKPYRWQYQKSNRLDENIRKAVIQRDKCKCKMCGAKDTQLEVHHITPKREGGNNTLKNLITLCSECHKSVTGVEDDYKSYLYSLIDGKQIPLAPAMHVMIGKNYLYQQLRQFIGGDSYVYLTTGGDTANSRLDWNIEKSHSNDAACITDVRCLPENLKTYVYTIKPQRKKKKTKQNTSNLAIRHRDLVWYTPRGREPIKCYVTAIMQTGCCVGKYKLKSIDGERFGPIAESSLRKIQQGTSSLMFV

SEQ ID NO: 2302 - protein, 456 aa, unidentified
  REGION 1..456: note 0114919_10025663_-_->_IscB_BH_Trimmed_Muscle(122,196)[71.0]
MQKLSEKLKNTPRNASLVPCSVNSQLNKEETLSVESIVLTDNNPEVNLSQHAERLKVKVYVISKEGNPIMPCSCAKAKHLLKEGKAKVIKRSPFAIQLNFECENQVQDVTLGIDTGFEFIGFSAVSEREELIAGTLKLDGKTKERLNDKRMYRRIKRNKLWYRKPRFNNRKKVKDWLPPSIERRYQTHLTLIEKIKKMLPITQVIVEVAKFDIQKLENSEIQGEEYQQGTLYGYQNTVSYLKTVQKNICPFCKRKLESGESKATHHRFMRSDSRRTDRIEGLILFHKKCHVRLHEQKREKEFQNIKIGKYQPSIFMSIINKRFWKDIPDLKVTYGNVTFVDRNNLGLAKSHTNDAFVIAKGNSQTRVKSFEIIQKHRNNRILQRQRRGYKPSIRRSRSIIQPLDLIWIKGIKYISKGMNGYGRYVYVDIGENKTSLNMKLVEKYFSQGSLSFSLKN

SEQ ID NO: 2303 - protein, 445 aa, unidentified
  REGION 1..445: note = Ga0376445_000045_-_->_pfam14239(4,180)[222.6]
MHRVFVLSSTAEPLMPCHPARARALLSAGKAKVYRRVPFTVILMERAEGETQPLTEQLDPGSKTTGIALVALFQRGRCVVWAGEMSHRGQAIKSGLDSRRALRRGRRHRKTRYRAPRFDNRRRPPGWLPPSIQSRVDNCAAWDAKLRRLAPVTAIAVETVRFDTQLLEHPDIAGVEYQQGTLLGCELREYLLARHHHTCAYCLGQSKDPILEREHVVPRCRGGSDRVANAVLACRTCNVAKANLLPGTWIEQLRRSKKPIDATRARQMEKILTGWRPSLRDAAAMNATRYAIGRTLKAAGLPVSFSSGGRTRFNRTAQGYPKAHWIDAACVGEEGSTVRLDPAAKPLQIQAVGRGSRQMTRPDRYGFPRTGAKRVKRVLGLQTGDWVRLCQSSGKYAGTYVGRVAVRERGDFDIQVVRDGQKIKITAPAARFTLLQRGDGYAYTT

SEQ ID NO: 2304 - protein, 359 aa, unidentified
  REGION 1..359: note = a0255344_1006041_-_->_pfam14239(3,175)[123.3]
MLVPVVDQVGTPLQPTHPAKARRWLKEGRCSKHFHRGTFYIRLKKIVTEPHINIILGIDPGSKRTAFTVATRNRVVLNWMIDSTNFTKNNIEKRRMYRRQRRYRNTPYRECRWNRSSLRNDGRVPPSTLSRWKRHLRLIYSLLKILPITKVIIEDVAAVTHNSKKKRLVDSKYVSCWNAAFSPLQAGKNLFYNFLEDRGIAVYKKKGWQTAKHRKKHGYKKISDKLSTKWEYQCIDSHSLCEMYYNRKIRPVRNLNFIQFLTFSRRELFRMFGKIRRRHGSTRTLGHNRGTLVYCKYVKRGRLEPIGLCYLAGYMKVKEEYRVCLYSLQGKELGQSFKLSDCVMLTNLRYLNNYIRNER

SEQ ID NO: 2305 - protein, 437 aa, unidentified
  REGION 1..437: note = Bacillus sp. REN51N
MVFVLNQEGKPLMPTKRHRKVRLWLKNGQAKVVKRKPFTIQLLFKTEDYVQPISLGVDSGFYHIGISAVTEKEEVFSSEVSLLKGMVERNEERASYRRTRRARLRYRKPRFDNRKKDKGWLAPSIQHKLDSHLRYIEWVKSILPISNTIIEVANFDTQKILNPDIQGLEYQEGVQKEFYNLREYILHRDHHTCQNPNCKNKSKEKVLVLHHIIFRSNGGSDSPNNLITLCDKCHTPRNHKGFLRDWRPKVKRLRSATFMSMVRWKLVNALECNHTYGYLTKSKRIEFEIEKTHANDAFVIAGGTSKHVRAQVHQVEQVRRNNRSLDKFYDAKYIDARTGEKAAGQDLFNGRTKRNKNTNGENLRKYRQEKVSKGRRAIRTMRYPFQPRDLVRSEGYTAFVVGTQNKGAYVKLKDRKKVAKTATLTLIKSGKGFCFLD

SEQ ID NO: 2306 - protein, 442 aa, unidentified
  REGION 1..442: note = 556_-_->_IscB_BH_Trimmed_Muscle(81,155)[75.6]
MGEGLQPDASPRRQNLRVFVLNKRGQPLMPCSPAKARLLLKEKKAVVMRRTPFTIQLTQATGETVQPVKLGVDAGSKFIGLSASTDKAEFYASEVELRTDVVDLLSSRRELRRARRNRKTRYRAPRFNNRVHSKNKGWLAPSVENKINAHLSRVDAVRQLLPVTKIVVETASFDIQKIKNPDIEGADYQWGEQLGFWNVREYVLFRDGHRCCHCHGKSKAPILNVHHLESRKTGGDAPNNLITLCETCHKAYHAGKIVLKAKRGQAFRDAAFMGIMRWTFFNRLKAQCPELDVRNTYGYLTKNTRIRHGLDKSHHTDAFCIAGNLGAKRLGEYFFQKQTRKHNRQIHKMSILKGGVRKRQQAPYEVKGFRLFDKVRYGSREAFIFGRRNSGYFDIRLLKGEKVSPAISYKYLQLLESRKTFLTQLIKKDAIPPATEVAGFLA

SEQ ID NO: 2307 - protein, 285 aa, unidentified
  REGION 1..285: note = 0079226_10038291_-_->_pfam14239(32,213)[210.1]
MATSGGRVTTKPTGEVAGGVVPAPVRAPQPRVFVLDKNKRPLQPMRPDRARKLLDAGRARVHRRAPFVIRRVDVDARTEEVIVDGVEVGIDPGSKATGIAAFITTPEGARQGVWLGELVHRGLQIKQRMQARAQLRRGRRSRNSRHRAPRFDNRTRPAGWRPPSLAHRVDTTLSWVNRLRRWAPVMAIHIERVRFDTHAMASPEVSGIEYQQGTLAGYEVREYLLAKFDRACVYCGASGVPLNIDHVHPRSKGGSDRVSNLVLACIGCNQAKGNMAVAEFVTDPA

SEQ ID NO: 2308 - protein, 467 aa, unidentified
  REGION 1..467: note = 0194044_10012301_-_->_pfam14239(1,111)[34.7]
MITLAIDYGASNVGIALVRNTEAGNEPLFAGTVILDARKLKEKVETRAGIRGLRRTRKTKNRRLRELGEALSGLGMEGDKVARIVRFSNRRGYKSLFSDPNETEKVDEAESAYRCTREQFFHQLEQELQEILSDREACDKALSVCERILNRKGDRYAEIRLIRIDNRGASRCAWGDCNKVTPRRDNATDDAIAQQLVTYFQSAIKTEPHKLEMLNQTVCELDSISKNLRGAIANNDDSSKKILRRRARKSLRNLRAELPSTEPEDVSGDAWKYVEKGILNTLENSGGRNRYCREHSKSYVEKVLEGKPPEFKSTIADSDIISRREQIAFSKLWRYIEARLLPLAPKGIDRIVVERTAFDLLAGKRKKIRDASSEGVENIYQYGPMYGFPNEKEMLRKEFGGLCAYCGNPSDTLMDRDHILPRRDFFFDSYLNTLPACPTCNSEKSASLPSQVSLRISEDAYSMYKQY

SEQ ID NO: 2309 - protein, 469 aa, unidentified
  REGION 1..469: note a0256831_1000378_-_->_IscB_BH_Trimmed_Muscle(72,147)[76.9]
MSNRVFVLDTNRKPLAPCHPARARELLRKGKAKVFRKYPFTIILNKAYPNAKLTYITIKVDPGSKQTGMALIAKGQNKTRCIFGLNIVHRGQQIVDALLSRRQSRRTRRSRKTRYRKPRFDNRAIPKGWLPPSILSRLSNIKTWILRFSKLTTIANAVVELVKFDMQRIRNPDIKGKEYQNGLLKDLELKEYLLYAYNHTCQYCHGVSNDSILEKEHIHPKSKGGSDSVDNLTIACRTCNIAKSNLLLNDWLRIVSDKKDKLSVARTKYIPKVIKGIKPSLKDATVSNILSNRTIAFCESMGLNTEAAPSYLTKYNRKNHGYRKDHWIDATMCGNLDRKIEIYKSMRCITAIAQKTNNRQMCLMDKYGFPRTKAKGQSTVYGFKTGDIVRAVVPSGKYKGKHIGKVMVRNSGWFDVKTIKGKIITNYSYCKTTHKKESFTYQHGTKTILKIISNRRDCIKDIFNTVKSQ

SEQ ID NO: 2310 - protein, 421 aa, unidentified
  REGION 1..421: note = 0310914_10061055_-_->_pfam14239(70,230)[108.5]
MQRKVKSDTRLDKIQDCEVLGRLKSTEHSGSGIPKDMPDASQVGLPSGRQRRWDCRHLHSKGLPPNAVIVPVLALDGEPLMPTCASRARRWVKQHKATPFWLNGVWCVRLRFEPSDRNKHEVVVGIDPGSKREAYTVASKEHTYLNVLSDAIDWVKDAVGSRKILRRARRNRKTPYRTNKQNRARGGIPPSTKARWQLKLRVVNQLRKMFPITGYVVEDVKATTHGRGRRWNSSFSPLEVGKSWMYGELLKLGTLTLKAGHETAELRKTFGVVKCCGDKMSMRFDIHNVDSWVLAKDALGAAKGRPENMQLVHARPLRFRRRALHLQNPTKGGVRRSHGGTLSQGFKRGSLVKHPKHGLTSVGGTKDDRISLHKVSGKRLCQNAKAQDITLLRRSSIAFRPIPKNGIPLPPKGDSFLPKIL

SEQ ID NO: 2311 - protein, 461 aa, unidentified
  REGION 1..461: note = a0256871_1000783_-_->_pfam14239(6,179)[129.0]
MTTRIIYVLNANGEPLMPTHRLGKVRRWINRGEAHWYGNSRTTIQFNHPVGNITQNCIEGVDLGNHLGISVVCTTTNQELYSGISQRDYQGEVKRNVKRREYRRTRRNRLRHRKVRFNNRRKSDGWLAPSIQHYIDFTVDEILRIQKFLPISKVILETSVFDVAKLTNFGVRPEDYTKGRLHGYHSLKEYLYDQQNGIDPIDGRHYPLSEMVVHHLQYRSQGGTNSPDNTILLARKNHNTANHNNGVLADLAKHYQSSLVNTKGAFLMNVMHLRLPKRLNNKPLQLTFGYKTAQQRQLYGFEKDRNDLANHAIDALLIANGNSHTKSMTNIIHREKHHRNNRSLEKFYDAKYYSNVDGKVYAGKELGSGRTNRKQPRTYNSRRCERGCKKSKGRRSIRRQHYQFQPHDKILWQGKPVEDCLGTMSNGKSVLFKWNNKRKSSAPKKLQLLHHSNNLIETIIQ

SEQ ID NO: 2312 - protein, 461 aa, unidentified
  REGION 1..461: note 0223826_10007721_-_->_IscB_BH_Trimmed_Muscle(71,138)[55.0]
MLTYVLAKDGTPLMPTYKINKVRRMLKEGKAEIAGHKPGFTIRLLYESGKGAQPVEVCEDTGYGTIGVSVKSEKHEFTHEEYTLLPDEKIRHDDCRKYRRTRRNRIRHRAAKFDNRKKDKGWIAPSLDNKVQRHVDIVTMYKKVLPVTDVTLEVGTFDTQVLEAVEAGRPLPKGIGYQYGPQYGFDTLREAVFYRDGYKCICCGKSAIKDHAILKIHHLGFLKGDHSDRMGNLATVCSKCHTPSNHKPGGKLYNLKPKLKPLGGAAFMNAVRWKIYNMVKERNPGLYVHMTYGAVTKRERLRRHIGKTHANDAYCIGFFHPKHKTRAVAYKKVKRNDRILQKFYDAVYIDRRDGKKKKGAELSCNRTNRSVPRNNSRNERPFRKEKASKGHVTTRKGRTQLKPGSLVLYKGKVMTVHGTHTNKGKVNVEFTQKASDDRKSANLSKVTIIRPMYQSGWVRIS

SEQ ID NO: 2313 - protein, 491 aa, unidentified
  REGION 1..491: note = 0209656_10018899_-_->_pfam14239(1,168)[202.2]
MLPQSQALRVAAADKPWSARNGQQQTATVQPVRGEIKPAPQNAERGVTRTFVLSKEGNPLMPCSNARARILIRKGRAKVYRLFPFTIQLIDKASGDVQPVAIKLDPGANTTGVALVREHADPTKQTVLHLAEIAHRSRAIRKHMIQRAMFRRRRRTANLRYRAPRFDNRTRREDWLPPSLQSRVDNVASWLNRYRKLAPITSIYVESVRFDMQALENPDIEGLEYQRGTLFGSELWEYLLEKWGRRCAYCDAEGLPLEAEHIAPKACGGSNRVSNLTLACHKCNQRKGSQPVHLFLANDPSRLARILSHTKKPLSSAAAVNVTRKATTRVMSATGLEVHCSSGGRTKFNRTQLGIPKTHALDAACVGELSELESSNIPVLCIKATGRGSYQRTRLDSFGFPRGYLTRQKAVKGFQTGDLVKATMPRGKFKGVHQGRLAVRVRGAFVIQSSAGNVETSWKHCKRLMRNDGYTYEINSPAIPPPPKGGGSLAY

SEQ ID NO: 2314 - protein, 430 aa, unidentified
  REGION 1..430: note = Candidate division MSBL1 archaeon SCGC-AAA382M17
MSQKVYVRIMRGEPLMPTNPAKARHLLDDDRAEVVKRKPFTIRLKYPTGENGQEVTLGVDAGYSTVGFSAVTEDEELIRGELDLRDDVSDRLRRRADYRRNRRSRKTRYREPRFDNRGKEDGWLAPSIKYKMSDHLQLVEMIGELLPVTRTVVEVATFDTEKLADPELDVTEYVPETFRGYEVKEYLLAKWGRRCVYCGAEDVPLEVDHIVPKSRGGSDRVDNLTISCVDCNREKGDRTAEEYGHPEVQRKAGESLKEAAFVNIVRWKIVNELDCDHTYGYRTKKGRIDLGLEKSDDNDAFVIAGGGDQERTGPYRVTRGRRNNRKLEINRRGHGRSVRRERYEFQPGDLVRGDDALYRVRGSCSYGRYVRAFDEERNEEYLRADSLKLVKYGKGLCWREKTSRNSSPTESEDSKGVSSRQPDGMAERLW

SEQ ID NO: 2315 - protein, 419 aa, unidentified
  REGION 1..419: note a0315550_1018591_-_->_IscB_BH_Trimmed_Muscle(73,148)[92.2]
MQRVFVLSSDREPLDPCHPARARKLLKQGRAAVLRKWPFTIILKDRTVAESVTHPHRVKIDPGSNTTGLGVVQEQTGEVVWAAELEHRGQQIKHRMTSRRQLRRARRGRKCRYRKPRFDNRASSRRKGRLPPSLQSRVENVSTWVERLRRYCPVEALSLELAKFDTQRMENPEISGVEYQQGELAGYEVREYLLEKWGRKCAYCGAENVPLQIEHIVPKARGGSDRVSNLAISCGPCNQEKGSCTAEEFGHPEVQAQARKPLKDAAVLNATRWVLFRRLQAIGLPLEIGTGGRTKYNRTQLGLPKAHWTDAVCVGELGEQVRVPPGLVPLQIRATGHGRRQRCGTDKYGFPIRHAPGAKKFRGWQTGDIAKAVIPKGKYAGVHVGRVAIRHRLSFRLNGIDVHPKYLELVQRADGYAYS

SEQ ID NO: 2316 - protein, 478 aa, Moorena sp.
MEKHMKEKQKLDRRDTYTPTDAPQVRGNCDHALNREETLSVHGLKTPSNNPHVDLLSPVGGHKADMPVFILNDDGKPLIPCKPAKARHLLSDKKAKVISSNPFTIQLLWHCEGNVETITLGIDSGYKHIGFSAVTDNKELISGEVVIRTDIPKLNEEKAMYRRKKRNKLWYRKPRFMNRGNNKEGRFAPSIEHKLETHIRLIEKLKRILPVSNTVIEVASFDTQKMKNPEISGIEYQQGELQGYEIREYLLEKFHRTCVYCGKTGVPLEIEHLTPRSRDGPDTVNNLAISCHDCNQKKNNLTAEEFGYPEVRKRALITMRDAAFMNTVRWKLTQLTGSEHTLGFITKKNRISLGLDKTHANDAFVIAGGTVQIRTLPFTITQRRRNNRSIQTNRKGFRPSIIRKRYAFQPGDMVLHDHERFSVVGMHNYGKSIVIKGGGKKMDINTKKVKLVKYGKGLQFAPQFLPTLSDGVSLGGVR

SEQ ID NO: 2317 - protein, 604 aa, Moorena sp.
  REGION 317..556: note = MISC_FEATURE - Xaa represents any naturally occurring amino acid
MLRVPVLTPSGKPLMPTKASRARRWLKEGKARVVYNDVGIFQIQLVRCPRTQDIQPIAVGIDPGKLYTGIGVQSAKFTLWLAHLQLPFKTVRERMEQRAMMRRGRRGRRINRKLPYNQRAHRQKRFDNRRQCKIPPSIRANRELELRVLDELSLIYPITTVAYEIVKASGDKGFSPVIVGQKWQLENLATYAEVKQVEGWQTANIRQQLGLHKQKHSKGDAIPATHAVDGVAASCSAFVRYGIIDRHSRGWKGDVTVTPAPFTVIRRPPVSRRQLHLMLPSIGGVRRKYGGTVTRHDFRKGDLVKVPSGEIGYCSGXXXXXXXXXXXXXXXXXXXXXXXXXXXXXXXXXXXXXXXXXXXXXXXXXXXXXXXXXXXXXXXXXXXXXXXXXXXXXXXXXXXXXXXXXXXXXXXXXXXXXXXXXXXXXXXXXXXXXXXXXXXXXXXXXXXXXXXXXXXXXXXXXXXXXXXXXXXXXXXXXXXXXXXXXXXXXXXXXXXXXXXXXXXXXXXXXXXXXXXXXXXXXXXXXXXXXXXXXXXXXXXXXXXXXXXXXXXXXXXXRQVVPGDQLIMTVELLWIKQRRFGKMQARAEVDSQLVAEGELMFSLVS

SEQ ID NO: 2318 - protein, 397 aa, Moorena sp.
MVRRWIKTGQAHWIGRDTIQFDRPIGSETQELTLGINAGYKIIGASVTSETQEYYASETNLRTDIVKNLSTKRQYRRSRRNHKTRYRQARFDNRVKSKHKGWLASSIEVKIDNHVQLIRKLIKKLPITNIIVEAGQFDIQNLKNPDITGKEYQEGNQLGFANVREYVLARDHHKCQHCKADGLKGIKLHVRHLVSRKVGGNRPDNLIILCENCHAAYHRGEFELKKAPKGYAPASAMSIMRSTLLDRLINEFGDKVETTFGYLVKEARLTIDLPKTSMTDAFVIAGNLMADRLDFQELRKHVRCHNRQLHKAKFLKGGIRKANQAPREVHGFRLFDKVQVENKNWFVFGRRTSGYFDLRSLTGEKLNKGSYSAKKIKLVHRANSVITQYATIAPTGA

SEQ ID NO: 2319 - protein, 446 aa, unidentified
  REGION 1..446: note = Wastewater metagenome
MFKQLNFNKVLVLDTNRKPLMPCYPARAKKLLSSGRASVFRRFPFTIILHDRTGEESNLQDIEIKIDQGSKTTGVALVVHGATGHAVAFAAHIEHRTNIKFALDSRRAIRRSKRQRKTRYRQARFLNRTKPKGWLPPSLVSKAENILNWVVRFAKLTPLSKFALETAKFDTQKLENPSIKGVEYQQGKMFGYADKKAYLLERENYYCIYCGIHASQAKMEIEHVIPRSKGGTDSLNNLVLSCETCNQAKGNQDVETFLKGKPSVLKRVKKHLDTSHKDAAHMNSIRWYVMNNLRGMADAIGATLKIGFGSTTKQNRLSLGLPKDHWIDAAVCTSDGSTVKVEPNLKPLIIKAVGRGSRQFCRMDKYGFPRTSPKPRSKNFFGFKTGDMVKAVIPEGAKTKVPASTYVGRVAVRSTGYFDVKTRNTKITMSYKHCKPIHLMDGYSYA

SEQ ID NO: 2320 - protein, 366 aa, unidentified
  REGION 1..366: note Ga0099741_1041_-_->_IscB_BH_Trimmed_Muscle(74,146)[72.1]
MQNLRVPVLNPDGCPAMPTKPSRARRWLKEGKARVIYNDLSIFSIQLIEEPSGRNTQQVVLGIDPGKLYTGIAAQTARATLFMAHLQLPFQTVKDRMEQRRVMRRLRRYRNCRRRPARFSNRRVKKVPPSIKANRQLELRVAKELCAVYPITLIVYEVVKAAGSKSFSPVMVGQFWMLSQLEKLRPTEQKYGWETSQVRTQLGLEKQKNHKGDTIPQTHAVDGIALAASQFLTYQQWHTKNAHGANWVGFCRVTPALFFVIRRPPINRRQLHLMVPAIGGIRRKYGGTTTRHGLRKGDLVQAEQASRVSIGWVSGDTKNQISVSNFGWKRIAQFTASKVHLIQRSTGLLVASDGKLSRLTALSHQP

SEQ ID NO: 2321 - protein, 238 aa, unidentified
  REGION 1..238: note Ga0376514_000350_-_->_IscB_BH_Trimmed_Muscle(1,24)[20.6]
VEGWLPPSLKSRVHNIETWTNRLCRFCNIQAISMELVRFDMQKIQNPEISGVAYQQGELMGYEVREYLLEKWDRTCAYCGKTDIPLEIEHIVPKSKGGSNRVSNLTLACRACNRKKGNKPLEEFLSRKPGLLKRIQKQSKVPLKDAGAVNTTRWDLFRTLKKIGLPVETGSGGLTKFNRTTRGLHKTHWLDAACVGKSTPEKIFQIDKTVLIVKADGHGSRQICRVNKFGFPDNSKVN

SEQ ID NO: 2322 - protein, 432 aa, unidentified
  REGION 1..432: note = 0137384_10001405_-_->_cas9(193,245)[32.7]
MSRIFVVDAQRNPLMPCTPARARLLLKAGKAAILRRAPLVLILKERRPEAVVQPLRVKLDPGASTSGIAVVNDRSGEVVWAAEVTHRGREIREALTRRRAVRRQRRRRQRRYRPKRFANRRRPLGWLAPSLLSRVLNLLTWVARLRSFCPIEALSQELARFDTQAMQDPTIAGIQYQQGSLAGYEIRSYLLEKWQRRCAYCQQPSTKLQVEHLIPKSRGGSDRISNVVLACEICNIAKGDRTAEEFGFVQLMAQAKVPLASAAVMNATRWRLYQELQAIGLPVEVDTGGRTGYNRAIRQLPKQHWIDAALVGTSTPEQLQLQHVRPWQITATGWQRRQMCLVDGAGFPRTRAKQRSLVKGFRTGDLVVGVVKSGTKQGIYKGRVAVRASGSFNITTDKVTIQGINHRWCRVLQRRDGYAYQQREEAAFPPTP

SEQ ID NO: 2323 - protein, 426 aa, unidentified
  REGION 1..426: note = Human gut metagenome
MAKDHYRSIDREETNLRVYVLNKRGEPLMPCSSAKARILLKEKKAVVKRRTPFTIQLTIATGETTQPVTLGVDAGYKHVGLSASTKKAELYASEIELRQDVSELLAGRSALRHARRSRKTRHRAPRFDNRKRDKGWLAPSVENRIGAHVSRVEAVLRILPVTKIIVETASFDVQRLKNPDIQGVEYQQGEQLGFWNVREYVLFRDGHECQHCHGKSKDKVLNVHHIESRRTGGDAPNNLITLCETCHKAFHRGEIELRVKRGRSFQAETFMGVMRWTFFERLRARHSEIEVRNTFGYLTKNTRITHGIEKTHCADAFCIAGNLKAKRLGYYFFQKQTRRHNRQIHKLTILKGGARKRHQTPYEIKGFRLYDKVLFQGKTAFIFGRRSSGYFDIRTLDGERISASVSYKKLRLLEKRRTYLIELRRN

SEQ ID NO: 2324 - protein, 399 aa, unidentified
  REGION 1..399: note a0256829_1001599_-_->_IscB_BH_Trimmed_Muscle(67,140)[82.1]
MVRVVSIDGKNLMPTNRHGKVRRLLKDNKAKVICKNPFTIQLLYQTDDVTQKITIGVDTGYKFTGFAFIANNKVLQKGTIELRQDVSSLITLRRTLRRGRRNRKTRYRKPRFLNRTRPDGWLAPSTQSKYNHILNWIDRFTKYLPNYQLKVEIANFDIAKINNPDIEKELYQQGNMYGYENIKQYLLAREHGTCQYCKKKKNDKWHIHHIVPKSKGGSDRVDNLALLHESCHKKLHEKNDTNKISKPKQYKDATFMNIIKWKLVNDLKAKYQDKVSFTFGYITKIDRNDLGLEKTHYNDAIAITKEIVNENKSNPIYIKQVRKKKRSLHEATPRKGRRIKNTTQKRSSKNTKGITVNNKKIALYDKVKINNQIGYVSGFTGKMVYVIDIQGNYIKQSNK

SEQ ID NO: 2325 - protein, 278 aa, unidentified
  REGION 1..278: note = 24_-_->_IscB_CTerm_Trimmed_Muscle(101,266)[161.9]
MGELLRKEVGYMLVYVINRHGKPLMPCKPQKARKLLKEQKAKVVKRTPFTIQLLYGSSGYRQDVILGVDAGSKTIGLSATTENREVFSAEVELRTDIEVELKVKRNSSFRDADFMGIMRWAFYDKLKELYSNVSLTFGYITKHARIKHNLEKSHRINARCISGNPSTKESDCWYFFKQVRKQNRQLHKTNPKKGIRRENKAPGYVHGYQLFDKVEYLGRECFVFGRRSSGYFDLRTLDGEVVSRSASVGKLKLVERASSLLCERREASFLTALKHGVS

SEQ ID NO: 2326 - protein, 555 aa, unidentified
  REGION 1..555: note = Viral metagenome
MLPQSQALESASADNRKGKDETGHGRRGNMITGMQHGREDRFLEFTSLGDSHTATSEQSEGAEARGVIAPPNSTASRVFVLDKHGKPLMPCHPARARKLLKSGRARVHRLAPFVIRVVDREIEQCEVPGVTIKIDPGSKHTGIVCASVDEAGITHGLVSIQLDHRGQLIHKRMEQRANYRRRRRSANLRYRAPRWRNRHPQACRACGKNAKHNKGYCGPCIQKRDFVDNGYRQYRLPPSLFHRVATTTAWVNRLSRWAPVTGLAMELVRFDTQVMQNPEISGVEYQQGTLAGYEVREYLLEKWDRKCAYCGASGVPLNIDHVVARSRGGTNRISNLTLSCRSCNESKGSEDAEVWCKRRFGEQNGEKIARKVTAQAKASLKDTAAVNSTRWALWRELLKTGLPVETGTGGQTKWNRKRFGIPKSHTLDALCVGEVDNIGSVPNSVLIVACTGRGKHQRTTLDKYGFVRSRLPRTKTHHGLRTGDFVRAVASKGKHKGVHAGRVIARSSGSVFVGKVDGISCKNCSVLQRADGYGYNRKEEALLISALTDGASEAR

SEQ ID NO: 2327 - protein, 559 aa, unidentified
  REGION 1..559: note = 0207433_10050431_-_->_pfam14239(94,220)[118.6]
MATLHTSEKTHRGMLPQSPALEPVPADNPGVGTKRGTGPVPIPGTGVHHGRGETGDVCACAPRRHPSKTDEPVETESGAVTGPVAVPLSVASRVFVLGVDGAALDPCHPARARRLLACGRARVAHHTPFVIRLIDRSAEQSVTHPLAVKIDPGSRHTGMVVARVDPEGRTHGLFAVQVDHRGRQISERLTARAGYRRRRRSANLRYRAPRWRNRHPAACDACGANAIHGRRFCRPCAAAKTPGMGARESRLAPSLAHRVDGTCSMVARLARWAPVAAAVMELVRFDLQALEDPGIAGIGYQQGTLAGYEIREYLLEKYSRTCVYCDRTGVPLQVEHVRPRSRSGSDRVSNLVIACDPCNNAKDSRSVEEFLAADPDRLAKVLAGLRKPLRDATAVNATRWALHRRLQAMFPDRVSVGSGGRTKYNRTRAGLPKTHTLDALCVGRTHAVNSYPAQLVIAVAVGRGVYSRTVPDAYGFPRLQRPRTKLAHGYATGDLVRAAIPTGKYTGTHTGRVMVRTSGAFDVRTLTGRVGANRRHCSLLQRADGWRWSRQEEGHSNDS

SEQ ID NO: 2328 - protein, 314 aa, unidentified
  REGION 1..314: note = Human gut metagenome
MSTGLRAEQAEPAGIRKGDTLKVFVLNMRGKPLMPCSPAKARHMLKAGKAVVLRRTPFTISLTVATGETKQEVTLGVDAGAEHVGISATTEKEEVFASEVELRQDIKGLLADRLAFRRARRNRKTRYRAPRFNNRVRSKHKGWLAPSVENRIQAHISRIEAVCRVLPITKIVIETASFDIQKIKNPEIEGEGYQQGEQLGFWNVREYVLFRDGHVCQACKGRSKDLILNVHHIESRKTGGDAPGNLITLCEACHKAYHAGKLKQFSPRRGASFRAETFMGIMRWTVLNRLRERHPELPVTNTYGYLTKHKRIVA

SEQ ID NO: 2329 - protein, 444 aa, unidentified
  REGION 1..444: note = 0207433_10084486_-_->_pfam14239(1,145)[158.9]
VEDSTLQPVRLKLDPGSKTTGMALVRESEEVYPDTGEVQRTAHVLKLADLQHRGHVIREALTQRASFRRRRRGANLRHRAPRFCNRTRPAGWLAPSLQHRADTTLAWVRRLQRWSPITALSQELVRFDMQLIQNPEISGVEYQHGTLQGYEVREYLLEKWHRTCAYCPATNVPLQVEHIVPRAKGGSHRVSNLTLACGPCNTAKGTQDVRAFLAQDPKRLARVLAQAKAPLRDAAAMKLFTQAEFDNLPVIDGVKQCPTGDYSSVRNFGERCVFGAESIFCRDSRFADSCIFGEKSRFGVGCSFCDRCVFGIGIRFEIWCKFGLGCIFGSETRFGDWCGFGAECVFGDRCAFGVQNRFGERCIFAGRRALPENPLLVFPGAGTDDRIVYAINVEGGPWIEGWSFSGGIDEFRAKVRVNGGGLKSRYLSVAYEVAAKWCPEKVES

SEQ ID NO: 2330 - DNA, 31 bp, synthetic construct
  misc_feature 1..31: note = Synthetic
  source 1..31: mol_type = other DNA
ttttaccttctgtgtttccaccattcatctc

SEQ ID NO: 2331 - DNA, 34 bp, synthetic construct
  misc_feature 1..34: note = Synthetic
  source 1..34: mol_type = other DNA
ttttaccttctgtgtgttttccaccattcatctc

SEQ ID NO: 2332 - DNA, 30 bp, synthetic construct
  misc_feature 1..30: note = Synthetic
  source 1..30: mol_type = other DNA
ttttaccttctgtgttccaccattcatctc

SEQ ID NO: 2333 - DNA, 30 bp, synthetic construct; identical to SEQ ID NO: 2332
  misc_feature 1..30: note = Synthetic
  source 1..30: mol_type = other DNA

SEQ ID NO: 2334 - DNA, 22 bp, synthetic construct
  misc_feature 1..22: note = Synthetic
  source 1..22: mol_type = other DNA
gtttaacatatgagtgttagaa

SEQ ID NO: 2335 - DNA, 22 bp, synthetic construct
  misc_feature 1..22: note = Synthetic
  source 1..22: mol_type = other DNA
attctaggcatatgtcatagaa

SEQ ID NO: 2336 - DNA, 22 bp, synthetic construct
  misc_feature 1..22: note = Synthetic
  source 1..22: mol_type = other DNA
aaaagagtgaacgagactagaa

SEQ ID NO: 2337 - DNA, 22 bp, synthetic construct
  misc_feature 1..22: note = Synthetic
  source 1..22: mol_type = other DNA
ttctaacactcatatgttaaac

SEQ ID NO: 2338 - DNA, 22 bp, synthetic construct
  misc_feature 1..22: note = Synthetic
  source 1..22: mol_type = other DNA
ttctatgacatatgcctagaat

SEQ ID NO: 2339 - DNA, 22 bp, synthetic construct
  misc_feature 1..22: note = Synthetic
  source 1..22: mol_type = other DNA
ttctagtctcgttcactctttt

SEQ ID NO: 2340 - RNA, 23 nt, synthetic construct
  misc_feature 1..23: note = Synthetic
  source 1..23: mol_type = other RNA
ggtttaacatatgagtgggctct

SEQ ID NO: 2341 - RNA, 23 nt, synthetic construct
  misc_feature 1..23: note = Synthetic
  source 1..23: mol_type = other RNA
gattctaggcatatgtcggctct

SEQ ID NO: 2342 - RNA, 23 nt, synthetic construct
  misc_feature 1..23: note = Synthetic
  source 1..23: mol_type = other RNA
gaaaagagtgaacgagaggctct

SEQ ID NO: 2343 - DNA, 52 bp, synthetic construct
  misc_feature 1..52: note = Synthetic
  misc_feature 38..45: note = MISC_FEATURE - Any "n" represents any nucleotide
  source 1..52: mol_type = other DNA
tagggcgctgatgcgtttagctcaggcgaaagtcgatnnnnnnnnatcgtcc

SEQ ID NO: 2344 - DNA, 52 bp, synthetic construct
  misc_feature 1..52: note = Synthetic
  misc_feature 8..15: note = MISC_FEATURE - Any "n" represents any nucleotide
  source 1..52: mol_type = other DNA
ggacgatnnnnnnnnatcgactttcgcctgagctaaacgcatcagcgcccta

SEQ ID NO: 2345 - DNA, 37 bp, synthetic construct
  misc_feature 1..37: note = Synthetic
  source 1..37: mol_type = other DNA
  misc_difference 1..29: note = RNA
  misc_feature 30: note = DNA
  misc_feature 31..37: note = RNA
ctgatgcgtttagctcaggcgaaagtcgatgttgtag

SEQ ID NO: 2346 - DNA, 52 bp, synthetic construct
  misc_feature 1..52: note = Synthetic
  misc_feature 38..45: note = MISC_FEATURE - Any "n" represents any nucleotide
  source 1..52: mol_type = other DNA
tagggcggtgggtggattcatctggagtctgggaatcnnnnnnnnatcgtcc

SEQ ID NO: 2347 - DNA, 52 bp, synthetic construct
  misc_feature 1..52: note = Synthetic
  misc_feature 8..15: note = MISC_FEATURE - Any "n" represents any nucleotide
  source 1..52: mol_type = other DNA
ggacgatnnnnnnnngattcccagactccagatgaatccacccaccgcccta

SEQ ID NO: 2348 - RNA, 37 nt, synthetic construct
  misc_feature 1..37: note = Synthetic
  source 1..37: mol_type = other RNA
gtgggtggattcatctggagtctgggaatcgttgtag

SEQ ID NO: 2349 - DNA, 52 bp, synthetic construct
  misc_feature 1..52: note = Synthetic
  misc_feature 38..45: note = MISC_FEATURE - Any "n" represents any nucleotide
  source 1..52: mol_type = other DNA
caacgtttttaacagtggccttattaaatgacttctcnnnnnnnnatcgtcc

SEQ ID NO: 2350 - DNA, 52 bp, synthetic construct
  misc_feature 1..52: note = Synthetic
  misc_feature 8..15: note = MISC_FEATURE - Any "n" represents any nucleotide
  source 1..52: mol_type = other DNA
ggacgatnnnnnnnngagaagtcatttaataaggccactgttaaaaagcttg

SEQ ID NO: 2351 - RNA, 37 nt, synthetic construct
  misc_feature 1..37: note = Synthetic
  source 1..37: mol_type = other RNA
tttaacagtggccttattaaatgacttctcgttgtag

SEQ ID NO: 2352 - DNA, 91 bp, Klebsiella pneumoniae
  source 1..91: mol_type = other DNA
cgaaatctatcaacgacgctatttccattgttcgctcatatctccgttaactctgccaggcagacgtctgatggggtcagtaaaaacagta

SEQ ID NO: 2353 - protein, 16 aa, Klebsiella pneumoniae
TKSINDAISIVRSYLR

SEQ ID NO: 2354 - DNA, 145 bp, Escherichia coli
  source 1..145: mol_type = other DNA
cgaaatctatcaacgacgctatttccattgttcgctcatatctccgttaactctgccaggcagacgtctgatggggtcagtaaaaacagtagtcaatcacccctccctgaagggagaggcttgtaaaagagcctgagattgacca

SEQ ID NO: 2355 - protein, 16 aa, Escherichia coli
TKSINDAISIVRSYLR

SEQ ID NO: 2356 - DNA, 71 bp, Klebsiella pneumoniae
  source 1..71: mol_type = other DNA
ataaaaggatatgactatgaaatcacgtgcagctgtagcatttgctcctggtaagcccctcgagatcgttg

SEQ ID NO: 2357 - protein, 18 aa, Klebsiella pneumoniae
MKSRAAVAFAPGKPLEIV

SEQ ID NO: 2358 - DNA, 145 bp, Escherichia coli
  source 1..145: mol_type = other DNA
gagagaggcgtttgctttgcaaacggcgctatccctccccgccatgaatgacggggtttctcgcgcaaaattgataaaaggatatgacatatgaaatcacgtgcagctgtagcatttgctcctggtaagcccctcgagatcgttt

SEQ ID NO: 2359 - protein, 18 aa, Escherichia coli
MKSRAAVAFAPGKPLEIV

SEQ ID NO: 2360 - DNA, 46 bp, synthetic construct
  misc_feature 1..46: note = Synthetic
  source 1..46: mol_type = other DNA
atattcacgagaagtcatttaataaggccactgttaaaaagcttgg

SEQ ID NO: 2361 - DNA, 46 bp, synthetic construct
  misc_feature 1..46: note = Synthetic
  source 1..46: mol_type = other DNA
ccaagctttttaacagtggccttattaaatgacttctcgtgaatat

SEQ ID NO: 2362 - protein, 656 aa, synthetic construct
  REGION 1..656: note = Synthetic consensus sequence
  REGION 2..47: note = misc_feature - Xaa can be any naturally occurring amino acid
  REGION 49..50: note = misc_feature - Xaa can be any naturally occurring amino acid
  REGION 52..75: note = misc_feature - Xaa can be any naturally occurring amino acid
  REGION 77..78: note = misc_feature - Xaa can be any naturally occurring amino acid
  SITE 80: note = misc_feature - Xaa can be any naturally occurring amino acid
  SITE 83: note = misc_feature - Xaa can be any naturally occurring amino acid
  REGION 93..103: note = misc_feature - Xaa can be any naturally occurring amino acid
  SITE 105: note = misc_feature - Xaa can be any naturally occurring amino acid
  REGION 107..112: note = misc_feature - Xaa can be any naturally occurring amino acid
  SITE 114: note = misc_feature - Xaa can be any naturally occurring amino acid
  REGION 117..130: note = misc_feature - Xaa can be any naturally occurring amino acid
  SITE 135: note = misc_feature - Xaa can be any naturally occurring amino acid
  REGION 137..140: note = misc_feature - Xaa can be any naturally occurring amino acid
  SITE 142: note = misc_feature - Xaa can be any naturally occurring amino acid
  REGION 146..150: note = misc_feature - Xaa can be any naturally occurring amino acid
  REGION 153..159: note = misc_feature - Xaa can be any naturally occurring amino acid
  REGION 162..167: note = misc_feature - Xaa can be any naturally occurring amino acid
  REGION 169..170: note = misc_feature - Xaa can be any naturally occurring amino acid
  REGION 173..174: note = misc_feature - Xaa can be any naturally occurring amino acid
  SITE 177: note = misc_feature - Xaa can be any naturally occurring amino acid
  REGION 180..182: note = misc_feature - Xaa can be any naturally occurring amino acid
  SITE 184: note = misc_feature - Xaa can be any naturally occurring amino acid
  REGION 186..215: note = misc_feature - Xaa can be any naturally occurring amino acid
  REGION 218..223: note = misc_feature - Xaa can be any naturally occurring amino acid
  REGION 225..231: note = misc_feature - Xaa can be any naturally occurring amino acid
  REGION 233..248: note = misc_feature - Xaa can be any naturally occurring amino acid
  REGION 255..265: note = misc_feature - Xaa can be any naturally occurring amino acid
  REGION 267..274: note = misc_feature - Xaa can be any naturally occurring amino acid
  REGION 276..278: note = misc_feature - Xaa can be any naturally occurring amino acid
  SITE 281: note = misc_feature - Xaa can be any naturally occurring amino acid
  REGION 283..285: note = misc_feature - Xaa can be any naturally occurring amino acid
  SITE 288: note = misc_feature - Xaa can be any naturally occurring amino acid
  SITE 290: note = misc_feature - Xaa can be any naturally occurring amino acid
  REGION 292..293: note = misc_feature - Xaa can be any naturally occurring amino acid
  REGION 296..297: note = misc_feature - Xaa can be any naturally occurring amino acid
  REGION 299..300: note = misc_feature - Xaa can be any naturally occurring amino acid
  REGION 305..307: note = misc_feature - Xaa can be any naturally occurring amino acid
  REGION 309..314: note = misc_feature - Xaa can be any naturally occurring amino acid
  REGION 316..320: note = misc_feature - Xaa can be any naturally occurring amino acid
  SITE 322: note = misc_feature - Xaa can be any naturally occurring amino acid
  SITE 325: note = misc_feature - Xaa can be any naturally occurring amino acid
  REGION 329..337: note = misc_feature - Xaa can be any naturally occurring amino acid
  REGION 340..341: note = misc_feature - Xaa can be any naturally occurring amino acid
  SITE 344: note = misc_feature - Xaa can be any naturally occurring amino acid
  REGION 347..348: note = misc_feature - Xaa can be any naturally occurring amino acid
  SITE 351: note = misc_feature - Xaa can be any naturally occurring amino acid
  REGION 353..355: note = misc_feature - Xaa can be any naturally occurring amino acid
  REGION 359..360: note = misc_feature - Xaa can be any naturally occurring amino acid
  SITE 362: note = misc_feature - Xaa can be any naturally occurring amino acid
  REGION 366..367: note = misc_feature - Xaa can be any naturally occurring amino acid
  REGION 370..379: note = misc_feature - Xaa can be any naturally occurring amino acid
  REGION 381..389: note = misc_feature - Xaa can be any naturally occurring amino acid
  REGION 391..399: note = misc_feature - Xaa can be any naturally occurring amino acid
  REGION 401..406: note = misc_feature - Xaa can be any naturally occurring amino acid
  REGION 408..410: note = misc_feature - Xaa can be any naturally occurring amino acid
  REGION 412..414: note = misc_feature - Xaa can be any naturally occurring amino acid
  SITE 416: note = misc_feature - Xaa can be any naturally occurring amino acid
  REGION 418..419: note = misc_feature - Xaa can be any naturally occurring amino acid
  REGION 421..428: note = misc_feature - Xaa can be any naturally occurring amino acid
  REGION 430..431: note = misc_feature - Xaa can be any naturally occurring amino acid
  REGION 433..435: note = misc_feature - Xaa can be any naturally occurring amino acid
  REGION 437..442: note = misc_feature - Xaa can be any naturally occurring amino acid
  SITE 444: note = misc_feature - Xaa can be any naturally occurring amino acid
  REGION 446..447: note = misc_feature - Xaa can be any naturally occurring amino acid
  REGION 450..451: note = misc_feature - Xaa can be any naturally occurring amino acid
  REGION 454..463: note = misc_feature - Xaa can be any naturally occurring amino acid
  REGION 465..474: note = misc_feature - Xaa can be any naturally occurring amino acid
  REGION 476..486: note = misc_feature - Xaa can be any naturally occurring amino acid
  REGION 488..496: note = misc_feature - Xaa can be any naturally occurring amino acid
  REGION 498..505: note = misc_feature - Xaa can be any naturally occurring amino acid
  SITE 507: note = misc_feature - Xaa can be any naturally occurring amino acid
  REGION 509..512: note = misc_feature - Xaa can be any naturally occurring amino acid
  REGION 514..527: note = misc_feature - Xaa can be any naturally occurring amino acid
  REGION 529..559: note = misc_feature - Xaa can be any naturally occurring amino acid
  REGION 561..568: note = misc_feature - Xaa can be any naturally occurring amino acid
  REGION 570..583: note = misc_feature - Xaa can be any naturally occurring amino acid
  REGION 586..590: note = misc_feature - Xaa can be any naturally occurring amino acid
  REGION 593..594: note = misc_feature - Xaa can be any naturally occurring amino acid
  REGION 596..604: note = misc_feature - Xaa can be any naturally occurring amino acid
  REGION 606..607: note = misc_feature - Xaa can be any naturally occurring amino acid
  REGION 609..624: note = misc_feature - Xaa can be any naturally occurring amino acid
  REGION 626..650: note = misc_feature - Xaa can be any naturally occurring amino acid
  SITE 653: note = misc_feature - Xaa can be any naturally occurring amino acid
  REGION 655..656: note = misc_feature - Xaa can be any naturally occurring amino acid
MXXXXXXXXXXXXXXXXXXXXXXXXXXXXXXXXXXXXXXXXXXXXXXRXXHXXXXXXXXXXXXXXXXXXXXXXXXMXXVXVVXKBGKPLMPTXXXXXXXXXXXGXAXXXXXXPXTIXXXXXXXXXXXXXXLGIDXGXXXXGXAVVXXXXXZVXXXXXXXLRXXXXXXLXXRRXXRRXRRXXXRXRXXXXXXXXXXXXXXXXXXXXXXXXXXXXXXNRXXXXXXNXXXXXXXCXXXXXXXXXXXXXXXXWLPPSLXXXXXXXXXXXVXXXXXXXXPXXXIVXEXXXFDXQXLXXPZXXGXXYQQGXXXGXXXXXXAXXXXXGXRCXYCGXXXXXXXXXLEXXHVXPRXXGGXBXXXNLVXXCXKCNXXKGXXXXXXXXXXFXXXXXXXXXLXXXXXXXXXYXXXXXXGXXXLXXXLXQXXPXXXXXXXXGXXTXXXRXXXXXXKXHXXDAXXIAXXXXXXXXXXPXXXXXXXXXXDXXXXXXXXXXXFXXXXXXXXXZXXXXXXXXRXRXXXXRXXXXXXXXXXXXXXPXXXXXXXXXXXXXXXXXXXXXXXXXXXXXXXGXXXXXXXXNXXXXXXXXXXXXXXPVXXXXXKGXXVXXXXXXXXXRXXVXXXXXXXXXXXXXXXXGXXXXXXXXXXXXXXXXXXXXXXXXXPPXSXX

SEQ ID NO: 2363 - protein, 1263 aa, unidentified
  REGION 1..1263: note = Cas9_758 protein sequence of Fig. 58
MSTVEYKLNPLPKAEPPYDWKNDPFYTDAVALGIDIGLEGIGVWLRKGWKPIYTRTFLFETPDAAPLEGRRGLRAGRRCRQAERRREVALKKFCDDFGLPWVEITDKGRDDGPFRFRWIATRKDVEGLRDARAFSACLRHIIRHRGYDWHAPEDGGDYPWGDEAKAKDAIEWAKTAFCQQEHADKLRYILTDCGWADKERQAFETALNHAVEKYKTQGIDAVLAEHFSQPKNNLRFPARRHNFPREMVWAHLTDIVQKHPQFVGGVERVKEALNQLHEIINDHRKEPGALALRKVNRCPLAEILFNGSAPKCDSSKNRHIRRFKLLEFLATRTFVRKDGTRILASRGLFGWLLDDLLEADIQALDSNGKIQRGKISMREFKKQFVAKHDSTGETELAGDTQSHNGEFFIQLTDLLWPKMSELGGRASLCARSAEALFDYAKKEGFDAAQIAVRLKDKRFERAGKKMSFYEIRQTAAAGFGIYKQVEFLLGRWKKNAKPGDKPAVPGKLRQVFAQLIKDGILPPDKTAPDYVVVETVGDIPRNREQAKEIQEAQAARRKFKDKLREQFKDFERGNLSWEETNKRLLLYDQQRGICPYTGDSLGENPLAHDLEIDHVFPRTRGGISEMVNLVLTHRKTNGEIKREQTPYEAFGGKNNSPQWREIRDRVLKMQWNGQKREFFLRSEDTPPDWGNMTRVAQLARQLRFEVARWMDIADDDAKVRQFIGTPTGYQTSVCREAWGDKLPEDFWPKKNRDNLRHHMWDAAILSHIPPGKGLNHVRCHGIFWSETNRGNIKLLALPQLGPDLKQFEKETAGLCLVAKIQPAHNKQSRFQQTIYSPPDENGLMWARDPIEKLADKPKLLELLRDAGIDEKQLPASRFNEWQEKRQAQFFTREEALSAVEALALPTDNQILVAVFEEWWTDRLKGDKKRVTDKSLRALLAKARVPKALVTDQQLAGVLINRGNPGPLTRKDGTIIRGISGSASTMTPMAVIPHRNHEGETIGFKLATETFIRAEIWTTEKRDKNGEVVKDEDGKPLLDYHRRLIPHPRGLKNLGLRKMQCTGERLAWERALTDAEIIELGLKENAEVKRLRKNYDKAVKFQEKEISKSKVAESELTLANAKAMPLKPKPPVISLRKIFTGLPPLAKRLKAADGTDVSRFAKGDLMLVPLTQDAEICQPKQAPYRKFWFRVAALKTNGQIQLLIAERKQTKPLTDQEIKDGEKLTPDQDWLIKAGVKQPGDDAVIAFLLRHTHGHDQPPHSAKK

SEQ ID NO: 2364 - protein, 775 aa, unidentified
  REGION 1..775: note = Cas9_1261 protein sequence of Fig. 58
VVVRPQGKLDHIPIPKPERGGITIRSENVLGIDFGPEHVGLALVRREPAGEQVLYAASITLRDLSPVMKERRALRRQRRSESWYRQPRVPQRGGGSARGAGAQEDEQAVEGVPEEEEEDRSRARSAPEYRRAQGCNKPKRKCKYVDPKTGEVCGANTPRKEKVRDLLLWDICQHLPVEPEQRLAILSYVNQVNIVRPEVLACLALEERALLENHRALARASKSKPLPQLLCELKIKKQLQSQILAIASGDPERKAADLKGRMAFCRKHFLLHHQQTRIPKPSAWLPPSIRCRHADLERVCREEVAPRWPVHRIRLERAQFDLQAIQRDPQGRGKDWDPEEWQRGPCWGRRNIYSAKRHEQGNRCAYCGKEPKKENRLELEHVKPGGGNTWDNLVLACRKCNQRKGKAEARGAGLKFSVDPDTGVSLAPRGLGESVVARYMTQTDQGYRELVARLQQLFPDAQIEYRYGYQTDHIRKRWIGSAQFAETALSLGYKQSPPRPKKRRKQWSELAHLKRKPRRHSDPLKSHVMDAVAIAGSLQRDSPELCQADKITIRPSRRQLFDTNPLGRGSDGRFYQRVKICGTQGGLSFRRVKHVVDARKRAILERVARDLLIEQAKGNEESPPSAFTPDAAQLIPFTSVRLAKRDASKTNTRRLHAPDDDRLPQQKGGHWYKAAGGPNWATVVYRLGGREQVAVLRNPAAFPDASSDIPAGAQVLFSFRKGKLVSFEQDGQTTRARITKNNSDGTLTVERLDDGREVTRSARCFRPVPLLAPNA

SEQ ID NO: 2365 - protein, 671 aa, unidentified
  REGION 1..671: note = Cas9_665 protein sequence of Fig. 58
VNTETREQVLGIDFGPKHVGIALVARGASSEEVLFVAEVRLRDRKSLLADRRALRRGRRGRKRYRQPKIPQRGGGATSQSGEESERGRAAAPEYRRATGLNTGRRRCKFVDPQTGEICGWNTPRKANVRDLLLWNICRHLPVSVSEQAGFLAYVNQTNLHRAEILGALPAEEQAPLEAVFSQQRRPKDERLKDRLRRLGVDRHLRSQVTDIVGITSRRPLSGRLSFCREHFLRHHEQSRVPRPSVWLPNTVEMKQADVLKVCRQEVAPRWRVDCIVLERANFDLQLLRQQTAIEWSVEDWQRGPRWGYRNTFEAKKQEQGNRCAYCGSKPTAKNRLRLELEHVIPGGGDTWENLVLSCRKCNEGKGNRSPAQAGMRFWTDTETGETLSPAPLGAAHVSRYMTQTDQGWRRLQAALQQVFPQAAHEVTWGYVTSFYRNRWNLPKKHFVDAAVIASSHELERPVSVPEQPQRFAPTSGGKQLFDTNPLSKRPEGRFAQSKAIVCEQGTLAFKDVAKVENPRKRATLQRVADEATAAAKARGETPPTAFTAEMLPKIPFKSVRLAKQDASDTNTRRLGRBWFKVASAVNIATIVYQLDGKVCMQLQRNPAVFRHDPGLPQGARVVATFRKGDLVECDAGRGRVTKNHSNCTLTVELLDSGKEVTRLAKSFRPRH

SEQ ID NO: 2366 - protein, 763 aa, unidentified
  REGION 1..763: note = Cas9_1079 protein sequence of Fig. 58
  REGION 206..207: note = misc_feature - Xaa can be any naturally occurring amino acid
MEKELVLGIDYGGKYIGLAVVNQKNNQVLYARTVKMRDDVTDILAGRREQRSLRRTLQTKKKRLRELKNYLESIGGIYEESSGTFTIEPFRTVYSLAHKRGYDYADLPEEKTSEEIEAMDAKERKQWEKEKKELEETQRNSRHRDEVLRDVRNVMTEGNLSEEQIIKVESIFNKQYRHKRFNNRILTKCKVCGKNYPLRINVREIXXIENIVRYLPLQNKERELLKLTILKGHQQDINEIFKHFRKVYKITLNQKDWPGKNLIDIARNQLRGRLLFCKVHFPENEKYVSIEKKTFRLAPSLKTKIENVLSVIKDDILPNFTLNNVVMESNNFDIAAKTKGKKRLLKEEYSKGHRESGETRKEALLRETDSRCIYCGKGIDLSNAHEDHIFPRKAGGINIFGNLVACCSVCNEEKRGRTPLESGILPKPEIVSFITNDLKKKILEDAQYINTLDFNKYMSHASIGWRHMRDRLRELTGNKELLIKRSQGIYTAYFRKWWGFIKERGNHGHHALDAVILASKKSYAEDGKVDMTIKPCGEDGKEFDIERHLSEMKEFRRDKGGKSAPLHDRNPLSFKNDIITRRFMVTEIECGKEAVIISEEYRKKLTEAFKRFGIAKGKYLTDEQAKDAGFYLRKNGEGVMSLKCEVKGTGYNQMIRIKNNIFKTNVHNVGVAVFLDEKGKKRACELKNPRLSKHFVKPAEQVKGKVIFILKRGNMVTVEGEEMIYRVKKLGTSPVIEAIVGSDGKTRTVSATKLLKINHTKKV

SEQ ID NO: 2367 - protein, 531 aa, unidentified
  REGION 1..531: note = IscB 2089 protein sequence of Fig. 58
MKVFVVDKNNNPLMPTHPAKARILLKNGKATVKRVEPFVIKLNYTIDNPKTQNVKVGIDDGARNAGLAVVVEKSKKDDEVVFKGQIDLNNMIKDKMEERSNYRRCRRTRLRYRKPRFNNRKRNKCVVCGGNTQSGKNTCRLHKVTDKQNKLKNTYWLPPSLKARKDCIVRVLNQLNKWIPINNIIIETGRFDIQKLVNPDLSGAGYQQGAKYGRDSVKSALIYEYGKEVRDENNKIKKIARCCYCGKEGVPLEIEHIKPRGQGGTDAWHNLTLACKKCNKEKGNRTPQQANMKLIVKPSKFHLSKTLKYAAQLQQGKNYLRQAIKDAVNIFPSYTYGQFTSWQRKRFNIPKTHMNDAIVIAITNYDTENKPRLPVVNCDEYYIKPIGTKSRSLFTATCYSPKDYCYNNEGKRKRINSINAAVLTNNNKTIRALKEINKACVLLEKNNKIVPKAIRMIEDIPDNAIMVVEKGDTVECNVGKKKLRGIVSACMSNGNIKINVQGKQQSASLKKTRLIYKKQNIIFQKIHKTTK

SEQ ID NO: 2368 - protein, 410 aa, unidentified
  REGION 1..410: note = IscB 50962 protein sequence of Fig. 58
MSKAFVLSLDGKPLMPMQYNKAWVFIRQGKARLVTFEPLTVQLTYRTATEATQPVRVGIDDGARTAGVAVVVEREQRGPEVVCAGEIRLRGDTKALLAARRQRRRRRRRQKRHRQPRSRRSKGKGWLPPSVRVRKENILRVVADLVWRAPISRIVWEEGQFDTHRLVEPEVEGATYQQGPGYGWENRRHAVLFRDGYRCQYCGEELVAAGKIAEVDHVIPRSRGGTDTFENLVCACRECNQRKGEQTAAEFSHPEVGGRTFAYPAYLQSGKRYLREGLEQLSSVEVVFSWQTKRWRKEMGLEESHVNDAVAIAVQGAETESPQGWMQIVARRRRRNFKRLKWKEKWGLRHWDLVCYTKRGGRKVVGTVRGFVESREEVKVRHAGCMNDPLKAKRVQLLQRQVAIAYAPWG

SEQ ID NO: 2369 - protein, 516 aa, unidentified
  REGION 1..516: note = IscB 61900 protein sequence of Fig. 58
MPTVYVLNKDGKPLMPTTRCMHVRHLLKNGKARVVKSKPFTIQLLYETDDVVQPLYLGIDPGRTNIGVAVVKADGAAVFTAHLETRNKEVPKLMKKRKESRCARRTNGRRCRRQRRAKTNGTISKKCVKQTTAQNGSVSKRAKEIGVIKRHLPGCEKDVLCVGIKNKEAKFSNRTRQEGWLTPTANQLLQTHSNLIKKIRKFLPISNVVLEINKFAFMQLDNPNIQKWQYQQGPLYQKGSLENAVSEQQDHHCLFCEKTIEHYHHVILRSENGSDTIANIVGLCAEHHDLIHKDDKLKEELAKKKQGLNKKYGALSVLNQIIPALTYELGSRFQGHFYVTTGKSTYDYRAAHSVSKDHWLDAYCIACSVLPDGCFDNTINSRVPYELKQFRRHDRQVCQQQNVKRKYYLDKKLVATNRHKAIKQETDSLEEYRNNGGTTDKLVVKEHKPTNKRLNRILPGALMAANGKLNVMVASRGLHNGIPDNYVFDNNSKAKPSKCMLINKNKGIVFVSNSVS

SEQ ID NO: 2370 - protein, 519 aa, unidentified
  REGION 1..519: note = IscB 20209 protein sequence of Fig. 58
MRQHHGIVTVAVVDKNGHPLMPTNSYRARHLKKSGRAVTYAHRPVYTIQMLDVEFDPEKNMVQEIEVTCDTGYEHIGVSVCSEKHEYLQREYDLLTDETEKHNDSRKYRRTRRNRKRHRAKMSRNRKGVIVKDGFAPSLRNKRDRHIDIITSLCFVMPITDVHVEMGEFDTQALKAIEEGKPLPQGTDYQQGEQYGYLTLRAAVFSRDNHTCQCCGRNAFSDKAMLHEHHIGFWKGDRTNRMANLLTVCEQCHTPKNHKPGGTLYGLEPKLKGLKGATFMTSVRWNMVNKLKEALPGISVHITYGAATKQSRQQLRLRKTHANDAYAVGNFHPKHRAHLEHFKKRRRNNRVLEKFYDAVYIDTRDGTEKMGSQLGCNRTKRNIPRNNPNNERKYRGEKKAKGHRSIRKQHYTLSPGDKVWCSTDKKMYIVNGMQNNGATVQLRTTKVVPLDKLQPMKKKGKTIPIAANQKLALISAKEKHTVLSVDEGTNTAVMRWFKGVNPSTLTRVSSYKTGWERIK

SEQ ID NO: 2371 - protein, 543 aa, unidentified
  REGION 1..543: note = IscB 51558 protein sequence of Fig. 58
MLHQSQALELVSADNPQVGTKRDTDTTAGASAGGVAGIQPGRDEIPTPRDIHSVGASLVSKPSGEGTTSGGNPGNPVQRVFVLDKRKKPLDPTSPARARKLLKKRRARVHKLVPFTIRLTDRLLEDSVVHDHTIGIDPGSKTTGIALFRDTEVANTDTGELTTDRTGLFLMELNHRGSMVSKKLGQRANYRRGRRSRNLRYRAPRFDNRSRPKGWLPPSLQHRVDTTMTQVHRFQKLLPVTGIAYEAVRFDTQKLERPEITGVQYQQGELFGFEVREYLLTKYGNTCVYCDTTDTVLNLDHVVPRAAGGSNRVSNLVTSCIKCNHAKGKQPVEIFVTNRARLARIKRGLKQPLKDAAAVNATRNALHRALLTTGLEVQAFTGGRTKYNRTQLRIPKTHALDALCIGHIDTVTSYPAQTLDIIAMGRGSHQRTNVNKHGFAIGNPKTRAKRHFGFSTGDLVKAIVPKGKKVGTHVGRVAVRTTGSFNIRTATETIQSINHKYCHLLQRADGYAYYQEPTAIPHASQDSGVFTQTRRNLPIAQLR

SEQ ID NO: 2372 - protein, 4 aa, synthetic construct
  REGION 1..4: note = Synthetic
PLMP

SEQ ID NO: 2373 - protein, 432 aa, Ktedonobacter racemifer; identical to SEQ ID NO: 2059

SEQ ID NO: 2374 - protein, 429 aa, Ktedonobacter racemifer
MSNVFVIDSDYKPLNPVHPARARLLLTQGNAAVYRRYPFTIVLKRVVDQPEVHPLRLKLDPGSKTTGIALVNDTNGKVVFAAELEHRGHAIKDSLDSRRGVRRRRRNRKTRYRKPRFQNRRRKKGWLPPSLESRLANILTWVARLCRSAPITALSQELVKFDLQLMENPDITGVEYQQGTLQGYEVREYVLEKWKRTCAYCGKQDVPLQIEHIHPRANGGTHRISNLTLACEPCNIAKGTQDIAVFLAKKPDVLKRILAQVKKPLKDASAVNATRFALLERLKAFGLPVECGSGGLTKYNRTTRGLAKTHWLDATCVGKSTPSAISHKGVVPLLITANGHGRRQMCVPDKYGFPEKHKQRRKTFLGYRTGDMVKAITSKGTFEGRIAIRHRPSFRLGKVDIHPKYMHCIHRADGYEYTQKGVRNAPPHV

SEQ ID NO: 2375 - protein, 433 aa, Ktedonobacter racemifer
MEPSMIYVLSVSGQPLMPTKRHNKVWYWLRRGLAKVVRREPFTIQLCFETSTHTQPVAVGVDTGSKTVGVAATTNGEVVYQAEVHLRTDISGKMTQRRTYRRNRRARKTRYRAARFANRRRQAGWLPPSLRSKAEATVKAVRLIASLLPVGTVNVEVGNFDTQRMQHPQISGLDYQQGTLQGYLVREYVLEKWKRTCAYCQARGVPLELEHIVPRSRGGGSRESNLTLACRPCNERKGQQTAAEFGFPQIQAQARVPLKDAAHVSAIKTSVLQQLRSLFGTAQVSVTYGYETKYKRIQVLGLPKSHTNDAVAIACEMGERVKPREEVYQIRCLPRGQYQRFNGRHSEHKCWAPRKVRGYKLYEVVKAKGVVGYIGGRREKGAFIIKEVSSGKKLLEVVPSKLERVARPTQGWMITRKPVVENLEKEDGASSPS

SEQ ID NO: 2376 - protein, 421 aa, Ktedonobacter racemifer
MNIVYVLSPERQPLMPCAPAIARLLLKERKAKVMRRTPFTIKLISRPETICTQPLTLGVDTGSSVVGSAVADEQGSVLYLSEVELRNDIATTMKERAMKRRTRRTRKTRYRPAHFLNRKHSRKQDRFSPTMTSKIDAHLREIRFVQSLLPIQSIVLETGTFDPHALKNPEVLHKKWLYQKGINYGFANTRAFVLTRDDYTCQQCTGASKDQQLEVHHLVFRSQNGSDEETNLVTLCKTCHDSLHAGTITLKKTGKKKGKLLHATQMNSIRVQLLKRVEAEETWGFVTKEHRLLAGLPKEHIFDATMIATRGVKPTFCTTSILSKRCVCDGDYQQTKGVRSEQRIATGKIMGFRKFDKVRYLGQEYFIKGRMSTGYAILMDLSGNKVALKPIPKFDKMKRVSARSSWMMTQRTMPHSSFSLR

SEQ ID NO: 2377 - protein, 438 aa, Ktedonobacter racemifer
MSRVLIVDAERRPLMPCTPARARLLLKAGKAAILRRFPFVLILREARPEAVVEPLRVKLDPGSKTSGIAVLHEQSGEVMWAAELTHRSTPLREALAKRRAVRRSRRSRHTRYRAARFANRRRPKGWLAPSLESRVLHLLTWVKRLSRWCPVGALSLELVRFDLALLQNPSIEEVEYQRGTLWGTEVRQYLLDKWQHRCTYCQASEVPLEIDHVSPRSKGGSHRIANLVIACRPCNQAKGDQPLESFLANRPDVLARVQVQRRAPLHDAAAVNSTRWQLYERLKALDLPVETGSGGLTKWNRQSRNLPKTHWIDAACTGRSTPERLQIRHVRPWLIQAQGRQARRMVNVDKRGFPRGKAKGPSGICGLRTGDLVRAVVTKGKKIGTYVGRVAIKSDGYLKLTGRPFGMVEGIHARYCRPVHRNDGYAYAQGEAALPPQA

SEQ ID NO: 2378 - protein, 392 aa, Ktedonobacter racemifer
MVYVVSADRTPLMPCSAAIARLLLKEGKAKVVRRTPFTIKLSAQPERTYTQPLTLGVDTGSAVIGSAVASEQGSILYLSEVEVRNDIATTMKERATHRRDRRNRKTRYRPARWLHRRNSIKTGRFSPTMRSKIDAHLREIHFAHSLLPISSIVLETGTFDPHALKNPEVLRKKWLYQKGINYGFANTKAYVLTRDGYTCQHCQGKSKDQRLEVHHIIFRSQHGSDEESNLLTLCKTCHDALHAGMITLKHTGKKKGDLLHATQMNSIRVQLLKQVEAEETWGFVTKEHRLLAGLPKEHCFDAAMIATRGNRPVFQIQTVFVKKCIPDGEYQQTKGKRSEQRIPTGKIQGCAQMRQSALSRSGILYQRAYVYWLCYFDDDRREKGRFETHSQV

SEQ ID NO: 2379 - protein, 429 aa, Lactobacillus equi
MPTSRLGMVRRWLKSGQAIWYGNSRNTIQFVRPITTNAQELTLGVDAGFHLGLSVVGNQREYYASESVRKSEKDKITARREYRRTRRNRLRYRKPRFDNRKRPDSWLAPSIQHRLDFTIKEIKRLYNFLPISKLVIEVSPFDNQKLLNPNIKPWEYTQGKMQGFKDVKDYLLARDVNRDALDGKIYPASQLRVHHLVQRKDGGTNQPDNLVLLSDRNHNQANHNNGVLAKLAQNRQNSIDYKGAYFMSILASRLPNYFDSYIETQGYITANLRKLYGIEKSHLNDAFVIAGGTNQYLRTSNVYSRTKVANNNRSLQKFYDAKYIDSRDGKKKSGKELSSGRTRRSREINYDNQRIYRQEKVSKGRVSIRRQHYQLRPHDIIRNLKTNKIEIVKGVINNGNSVLFQTGKSVTTKKVKCLYHINGLREEKI

SEQ ID NO: 2380 - protein, 451 aa, Petrotoga olearia
MVYVLSKDGAPLMPTKRHGKVKHMLKDGKAKVVRNKPFTIQLTYDTPHYTQPITLGIDSGYKYIGFSAVTEKGNTPNGVKEEVLSGEVNLRSNVSELLKERSMYRRIRRNKLRYRKSKFDNRVSSRKETPRKGFKESWLAPSIKHKLDTHIRFIEFIKKILPITNIVIEVAKFDTQKIKNPEIKGKEYQQGEQQNFYNLREYILYRDNYTCQLCGKSNVPLEVHHIGFWKGDRTNRPSNLITLCTKCHDPKNHLKGGKLYGMKPVQKPLKEATFMSTVRWKLVNILDCKYTYGYITKSKRIKLNLDKTHYNDAYCIAGGTSQRRIEPIYFEQIRRNNRSLEKFYDAKYIDTRDGSIKKGQELFNGRRTRNKNYNTENLRKFRGQKISKGRRSIRTQRYFYQPKDLVIYEGKKYTVKGIHCCGKRIILAELSKSFKIETVEPYMFRKGLCIT

SEQ ID NO: 2381 - protein, 447 aa, Petrotoga olearia
MQRVFVLDKNKRPLMPCHPARARELLKKGKAAVFRYHPFTIILKDRAGGDTQPTHVKIDPGSKITGVALIGNFKNGKKVIWSAEIQHRGQSIKKALDTRRALRRSRRNRKTRYRKARFDNRERSKDWLPPSLMSRVENILTWIKRMRHFALITGISMELVRFDTQKLQNPEIKGIEYQRGTLYGYEIKEYLLEKWGRKCVYCGKENVPLEIEHIIPKSKGGSDRISNLTLAFHECNQKKGNQSIEEFLANNPERLNQIKSESKKSLKDTAAVNATRWYLFNQLKKERLLIEVGTGGKTKYNRETQNYPKKHWIDAACVGESGQNVQIEPDMQVLEITAMGHGTRKMCNVDKYGFPRSHRRAKNAPNGVKGRTYMGYKTGDIVLAVIPKGKNAGIHIGRIAIRQQPNFKLNDLDGINPKYLRLLQRNDGYGYQTARKEGEKLLHSSYH

SEQ ID NO: 2382 - protein, 445 aa, Petrotoga miotherma
MLVFVFNKHGEPLMPCKPSKARKLLKGKKAKIISYEPFTIQLLYGSSGYKQGVSIGIDIGSKHIGVAITSENKVLVKGEIELRQDVSSLLTTRKTYRRSRRFRKTRYRKSKFLNRKRKEGWLPPSIESRISNTFKWIDKFASLVPNPKLNIEVGKFDSHKFVNPEVSGKDYQKGQMHGYDDIRYFVFERDNYTCEVCKKKGVILQTHHIKYKSKGGTDNPNNLITVCADCHTPENHKPGGIFWEWMTKSKKPKAYKEHPFMNIIRKRIYQRYPSANIVYGFWTTPRRKELGLSKTHYNDAIAISGIDFIKKNVDSVFEIRQVRKKKRSLHEATARKGRKEPNRDQIRNSKNTKFYKSFYLNDLVKVFSRKGWITGFTNGGAYIKDIFDNYITMPNKSYKQVSLKNIQFISHNNNWQFVPHMKEGDLLLNGKENQLSSLIKQPHGR

SEQ ID NO: 2383 - protein, 434 aa, Lactobacillus composti
MQNRVFVINRQGEPLMPCKQRKCRKLLQSGKAKVIKKEPFTIQLKYVSTGYKQPLAVGVDSGQHHIGLAVTSQNKVLFQGEVSLRQDVKKLLDTRRIYRRGRRNRNTRYRQPRFLNRARSAGWLPPSVASKVQHNINWIRRFQAVLPKTELHIEVGKFDMAKMVQPGITGLGYQQGDLYGYETAKQYVLDRDNYTCQICHGKSKDPKLKIHHIIYRSNSGTNQVSNLLTVCATCHSLANHQPGGKLYDLQAKKFQSHRSLKGATFMNILRRRLFTAFPEAKFQYGAQTTLDRAKLDLEKAHYNDAVIISGIQKNAQRPTAVVMFHQFRKKKRSLHEATARKGRKVPNITSKRNAKNTKFSRGFYLNDYVQLPNGQKGNISGFSSRARCFVKAGDGNYLAISSKYKHINLSELKVIRHQNNWNVAEINTADYLMA

SEQ ID NO: 2384 - protein, 442 aa, Lactobacillus equicursoris
MKHENANRVFLLNRDGKPLMPCRPRKARLLLKSGKAFVVKKYPFTIQLKYGSYGYKQKVSLGVDTGQRHIGFAIVSQNKVLYQSEVELRQDVHKNLYTRKIYRRSKRNRKTRYRQARFLNRVHGKRDGLWLPPSVKGKVNHNIAWIKRYLAVLPNPDLHVEVGKFDMAKMLNPQISGKQYQEGSLKDWKNYEYYVLARDEYTCQLCHKHGEGVKLVVHHIVYRSQGGTNRVDNLITLCTDCHTTKNHQPGGKLYKWMKVKKKVTKQLKGATFMNILRKRIMTAFPEASFQYGSQTYVDRKNLLLPKGHFMDAIAISGIKSVGQMPDTVTLISQFRKKKRSLHEATARKGRKQPNTSSKRNEKNTNHARGLWLNDYVRVIGNHAKGYVKGFKSNGYYVYLTNGLGNYVLNNGKNYINGQQCRLIMHNGNWQKAEQKLSLNEFK

SEQ ID NO: 2385 - protein, 443 aa, Caldicellulosiruptor bescii
MVFVLNRDKTPLAPCHEAVARKLLKHGKAVIHRIYPFTIRLKEQKDTSTFKPNYRLKIDYGSRCTGIVILKNNCEVVFMMKLYHRTEIKENMDRRRSLRRSRRNRKTRYRKARFSNRRRDENWLPPTLLSRVRNIETWVKRLCKLCPVTAISYENVKFDTQKLRNPEISGIEYQHGTLQGYEVKEYLLEKFNWRCVYCGATGVPLEVEHVIPKSRGGTDRVDNLVIACHGCNQKKGNKTAEEFGYPEIQKLVKAPLRDCALVNATRWRIYEVLKNTGLPVECGSGALTKMNRIKLGLPKDHHFDAICVGYSTPNRIWLKTKTVLHVIAKGRGTRQIAILDRYGFPRGHRTRKKFFYGFQTGDMVKVVVPKGKYKGTWVGTVSCRNSGYFDIKDKTGKRIVQSISYKHCKIIQRFDGYCYELERIRISGTFPLQPVEVGASMCQ

SEQ ID NO: 2386 - protein, 471 aa, Caldicellulosiruptor bescii
MVIFTVDKHGRPGHPTRRFDMVRKLVKQGRAKIIGGGASGKPPVVMFLDREFDYSKTIERRLFVVLDPGYHHIGFAVCELRWGVLIVYCIGVLETRIPEIKDLMTKRRGYRRNRRYHSRCRKKRMSKRHSRVLTKFKAPRNVRTKDRTNATLRHGIETHLNLYKKLLKFFPFPAEQVVFVMEDNIFDVRTMTWGKTYGTGYQKSPRVPAEKKCIICGTEDNLQKHHLIQRKCGGTDVQENLVYLCRDCHEDVHAGRVYIPVEGVRQWRALGTMNAIIGQLREIPWLKFVPASDAAQMRKKLGLKKGHANDALATAAVFCSCTEADRTHMIELTLVKFRRHNRARIHAVRDRLYKVDGKIVAKNRRKRTDQKEPSFADISPLPPEIQRKLKVYPGTKILNPLRKEMPTIAGDVWIHEPTGKRFVTTGVVSQKYLYSPQLKKIVGKMYVQPEECRQVLHNEGMVVMYNSLYHS

SEQ ID NO: 2387 - protein, 452 aa, Streptosporangium roseum
MVFVLDTHGHPLDPCHPARARRLLAAGRAVVVRHTPFVIRLKDRTVAGSTMQGVELGIDPGSKHTGIAAFSERGGSRIGLYALQLDHRGGQIRDKLASRAALRRGRRSRNLRYRAPRFNNRTRPQGWIAPSLRHRVDGTVSWVSRLSRWAPVTAVHVERVAFDTHLLSAGRPLEGVEYRYGTLHGYEVREYLLAKWGRACAYCGASGVPLNLDHIHPRSRGGSNRISNLCVACVGCNQAKNATPIEEFLTDRPVVLVKILQQSKAPLRDAAAVNATRWALWRALTATGLPVATASGGRTKWNRSRTGAAKSHTLDALHVGALDHVTGWPSMVLVIAATGRGTYARTRADRYGFPRLALPRTKQHHGFQTGDLVRAVVPTGKKAGVHTGRVAVRSTGNFNIRTRHGSVRGISHRHVRLLQRADGYGYTTHPEARNRAAFPPPPEGGGIHAGGN

SEQ ID NO: 2388 - protein, 449 aa, Allochromatium vinosum
MAVFVLDKQKHPLMPCTEKRARLLLERGRAVVVRLAPFTIRLKDRIGGALQPLRLKLDPGSRVTGLALVRESETCDADTGAVERLEHGLWFGELAHRGQAIRETLGQRRHLRRARRSRKTRYRAARFLNRTRRTGWLPPSVQHRVESTVNWVKRLRRLAPITALSQELVRFDTQALQNPEISGVEYQQGELAGYEVREYLLEKWHRTCAYCSATGVPLEIEHIVPRSRGGSDRVSNLTLACRACNQRKGNQSIEDFLKRQPALLRQIQAQAQAPLQDAAAVNATRWALFAALKAQGLPVETGSGGRTKFNRSRLNLPKTHALDASCVGAVDQVRDWNRPVLAIRATGRGTYSRTRLDRFGFPRGYLIREKRVHGFQTGDWVRAEVPAGKRAGVHVGRVAVRRTGAFNIQTQDATVQGISYRHCRVLQRADGYGYAFQSKPDAEKARRAA

SEQ ID NO: 2389 - protein, 419 aa, Anoxybacillus amylolyticus
MFVYVINKHGNPLMPCSPRKARILLKNKKAKVVKRTPFTIQLLYGCSGYKQPISLGVDAGTKHVGLSATTKNQVLLEAEVQLRTDIQELLATRRQFRRSRRNRKTRYRKARFLNRKKPNGWLAPSIQHKMDSHIKLVKWVHSMLPITHITVEVAQFDTQKIKNPDIQGAAYQQGEQLGFWNVREYVLYRDGHTCQWCKGKSKDPVLNVHHMESRKTGGDSPSNLITLCKTCHDRIHREGLEHEIQRRFSSLKDASHMTAMRWFIWNGLKKVYPHVKHTYGYITKHTRIVHGLAKTHMVDARCISENPLATPSDTVFLLKFVRKNNRQLHKATISKGGKRKANKAERFIKGFQLFDKVLYNSQECFVFGRRSSGYFDLRLLDGTRIHASASYKKLKKVEHASTLLIERRKGDSSPTFALA

SEQ ID NO: 2390 - protein, 451 aa, Paraburkholderia hospita
MSAFVLDRNGRPLMPCSEKRARHLLARGRARVHRVMPFVIRLVDRMADSCALQPLRIKLDPGSKVTGVALVREADSGIAVINLFELIHRGRQISEALTARRGFRRRRRGANLRYRAPRFLNREKPEGWLPPSLQHRVDTTMAWVQRIRRWAPVTALSSELVRFDLQQLENPEISGLEYQQGTLAGYEVREYLLEKWKRTCIYCDAKDRPLQIEHLTARARQGSNRVGNLGLACGDCNQDKGALDVRAYVKDSKRLARILATASRPLRDAAAVNTTRWALTDTLRATGLPLELASGGRTKFNRVTHDLPKTHALDAVCVGRVDAINDWKRPSLSIKATGRGSYQRTRLTRHGFPRGYLMRQKQVQGFRTGDHVRADVPTGKRAGIHVGRVAVRATGSFNIQTASTVVQGINHRHCRLVQRGDGYAYSLQSTDSYQGDAGICGAAHAALSLPG

SEQ ID NO: 2391 - protein, 469 aa, Paraburkholderia hospita
MAVCVLDRSGKALMPCSEKRARLLLARGRARVHRVVPFIIRLVDRRAHASRFQPLRIKVDPGSRTTGLALVRDTQLVDATSGEIQRGAAVLNLFELVHRGRQISEALSARRAMRRRRRGNLRYRAPRFLNRTRPAGWLAPSLEHRVATTMAWVNRVMDWTPVAALSSELVRFDMQALENPEIASVEYQQGTLAGYEVREYLLAKWGRRCAYCDQEHVPLQIEHILARASGGTNRISNLTLACACCNAKKAARPIEAFLARDPKRLAVILAQAKRPLKDAAAVNATRWALANALRATGLPVELASGGCTQFNRKQLGLPKTHALDAVCVGKVASVSVWYKPTLAVKCTGRGSYQRTRLDRYGFPRGYLTRSRRVHGFQTGDLVRAEVPTGKKAGRHTGRVAVRATGSFNIQVAGNVVQGIAHRHCRLIQRSDGYGYSRIALLKGDASDGTASLSALSLPAVNDGVSRAAG

SEQ ID NO: 2392 - protein, 420 aa, Methanobrevibacter millerae
MFVYVLNMHGEPLMPCKPRKARILLKEKKAKVVNRTPFTIQLLYGSYGHKQPVNLGVDAGSKYVGLSATTTNKELFKATVELRRDIPKLLENRSILRRNRRTRKLRYRPPRFKNRGKKGKLAPSIQHKIDCHLTIIKRVCNIIPIQNIIVETAEFDTHKLKNPNVQGVEYQNGEGKDFYNVKQAVLSRDKYTCQICGKKQVKFEAHHIIPKSQGGSNRMENLTTLCSECHHKVHNGELKFNKKVTRFNHTSHMNIIRKRLMELLKKEFDNVHETFGYLTKYNREKLGIPKSHCNDAFIISHNPQAEQSSIEYLFKKVRRHNRQIHKAKPSKGGKRRKNQSHYIINDFRRYDKVMYNGIECFITGKRSNGYFQLKSFDGTVISQSTNSKKLKLLEPIKGWLVDWRWTIPPRPKEIKVSLPN

SEQ ID NO: 2393 - protein, 430 aa, Eubacterium oxidoreducens
MVYVLNQDGQPIMPTRNHAKVRVLLKNGKAKVINRCPFTIQLLYPCDNQTQSISLGVDAGSKHIGISATTKGDSTGARVLYEADVTLRNDIVELLSTRRENRRARRNRKIRYRKPRFDNRRRKDGWLAPSVQNKVNTHLTVVANACKILPVTKIVVETASFNLQKLKADLEGLKRPEGIEYQQGEQLGFWNIREYVLFRDGHTCQCCKGKSKDKILNVHHIQSRKTGGDAPNNLITLCETCHTGYHKGLVKLPESIKRNKPLKDATFMGIMRWAFYNKVKEIYVPQGIDVHMTYGYITKNTRIKNGLPKEHYIDARCISNYPEAIHPWNKTEVYYQKKVRCHNRQIHKMSIHKGGVRKLNQAEYLVKGYRLFDRVQYQGKEYFVFGRRKSGFFDIRTLDGEKVNKGSISYKKLKLLEISKGFLTERKVVA

SEQ ID NO: 2394 - protein, 456 aa, Fervidobacterium changbaicum
MVFVISKDGKPLMPTKRHGKVRRLLKQGLAKVVNREPFTIQLLYETTNYTQPVTVGIDIGSKVVGVCAVTDKEEMFSAEIQLRQDISKLLLERRQHRRFRRYRKTRYRKPRFLNRRKEDGWLPPSLQWKVDAHVRIVNKLSKIIPITKVVVEVAPFDIQKVLNPDIEGEDYQNGPQKGFSDVRDYCLWRAGYKSELSGKTGILEVHHIIPRSKGGTDAPSNLIVLTTQEHKMLHEGKIKIPKSRLEQIKVFKDAAHVSTIEQHIVNKLKQNYHVEITYGSITKERRDMYGLEKSHRDDAFVIAGGNIQERASEWYFGKFFRRQNRSLHKANPIKGGRRPINTVKQVNGFIRFDKVECEGEKAIITGLRSSGYFSISSLSGEKISDSVKYTKLRLIERAKTLMFERRERATCSWLKPRVSVARFHEIKTAHSRSFKRSTICFTMDNWFSYFYAYTAH

SEQ ID NO: 2395 - protein, 440 aa, Fervidobacterium changbaicum
MVFVLDKNKKPLMPCSEKRARLLLSRGRAVVHKMHPFTIRLKDRTVQQSELQPLRLKLDQGAKVTGLSVLREDGDVAETVFLCEIHHKTDIKQKLDARRAVRRSRRNRKTRYRKPRFLNRRRPEGWLPSSFKARADQLVNVVIKLTKLLPISAISIEDAKFDTQKLQNPEISGIEYQRGTLFGYEVREYLLEKWGRRCAYCGRSDVPLEIDHIVPRSRGGTDRVSNLTLACRECNQKKSNKTAAEFGYPHIEERARQTYKQAAFMNSIRSYLSKSLSSFGIPVEYGTGALTKANRIRLGFPKEHYFDACCVGESTPSEIRITQSYVQIWRAVGRGTRQMCNTDKFGFPRGHRQRCKKHFGFQTGDIVKAIVPRGKYAGIWMGMVAVRASGFFDIKDKNGKRVCQGIRYKYCKLIQTADGWQYSKTKTNYSISHTTEVACI

SEQ ID NO: 2396 - protein, 439 aa, Allochromatium warmingii
MSVFVLNKQKRPLMPCSEKRARLLLERGRAVVVRLVPFTIRLKDRIGGVLQPLRLKLDPGSKTTGIALVREVVRRDESVVWLAELTHRGYQISEALRARSAMRRRRRSANLRYRAPRFLNRTKPKGWLAPSLRHRVETTINWVKRLRRLAPITEITQELVRFDLQAMQHPEISGIEYQQGELAGYEVREYLLEKWQRTCAYCGAQQVPLQIEHIRPKSAGGSNRLSNLTLACAPCNHKKGAQSIEAFLKHKLELLKQIQAQAQAPLKDAAAVNTTRWALFNALKATGLQVKTGSGGQTKYNRQRLGIPKTHALDAACVGKLDALHNWQIPTLAIKAMGRGSYQRTRLNRFGFPRGHLMRHKRIHGFQTGDRVIAHIPSGKKAGVHVGRVAVRTSGSFNIQTATGVIQGIAHRHCSVLQRADGYGYSFNLTQPEEARLAA

SEQ ID NO: 2397 - protein, 424 aa, Caldicoprobacter faecalis
MVYVISKAGKPLMPTERHGKVRRLLKQGLAKVVKREPFTVQLLYDTTTYTQPVTVGLDIGSKTTGVSAVTEKKEIFSAEVELRDDIKGLLLERRQYRRMRRYRKVRYRKPRFLNRARDDGWLAPSLQWKVDAHIRIVDMLGRIMPIERVVVEVAPFDTQKILNPGIEGEDYQNGAQKGFWDVREYCLWRAGYRSELSGKRGILEVHHIVPRSEGGTDTPSNLIVLTADEHKGVHEGRIRIPKSKVEKVKMFKDAAHVSTIGWHIVNRLRERYSVEVTYGSTTKAKRLSCGMEKSHRVDAFIIAGGDLQERLREWYLGKFLRRQNRSLHKANPIKGGVRPVNTIKEAYGFRRYDRVEYEGIIGIIAGLRSSGYFAVRSLSGEKIHDSAKHNRLRLVEKAKTLMLERREERIPLHLEEDGVSCARI

SEQ ID NO: 2398 - protein, 447 aa, Halolactibacillus miurensis
MRVFVKSMRGFNLDPCKNQKARQLLKEKKAKIISYKPFTIQMLIATGETTHESHVGIDLGAKYTGVAITQEDRVLAKGDIECRQDIKALLETKKIYRRSRRSRKTRYRKCKCKHKTTRVYSNKKGKWVKKKTSFTSPRPKSWLPPSLESRTQNLFFWIDTFTSLLPKVKLHIEVGKFDVQKMKSPDIQGKAYQEGDTFGYHDVRYFVFARDHYTCQVCKKKGNILNTHHIIYRSHGGSDAPSNLISVCTDCHTSDNHKRGRILWHWMEKRKKVPTYKEPPFMNALRIRTFRRYPDARIIYGSETTPRRKELHLEKTHYNDAIAISGIQHIKENPHTIFYIKQFRKKKRSLHEATARKGRKNKNLTQKRNKKNTKEMKGIHLNDTVRIFGKIGFVSGFTTTGIYIKDIHNAYITKPGKTYKQVGFKDVTVENHNNNWQFISHLAPDGA

SEQ ID NO: 2399 - protein, 427 aa, Alicyclobacillus macrosporangiidus
MKQNRVLVLDKNHHPLMPCHPARARQLLKAGRASVFRWYPFTIILHDRDRGEVQSVRLKLDPGAKVTGIAVTAAFQRGDTVVWAAELHHRGDQIRQALLTRRALRHARRNRKTRYRKPRFDNRRRPEGWLPPSLVSRVENVVTWVERLRRFAPLTHLSMELVRFDTQKLQDPEIHGVEYQQGTLFGYEVREYLLEKWGRKCVYCGAEDVPLEVEHVVPRSRGGTDRVSNLTVACHECNQAKGNQSLEEFLHHDPERLRQIKAGLKTSLKGAAVVNATRWALFRRLQATGLPLEVGSGGRTKYNRAVQGYPKAHWIDAACVGELGERMRLHPEMQVTRIVAKGHGTRRRCGTDKHGFPIRHAPAAKSYMGFRTGDLVRATIPRGKNTGRHVGRIAIRHRPSFRLNGFDVHPKYLKILQRGDGYAYATE

SEQ ID NO: 2400 - protein, 501 aa, Desulfotomaculum thermosubterraneum
MVFVLDKHKKPLMPCTEKRARLLLERGRAVVHRMSPFTIRLKDRTAEESRFQPLRLKLDPGSRTTGFAVLREDTPNRSEVILLGEIHHKPSIKDGLDVRRNQRHSRRNRKTRYREPRFNNRHPEKCAVCGKNAQHGSRYCRPCEKAKNFVDNGHREGRLVPSLEARVNQTLSVVDKLTRWLPITAISTEHVKFDTQLMQNPDISGVEYQQGELFGYEVREYLLEKWGRKCAYCGKEGVPLEVEHVVPRNPKRGPRGTDRISNLTLACEECNKAKGNLQPEEWLEKLKQSKRKLDQVRAENLPKILRKLKEPLRDAALVNATRWVLYDRLKKTGLSVECGTGARTKYNRLKMGLPKTHYYDACCVGESTPENLAINQEYVQVWTALGRGTRKMCNTDKYGFPVSHRTRQKMYFGFTTGDLVMAEVPEGKYAGRWVGRVAVRASGYFDIKDGSGKRICQGISYRHIKLLQRADGWQYEKIRVEKGGSGGASSPGVNAGASGAA

SEQ ID NO: 2401 - protein, 415 aa, Fervidobacterium gondwanense
MVYAISQQGKPLVPTKRHGKVRRLLKQGLAKVVKREPFTIQLLYDTTTYVQPVTVGIDIGSKTVGVSAITDKKEVFSSEIELRTDIKDLLCERREYRQLRRYRKTRYRKARFLNRRKPEGWLAPSLRWKVDAHIRIVNMLSKILPISKVIVEVAPFDTQKILNPDIQGEEYQNGVQKGFWDVREYCLWRAGYKSEVSGKKGVLEVHHIVPRSGGGTDNPSNLIVLTAQEHKAIHEGRLKIPKSKIEKVRILKDASHVSTIGWHIVNELKELYEDVRVTYGSITKAKRSEFGLEKTHRNDAYVIGGGTVQKRAKEWYFGKFFRRQNRSLHKVNPIKGGIRPVNTIKQSYGFRRFDKIEYEGKIGIIAGTRSSGYFVIRSLSGERIHDSVKYSKLKHFEKSKTIMLERREAAISSHD

SEQ ID NO: 2402 - protein, 442 aa, Desulfobacterium vacuolatum
MHVFVKNMRGEALMPTSPRKARVLIAHGKAKIDSYRPFTIQLCIATGESRQDLTLGVDAGYATIGFSVIDSTKELFACEIELLKGQVERNNKRRIYRRQRRSRLRYRKARFEKQNKPEGWLAPSIQHKLDTHIKFIHRLQSIMPITETIIEVAAFDIQKIKANGEIEGKEYQEGEQLGFWNLREYILHRDNHKCQHLDCKNKAKSPILEVHHIGFWKKDRTNRPGNLITLCTKCHTAPRHKKNGSLYGWEPKVKTFKPATFMSMIRWKLVNALQCDHTYGHITKHNRIRLDLPKTHFNDAFCIANGQHQTRAIPVFFQQKRKNNRCLEKFYDAKVLDIRTNKIVSGNDLNNGRRTRNKNLNGENLRKYRGLKKSKGRRQVRRQRYSIRPHDIVEFDGSIYKAVGVQNKGTYLKITNGVKTVVKNIKHVKTIFHQKTLMYVSR

SEQ ID NO: 2403 - protein, 469 aa, Desulfobacter hydrogenophilus
MKVYVKSQSGKWLMPTNPANARILLKKGKARVIQRTPFAIQLLYETTEHIQPVTVGIDDGGIHVGIAAVSHGQSLFQQEVVLRSDIKSKLDTRRQYRRSRRHRKTRYRKPRFLNRKQSIPTCKVCGKNAPASKVICRACLRKAEGVHQKYAGIQKKAFRIPPSIKAKKEAIIRVVRQIPLPISNIILEDVYFDFQAMENPGISGKQYQHGDLLYHKNFKQACWVRDKFKCRVCGAESKLQCHHIKPRADGGTNKLSNLMTLCEGCHEKHHKDGLKLPKQKSAFYISAAHVQQGKNYLQAELSRIAPLRTTFGYITAHHRNKAGIEKSHVNDAVLIADKQASPLDRQIQTKHVQLRKRSLHEATARKGRKAPNRTQKRNKKNVFTLKGFNRWDTVQYKGRVGFISGFTGTSSCRIVDIKGNYIKNPEKKYTQVNLREVRKIHENRSIVSYYANSSPTFAIAQEGDSLAGS

SEQ ID NO: 2404 - protein, 470 aa, Paraburkholderia nodosa
MAVFVLDRRGRPLMPCTEKRARLLLARGRARVHRVMPFVIRLTDRKADACSFQPLRVKLDPGSRVTGIALVREADDGIAVLNLFELVHRGRQISEALTARRAFRRRRRGTNLRYRAPRFLNRSKPEGWLAPSLMHRVHTTMAWVNRIRRLAPVAALSSELIRFDMQALENPEVSGVGYQQGTLAGYEVREYLLEKWNRTCIYCDATDRPLQVEHLTARARNGSNRIGNLGLACGGCNQEKGSLNVREYVKDPKRLARILAAASRPLKDAAAVNATRRALADALRATGLPLELASGGRTKFNRVTHGIPKTHALDAVCAGCVNAVRDWQRPSLTIAATGRGSYQRTRLTRYGFPRGYLMRQKQVQGFQTGDHVRADVPHGKRAGVHTGRVAVRATGSFNIQTATAVVQGISHRHCTLIQRGDGYAYLQPKDSFRQEDAGDGRASHAALSLPGMNPGFLAQSDDFEIDFQGI

SEQ ID NO: 2405 - protein, 468 aa, Moorena sp.
MSVFVLDRRGRPLMPCSEKRAKLLLARGRARVHRVVPFVIRLIDRHVESCASQALRLKLDPGSRITGMALVRDTEIIVPATGEIQRGAAVLNLFELVHRGRQISETLTARRAMRRRRRGNLRYRAPRFLNRSRPAGWLAPSLQHRIDSTLAWVRRIQRWAPVTALSSELVRFDMQALENPEIRGIDYQQGTLAGYEAREYLLEKWGRQCAYCDTAGTPLQIEHIHAKARGGSNRVSNLTLACGACNRAKGASPVEVFLAKDSRRLARILARAKRPLKDAAAVNATRWVLSNVLKATGLPVELASGGRTKFNRMTLGLPKTHALDAVCVGEISFVTAWQKPTAQAKCTGRGSYQRTRLNRFGFPRGYLTREKQHFGFQTGDLVRASVPAGKKAGSYSGRVAVRASGSFNIQGAGGAVQGIAHRYCRLVQRSDGYAYSRIATSGRIAGAGTASRSALSLPAMNGGVSRAI

SEQ ID NO: 2406 - protein, 418 aa, Exiguobacterium antarcticum
MLVFVLNQHGEPLMPCKPRKARHLLDEKKAKIVKRTPFTIQLLYGASGYKQPISLGVDAGTKQIGFSATTSTKVLLEGEVQLRTDIQDLLATRRAMRNARRSRKTRYRQARFLNRKKPKGWLAPSIQHKVDAHLKLIRMIHRLLPIKHLTIEVAQFDIQKIKNPDISGDLYQKGDQLGFWNVREYVFFRDKHMCQHCKGKSKDNILNVHHIESRRTGGDSPDNLITLCETCHHKIHQQKLEHLFQRKSRSLRDASQMTVMRWFIYNAVKEAYPYVKLTYGFLTKNTRIQNGLEKRHAVDARCISGNPLGEAPKVSYLFRQVRANNRQLHKMTIGKKGKRKANKAERLVHGYQLFDKVQYEEQTCFVFGRRKNGYFDLRTIAGFSIHKSASYKKLTLLEKAKTWLVDIQPEGGEGRSQP

SEQ ID NO: 2407 - protein, 461 aa, Acidihalobacter prosperus; identical to SEQ ID NO: 2043

SEQ ID NO: 2408 - protein, 451 aa, Caldanaerobius polysaccharolyticus
MVFVLDKKKKPLMPCTEKRARKLLQSGRAVVHRLMPFVIRLKDRTAEESNFQPLRLKFDPGSKTTGFSLLREESAEKSAAIIMGEIHHKQGIKDRLDSRRVLRRGRRNHKTRYRKPRFDNRRREEGWLPPSLEARVEETVRAAEKLMKWLPITSISTEHVKFDTQLMQNPEISGIEYQQGELYGYEIREYLLEKYGRKCAYCGTENVPLQIEHVVPRNPKHGPKGTNRVSNLTISCERCNKDKGNKQPEEWLEELQKSKRKIDRVRAENLLKVLANLKKPLKDAAMMNATRWTLYERLKRTGLPVECGTGARTKKQRIEHGFPKAHYFDACCVGASTPKTIKIKTKYTEIWTAVGRGNRKMCNTDKYGFPISHRQRKKRHFGFQTGDIVEAEVLSGKYKGTWRGRVAVRASGYFDIKDSKGNRICQGISYRYVRLLQYVDGWQYEKEKVAY

SEQ ID NO: 2409 - protein, 477 aa, Azohydromonas australica
MSVFVLDRSKKPLMPCSEKRARKLLTAGRARVHRMYPFTIRLLDRTAEDSALQPLRLSIDPGSKATGLALCRVEDRVDADTGEAGEPALHIVALVELVHRGQAIRDSLRRRAMLRRSRRGRNTRYRAPRFDNRGGKRTGWLAPSLLHRVETTLTWVRRLRRWAPVSELAQELVRFDMQLMQARAAGKGIEGVEYQRGELAGFEVGEYLLAKWGRRCAYCDAEGVPLEKDHIVARARGGSDRVSNLALACRPCNRAKGAQDVGEFLAHAPARLARILAHAKAPLKDAAAVNATRWRLFNDLKSTGLPLQTASGGRTKFNRTRLALPKTHVLDAACVGRVGEVLRTAQPTLQVQCNGRGSRSRTRLDAHGFPRGYLMREKSVLGFRTGDMVHATVPASSRKAGTWVGRVAVRSSGSFNVQTAAGTVQGINHRHCRVLMRGDGYGYQLVAQHRKESGYRDGASRRALSLFGLKAEVSRAV

SEQ ID NO: 2410 - protein, 427 aa, Enterococcus cecorum
MVYVLSIDNEPLMPCSNVIARLLLKQGKAKVKYREPFTIKLTYETTTYTQPLTLGVDTGSQTFATAVADEKGNILYTSEVTLREDKNNSIKKKMDQRRMYRRNRRSCKTRYRKARFNNRKNSKRKERFSPTMTSKLHSHQKEIEFIKSILPIAKLIFETGTFDPHLMKNPSLANPKVKPWGYQQGPNYGFENTKARVLVRDNHTCQICNKKPKNERLEVHHIVFRSQGGSDEENNLVTLCHSCHVELHKGLIHPNFEGSLKSALKYATQMNSIRIQLLKLYPDAIETFGYVTKANRLNLGLPKEHYVDAAVIATAGNQVKFACNLMIKRCIPKGDFQRTKGVRSEKTIPKGKIDGFKKYDKVRYFGNEYFIKGRRTSGYFTLMDIYGQTISFNHMSKGQKTPKAKNCHRISARKSWIVTTKKLENIA

SEQ ID NO: 2411 - protein, 419 aa, Bacillus humi
MVYVLNIDGKPLMPCSSVIARLLLKQGKAKVKRRTPFTIQLFYKTDTEYIQPLTHGLDSGSSKVGSAVSDEKGNIVYMSQVEIRNDVSKKMQQRSKYRRNRRNRKTRYRKARWLNRKNSMKKDRFSPTMTSKIHAHMRETRFVQKVLPISKTIIETATFDPHALKNPAVLTNKWLYQTGINYRYANTKAYVLTRDGYCCRHCKGKTKDKRLEVHHIIFRSENGSDEEDNLITLCKTCHDALHQGKVALKKKGKKKGQLNHATQMNSIRIQLLKRIHAEETFGFVTKEHRQLMGLSKEHYFDAVAIATQGKEPTFKMSNVLFKKCVSDGDYQQTKGVRSEQVIPTGKLFGFRKFDKVQYIGNDYFIKGRMSSGYAILMDIEGNKVDLKPIPKFSKMQRVSARKSWIMIPKTIPSFYSYVT

SEQ ID NO: 2412 - protein, 447 aa, Micromonospora viridifaciens
MVFVVDRHHRPLQPCSPARARKLLASGRAVVHRHTPFVIRLKDRETADSQVDGVELGVDPGSKFTGIAVFRTDNDVRTGLFAIEVRHRGGRVRDKLAARSAFRRGRRSRNLRYRAPRFLNRRKPDGWLAPSLRHRVDNTMSWVQRLCRWAPVTGVHVERVAFDTQLMQNPNIGGVEYQHGTLHGYEVREYLLAKWGRKCAYCGVAGVPLNIDHIVARSRGGSDRVSNLTLACVPCNQAKDATPVDVFLADRPTVLARIRRQAKLPLRDAAAVSTTRRALWQALAATGLPVEVGTGGRTKWNRHQTGAPKTHTLDALHVGTITAVRSCPGHIMVATATGRGCYARTRCDRYGFPRLRMPRSKTVYGFQTGDLVRAVVPAGQNKGRHVGRVAVRTTGKFNIRTSHALVQGIHHRHFRLLQRADGWAYTREEERRFIPALNGQVSTPQRR

SEQ ID NO: 2413 - protein, 450 aa, Micromonospora siamensis
MVFVLDRHHRPLQPTTPARARKLLTSGRAVVHRHTPFVIRLKDREVASSEVDGVEVGIDPGSRFTGIAVFLAETAGDNLVRTGLFGIEVRHRGNQIRDRLFARAALRRARRSRKLRYRAPRYANRRRPHGWLAPSLRHRVDNTMSWIERLRRWTPVKLLHVERVAFDTQLMQEPDISGVEYQHGTLHGYEVREYLLARRGRKCVYCGAVGVPLNIDHVVPRSRGGSDRVSNLTLACVPCNQAKGATPIDTFLADQPAVLARIRRQQKLPLRDTAAVSATRWALWRALVATGLSVQVATGGRTKWNRHRTDVPKSHTLDALHVGVLTTVRSYPGQVLVATATGRGRYARTRADRYGFPRLRLPRIKTVCGFQTGDLVRAVVPTGKNIGKREGRVAVRTSGRFAIRTGQTLIQSVHHRYVHLLQRADGWAYTREEERRFDPVVTDRVPTPHT

SEQ ID NO: 2414 - protein, 430 aa, Clostridium magnum
MRVYVKNQRNQPLMPTTQRKARIFLKQKKAKIITYEPFTIQLLYATGETTQETILGVDAGNRTIGLSATTYKCELFSAELKLRTDIVELLATKRQFRRSRRSRKTRYRQPRFENRKKTEGWLAPSIENKIGTHLKVVNKVHSLLPISKIIIEVASFDIQKIKNPDIQGEKYQQGNQLGFWNVREYVIFRDGHKCQGKKNCKGKILNVHHIESRKTGGDSPDNLITLCEDCHKDYHSGKLKLNLKRGQSFRDAAFMGIMRWSFYNKLKELYSNVNLTYGYITKNTRITNNLPKEHRIDALCITGNSTVKRLDNWYLIKQVRKKKRSLHEAIARKGRKEPNITSKRNSKNTKEIISKGKKWCLFDKVKIGSNTGFVSGFTGNMVYVQDIEGNYLQVSPKYKQISTDNVSLISRNNNWIYKEVALGTANHPHL

SEQ ID NO: 2415 - protein, 423 aa, Clostridium magnum
MRVYVINQRKEPLMPTSQRKARVLLKQGKAKIHSYNPFTIQLLSSTGETKQDITLGVDAGSKTIGISATTKKVELYSAELELRTDIVELLSTKKQYRRSRRNRKTRYRKSRFLNRVKSKNKGWLAPSIENKIQGHFRIIEKVNQLLPISETIVEVASFNIQKINNPTIQGKEYQQGNQLDFWNVREYVLFRDGHKCQGKKNCKGKILNVHHIESRKVGGNAPANLITLCEDCHNDYHSGKLNKTFKRGKSFKDSTFMGIMRWTFYNRLKEIYPNVKMTYGYITKTIRITNKLEKAHRIDARCISGNSLAKESDVWYHVKQVRKKKRSLHEAVARKGRKTPNRQSKRNSKNTKEIIYKEKKWCLYDKVKVNGGIGFISGFSGNMVYVQDIDGKYIQLSPKYKQISTDNIELINRNNNYICECIA

SEQ ID NO: 2416 - protein, 442 aa, Macromonas bipunctata
MAVLVLDRSGKPLMPCSEKRARLLLERGRARVHRVVPMVIRLVDRQVADCTLQPVRVKLDPGSKTTGLALVRDAERIDVTTGEIQREAAVLNLMELVHRGRQISEALSARSRMRRCRRGNLRYRAPRFLNRRKPQGWLPPSLRHRVDTTVAWVERLRRWTPVVAISSELVRFNMQALANSEIAGVEYQQGTLAGYEVREYLLEKWGRKCAYCCATEVPLQVEHIQPKARGGTNRISNLTLACRPCNERKAARPVQEFLAKEPQRLASVLAQAKRPLKDAAAVNTTRWALANALKDTGLPVELASGGQTKYNRVRLGLQKTHALDAVCVGVVGTTVTHSQQPTLTITCTGRGSYQRTRLDQYGFPRGYLMRTKRVKGFGTGDMVRAHVTSGKKVGNYVGRVAVRASGSFNIRTSGELVQGISHKYCHLVQRADGYGYFFNYRA

SEQ ID NO: 2417 - protein, 441 aa, Macromonas bipunctata
MSVFVLDRCGKPLMPCSEKRARLLLERGRARVHRVVPMVIRLVDRQVANCKLQPVRVKVDPGSKTTGLALVRDMESTDSVTGEIYRQVAVLNLMELVHRGRQISEALSARSSMRRRRRGNLRYRAPRFLNRSKPQGWLPPSLQHRVDTTMAWVKRLQCWAPVVAISSELVRFDTQALDNPEISGAEYQQGTLQGYEVREYLLEKWGRKCAYCDATEVPLQIEHIHPKARGGTNRVSNLTLACAPCNQRKAAQPLQNFLATEPQRLARITAQAQRPLKDAAAVNATRWALANALKCTGLPLELASGGQTKYNRVRLGLEKTHALDAVCVGHVDAATYGLQPTLAIKCTGRGSYQRTRLDKYGFPRGYLMRTKRVKGFGTGDMVKACVLTGKKVGTYTGRVAVRASGSFNIRTSTELVQGISYKHCQLVQRADGYGYFFHYRA

SEQ ID NO: 2418 - protein, 436 aa, Nonomuraea polychroma
MVFALASDGTPLDPCHPARARRLLKAGRAVVARHTPFAIRLKDRSAEQSEIQGVEVSLDPGSRHTGMSLFRAHDGTRYGLFGIRLDHRGGKIRDKLAARTAYRRRRRTANLRYRAPRFANRTRPDGWLPPSLRHRVDTVISWVQRLRRLAPIRALHVETVRFDTHALPAGRPLEGTGYQHGTLHGYETREYLLTKWGRACAYCGTTGTPLNIDHIQPRSRGGSDRISNLTVACMPCNQAKNNMPVTDFLAGRPAVLARILAQAKAPLRDAAAVNTTRWALYTALTATGLPVRCGSGGRTKWNRHRTGAPKSHTLDALHVADLDRVASWPGRVLVIAATGRGSYCRTATDRFGFPRLRLPRTKQIFGYQTGDLVRAIIRKGKHPGSHTGRVVIRTSGSHTVQTASGPIKTSHKHLRLLQRANGYAYTTKKEEHRCAS

SEQ ID NO: 2419 - protein, 446 aa, Moorena sp.
MAVYVLDKQGRALMPCSEKRARLLLARGRARVHRLTPFVIRLVDRLRIDSDVQPLTLKLDPGSRFTGMALVRQQAQRLSVLSLFELLHRGAAISKALGQRAGFRRRRRSANLRHRAPRFDNRTKPSGWLPPSLRHRLDTTLGWVTRLRRWAPITDLAVERVKFDMQVMQNPEISGVEYQQGELAGYEVREYLLEKWGRCCAYCGTENTPLEIEHIIARGNGGSNRVSNLTLACRSCNQRKGSQPVERFLKNKPQVLARIKVRAKAPLRDAAAVNATRNALLGALLHTGLALATGTGAQTKYNRRRLGIPKAHTLDAVCVGDVQAVKGWQRPTLTIKATGRGDYQRTRLTASGFPRGYLTRQKQHFGFQTGDQVLANVPAGKKAGMHRGRVAVRKTGSFNIRTPDGVIQGISHRHCRIIQRADGYAYTQSRFDSAQLEQEAARTGAH

SEQ ID NO: 2420 - protein, 439 aa, Moorena sp.
MVFVLDKHGMPLQPCHPARARYLLRRGRAVVHRHTPFVIRLKDREIAGSEVDGVEVGIDPGSKHTGVSVFTAQTGERRARFAVQLNHRGATIGKRMRQRAAYRRRRRSANLRYRKARFSNRTRPQGWLAPSLRHRADTTTSWVDRLTRWAPVQAVHVERASFDTHLLAAGKPLEGTEYQHGTLHGFEVREYLLTKWGRACAYCGATGTPLNIDHIRPSSRSGSDRVSNLTLACIPCNQVKSNRLVTEFLAGRPDVLAKVLAQATKPLADAAAVNSTRWALWRALDARLPTHTATGGRTKWNRTCNGLPKSHALDALAVGTLDSITETVRRVLVVGCAGRGAHQRTTPNQHGFPRLTRPRKKTFYTFATGDLVRAVVPTGKKAGTHTGRIAVRERGYFDIHTRHGRVAGIGHRHVRLLQRADGYAYTTQLEVTPEHHKDG

SEQ ID NO: 2421 - protein, 447 aa, Moorena sp.
MVFVLDGQGVPLQPCHPARARRLLASGRAVVARHTPFVIRLKDRLAAESQVDGVQVGIDPGSRHTGISVFTSQEGERRGRYSIQLDHRGAQIHKRVGQRAAYRRRRRSAKLRYRAPRFLNRQRPDGWLAPSLGHRVDTTVSWADRLTRWAPVRVLHVERVAFDTHLLSAGRPLEGTEYQQGTLCGYQAREYLLEKWGRVCVYCGAVDVPLNVDHIHPRSEGGSDRISNLTLACVPCNRAKGDQPVQRFLARRPAVLARILAQAKTPLRDAAAINATRWRLWRALDSRFPGQVRIGSGARTKWNRTQSGLPKSHTFDALCVGGSDAVTVTAYPADVLVIACTGRGTHCRTSPDKYGFPRLRLPRSKNVHGFQTGDLVKAIVPAGKKAGSHLGRVAVRTTGWFDITGGRGTVQGISHRHVRLLQRGDGYGYTIRPENTVPMYGPKEGIR

SEQ ID NO: 2422 - protein, 459 aa, Branchiibius hedensis
MVFVLDRHKRPLMPTDCKRAKKLLARGRAVVHRKVPFTIRLKDRTVDQSMLEPLGLGIDPGSQHTGLSLDKTVEAVDESTGEVTTTRTGLWLGQLDHRGQHIHLRLVARAQRRRGRRGRNLRHRAARNRNRSVRVGWLPPSVQHRVDSTMTCVTRLQSLAPIASLRLERVSFDTHAMTAPGISGLEYQQGTLAGTEIREYLLAKFCHRCVYCDATGVGTGSVPLNIDHLLPRARGGTNRVSNLVLACVRCNQAKGARSVDAFVTDGVRRARIKAEAKTPLRDAAAMNACRNRLAAELDATGLPVEWASGGRTKWNRVRNGVPKDHSLDALCVGAVDVIVRWVPTVLHIQCVGRGRYQRVTTDRFGFPRSHRPRRKQHYGFITGDLVKAVIPTGPKAGVYRGRVIVRSTRTFRLVTPTHRYDGINCRYMTTMQRGDGYSYKARPSLQRRLAPHGDQTKAA

SEQ ID NO: 2423 - protein, 446 aa, Pseudomonas rhodesiae
MAVYVLDKTGTPLMPCSEKRARLLLERGRARIHRQVPFVIRLVDRRQADSALQSLTLKFDPGSKFTGIALVRQKGQRVSVLSLMELAHRGAAIRQAMQQRAAFRRRRRGQNLRHRAPRFDNRTRPEGWLPPSLRHRLDTTLGWVGRMRNWAPISDLAVERVKFDMQAIQNPEISGVQYQQGELAGYEVREYLLEKWGRCCAYCDAENTPLEIEHIVPRSAGGSDRVPNLTLACRPCNQRKGNQPVEVFLKARPELLARIKAKAKAPLRDAAAVNATRNALFRGLLDTGLSVTTGTGAQTKYNRRRLDLPKTHALDAACVGEIRAIEHWHRPTLAIKATGRGDYQRTRLTTHGFPRGYLTRQKRHFGFQTGDQVRAEVPTGKKAGTHLGRVAVRKTGSFNIQTSDGVVQGVHHRHFTLIQRADGYAYSHIQTDSPQSQKEAARAEVR

SEQ ID NO: 2424 - protein, 451 aa, Ruminococcus sp.
MSVAVISKTGERLMPTSEYRARKLLKSGKAVKHSYHPFTIQLTERKTGDVQPIELCMDTGYIHIGISVKSEKHEYLAEQIDTLTDERIRHDACRMYRRQRRGRKRYRKPRFNNRKRDKGWIAPSLKHKKDIHVQAISRINKVMPLTDITMEMGNFDTQVLKAKEEGKPLPQGACYQHGERYGTATLREAVFSRDGYKCQCCGRTIRDGAMLHVHHVKYRSQGGTNSMANLATVCDKCHTPKNHKPGGKLYNWKPKLPDFKGATFMTTIRWQLYNEVKSLFPDINVHITYGAATKEQRRELNIDKSHVNDAFAMGKFHPKHRANAVLYKKKRRNNRCLEKFYDAKYIDSRDGSKKTGQELFNGRINRNHKKDSENLHQYRLQKIKAGKRTIRKQHYSIQPHDIIMYKNRKRETSGCHCNGTRVVLLPDKKTAAIQKVKIYKYAGGYFKSAFN

SEQ ID NO: 2425 - protein, 418 aa, Bacteroides dorei
MVYVINKQGQALMPTERFGKVRRLLKNGLAHVVCRIPFTIQLDYDTTDYTQPISLGVDAGSKHIGISATTSEKELYAADVELRNDIVDKLSTRREQRRTRRSRLRYRKARFNNRISSKRKGWLAPSVENKIQTHLTVVEKIHKFLPITNIVVETASFDIQKIKNPSISNEEYQQGEQLDFFNVREYILFRDGHTCQHCKGKSKDKVLNVHHIESRKTGGDSPNNLITLCETCHKAYHRGEFELNVKRGKSFRDAAFMGIMRWNLYDRLKHIYPNVSMTFGYITKNTRITNNLPKEHYVDARCISGNPVAKPLGYYFYQKKVRCQNRQIHKVNFLKGGRKKLNQAPFLVKGFRLFDLVEYQKDLYYIFGRRDSGFFDIRKLDGTKVNKGSISCKHLRLIDKRKSILTERRNSGSIPPTN

SEQ ID NO: 2426 - protein, 431 aa, Eubacterium sp.
MVYVLDINGQPLMPTTRHGKVRRLLNGHLAKVVKRCPFTIQLLYQSTKETQSTSLGVDAGSKHIGLAATTEKKVVYQEEFTPRNDVVKLLSARRILPHSRRNRKTRYRKPRFNNRVHSKHKGWLAPSVEIKIQEHITAIKRICQILPISEIHVETAEFDLQRLKALEDGNPLPVGTDYQLGEQYDFYNTRQYVLHRDGYTCQCCGTHDNNVKLHVHHIESRQTGGNAPNNLITLCEHCHSALHEGKLKLPKGKKRGKSYRDTAFMGIMRKTLLERLRKEIDIPVTETYGYITKYWREKVGLEKGHINDAVCISKHPYAEPLDIYYLTKAVRHHNRQIHKTKFSKGGIRKRNQAPYLVKGFRLFDKVLYQNREYFIFGRRATGYFDIRTLDGTKVNKGSISYKKLRIQDTANAYLKEVKAIPHMNKFTCVLA

SEQ ID NO: 2427 - protein, 413 aa, Moorena sp.
MVYVIDKQGNPLMPMERYGKVRRMLKSGRARVYSRTPFVIQLCYDIKEPKCQEVVLGVDAGHKELALSGCSSAQELYAAKVMLRTDVPKLMEAKKNFKRRRKINRRYRAKRSQNRKRNSEHGWAAPSVKVKVDEIIQAILRVKQILPVTEVRMEIAEFNYPQIRQYIYDGIAIPHELDLYDVRQYMLWNSYHTCESCKGREDTKKLIVVGQEAKDMVVLCANCYLRYEAGKKKLPKPKMRKSPADIPEFGMVRKYLRRRIYSAIDPSEIVEVYGYQTKIRREKFKLPYSKLNNAFAIAASTESQSSSDKVYCYKILRRHNRMLHNATVLKGGTRKLHQAPYIVKGFRLWDKVLFENQECFVAGRRKTGYFLLKDIKGNIVHTAASYKRIRLLEMSKGYIVAEYSRKESMFGAE

SEQ ID NO: 2428 - protein, 446 aa, Pseudomonas aeruginosa
MAVYVLDKTGTPLMPCSEKRARLLLERGRARIHRQVPFVIRLVDRRQADSALQSLTLKFDPGSKFTGIALVRQKGQRVSVLSLMELAHRGAAIRQAMQQRAAFRRRRRGQNLRHRTPRFDNRTRPEGWLPPSLRHRLDTTLGWVGRMRNWAPISDLAVERVKFDMQAIQNPEISGVKYQQGELAGYEVREYLLEKWGRCCAYCNAENTPLEIEHIVPRSAGGSDRVPNLTLACRPCNQRKGNQPVEVFLKARSELLARIKAKAKVPLRDAAAVNATRNALFRALLDTGLSVTTGTGAQTKFNRRCLGLPKTHALDAASVGEIRAIEHWQRPTLAIKATGRGEYQRTRLTAHGFPRGYLTRQKRHFGFQTGDQVRAEVPTGKKAGTHQGRVAVRKTGSFNIQTPDGVVQGIHHRHCTLIQRADGYAYSDTPTDSAQPQKEAARAGAR

SEQ ID NO: 2429 - protein, 425 aa, Moorena sp.
MVYVLNKNGQSLMPTNRHGKVKHLLKDGKAKVVKRCPFTIKLTYETTNYTQDLTLGVDTGSGTIGTAVSKDSGDIIYMSEIVVRNDITNKMSQRAKYRRNRRNRKTRYRQARWLNRRNSIRKDRFSPTMQSKLHSHVKEIEYIKSILPITTMVFETGQFDMHLMKNPMLANPKVKHWGYQKGTNYGFENTKAMVLNRDNYTCQYCKGKHKDSKLEVHHIIFRSQGGSDEDSNLITLCHTCHKNLHDGKIAPNFKGKAKGTLKYATQMNSIRKQLFRLYPEVIETFGYVTKANRLAIGIEKEHYYDACTIATQGKPFIVKTNLYKKKCISDGDFQKTKGIRSEQPIVTDKIYGFRKFDKVKYFGKEYFIKGRMSTGYAILMDIEGNKADFSTMPKGFKTPKMINLKRLEARSSWMVTIVEVTPNIA

SEQ ID NO: 2430 - protein, 424 aa, Ruminococcus sp.
MVYVLSKDGKPLMPCSNVIARLLLKQGKAKVRKRQPFTVKLNYETTNYTQNLTLGVDTGSGTFGTAVTRDNGEIVYLSEVTVRNDITDKMTQRAMYRRNRRSRKTRYRKARFLNRRNSIREGRFSPTMQSKLHSHVKEIEWIRSILPVRTMVFEAGQFDTHLMKNPAFADPKTRLWGYQKGPNYGYANTKAMVLNRDGYTCQYCHGKRKNSRLEVHHIQYRHMGGSDDSDNLITLCRSCHKDVHDGKITLPNVGKKKGTLKYATQMNSIRKQLSLAYPEAAETYGYVTKENAQLLGIEKRHCLDACVIATQGQPFTVKSLLYRKKCIPKGDFQQTKGVRSEQPVATGKIGGFQKFDKVRYLGKEYFIKGRMSSGYAILMDFEGKKADFSHMPRGQKTPKLSRMQRLETRSSWMTTAEAGIQNTA

SEQ ID NO: 2431 - protein, 415 aa, Bacillus cereus
MRVFVKNLRGEPLMPCSNRKARLLLKQGKAKIIGYTPFTIQLQYATGETVQSVAIGVDSGSKYVGIAITTEDKVLAKGTIELRQDVKENLTLRATLRRSRRQRKTRYRKARFLNRKKREGWLPPSIQSRMHNQIHWIEIFRSLLPSPKVIVEVGKFDAQKLKNSDIQGKEYQQGDAFGFWNTRYYVFTRDHYTCQICKKKGGILHTHHIIERCSGGSDMADNLVTVHEECHQKFHQGTIKHIFKKPKQYKETAFMNILRLQIMNRLGCEITYGSYTTPKRKELRLSKTHYNDAIAITTPTKLQEYEQSGEFRIKQFRKKKRSLHESTARKGRKTKNTTAKRNNKNTPKVHGIYLGDKVKVFGQVGFVTGFTGKMMYVQDIDGHYLQNPSKSYKQVKISDIECIHHNNNWLFLQIS

SEQ ID NO: 2432 - protein, 434 aa, Escherichia coli
MAVFVLDHHKKPLMPCSEKRARLLLERGRARVHRRVPFVIRLVDRKQPDCALQPLRLKIDAGSKVTGMALVQDKENSTVSAINLFELAHRGHAIRDALTARRAMRRRRRGNLRYRSPRFLNRKKDNGWLAPSLRHRIDTTMSWVNRFRRWTPLAAISSELVRFDMQSMTDSDIQGAEYQQGTLFGYEVREYLLEKWQRKCAYCDAVNTPLNIDHMEPRSRGGSNRVSNLVLSCIPCNQNKGVQSVTEFVKDKARLTRILAQIKRPLQDAAAVNATRWALANALKATGLPVELASGAKTKYNRTRLGLPKTHALDASCVGQVGYITRWERPVLRIKCTGRGSYQRTRLDKFGFPRGYLLRQKQVNGFQTGDMVRATVPESSKKAGCYTRRVAVRASGSFNIQTGDSVIQGISHKYCQLLQRADGFGYQLTKIAIN

SEQ ID NO: 2433 - protein, 470 aa, Ruminococcus sp.
MSVFVVGLNGCRLMPVSERKARLLLKGGKASVYRKVPFTIKLNYKTGSTVQPGYLGIDTGSQHIGVSVVQKDGTILHKEEIRLRDSMSKRKLLESRASSRRGRRYRKTRYRHPKWKPKTKRIYNEKADRKGRHWKKQKNTFTSKRQAGWLPPSLQSKTDHHIQWIRKLLDLLPEGYRLSIELGRFDPARMRDPEIHGELYQKGPQYDYENVRAYVLARDGYTCRVCKKKGGKLHVHHILYRSRGASDNPKYMAAVCSKCHTTENHLPGGILYQWMQDQKKFTRGLRDATFMNILKKRLRKAFPDAVFTYGNITKADREKLELPKSHGNDATAIALVKTEVKSVKDEEPVIHIQQVRRKKRSLHEETPRKGRKEPNRTASRSDKNTKSVTVAKGSGEKKASMTACLFDRVELDGKKGWITGFTGTSCYVKDKEDNYICTSSKYKQVSISRLRILHHCGNWAIGAEKPLGKG

SEQ ID NO: 2434 - protein, 457 aa, Ralstonia pickettii
MAVFVLDRHSRPLMPCSEKRARLLLERRRARVHRLMPFTIRLTDRRLNDCELQPLRLKLDPGSKETGVAIVRETIHDTDGTRTAIVLSLAEIVHRGRQISEALTARRSMRRARRGRKTRYRAPRFDNRSKPKGWLAPSLRHRVDTTAAWVRRFIELAPITALSMELVRFDMQAVENPEISGVEYQQGTLLGYEVKEYLLEKFGRICAYCDAPDRPLETEHIVAKANGGSNRISNLTLACRPCNEKKGKLPLEIFLCKDPERAKRILARAKAPLRDAAAVNATRFALLDALNSCGLSVETGSGGQTKYNRRRLEIPKSHALDAACVGEVHAVLDWQRSVLRIKCTGRGSYQRTRLTAHGFPRGYLMRNKRAFGFQTGDMVKAIVPTGKKTGTYVGRVAIRATGSFNIQTAAGAVQGISHKHCKVIQRGDGYGYQFVAQTTKESEKGATPRVAHYPSPA

SEQ ID NO: 2435 - protein, 431 aa, Klebsiella pneumoniae
MNRVFVLSKTGKTLMPCHPARARQLLHDKKAVIKRLYPFTIQLTHRSEEYIQPVELKFDPGSKQTGIGIVLHGKNRLSAIYGAVLTHRGNEIKNNLDSRRMIRRSRRNRKTRYRQVRFLNRVRSKHKGWLAPSVQSRVDNIVEWSKRFIRYVTVGFITVESVKFDMQKMENADVDGIEYQRGTLFDYEVKEYLLEKYNYSCVYCGAKNVPFEKEHVIPRSRGGSNRISNLVLSCRSCNEKKDNLPIEEYLKDNPALLKKIKAQLKSSLKDAAAVNITRKQIVKELENLNVPVLTGTGAETKYNRVSQGYKKEHYIDALCAGTTGTKVYIPSTLKPLLIKKERRNNRQMCLVDKYGFPRGKAKGSKIVHGFKTGDIVKAVVLKGKKKGTYKGKVAVRSSGSFNIKVKQGVVEGIGWKNCVMLYRFDGYSYAY

SEQ ID NO: 2436 - protein, 451 aa, Ruminococcus sp.
MSVAVISKTGERLMPTSEYRTRKLLKSGKAIKYSYHPFTIQLTERKTGNIQPIELCMDTGYIHIGISVKSEKHEYLTEQIDTLTDERSRHNARRMYRSQRRNRKRYRQPRFNNRKKDKGWIAPSLEHKKNIHVQAISRINNVMPLTDITMEMGNFDTQVLKAKEEGRPLPQGVDYQHGERYSIATLREAVFARDGYKCQCCGRTIKDGAILHVHHIKYRSQGGTNSISNLATVCDKCHTPKNHKPGGKLYGWKPKLPSFKGATFMTTIRWQLYNEAKALFPDIDIHITYGAATKERRRELNIDKSHINDAFVMGQFHPRHRIKAVLYKKKRRNNRCLEKFYDAKYIDSRDGKKRSGQELFNGRINRNHKKDSENLHQYRLQKVTAGKRTVRKQHYSVQPHDIIIYESRKRETTGCHCNGARVMLLPDKKSVSIKKIKIYRYAGGYFKSTFN

SEQ ID NO: 2437 - protein, 450 aa, Clostridioides difficile
MVYVINFEGKPLMPTTNAKARKLLKQKKATVKRVNPFIIQLLYKTDTEYIQTITLGIDSGYLNIGFSAITDSKELIVGEVKLLQGMKDRLLEKSQYRRIRRQRLRYRKPRWNNRKIKQGWLAPSLQHKLNTHLKFIDYLNSILPIRNIVIEVANFDIQKIKNPDISGVEYQQGEQMSFWNVREYVLHRDGHKCQNPNCKNKSKEQILEIHHIKYKSEGGSDAPSNLITLCNKCHTSPNHKKGKFLYDWCENGKKVRGFRDATFMSMIRWYLLEQLKEKYTNIKATYGYLTKNHRIEHGIEKSHFNDAFAIAKGVNQVRNLEIFKVEQSRLNNRSLEKFYDAKYIDNRTGEKVSASELNCGRRTRNKNLNSENLRVFRGQKISKGQRRIRKQKSLYQPNDLIKYDRNVYTVKGSQNEGKYIALKEIKKVPNVKLIKPYIFKKGLNWSHGLY

SEQ ID NO: 2438 - protein, 415 aa, Ruminococcus sp.
MENRIEYCFVVDKNNRPLTPTKVNKGWYLVRKSRAKLKSKYPMVIQLEKEVKSDEDDESHIVCGIDDGSAHVGLAIVQKCPTKNKVVFKGTIEQRQDVKHLMDVRRGHRRYHRYHKRYRQARFNNRSSSKRTCRLAPSIKQKKDAILRVLYQLNKWVNIQEYHLEDVCIDIRALTDDYKPYRWQYQKSNRLDENLRKATILRDECRCQEFGKSNCVLEVHHIRARKYGGADTIGNLITLCSGCHQKTEGRERDFEDRYFNMIKSKPKRFDYAMHVMQGKTYLREKISELGSLHLTNGGETANKRIEWNMEKSHGNDAICVTDCIPDNCDVKEWIIKPMRRKSKAKTNNLLGIRHRDLVSYTYKNGETHTGYVTALYPEQLVLNFQSKTKHCKKVNARKCRLLWKFNKIYWLEQCV

SEQ ID NO: 2439 - protein, 439 aa, Arcobacter butzleri
MVFVIDKQKNQLLPTTNAKARILLNANKAVIHKIYPFVIRLKTSKTINANNKCAIKLDPGANTTGVAIVDKEKCLFLMEIIHRGKEIRKALFQRKVVRRNRRQRNTRYRQARFQNRIKRNGWLAPSVKSRADNIINIVNKLSKYIPLTNVAIENVSFNTTDMTEGIKLYGKEYQNGNLKDTKLRKFLMEKYNNRCNYCGSIEKLEVEHILSKSKGGTDSIKNLTLSCRKCNELKNNLSLKQFGKLINRDLSHLEPLQTPKSAAIIQSARNYTIAQLAKSFEIETGEGWETSFNRKEVNLPKEHYYDALCVGKDYDYRIVANTVLVIKARGRGSRQMCLMDKYGFPRTSPKSSKSVKGFQTGDIIKAKVPDGKKQGKYFGKVAVRTNGYFNITTDTQTIQGIGHKHCKVIQRGDGYAYFMKGASGFLSGLEDRVSTAILR

SEQ ID NO: 2440 - protein, 460 aa, Moorena sp.
MNSPRIHRTFPSGRCSFSTSAASRSCLATPARARQLLGKGRARVHKLYPFTIRLTDRLAETSEIDGMAVKIDPGSKATGIAVTRTDENGDLHGLVAVEVRHRGGQISKKLTARGAYRRRRRSANLRYRAPRFNNRTKPKGWLAPSLQHRVDNVIAWVTRLRKLAPVTSIAMETVRFDTQLLQNPEVSGVEYQQGTLAEYELREYLLEKYHRACVYCDATGVPLNLDHLVPRAHGGSDRAANRVLACVACNQAKGASAVEQFVTDPNRLAKILADVKKPLRDAAGVNSTRNALLRGLEATGMPVEAGTGGRTKWNRHHFSVPKSHTLDGLCVGEVSGIAKVSRDVLIASSTGRGTYQRTLPDKFGFPRLHRSRIRQHHGFQTGDLVRATVPSGKKAGTHTGRVAVRATGSFNITTGEGTVQGVHHRHCRLLQRADGFSYQTGKETALLPALTDGVSAREER

SEQ ID NO: 2441 - protein, 594 aa, Ruminococcus sp.
MTNFKLRLYYKGNKNMNYMDFVLIVDKNNKPCIPIKNGKAGYLLREHKAEIINHEPLVIKRTDDYNSDLENRDIFELKVDSGYLNIGFSVSDNDHEYIAGQVKMLNGMSNRLLERKSMRSSRRNRLRYRKNKNIDYKTVHNPTYKNGNEDGWFAPSIVHKMETHIRIIEQLKQWVPIDKVIVEVANFDIAAMDAYLKDGTILNGKDYQNGEMKGYENVVSYVRARDNYSCYFCNKKKKKDGTLKEKPKRIEVHHKIPRSWGGTNNPGNLICVCQGCHQKIHSNNNNNKYFKELLEQALQENTFKDSTYMNIVRWELLNRLTEKYPELDIEAEYGYNTKLIEKKQVLRKFHYNDAVCVKEFKNTTLSKKVFIVEQKRCNDRKMENFADAKYIDSRDGKKKSGNDLKVIRHSTKSKRSTNKEHIDNERVFRKEKVSKGKIQFECHSYCVKPGDLIYIKEGKHKGKIAEVSTIQIVGGKIPNPIIDINEINNKKIDFNRELKKRKTISNMTDYQKSFAKYQIRFTYKESDADGPSITLTQKEYEKLKENKSDRVKIIRTRRGLVWREYDRLTYEAENMDQEEKKLEVKNKKQELKAA

SEQ ID NO: 2442 - protein, 555 aa, Moorena sp.
MYVRVIAKDGTPLMPTKRCGKVRHLLETGNAVAIKTRPFTIRLKYETTKYVQDLYGGIDTGRENIGSAVSKENGENVYLADTRSNNGSIHSQMYDRAGFRRERRRHDRQNKQRKAKHDHTEMQNGDKDKVRTTHDCISRKVSYPGAEEPVTHKVIQGKEGKFNNRKRPEGWITPSARQLVQVTMNEVKFMCDTMPIKQLSVERVSFDFQKLANVHIRKWQYSKGPLYGYNSYKDYIYDEQKGKCPFCGEELVHYHHMKPRHKRGTDTVQNIIGVCESCHEMIHCGEITDDMLHEAKDSVVRSFEVSLLNSVMPALIDAMKQFCDQRGIHLVVTDGKTTSDARDKYHIQKDHSTDAYCISLTGCDIDPANAKLDDHIFRKRRFKKKSKNIISARNQRVYYDGKEPVAYNRHRAMDQKTDSLEQYIAKFRLAHTSAEADKHFRSLTVKPARRTYTFHKNGTPAVIHAGDVVRYVKYNKTYGNTKTETFVALSCDMSGEGRVKYGNGNKAKKLKFCRTIAPGALQCVGVERTDVYLRATALEETKRKTVRAGRKKIAG

SEQ ID NO: 2443 - protein, 518 aa, unidentified
  REGION 1..518: note = Human gut metagenome
MANLKLIDTLLEKTEYIYVLGADGKPQMPTNRKVRVRSLFKSGLAKIVDTVPFTIRLLYENNAVLQPITLAEDPGRTNIGVAVLTQFGDLVFSAVVETRNKYIKKLMSDRKAHRQASRRGERKARQRLAKKHGSMIKSGMIMRKLPRYAADKFVTCKFIKNTEARFCNRKRIPDWLTPTVNHLVETHINIIRKISKYIPVTDIAVEVNRFAFMQMENPETTGIDFQNGPLKGFNDVKAALRVQQHGKCLMCKNDISDFHHIVPRSQGGSDNIQNQVGLCPKCHKKAHTNENFKQKLADKKVGLLKKYGALSALNQAVPFICKSLLEIYGKDHVHFCTGKDTSLIRTGLGYEKTKDNQMHEVDAYCIGLAAVGADIVNLPKFENIYKIKQFRRQDRSIINYQRERTYYLDGKKIATNRKPRFEQKKDAFSDWYSKRVKSDGKEQADKLTGRVTVKKSIRGYNSKNRLMPGTIFYYNGKRLVLTGQLTGGKYYRAYGDSKTNYPAAKCQVYKQNEGLVFV

SEQ ID NO: 2444 - protein, 512 aa, unidentified
  REGION 1..512: note = Human gut metagenome
MSTIYVLNKDGKPLMPTTRGGHVRHLLKEQKARVVQSNPFTIQLLYETNDVVQPLYLGIDPGRTNIGFAVVKADGTAVFAAHLETRNKKIPKLMQDRKKARRARRTNGRRCRRQRRAKANGTISKKCVKQDTAQSKNPSKRAKEIGVIKRHLPGCKKDVLCVGIKNKEAKYTNRARLEGWLTPTANQLLQTHINLVKKIQKFLPISDVVLEVNKFAFMRLDNPNIQKWQYQRGPLYQKGSLENAVSEMQEHHCLFCEKPIEHYHHVVPKSENGSNTIANIVGLCAEHHNLVHKDVAWQEKLVEEKTGLNKKYGALSVLNQIIPALTKELSFLFPKHSFMTNGKSTHDYRAAHGISKDHWLDAYCIACSVLPIDVCDSTINNCVPYELKQFRRHDRRALNNENMNRVYTLNDKVVATNRHKATEQEAASLEEFRKEHPNDVCKLKVKEHHPTYRNMNRNYPGSVFLVGKQIHVMQGIASSKDGKATKYNDTRATTIAAGKCKFVAKNSGILFV

SEQ ID NO: 2445 - protein, 511 aa, unidentified; identical to SEQ ID NO: 2273
  REGION 1..511: note = Human gut metagenome

SEQ ID NO: 2446 - protein, 507 aa, unidentified
  REGION 1..507: note = Human gut metagenome
MPEYIYVVGIDGKPQMPTRRRRHVNKLLNTGKARIAEHVPFTIQLLYKNEPVLQQIIMAEDPGRTNIGAAVVGLKGQLYLPAVVETRNKEIRKLMDKRRACRRASRNGERKARQRRAKRFGTMLKAGMLMRKLPQYGEDGFITCHVIRNTEARFCNRKHPKDWVTPTVEHLIRTHINLVHKMQKFLPITDVAIEVNRFAFMLLDDPTVAGVDFQKGPLKGYSNVNDAVFDQQDGKCLLCGQPIEHYHHIIPKSKGGSNTLENIAGLCCNCHDTAHKNEDVQKALKDKKSGLMKKYAALSALNQAIPFIYKRLVEEFGKEHVFTCTGRETALVRKSLGYTKTKKNQLHEVDAYCIALLALGCTDAVLPTFEHVYQMKQFRRQNRANINNQRERSYYYEGRLVAKNRKDRIEQKDDSLETWYQKIVQQYGEKEAERRRSVLQVKKSTRHYNTPGRVAPGAVFYCNGERHVLNGQITNGQYFKAVGDAKTNYPAKKCRIVKQNEGLVFLG

SEQ ID NO: 2447 - protein, 507 aa, unidentified
  REGION 1..507: note = Human gut metagenome
MPEYIYVLGMDGKPQMPTTRRRHVQKLLDTGKARIAERVPFTIQLLYDNDPVLQPVTLAEDPGRTNIGLAVLDLKGELLLSAVVETRNKEIAKLMEKRRQCRRASRNGERKARQRLSKKYGTMIKAGMVMRKLPLYKADKFITCKFIRNTEARFCNRKRKDGWLTPSARHLVQTHINLIHKIRKYLPVTDIAFEVNRFAFMQLENPSVSGVDFQNGPLKGYDDRDAAVYDLQDGKCLMCRHGITQYHHIVPRSRNGSNTIGNIAGLCDTCHDKVHKDADFAKQLKDKKEGLDKKYGALSVLNQAIPFICQKLEAEFGKEHVHYCTGRETSLVRRSIGYHKTKKDQFHEVDAWCIGALALNWIPERAPDFTEVHLVRQFRRQDRSLIKAQTERVYKLDGKTVAKNRKKRTGQKTDSLEDWYNKQVESYGKPKADQLRSRLTVEKSQRRYNDPFRIRPGTVFLYKGKRYVLSGQLTGGRYFRAVGDMKTNYPAAKCRILKQNEGLVFIS

SEQ ID NO: 2448 - protein, 498 aa, unidentified
  REGION 1..498: note = Human gut metagenome
MAVVYVLSASGEPLMPTTRCGHVRMLLKEKKARVVERNPFTIQLAYETEGVTQPLYLGIDPGRTNIGAAVIREDGECMFTAQLTTRNKDIPKLMKARKQYRMAHRRLKRRCKRQRRAKAAGTISPQKEIQRLLPGCEEPIICKGIRNKEARFNNRKRPAGWLTPTANHLLQAHINLVKKLKKFLPITGVVLELNQFAFMAMENPRIQRWQYQRGPLFGKGSVEEAVYAAQDGHCLFCEKGIDHYHHVVPRRKNGSETLENRVGLCEEHHRLVHTEDAWTKKMAAMKAGMNKKYHALSVLNQIIPSLTERLAELFPQHAFVTTGQNTYHFRVDHDIPKDHYLDAYCIACSVLSNAQKVSPPKREPYDIRQFRRHDRQACHKANITRKYYDADGKLVAANRHKAMEQKSDSLVEYRENHSDVEVSQLRVKPHFPQYKEMSRPMPGSLLATNGGNIFTLMRSDGKHYGKADYFVDTQGIKHLAKRCILLQNNQGIIFAEIG

SEQ ID NO: 2449 - protein, 489 aa, unidentified
  REGION 1..489: note = Mouse gut metagenome
MPVYVISSTGKPLMPSRRFVHVRLLLKEGKAKVVKTKPFTIQLLYESTEYTQPLYGGTDPGRTNIGEAVLDQCGTVQYAAHVESRNKDIPKLMENRAAHRSASRRGERKRRQRRAVANGTITFPLQKQRILPGCQKPITNKFIINSEAKFLNRKRPANWLTPTTNQLVQTHLNMVKKICSILPVTDWTLEINKFAFMLMEDGTIRGVDFQNGRMKGYPDVEAYIYAIQDGKCPFCGKTIEHYHHIKPRSEGGSNRPENLVGLCSDCHARIHKGDTEMAGLIDKLGEQKKYAALSVLNQAIPYIYQGLVEIFGEEHTHICYGWQTKEMYTKLKIPKTHSNDAICIAALGSGVVPPIQMTNPYEVKQCRRHNRAIVKAQRERTYKLFGETVAKNRHPRFKQEGPSLEDFVESIPAAYRQQVISVLKVTPSKRYYNTMDRDLPGTVFYYQGHRYVKSGQSSGGKDLRAYGMGSKNFPSAKVSIVPSGGVVYL

SEQ ID NO: 2450 - protein, 494 aa, unidentified
  REGION 1..494: note = Human gut metagenome
MAMVYVQNKDGKPLMPTTRYCYVRLLLKENKARVVSTTPFTIQLNYDTPDITQDLILGIDPGRTNIGVAVVKEDGQCVFSAHLETRNKDVPLLMQKRAGFRKQHRTLDRRRKRQRRAKVAGTTVEGETIERLLPGYEKPVVCHYIRNKEARFNNRSRPAGWLTPTANHLLQTHINLIAKVAKFLPITKVVVELNRFAFMAMDNPNIRRWEYQQGPLYGLGSVEDAVYAQQDGRCLFCKKPIDHYHHVVPRHKGGSETLANRCGLCREHHALVHTDKVWADKLVTRKEGVNKKYHALSVLNQIIPHLMEYLGSETRYDVYATDGRSTKGFRVAKNVPKEHYTDAYCIACSILDTDIEVSTPVEPFELKQFRRHDRQSCHQQRVDRKYYLNGKQVATNRHKAIEQKSDSLQEFRESYGDTAVSQLAVKPHSPQYKDMTRIMQGAVMDFGGTVGVFQGSDGFHNGKPDYYKSAKGARVLTKRCVLLAQNTGIVFIPA

SEQ ID NO: 2451 - protein, 496 aa, unidentified; identical to SEQ ID NO: 2063
  REGION 1..496: note = metagenome

SEQ ID NO: 2452 - protein, 568 aa, unidentified
  REGION 1..568: note = Erysipelotrichaceae bacterium SG0102
MSGKKNKSNHYIYVVDRHGNPVMPSRRPGRIRHLLKEGKAVPISTHPFVVKLKYDIPGRTQPIHLGIDTGRENIGVGASLENGENVFLSDVETKNKAVTKAMSDRRAYRMSRRRHRREKKQRHAHAKKSEMKNGRPAVKGERHTRKTVGRDIRYPGCKNPVTHKVIKGKEARIANRRRDEGWQTPSARQLIQTHMRIVRNVMKFLPVTHITIEMVSFDFQKLANVEIKNWEYSDGPLHGFKSPADYVWARQNGKCYFCDKKIAICHHAMHRAKGGSDRVGNLVGLCPECHQKLHSDRDMDKRLQEEFGTPKTCISVLNSAMPEIDRQMRALCDARGIVYDTCTGFDTYEARKRYGIPKDHCTDGYAISLYGRNANNVCLTDSVCMMRRFRKKSGSIIQKLNQRVYKLKGKVVAVNRHKRTDQKEPALDDYMSRYAQKHSEAECRRHFHELKIIPARRTYTYRKQKLVSPVHIGDTVRYEKRNKTSGITKKAVFVAEEIDMFNGKVKYGDQSGRYGKKSPLMKYCRPIKAGSLKFIRTIRLADCLSMARKEAEVRRKKQLKKPKNLVID

SEQ ID NO: 2453 - protein, 671 aa, unidentified
  REGION 1..671: note = Human gut metagenome
MKPWITTRILQASVREDARKCRKETIMVAVLSNTDVALMPTSSCRARILLRSKRAEIVGYHPFTIRLLDRETGNTQPIEYKSDTGSVYVRVSICSEKHEYISEERILLDDEKKKHDNCRTLRRTRRNLLRYRKPRFDNREKAKGWIAPTLQNKLDRQLDIFHAYKKVMPITSATFEVGKFDIQLLAAMESGKPVPEGKDYQQGARYQQETLRQAVFFRDSFTCQVCQKGVKDGVILRMHHIGFRKNDHSDRMANLLTVCTTCHSSKNHNPGGELWDLKPEIKPLHDAAFMNTIRWKLIDTLKETHPDVELHFTYGARTKCTRRTMHIGKSHANDAYCIGEFHPKHRCDTVYYQKQRRNNRVLEKFYDAVYLDLRTGEDEKAAALGSGRTKRNTHLAYKDQRPYRGRKVSSGHRSITRKRSPYKKGDILRVQKEYTVKEPDQNGKLQKVIKVMDVTAKLASSHSKVDSKTLKAFRTGKIKKIPKSAVMMAYDFTEPLPNGRQSCDGKHVKAVKTTKIQAWKRISKPELKKRRLTPNDKEQTRRIPRTTYKGGGTLRHDNGKTVFRIPYIQIKNKGFKIASQISRSSVPDRPHPYRIFLPVAICKRRLYAWAARYAGTRFLKCHDRWLYAADVLICTFHQPIHYGIHYHAAYDRGISEYRGNAKGRKDRTGPF

SEQ ID NO: 2454 - protein, 537 aa, unidentified
  REGION 1..537: note = Human gut metagenome
MQYVYVVDKHGKALMPTTRYRHVRKLLKSGKAVAICNKPFTIRLKYESSTYTQDLWEGIDTGRQNIGDAVSNEKGENVYLADVRTNNKSIKSNMQDRAGFRRERRRHDRQSKQRKAKHDGTEIQNGDDDTVRTKHSCKSIKISYPTADEPVIHKVIRGKEGKFANRKRPEGWITPSARQVIQITMNEIRQTARILPVNHINLERVSFDFQKLENQDIRRWEYGKGALYGYKTYKDYIWDEQHGKCACCGKPITQYHHIIHRAEGGIDSVKNIIGLCNGCHNKIHASKDAEDKLKELKEGVRQRYYVGLLNSVIPALIEEVSAYCDEHGIEFTVTDGKTTAETREKYGLSKDHCTDAYAISLADRDVKSVSVSDRIYEKRRFKKKSGNIIAKRNQRVYKFDGKIIAYNRHKATNQKDDSFEEYMTKYAETHTDKECRQHVAQIEIIPAKRTYTYHKQGLVAPCHAGDIVRYEKHNKIKGNTKKDTFVATSVEMNGEGHIKYGDACGSRKIKFCRPIDSGCLQAVHNYQADEYLRKIAE

SEQ ID NO: 2455 - protein, 536 aa, unidentified
  REGION 1..536: note = Human gut metagenome
MKYVYIIDKHGKPLMPTTRFGHIRKLMKSGKAVPISNNPFTIRLKYDTTSYTQDLWEGIDTGRQNIGDAVSDKDGKNVYLADVCTNNKSIKSNMQDRAGFRRERRRHDRQSKQRKAKHDGTEIKNGDDDTIRTKYFCKSVKISYPAADEAVTHKVIRGKEGKFANRKRPDGWMTPSAKQVIQITINEIKQTAKILPITHINLERVSFDFQKLENQDIRKWEYGKGILYGYKTYKDYIWDKQHGKCACCGQPITQYHHIIHRAEGGIDNVKNIIGLCDACHDEIHGSQDAEDKLKELKEGVRQRYYIGLLNSVIPALIEEISAYCKKNGIEFMVTDGKMTADTRKEHGLQKDHCTDAYAISLAGRNITTVSVSDTIYEKRRFKKKSCNIIAARNQRVYKFCGKIIAYNRHKATNQKTDSFEEYMAKYTKTHTEKECRQHVAKIEIIPAKRTYTYHKNGLIAPMHTGDIVRYEKHNKIKRNTKFETFVATSVKMSGEGHIKYGDKCNSKKIKFCRPIGSGCLQVIHALCTEEYLKSLA

SEQ ID NO: 2456 - protein, 515 aa, Moorena sp.
MTTLEERLSKTEYIYVLGFDGKPQMPTRRKRHVLKLLKTGRARIAEDIPFTIRLTYRNAPVLQPVTLAEDPGRTNIGAAVLSPLGDLLFAAVIETRNKEIKKLMADRKKSRQASRRGERKARQRLAKRYGSMLKSGMIMRKLPMYAADKFVACKFIRNTQARFCNRKRCTDWITPTVQHLVQTHLNIIRKISRYLPVTDIAIEVNRFAFMHMENPKAVGVDFQNGPLKGYDDVKEAIRTQQHGKCLMCKKPIAHFHHIVPRSRGGSDTIQNLAGLCTEFHTKVHTDTAFRKDFDEKKSGQLKKYGALSALNQAVPFICKKLLEEYGEEHVHFCRGLDTSLIRTALGFEKTKKNQMHEVNAYCIGLAALEVNEVAAPAFDHTFQIRQFRRQDRSIIHHQTGRSYYQGKEKVAQNRKPGFEQKTTALSQWYKEQVRIHGEKEAEKLRSQLRVEKSCRHYNDMDRFLPGAVFLYEGKRYVLSGRITNGKYLRACGQGMKNFPAAECTFIRHNAGLVFI

SEQ ID NO: 2457 - protein, 544 aa, Moorena sp.
MKQKKQKVIVYILNKKGKPLMPTTRCGHVRKLLDSKKAVVVNSNPFTIRLKYDTPNGVQDVFAGIDSGRENIGSGVSNEDGDCLYLGELRTSNKSIKMKMNERAGFRRERRKHDRQNKQRKARKDHTEIQNGKADICRATISCKSVQISYPTAEESVTHKIIRGKEGKFANRHRDGDWITPSARQLVQIHMNDLKSICKILPISHVTLERVAFDFQKLENENIKAWEYGKGKLYGYDSPEEYIHDVQDGKCLVCGKPHIDYLHHIIPRSKGGSDKVSNIAGLCYDCHYGPMGVHNCQDTQDRLPELKNEANKQYKVSLLNSVMPVLIEEIDKFCKANSIMFSICEGHDTAKVRDMYDLQKDHCLDGFAISLVGRNVKSVDVMPDRIHQKQRYKKKSKNIIQKRNCREYYDGKKLVAINRHKGTDQKADSLEEYMNTYAETHTADECKMHFESLTVKPARRIYTFHKEGRICPLHIGDKVRYEKKNKIKGNTKVDTFICEGIYFSKDENKAKVEHNKTKSKKMKFCRAIESGCIPYIDYIKFALI

SEQ ID NO: 2458 - protein, 457 aa, Lactobacillus salivarius
MSKSQIKKLIYVVDSNGKSLMPTTRNRKVRHWLATGQAHWFGNSRKTIQFTRPVNQHIQPVTVGVDLGRHTGISAVDQSNNREYYSAQVERPYVQEVKRNKQRKMYRTQKRHRLRHRQSRFDNRRKPNGWLAPTIQHQLDFIDYEIQRVSQFLPVDKIVLEDQPFDIRKLTNDNQRPADYTKGPQSGFASLKAYLYASQNGIDPIDGQHYLLSDMVVHHLLPRSQGGTNSPHNLVLISKEHHNNANHRNGVLKHLAQQLRDCLDTRGAYLMNILYNRLPEQLSNIAPVVFTAGYITAQNRKTYGINKSHINDALVIAGGNAQTIRLAPSIKRVKLRRNNRSLAKFYDAKYEDLRDGQIKSGQELSSGRTSRSREYHYDNQRIYRARKIKKGRTSIRKNHYQLRPHDLIKYQNHIYEVNGVHNNGHRVLLFINCKKKSVAISKVTCIKHVNGILETIL

SEQ ID NO: 2459 - protein, 466 aa, unidentified
  REGION 1..466: note = Human gut metagenome
MSTCACVLSKSGERLMPTIRLGKVRHLLKDGKAKIIKHHPFTIQLLYDSETNIQPIEICEDVGYNYIGISVKSESHEYVSVQYDTLQDEKDCHDSCRKMRRIRRNRLRYRKPRFDNRKRNKDWLAPSLEHKKELNVNVIKMYCEVVPITHVTVEVGSFDTMLVKAIQEGKAIPEGADYQKGPRYNLATLREAVFYRDNYTCKVCGRKAKNDSAILHVHHMFYWKGRHGNSLNELLTVCEKCHTPANHQKGSKLYGFGENIKFANLSGAAFMNTVRWQIVNELYATFGKLFVTFTYGAMTKEKRIALHLEKCHNNDAYAMGNFHPVDRCAFEHYKKVKRNNRILEKFHDSQYIDIRTGKVANGRSLFNGRINRSHKKDSENLHKYRGKRTRKGYRALRRKKVALNPGDLVSLNGEILVVHSTHAGKNGYVGVEFKTPSKSGKKSASLKKLKIVKTSNSMHSAWTKVS

SEQ ID NO: 2460 - protein, 437 aa, Moorena sp.
MNTILVLSSIKIPLMPSHPARARQLIQSGKAKVYRHNPFTIILTERNQGNIQPIECKIDPGSQTTGMALVVQGKKQTKALLGIHLKHRGKHITQALKKRSVSRKFRRSRKTRYRPPRFLNRTRPIGWLPPSINSRLNNITNWVRKLKVWAPLSSIEVENVKFDIQKLQNPEIQGIEYQQGTLMGYEVREYILEKFHKTCAYCGQTKGRLEIDHIIPKSKGGSNRMSNLTLACQRCNQKKGNQSLTEFVKNKQKLEKIKAQCRTSFKDAAIVNSMRKALVSTLKKFHLPVYCWSSGLTKYNRVRQNYEKHHWIDAACVGNSGSNVCLPRNSSVLTITAMGRGNRKKCQMNKYGFPKSKPKQAKRVHGLDTGDWVKIRALSPEQNANRNEKNQITRPVYGRVTVRATGNFAVTPKNGKQVSIMYKYCFLLQKNDGYNYT

SEQ ID NO: 2461 - protein, 457 aa, unidentified; identical to SEQ ID NO: 2055
  REGION 1..457: note = Delaware Bay aquatic sample metagenome

SEQ ID NO: 2462 - DNA, 322 bp, Ktedonobacter racemifer; identical to SEQ ID NO: 2060
  source 1..322: mol_type = other DNA

SEQ ID NO: 2463 - DNA, 249 bp, Ktedonobacter racemifer
  source 1..249: mol_type = other DNA
gtcaggaaccccatgcctaaaggcaggggcttgcgtaagtaagcctggacctgaccagtctcagccagagcagacttgatggatagaatcatcaaggctatcgggctacgttaggaacgaaataggtacgttggggtgctttgccgctacggtacagcattaaacatccctagagggttaaggacgtgtgttgtacgtaaaaccgtttgctaacattgacgaggcacacattaccctggaagacaggag

SEQ ID NO: 2464 - DNA, 289 bp, Ktedonobacter racemifer
  source 1..289: mol_type = other DNA
gtcaatgaccgccggtcggagaccggaggcttgggagagcctggctcttgcaagccgattgaccagaccaggttcttgagagagcgttgccgagcttctctgcgtcaccgctcccgctgagagaacgtcgatgcttccaagtgttcaagatcgtactggcgggtgctgccccagcctgccaccctacaacggcttctttaaaacaggtgatgaggtcagtcccagtgagaagccgaaagtaccgagaggcatcatggtcgaggggaagagaatactccgaaaggaagtt

SEQ ID NO: 2465 - DNA, 345 bp, Ktedonobacter racemifer
  source 1..345: mol_type = other DNA
gtgaactaccacagaaccacgtcttcagtgacttccgaagaagccactgaagacgtggttctgtagcttcttcgggagcctgagttcaccagactcgtttccagaaatgggaacggcgttcgattggtcatgacacctgcggttgacgcatcagaccgctgctctgtcgctgagagttaagtaggcttgaggtaagggctggtgctctcggcgtaaaaagcctcttgaacattgtcgagatgaagccggattctcctggtggtcactacctgaaggtggcacggcagccaggagatacgcaccacctgctggcaacagcagagcatttttccgaaaggaacattg

SEQ ID NO: 2466 - DNA, 332 bp, Ktedonobacter racemifer
  source 1..332: mol_type = other DNA
gtcagcgaccccaccggtaaaccggggggcttgtgggagactaccctgagtggtcttggctgcgagccccgatgctgaccagcccccggtgtgctcgcacaccggagccgttcagaaggagcgcgaaaaagcagaccctggagtggcttttccagctcccggctctttaattgctcagttaaacaggttgatggggtgtccaaagccagtgctgagcaaagatcgccgcttctgacacccgggcgaggaaaacattaccgttcgtgtgtgctggacaggaaggcgcacaccaacgcgatgcctcattacgaggcccccgcaaggggagaaca

SEQ ID NO: 2467 - DNA, 323 bp, Ktedonobacter racemifer
  source 1..323: mol_type = other DNA
gtgaactaccactgagctgaagacgcagcggcttcttcggaaatcgtcgggtctgcggtttgggagctttttaggaagctcaagttcaccagactcctcatcagaaatgatgagaccgtttgaaaggtcatgacacctgcggttgacgcatcagaccgctgctctgtcgcctgggtttaagtagggctgaggaaaggcccggtgatccaggtgcaaaaagccttttgaacactgtcgagatgaggtcggattccctgcatggtcacagtgcagggatacgcatcacccggcgcttgccggagtatttttccgaaaggaatcgt

SEQ ID NO: 2468 - DNA, 273 bp, Lactobacillus equi
  source 1..273: mol_type = other DNA
gtcaacagacccgttattaaaataacgggcttgcaatgtaaattgtaagcatggttgattagcctcagtattaagttactacgttaccactgaaattaggtactccgggatgccaccctagtctcggactctacgcttgcttattaaacagggctgaggtcaggcccagtgtaagtgagatttaaaaccagtggctaacattggcgaagggtacacacgcattgctcttcggggataatgcgacttataacccattaaagaaaggggtgggcc

SEQ ID NO: 2469 - DNA, 291 bp, Petrotoga olearia
  source 1..291: mol_type = other DNA
gtcaactacccccatctaaagatggtggcttgtaaaagtcatagttgattagcctcagccagggttgtaagaccatccggctacgttatatcggaatgggttatccttaagaggcgaaagcccgtttaacctaaataggcactctagggatgctccacaagttccagactctgcggtcagtgattaaacatctctgaggggtaggagaagtgttgctgacaacaaacccgatataacattggcgatgtggacttaccgctgtgaagcggatttatttccgaaaggagattt

SEQ ID NO: 2470 - DNA, 285 bp, Petrotoga olearia
  source 1..285: mol_type = other DNA
gtcaactaccctcgtctaaagacggagacaaaaagtctcggagttgaccagcctaagttccaagacagcctcacggcggataagagagacagccttacggcaaagttggagaactacgttattctggtcatgacaccttggaatgcccgagccagttccaagctctgtcgttcaacattaaacaggcatacggggttgaagtcagtgtgttgaatgtaaaaaagccagaataacattggcgaggctcacattaccctgatagggagaaaggaaggtaacttccgt

SEQ ID NO: 2471 - DNA, 262 bp, Petrotoga miotherma
  source 1..262: mol_type = other DNA
gtcaactaccccggtctaaagacgatggcttgtaaaagccaaggttgactagcatgagtctgaaaacagccttacggcaaagttgaaagactacgttattttagttatcacaccctcggatgatgccctagtccgttgctctgtgtaggctccgtaaacagtcctgtgaggtagggacagtcgacctaaggaagtcctggcattccaggcaagctaaaataacatttgcgaagggcaactactccgataaggaggaatactt

SEQ ID NO: 2472 - DNA, 294 bp, Lactobacillus composti
  source 1..294: mol_type = other DNA
gtcaaccgtgacccctcactaaagtaaggggcttgaagtgcctacttcaagtctggttgtctagacttagcgtcttttggacactacgttatcttggtgatcacacttggaaatgataccctagttcccagctctgtgcgggcgctgtaaacagtcctaaggtcaatgggaccgtcaacccgtgagaaagctgctgctcgtcagcagctaagccttgataacattgtcgaagggtaacctcacgaactcaagtctgatgaacttgacgccgtggtcaggtcattttacctgacg

SEQ ID NO: 2473 - DNA, 308 bp, Lactobacillus equicursoris
  source 1..308: mol_type = other DNA
gtcaatggtaaccccttactgaagtaaggggcttgaagcgcaagcttcaggcctcttatctttagcagggaagctggagaaattcggctttcattgtctagactaagctatccagtcggcttcggctgactgaatagagaaactacgttatccatgtcatcacacccaaggatgatgcccaagtccttggctctgtggcagctctgtaaacagtcatgaggttaacgtgacagtcaactgcgcccacaagcatggataacattgtcgatgggcaacaacgcaaatccaaattgggtctcctggtttgg

SEQ ID NO: 2474 - DNA, 300 bp, Caldicellulosiruptor bescii
  source 1..300: mol_type = other DNA
gtcaactacccccgcctgtagaggcggagacttgaagggcctcgtggttgaccagcctgagggactgacccgaaggacaagggaatgaagtccctacgttatccctgcctagggcactctggagtgcgtcccaagctccagaccctgccgtgcagacttaaacagtcctgtcggggtagggacagtggtctgcacacagcaaagtagggataacattggcgatggaagatgcaggtgtagtccaacctgcacgtcacccagcagaatcaaatcctgctggagaagggaggagaactccaa

SEQ ID NO: 2475 - DNA, 260 bp, Caldicellulosiruptor bescii
  source 1..260: mol_type = other DNA
gtcaactaccacccccctgaagaggcggtggcttgctggcaagggtggactgccggtgagtctgcctgctggcaggtagttgaacgtgggtgatgctgtagcagaacctgacgttccgggacgacactcccagttccgggagacagcggtgcaatcccgcagccttacacagggtgctacagcacgcctcagggagacctaccaccttccttttggaaggtgcccagatcatagggctcctgaacaaggagggaaagaat

SEQ ID NO: 2476 - DNA, 344 bp, Streptosporangium roseum
  source 1..344: mol_type = other DNA
gtcaacgaccacctcttgaaggagagggcttgaggtgccgcaccgcgcgctgacggccccgcgttgaccagcccaagtcgatcatcttgaaggaggtgcattcgattgactacgtttcacgtaggtcagcagacccaccagtccgtgcttcctcagcgggctgctctggaattcgcgtcagcagacacgcccgagggtgggcacgaaacgggacgcggacaccgcctcagcacggtaaccggtgtggaacatgggcgaggggagatcgcaccggatggcacccgtctgctgcgacgtcaccccgaagacacttcggtgtccgagggagcggaccgtgaggttca

SEQ ID NO: 2477 - DNA, 287 bp, Allochromatium vinosum
  source 1..287: mol_type = other DNA
gtcaactacccccgcctgaaggcgggggcttgtgaggcgactcacgagccgggttgaccagggacagcggtgaacatccgctgcgtttgcaacaggtcgttgagacccactccgggatgcttcctcagtcccggaccctggaaggtcggagtcatgcaggcgaaaggcaaagcgccgaaggttccgatcgccgccgcgaggcgggagccggttgcagacattcccgaggggagcgagccgcaaggctccgtcaccaggcccgtaagggcagacgtttggaacagacc

SEQ ID NO: 2478 - DNA, 246 bp, Anoxybacillus amylolyticus
  source 1..246: mol_type = other DNA
gtcaactacccaccacttaaagccttgggcttttgaagtgggggcttgtaaaaagccctagttgactatcccaagtctttcgaggactacgttggttgggtcatgacacctacgaatgctcctctagttcgtagccactgtcgttgatggttaaaagtcctgatgggtagggacggtgctgtcaacatcacaagcccttccaacatgggggaagaggaagaacactccgagaaaggaggtacacgc

SEQ ID NO: 2479 - DNA, 291 bp, Paraburkholderia hospita
  source 1..291: mol_type = other DNA
ggcaaccaccccgccctaaaaaagggcggagcttgaagcggtgaatcaagctcgggttgaccagaccgagcgccgcgaggcgctacgttgcgcagaagatagcagacccaccctgacgtgcttcctcagcgtcaggctctggaaggggcggttgcagacaagcgaccgggtaagcacgaaacggatcgtccccgtcagttctatcactgacacctgctgcgcaacatggtcgaggggagacttcccgcaaggggagcgtcaccaggcccgtaagggcaacgttttttaagg

SEQ ID NO: 2480 - DNA, 321 bp, Paraburkholderia hospita
  source 1..321: mol_type = other DNA
gtcaatcaccccggcctgataggccgaggcttgcggggaagcatcctgcaagtctgggattgaccagacccagcgctggacggcgctacgttgtgcagaagacagcagacccaccgccagatgcttcactcagtctggcgctctggaagtcgcagcagcagacaagccccgggtaggtacgaaacgggctgcgaccggtgaactcaccctcaccctctgctgcacaacatggtcgaggggagcggcgccgcaaggcgcccgtcaccaggcccgtaagggcaacgcgccggacgttttccggcggcataacaaggagcttgg

SEQ ID NO: 2481 - DNA, 261 bp, Methanobrevibacter millerae
  source 1..261: mol_type = other DNA
ttaaactaccacggcttatagaagccgtagatttctagaattttctgggaatctacaagtttaatagactcagaccattaaatcgtggtctacgttacccaagaatatcataggtaccgtggaatgtttaatcccagttccacgctctacggtaagtgattaaacaagttctgtgatggtaggaacagtgttgcttacaatctaaaaccttgggataactttgtcgagggataaaataactcaggaataggaggtaaacat

SEQ ID NO: 2482 - DNA, 257 bp, Eubacterium oxidoreducens
  source 1..257: mol_type = other DNA
gtcaactaccacgcacctaaaggtacgtggcttgtaaaagccacaagttgactagcctaagttctttgagaactacgttacccacaaatatatagttaccttggaatgtttagcctagttccaagctctaaggtatgtgattaaacaatcctgtgtggtagggatagtgttgcatacataaaactgtgggataacattggcgaaggctttctaaccactcttcggagtgggtaattaaattattgaaaggagcatag

SEQ ID NO: 2483 - DNA, 223 bp, Fervidobacterium changbaicum
  source 1..223: mol_type = other DNA
gtcaaccacccaccactgaagtggcgggcttggaaaaagccctggttgactaccctcagcctttcggctacgttaggctggtcacggcaccatggaatgctgctcaagttccatgccctgccgtctgccactaaacagtcctaatgggtagggacagtgtggcagacacgacaagccagcctaactttggggatgagcacctaactccgataggaggcttacc

SEQ ID NO: 2484 - DNA, 292 bp, Fervidobacterium changbaicum
  source 1..292: mol_type = other DNA
gtcaactacctccgactgaagtcgagggctagtaaaagccttagttgaccagcctgagcactggacccgaaggacaaggggacgaaggtgctacgttggtagtaggctcaagacccactccgggatgcttctccagtcccggaccctggaagtgctggttgcagacaacctttggggtgtgggcgaaacggaccagcacacgtgccggctaccaacattggcgaggagagtgctaaagtgagtccgctttagcacgtcacaaggcccgtaagggcattttcatggagtgaga

SEQ ID NO: 2485 - DNA, 292 bp, Allochromatium warmingii
  source 1..292: mol_type = other DNA
gtcaacgaacccccgccttatggcaggggcttgtgaggtgactcgcaagccacgttgaccagggaaagcggtaaccaacccgctccgtttacaataggtcgtcaagactcaccggcggatgcttcctcagtccgccgctctgaaaggtcaggattaggctggcgcaaggtaaaacgccgaaggttctgatcgccgctgcgaagcgggagccggttgtagacagtcccgaggggagcgaagcctttgggcttccgttactaggcccgtaagggcagatgtttgagtgtgaata

SEQ ID NO: 2486 - DNA, 241 bp, Caldicoprobacter faecalis
  source 1..241: mol_type = other DNA
gtcaactacccaccacttaaagaagcgggggcttgtaaagagccctggttgactagcctcagccaccagcaaaaagttgacggggctacgttagacaggtcatgacaccccggggtgctgctcaagctccgggctctgtcgtacaggtctaaacagtcctgaggggtagggacagtgacctgtgcatgacaagcctgtctaacattggcgatgagcacctaactccgcaaggaggcttacc

SEQ ID NO: 2487 - DNA, 240 bp, Halolactibacillus miurensis
  source 1..240: mol_type = other DNA
gtcaattacccaccacttaaacgctaacgcgttttgaagtggggcttgcaaaagctctaattgtctagcctaagtctttcgaggactacgttagaaaagtgaatacggctttgtatgattccctagtacattttgtcgttcaggcgctgtaacaactctgagaggtaggagtggtcaacctgttgcacgaagcttttctaacattggcgaagggaaactaaccctaaaaggagggcgaat

SEQ ID NO: 2488 - DNA, 263 bp, Alicyclobacillus macrosporangiidus
  source 1..263: mol_type = other DNA
gtcaaccaccccacggctaaagccggggacttacgatgagtaagcccggggttgaccagcccgcacgaaggcgacggccttcgcgcagccgttatcccggtcatggcaccctggggtgcgaggccagctccaggccctgccgtccggcattaaacaggcatacggggttgaagccagtgtgccggacatcacaagccgaggtaaccgggcgaggccaacgttacccccaatcggggagaagggcaggtaactgccatgaaaca

SEQ ID NO: 2489 - DNA, 344 bp, Desulfotomaculum thermosubterraneum
  source 1..344: mol_type = other DNA
gtcatagaccccacgcctaaaggcgggggcttggccggaggcaactcccgtcaggtctccactttgggtggaaagctgctctctggagcagcgctatgacccgcctcagtgtgggagcctgcggaccaggcggttgaaccacgctacgttaagggggccaacacaccctgggatgcttctccagtcccatgccctgtggtgcggcattaaacagcgagcgggggtgtcagcgagcagtgtgccgcacgcaaaaaacctccttaacattggccaggagagacgcccgggctggtccggcccgggcgcgtcacgagccccgtaaggggtctccgaaaggggaaggt

SEQ ID NO: 2490 - DNA, 233 bp, Fervidobacterium gondwanense
  source 1..233: mol_type = other DNA
gtcaacgccccaccactgaagtggcgggcttgaagccctcgttgactagcctcagccaaagccaataggcttcttggctacgttagatgggtcatgacaccatggaatgctgctcaagttccatgctctgtcgtctgtcattaaacagtcctgaggggtagggacagtgtggcagacatgacaagcccatctaacattggcgatgagctcctaactccgcaaggaggcttaca

SEQ ID NO: 2491 - DNA, 286 bp, Desulfobacterium vacuolatum
  source 1..286: mol_type = other DNA
gtcaacaacccctgagctaaagactcaggggcttgcaaggcaacttgtaagcccggttgattagcctaagccccagaaaacttggtggctacgttacattggaatatatagtcatcccaaggcactccacacgccgaaggctctgagatcagtgtttaaacatctctgagggtaggagaagtgatgctgatattgtaaacccgttgtaacattggcgaagtggatcactcacgtatgtgagggcaggacttgagagtctctgccaaattctaacacaaggatttaa

SEQ ID NO: 2492 - DNA, 258 bp, Desulfobacter hydrogenophilus
  source 1..258: mol_type = other DNA
gtcaactacccctcctgaatcagagattcagaaggggcttgtaaaagcccgagttgactagcctaagtcctcgttattggggactacgttcggcaggatgtagatacctttggatatattcgccagtccaaagcactatcgtggctctgtaaaagccctgtgaggtaggggcggtcaaccacattgcgaagcctgctgaacattggcgaggcgaatcttacccctcttcggagggtgtcgataaccgaaaggtttttt

SEQ ID NO: 2493 - DNA, 297 bp, Paraburkholderia nodosa
  source 1..297: mol_type = other DNA
gtcaactaccccaccctgaaaggtggagcttgaggcggtatatatcaagctcgggttgaccagaccgagcgccgcaaggcgctacgttgcgcagaagacagcagacccaccgccggatgcttcacccagtccggcgcactggaaggggcggttgcagacaagcgaccgggtaagcgcgaaacggatcgtccccgtcagctttttcgctggcacctgctgcgcaacatcgtcgaggggagacttcccgcaagggatgcgtcacaaggcccgtaagggcaacagttttacaggagcagc

SEQ ID NO: 2494 - DNA, 314 bp, Moorena sp.
  source 1..314: mol_type = other DNA
gtcaaacaccccggcctgagggccggagcttgcgggatcactcgcgggctcgagtttgaccagaccaagcggtagccagtccgctacgttgtgcagaagtacaagacccaccgctggatgcttcctcagtccggcgctctggaagtcgcagcagcagacacgccccgggtaggcacgaaacgggctgcgacgaggcgtcaagccgaagctgctgcacaacatggtcgaggggagcggagccgcaaggttcccgtcacaaggcccgtaagggcaaccgcaccggacggattccgggagagtttcagaggggccgc

SEQ ID NO: 2495 - DNA, 223 bp, Exiguobacterium antarcticum
  source 1..223: mol_type = other DNA
gtcaattacctatcactaaagtgacgggcttatacagcttgaaattgactagtctaggttctcacgaactacgttggttgggtcatgacacctctcggtgcccgttctagccgtttgccctgtcgtctgtgattaaaagtcctgttaggtcggggcggtgttgcagatggaaaaagcctttccaacattgacgaagaacatctgactcttaaggaggaaaacg

SEQ ID NO: 2496 - DNA, 291 bp, Acidihalobacter prosperus
  source 1..291: mol_type = other DNA
gtcaaccacccctccctgaagggaggggcttgtagggagacctataagcccggggttgaccagggaaagcggtaatcagcccgctacgttggcgacaggtcagaagacccactccgagatgcttcctgagtctcggaccctggaaggaaccgttgcagacaaggcacgggtagccacgaaacggacggttcccgccggtcgatccggcaagccggttgccgacattcccgaagggagacgccccgaaaggggcgcgttacaaggcccgtaagggcgttttttggagaaaaa

SEQ ID NO: 2497 - DNA, 300 bp, Caldanaerobius polysaccharolyticus
  source 1..300: mol_type = other DNA
gtcatagaccccatggctaaagccaggggcttgtgagacaagcccctgcagctcagccagacctatgaccagcctgagtgctggagttcagccggaacgatgaaggcactacgttggaagggcgcacaccttaagatgcattcccagtcttctgccctgtggcacagcgttaaaagcgagcaggggtgcagcgagcggtgcgctgtgagctaaaccccttccaacattggcgagggaagactgcagatcggcaatctgcggcgtcaccagccccgtaaggggctccgaaaggagaggagg

SEQ ID NO: 2498 - DNA, 299 bp, Azohydromonas australica
  source 1..299: mol_type = other DNA
gtcaaccaccccgccatgaagggcgaggcttgaaagagcctggttgaccagaccgagaaaggagcttcacagcaccaatctacgttgcgcacaggacagcaaggccgacgttgaagtgcttctccagcttcaacctctcgaagccgcagcagcagacaaccccggggtagggacgaaacgggctgcggcgggtgccccgtacggggtgccacccggtgcgcaacacggtcgaggagagcgtggccgaaaaggccaccgtcactggagcccgtaagggcagtatttcaaggagccgccgc

SEQ ID NO: 2499 - DNA, 301 bp, Enterococcus cecorum
  source 1..301: mol_type = other DNA
gtaaactaccacatacccaaggatatgtggcttccattaaatagtttaccagactcagtatatagaaatatatactacgatagttaagtcatgacacctttggttgacgcaacagaccaatgctctgtcatatacgtttaagttaggttggagtaagcaaagccttgtgacgtatatctaaaaagcttaattatcattgtcgagttgaagacggaaaaaatcatatggtaatagtatgatttaagtacgcattacctgcttttaagcagcgtttttaaatatttttattttaaaggagtga

SEQ ID NO: 2500 - DNA, 321 bp, Bacillus humi
  source 1..321: mol_type = other DNA
gtgaactaccacgagcctaaaggcatcgtggcttctgaaaaagaagctacatggttttagcttcgtccctccaagggtgggttcaccagacttaggtaggagaaatcctagctacgatagattggtcatgacaccttcggttgacgcaccagaccgttgccctgtcgcttgcatttaagtagagatgaggaaagtctcggtgatgcaagtgcaaaaagcctgtttatctttgtcgaggtgaggacggattccttgtatggtaacagtacagggatacgcatgacctactttcgagtagagattttatctgaaaggatgtaa

SEQ ID NO: 2501 - DNA, 305 bp, Micromonospora viridifaciens
  source 1..305: mol_type = other DNA
gtcaacttctcggccctgacggatcgagcttgctcggctcgtcagggtggttgaccagcccgaggaacctctgaaagggaggtgactacgttgtacacaggtgtgaagacccactccggggtgcttcctcagccccggaccctggaatccgcgtcagcagacacggccccgagatgccacgaaacgggacacggacgccgcaaggcagccggtgtgcgacatgggcgaggggagaccggcgtgagccggcgtcacccggaacccgcttcggcgggaaccggagcgggccgtgaggcccacaccca

SEQ ID NO: 2502 - DNA, 301 bp, Micromonospora siamensis
  source 1..301: mol_type = other DNA
gtcagcttctcggacctgagggacgtgaacgttcggccctgagggtggttgaccagcccgagaacctctgaagggagggatctacgttgtacacaggtcagacgacccactccggggtgcttcctcagccccggaccctggaatccgcgtcagtagacacggcaccgagaagccacgaaacgggacgcggacgccacccggcagccggtgtacgacatgggcgaggggagaccggcggacgccggcgtcacccagaacctgcacccgcaggaactggagcgggccgtgaggcccacaccca

SEQ ID NO: 2503 - DNA, 240 bp, Clostridium magnum
  source 1..240: mol_type = other DNA
gtcaactaacccccacttgaagaagtggtagcttggagaagaaattctttgaagccctagttgactagcctaagtagcgaaaaaaatactacgttggattgcatgtagaaacccaagaatgatgctctagtttttggctctttcgtggctctgtaaaagttctgagggtaaggaacggtcaaccacattgcgaaggctttccaacattggcgaagggcaaataaatccgaaaggaggacg

SEQ ID NO: 2504 - DNA, 232 bp, Clostridium magnum
  source 1..232: mol_type = other DNA
gtcaactacccccctcttatagaagaggaggcttgtaggaataatcctacgaagtcttagttgtctagcctaagtgttcactcactacgttggattgcatgtagaaacccaaaaatgatacccaagtttttggctctttcgtggctctgtaaaagttctaagggcaaggaacagtcaaccacattgtgaaggctttccaacattggcgaagggtaaataactctgaaaggag

SEQ ID NO: 2505 - DNA, 324 bp, Macromonas bipunctata
  source 1..324: mol_type = other DNA
gtcaatcaccccgtcctaaaggacgaggcttgggcattaattgcttgaagcctgagattgatcagaccgagtagtcgaaaagctactacgttgccagtaagtacaagactcacctcggagtgcttcctcagctctgagctctgaaagtcgcagcagcagacaagcgtcgggtacgtacgaaccgggctgcgataggcactcaggtgccaagctggctgacaacatggtcgaggggagcgatgccgcaaggtatctgtcacaaggcccgtaagggcaaagctgtatccagccggtagctgtgctgttcacagtgtgtaggagatg

SEQ ID NO: 2506 - DNA, 305 bp, Macromonas bipunctata
  source 1..305: mol_type = other DNA
gtcaaccacccccagcctaaaggctgaggcttgtaaaagcaagcctggttgaccaggctcagtgccgtaaggcgctacgttgtgcgtaagaccaaagaccgacgtcggtatgcttccttagtaccgacttctcgaagatgccgtagcagacaaggtatgggtgctacgaaacggacggcatctggaaagcgtaagccttccacctggcgtacaacattgccgaagggagcgataccgtaaaaaagtatttgtaacaaggcccgtaagggctggcagctgggaagacagcatttttaggagtcgtc

SEQ ID NO: 2507 - DNA, 324 bp, Nonomuraea polychroma
  source 1..324: mol_type = other DNA
gtcactcgctccccggcctgtaggtcggggcctgtcccgctgaaccggggcggaccggagtgaccagatccagccaccatgcataaggaggtgaccttggtggctacgttggacacacgtcagcagatccacttcgccgtgcttcctcagcggcggactctggaatccgcgcctgcagacactcctggagcagggacgaaacggggcgcggaggccttcgggcagcggagtgtccgacatggtcgaggggagacccgccacgcctcacctgacgcggcgagcgtcacccccgcaaggggagaagccggtcgtgagaccgcaccc

SEQ ID NO: 2508 - DNA, 284 bp, Moorena sp.
  source 1..284: mol_type = other DNA
gtcaactaccccgccctgaaggacggggcttgtgaaagcaaaccaggttgaccagggaaagccgtaatcaaccggctccgtttgcaccaggtcgttaagccccaccaccgaatgcttcctcagttcggtgctctggaaggtcaggatcatgctggcgaaaggtaaagcgccgaaggttctgatcgccgcgtaacgcgggagccgggtgcagacattcccgaggggagacagggcgcaagccctgcgtcaccaggcccgtaagggcagataattaaggaggatcg

SEQ ID NO: 2509 - DNA, 344 bp, Moorena sp.
  source 1..344: mol_type = other DNA
gtcaaacgctccccggcctgaaggccggggcttgcctcgctagccgaggtaggccttgtttgaccagcccgagccagcacgcatgggaggtgaactagttggctacgttccgtgcaggtgagcggacccaccaggccgtgcttctccagcggcctgctctggaatccggttcagcagacatgcttgggggcaggcgcgaaacggggaccggacaccgcccttgcggggtggtacccggtgcggaacatgggcgaggagagcccgccgccgcctcacctggcggcggtggcgtcacccccgcgtccccttcgggggccggggagatgccgcgtgagcggcacgcg

SEQ ID NO: 2510 - DNA, 337 bp, Moorena sp.
  source 1..337: mol_type = other DNA
gtaacgagatcttcctttggacgaggaggctttcagttcgctgtgactgaggccgtcgttaccagcaccagccaacactcatagggaggtgaccttgttggctacgttccgcacaggtgagccgacccaccggcccgtgcttctccagcgggctgctctggaatcggggctcgcagacactccccggatcgggaacgaaacggggccccgccacccctcccggaagggcgggggcgccggtgcgggacatgtgcgaggagagaccactggtacctcacctggtgccagtggcgtcacccccaacccatcggttggggagcagcgccgtgaggcgcat

SEQ ID NO: 2511 - DNA, 393 bp, Branchiibius hedensis
  source 1..393: mol_type = other DNA
gtcgacgaccctgccctctctccgggctcgttgaccagaccaagacatcagtgatttggaggtgaccaagatgtctacgttgcacacgggtgcgcgaacccaccggcgggtgcttcctcagcctgccgctctggaatcggtgccagcagacaaccccggggtagggacgaaacggggcaccgacatcccgcgcacggcgcaagccgggcggcgggacaccggtgtgcaacatggtcgaggggagaccaccgggggcgcacctgtacccggcggcgtagcagcagtacccgcagggcgtaagcccagcagcaccaagcaacacagcgccacccagcagaaccgcaccacccgcatcaccagcagccccaagcagtctcggttcacggctgacaa

SEQ ID NO: 2512 - DNA, 282 bp, Pseudomonas rhodesiae
  source 1..282: mol_type = other DNA
gtcaactgcctcgtcctgaaaatcggggcttgtgaaaacaagctaggttgaccagggatagccgtaaccaaccggctacgtttgcaccaggtcgaaccgacccaccccggaatgcttcctcagttccgggcactggaaggtcgggaccatgctggcgaaaggtaaagcgccgaaggttccgaccgccgcgacagcgggagccgggtgcagacattcccgaggggagcgagccgcaaggctccgtcaccaggcccgtaagggcacagttcaaaggaggatcgc

SEQ ID NO: 2513 - DNA, 417 bp, Moorena sp.
  source 1..417: mol_type = other DNA
gtcaataacccgcgcccgaggtaaacctcggacggggcttgcaaaagaataaattgttttatttccacttttgtttagctccgttacagtttacggaaggtgttggccgaaaggccttattgattagccttagcagtactgctacgttaccgataaaataggcgccgtgggatactcctcaagtctcacgctctgcggtatgctgttaaacatctcttagggtaggagaagtgcagtatacgctaaactatcggataacattggcgatgaggacaaccgattctgactaggcgccggcttgccggagccgaaaggatagagaacctgtatggattattttcaagcatcttcggatgtttggaaatggttgatacagaaggcgtaagccaccccggcttgccgggaaaatacaacaca

SEQ ID NO: 2514 - DNA, 190 bp, Bacteroides dorei
  source 1..190: mol_type = other DNA
gttaaaggaatattaactacccactaggctaaagacctgtgggtgttgattagtctaagcactttgggtgctacgtttggagagaatatatagttaccaaggggtgtttgttcaagccccttgctctaaggttaaaacctctccataacattgacgatgagcatttaacggagaaatccgacttatagta

SEQ ID NO: 2515 - DNA, 271 bp, Moorena sp.
  source 1..271: mol_type = other DNA
gtcaactacccaccaataaattggcaggcttgtaaaagcctaagttgactagcctaagtgctttgagcactacgttaagagagaatacatagttacccgtggatgtaacacctagtctacggctctaagggaacatattaaacagttctgtgaggtaggaacagtgtgtggtggacaatagtcctttatccattaaacctttcattaacattggcgaaggtgtcatttacagttcaatatgtactggcttatcgctctaaacatattaaaa

SEQ ID NO: 2516 - DNA, 252 bp, Moorena sp.
  source 1..252: mol_type = other DNA
gttgaattacctgtatagcatataaatatgccattcgactaccctcggcgcaagctccattatcatcgaatgatatagacacctatgagtataagcaacaacatccaagctcgtagcgctgtgtctgcagattaaacagtgctggcaggaaggtacagtgtctgcagagaaaaccgatgaataatattggggatggatgacttactgacatattatgtcaggcttaccgcactgaggctgtgatcaaacaca

SEQ ID NO: 2517 - DNA, 282 bp, Pseudomonas aeruginosa
  source 1..282: mol_type = other DNA
gtcaactaccccggcctgaaggtcggagcttgtgaaagcaggctgggttgaccagggaaagcggtattaacccgctccgtttgcaccaggtcgaaccgacccaccccggaatgcttcctcagttccgggcactggaaggtcgggatcatgctggcgaaaggtaaaacgccgaagattccgaccgccgcgacagcgggagccgggtgcagacattcccgaggggagcgagccgcaaggctccgtcaccaggcccgtaagggcatagttcaaaggaggatcgcc

SEQ ID NO: 2518 - DNA, 306 bp, Moorena sp.
  source 1..306: mol_type = other DNA
gtgaactaccacacaccataaaggtgtgtggcttctgttaaatggttcaccagactaagttgttagaaatagcaactacgatatttaggtcatgatacctttggttaacgcaacagaccattgctctatcgtacatatttaagttaggtcagagtaagaacagccttgtgatatgtatacaaaaagcctttatatcattgtcgagttgaggacgaaacaactatgtggtaatggcatagtgtagtacgcattaccattgcatatgtaatggagttgtgtgattaaattcacagaaaggagtgccgg

SEQ ID NO: 2519 - DNA, 295 bp, Moorena sp.
  source 1..295: mol_type = other DNA
gtgaactaccacagaccgtaaaggtctgtggcttctgttaaaaggttcaccagactcagggtttggaaacaagccctacgatattcaggtcacgacacctccggttgacgtaacagaccgttgctctgtcgtacccaggttaagttaggtcagagtaagcacagccttgtgatgggtatgcaaaaagcctggatatcattgtcgagttgaagtcggaaacggctgcatggtaacagtgcagcccagtacgcattacctgccatcaggcagagtatctataaggagggacttatct

SEQ ID NO: 2520 - DNA, 285 bp, Bacillus cereus
  source 1..285: mol_type = other DNA
gtcaactacccaccacttaaacgctagcgcgttttgaagtgggggcttgtaaaagttctggttgtctagccacggtcctttgtggactccgttcgtaggttgcatacccaagaatgattccctagttcttggctctatggtggctctgtaaaagttctggttgggaaggaacggtcaaccacaagtcttcttgcacaagaagttgccaacacctacaaacattggcgaagggaaacaaactcttaggagggacaaatcatgcgtgtatttgtcaagaatttaaga

SEQ ID NO: 2521 - DNA, 285 bp, Escherichia coli
  source 1..285: mol_type = other DNA
gtcaatcacccctccctgaagggagaggcttgtaaaagagcctgagattgaccagaccgagcgccgaaaggcactccgttgtgcagaagagcgcagacccaccctgaaatgcttcctcagtttcaggctctggaaataaccgtagcagacacacttcgggtgagtacgaaacggacggttatcggtcatgtgaatgaccacctgctgcacaacagggtcgaggggagcatggccgaaaggctatcgtcacaagacccgtaagggtatttatttaaagggcgttat

SEQ ID NO: 2522 - DNA, 328 bp, Moorena sp.
  source 1..328: mol_type = other DNA
gtcagcttctcggctatagaataaccgagcatacagaaatgtatggatcagttatctgtagcacctgaaagggcatgctgactagactaagcgcaacggaacttacagcttccatgctgtgaaggataccattagtgctacgtcccggatatcaatacccgacccggtggtacccaagccggcacagggttcaggcaacggatgtcttcccggagaagaagataccgacctggtgcaggaagtatccggaacattgtcgaagggtgaacactctcctgtgggagggcaggatttttgcgtacctgccataataacataaggagggacc

SEQ ID NO: 2523 - DNA, 246 bp, Ralstonia pickettii
  source 1..246: mol_type = other DNA
gtcaactaccccggcctgaaggccggagcttgaaatgcgactgacaagctcgggttgaccaggcaaagcggcaaccaacccgctacgttgcgaataggttcaggaccgacgttgggatccttccttagtcccaacctctcgaagccccggttgcagacaagcgacagggtaagcacgaaacggatcggggcagatcgccggttcgcaacattgccgaagggagacttcccgcaagggaggcgtaac

SEQ ID NO: 2524 - DNA, 402 bp, Klebsiella pneumoniae
  source 1..402: mol_type = other DNA
gtcagtaaccccgccctatcggacgaggcttgtaactgaaaactgcattatcgttttcctgaacaagtctgcgacttggattaactgaccagccttagtctgtgaaacgatgagttttacagactacgttaaaaaacagatgacaccataggatgcttctaacttgcagtaccgaaatatgcaaatatttcgtttttattctgcttctccagttctatgcaatgtcgtaatacattaaacatttctttggggtaaggaaaagtgtgtattacatggtagaaacgtaacgttaaaaacgttgcgtaaaaccgaaatgttttttaactttggcgaggagatcttactttatgaaaacaatatttttcataaaagataataaggtaacttatttttaataaaagg

SEQ ID NO: 2525 - DNA, 509 bp, Moorena sp.
  source 1..509: mol_type = other DNA
gtcaataacccgcgcccgaggtaaacctcggacggggcttgcaaaagaataagttttcttatttccacttttgtttagccccgttacagtttacggaaggctgttggctgtaaagccttattaatagcgccggggtcacccgtcgttaccacataaggcttacagccttattgattagccttggtagtaaagaagccggccaaaccaggtcaggtaaatctttaactgctacgttaccggtaaaataggcaccgtgggatgctcctcaagtctcacgctctgcggtatgctgttaaacatctcttagggtaggagaagtgcagtatacgctaaactatcggataacattggcgatgaggacaaccgattctgactaggcgccggcttgccggagccgaaaagatagagaacctgtatggactgcttttaaatatcttcggatgtttggaagcggttggtgcagaaggcgtaagtcatcccggcttgccgggaaaatataagaataaaag

SEQ ID NO: 2526 - DNA, 298 bp, Clostridioides difficile
  source 1..298: mol_type = other DNA
gtcaactgccattaccctaaagggtagtagcttgtaaaaagctagttgaatagcctaagtttacactacgttatgtaagaatatataggtactttaggatacttctctagtcctaaactctacggtatatcattaaacatcactgatggcaggtgaagtgtggtatatttaaaacctttcataacattggcgaagagagcttaccaccgtaaggtgaggttaaattatctgaaaggattatactatggtatatgtaattaattttgaaggaaaaccattaatgcctactactaatgca

SEQ ID NO: 2527 - DNA, 317 bp, Ruminococcus sp.
  source 1..317: mol_type = other DNA
aggactaattgttaagcggtttattttatagacaaaagtgtaaataagtggacaaatgtatgattacatttcttgttcacacttgcttagcaacaggtttcaagcctcagtgactgctgttatcgaaagatatgttgcagatacgaactgcgttagagaaaaggttaaagacacaccttcagatgtgctcgtcagtctgaagctctgcgagtgccaatcaagaaactatgctaatgtcctgcatagataacagagaaacacatatgccctctccgacattggcaagacgaaaattactccgaaaggaaggtatccag

SEQ ID NO: 2528 - DNA, 295 bp, Arcobacter butzleri
  source 1..295: mol_type = other DNA
gtcaacaacctcaccctaaaggatgaggcttggttgtccagctttagtaagcagtgatttttcgagcggtatccaatccgccaacttatgagtttttttactgtttaaactacgatatttaagttatcacaccttggagtgcttctccagctccaagctctgtgcaggctctgtaagttgggttaaagccctgtcaacctgatgtgttagtcgcactaaaaagcttttatatcattagcgaggagagagtcgaaagaccgttaccgcagaaatgcgagaaagagattaagttctc

SEQ ID NO: 2529 - DNA, 375 bp, Moorena sp.
  source 1..375: mol_type = other DNA
gtaaatcaccccgccctgacggacagggctttcggaacctagttccagtggcccggcctttcaggtccgatttaccagacccagccatcagacaaggaggtgacaccagatggctacgaccgatacacgacagcagacccaccggcgagtgcttcctcagctcgctgctctggaatccgcatcagcagacaccgttggggtaacgacgaaacgggttgcggaggcttccgccacgggcaaccgtgacggggcaccgggtatcgatcatggtcgaggggagaccgcgcgtacgcgtcaccgctccgcgcggcgtcacgggggaacggcttcggctgaacctctcgtatccggtgggagtgatcccgccacacccac

SEQ ID NO: 2530 - DNA, 231 bp, Moorena sp.
  source 1..231: mol_type = other DNA
gttttgtaaccatgtaaattaagaggtatacaaaacctcaaagtatagttttatacctcttattttaaggcacttctatgaaatagactaagagaaatctacgttataaaaagataatatgttatggtgtcgctctagctgtaattatatcgtttgtacctaaacatacactgtgctgaacatgattggtgtaagtgatacaaacatgtaactttttataacattgtcgaa

SEQ ID NO: 2531 - DNA, 350 bp, unidentified
  misc_feature 1..350: note = Lachnospiraceae bacterium UBA2826
  source 1..350: mol_type = other DNA
gtcaatgtcactaagttaaggctctgactaacagcttccacagtgttagctatccttaactcaaacattgacacgatttttttctttgaatcaaatatgagaatggaagctcatatttgtgcagaatgacgatactgcaaatgcacttgctgctcttgtacaggtggcaaccctgcttcagtttgcagtgatatttcgagtacacggtatcaggaattcggcaactctgcttccacagaaagtaccgcactggatacacagcaacgctgtccacgacagcgaattatctttttagtaaggtgcaacagttgttatgtatgtaagagtaatcgcaaaagacggcacaccgc

SEQ ID NO: 2532 - DNA, 311 bp, unidentified
  misc_feature 1..311: note = Human gut metagenome
  source 1..311: mol_type = other DNA
gtcaactactcggctattgaatagccgagcatgaaatcgttgtgaaaacgcctgaaagggttttttacaatgattccatgtgacgttatttgataacgggtagctgagcagagacgcgacatatacatgtatctggatggtgtcttcgggcacctgaaagatgctggcacctgcaggtattcttccagcctgcagcaccgcagagtatatgccaagtctaggaaaacgataccaggacaatgcttagggttacaaccgatgcgaaagaaccgttttttcgtgggaaggtattgtccaactctgataaggag

SEQ ID NO: 2533 - DNA, 198 bp, unidentified
  misc_feature 1..198: note = Human gut metagenome
  source 1..198: mol_type = other DNA
gggtattgaagaattttagtggaatgaccccattccactaagtttcttcaatatcacaggcggatgtacttttgtacatcaagatgacgagctgcacttgtacggttttcccagcctgcaaccatgcgaaggcgtcatctagccaagggaaacacaacctcctgcttcggcaggagagacttatcgtaaaggaggtgg

SEQ ID NO: 2534 - DNA, 199 bp, unidentified
  misc_feature 1..199: note = Human gut metagenome
  source 1..199: mol_type = other DNA
gtcaattacacccacctaaagaggtgggtgcctgcaagcttgcttgcaggcaaaaaaggtaattgagcagagacatgatgcagcgctcactacggggtaatgccaagccccgtaccctggttacagctgcacctagtctatggcactcttacattcccttcttagggaatgaattatcttatttttaaggagaaccaaa

SEQ ID NO: 2535 - DNA, 242 bp, unidentified
  misc_feature 1..242: note = Human gut metagenome
  source 1..242: mol_type = other DNA
gtcaactactcggtaattgaattaccgagcatgtagtgttcgtagttcatacgggtagttgagcagagacatgatagcttgcgttctcgttacgagatgacacttttggatactttctagtccaaaacactgcaaagcagctaccaaagtctaagaaaacagtagtattcggtatacacaggcttaccaccgatgcaggtacaccgttgtatctgcggtactgtataccacaaaagaaagga

SEQ ID NO: 2536 - DNA, 254 bp, unidentified
  misc_feature 1..254: note = Human gut metagenome
  source 1..254: mol_type = other DNA
gtcaataacccacgactaaagtcgcgggcttgctgatgcgagtcccactttaacctgggttattgagcagagacgtgatgcctgcgttctccctctgggggatggcacctgtaggtttttccagcctgcagccatgcagagcaggcaccaagtcttggaaaacagttataccgccatgcacaggcttactaccgatgcgggaagtaccgtatttctcgtgatactgcatgacacttaacgaaaggaggcatcgg

SEQ ID NO: 2537 - DNA, 227 bp, unidentified
  misc_feature 1..227: note = Human gut metagenome
  source 1..227: mol_type = other DNA
ggtatttgcgaaaataggtggttgaccatctaaagttgcaaatatcacaggctgaaacatttgtaaatttatcctatttggatggataaatggatgcaccgtggaattttcccagttccatgcaatgcagagcaaatgttagttgtcagaaaactatctggcagaaaagccaagggaaacagttacctctccagcgatggagagagtcttacgaaaggagattacgg

SEQ ID NO: 2538 - DNA, 201 bp, unidentified
  misc_feature 1..201: note = Mouse gut metagenome
  source 1..201: mol_type = other DNA
gtcatgaccccacggctaaaaccgggggcttgagggagtaaccaatctctccaggtctcccggtgccgcgagatcatgagcagaggcatgacacatccgcactttggggttttcccagcttcaaaccctgctgatagatgtgccaagcctagggaatctaacccaccttcgggtggagtatttattgacagaaaggagggc

SEQ ID NO: 2539 - DNA, 201 bp, unidentified
  misc_feature 1..201: note = Human gut metagenome
  source 1..201: mol_type = other DNA
ggctatttaagatttgatgtgggaaacccacaaaaagtctaatagccacagccacagcgacgtatgtaagcccctcaggtagaggcgacggatgcacctgcgggttttcccagctcgcagcactgccaagcatacgccgaggtaagggagacattaccgcctcctctggaggtgagacactactacgaaaggagatgagcg

SEQ ID NO: 2540 - DNA, 206 bp, unidentified; identical to SEQ ID NO: 2064
  misc_feature 1..206: note = metagenome
  source 1..206: mol_type = other DNA

SEQ ID NO: 2541 - DNA, 344 bp, unidentified
  misc_feature 1..344: note = Erysipelotrichaceae bacterium SG0102
  source 1..344: mol_type = other DNA
caatgtcattaagttaagggaaaactgatgatttcggtcgttaagctctcctaacttataaacattgacaggctttttttcttcacataattcagaatgcatggaataagtttgatgcatgtgaggataacatcaaaggaatcacccggcgcccctgcacaggtgccggctctgcgctacagccgatgatgatattgtcagtgcatgccaggagtgaaactctgcgttttccagacgcaaaacccagctcacgaaggcagtaacaggaaagctcctttctccggaaaagagtgagtactgcattatccttcctgcgggaaggaagaaagcgaggatatgttatt

SEQ ID NO: 2542 - DNA, 364 bp, unidentified
  misc_feature 1..364: note = Human gut metagenome
  source 1..364: mol_type = other DNA
gtcaacaaccaacgcttaatctctgttaagatttgaagcgggagcttcaaaagcaacagccaaagcatcatcttggtaaggtcgtttttgaagctggttgattagcctaaggcataagagggtcacactcttatgaagaacctacgttacttatgaataatacaggcaccctgtgaatgcgtgtaacaagttccaggctctgcggtacgggtttaaacatcggcattccggtggtatcatgtgatgatttttataaattaccacgggaatgtccgcaaaagcgtaagcttttggcctgaggcaagggcaagtgatccgtatacgggctctctgagtcctaaaaccatttgtaacattggcgctg

SEQ ID NO: 2543 - DNA, 243 bp, unidentified
  misc_feature 1..243: note = Human gut metagenome
  source 1..243: mol_type = other DNA
caatggcattaagttaaggatttcgggcgagcaaaaccgtccgagacacctgacttttgaaccattgacatgttatttttcttgtaccatttacaagataacattgtcaccgcacctatcggtcttgcacagctgatagttaaactgcttcaagtgacaatgatgtaacgggtgtaggtagaacttatcaggttctacagtaactcccaccgtgggagaattatttccagaaaggagattatt

SEQ ID NO: 2544 - DNA, 242 bp, unidentified
  misc_feature 1..242: note = Human gut metagenome
  source 1..242: mol_type = other DNA
caatggcattaagttaagaaaaatggggctacttcggtagtccctgacctcaacttttgaaccattgacacgttttttatttcgtaacaattacgaaatgatactaacacccttcgcaccagttgctcttgcacaggtggctgctctgcatcaagtgttagtgacattacaagtgcaggtatatcttatcaggatatacagtaacgctcatcataagcgaattatctcagaaaggagattta

SEQ ID NO: 2545 - DNA, 289 bp, Moorena sp.
  source 1..289: mol_type = other DNA
gtcaagtaactcatgactaaagtcacgagcttgcgaaagcaggttctggttttagctgtagggttactgagcagggatacggtgacgtatgcgtgtatccaatggcatcttcggatgccggagggtgctggtaccggaggatatcatgcttttcagcaggattccagtcttccgttctacagagcatacgccaagtccaggaaaacaaacgtaagtgcagtgcctcaggcttaccaccggtgcaggaggaccgttcctcccgtgaaacagcactgctaaaggagttagt

SEQ ID NO: 2546 - DNA, 301 bp, Moorena sp.
  source 1..301: mol_type = other DNA
caatgtcattaagttaagggattttggcagcttcagctgtcaaagtcctttaatttaaaaaacattgacacgatttttttcaaagggatttcgtaacatttgttgcgaatgaaccgagaagatactaacaccccatgcaccaagcgctcttgtacaggtgcttgctctgcttcaagtgttagtgatatttcgagtacaagtacaacttattaggttatacagcgacatctcttcggagatgatttacaatctggtttccaccagagaaaggaactttatgaagcaaaagaaacaaaaagta

SEQ ID NO: 2547 - DNA, 299 bp, Lactobacillus salivarius
  source 1..299: mol_type = other DNA
atcaactacctcacgataaatcgtgaggtttggtaatagctatgctgttactaaacctggttgactagtctcagtacttcatgtactacgttattccagaataagttataggtacctgtaaatacttctctcgtttgcagcactacgcattaatattaaaccaagctaattggtaggcttcgtgtattaatgcttgttattaaacaagtaaacctggaaataactttgacaaagagaactcacaaagcgtgattctttccgctttgacttaccgtatactaaatatagaaaggaagtga

SEQ ID NO: 2548 - DNA, 311 bp, unidentified
  misc_feature 1..311: note = Human gut metagenome
  source 1..311: mol_type = other DNA
gtcaacaacctcgcctaaaccgttccgccggttatagacgggacttgcggggaaattcgtaagtccggttgattagcctaagcccgttgcttctgcagcgggggaaactacgttgtgtaccaataatataggcaccttatccatactccacaagtggtaagctctgcggatgtttgttaaaaatctctgagggtagaagaagtgcgaacatcataccgaaaggtaaaacagtacaacaacattggcgatgtggaccacagggcgcaagccctgacttattgatttattatttgcgaaaggagtgccttgca

SEQ ID NO: 2549 - DNA, 340 bp, Moorena sp.
  source 1..340: mol_type = other DNA
gtcaatgacccattttcaataacacaatgagcaagcgaagcggggagttttgctccccaaatccagagctcctttacattgacccggctcagggacttctaagttcctacgttagcagttaatattataggtaccccagaatgcttcaccagttcgagggctctacggtaagtggttaaacaagtggaaggggttaaactagtgctgcttacataaacaactgcataacattgccaaggtgacgtgattcatactaagctctaagctagcatgagtcacaccaccatgcaagtgtgtaaatgcttttcgctcacttgcatgagagtgattgaaggtaact

SEQ ID NO: 2550 - DNA, 365 bp, unidentified
  misc_feature 1..365: note = Delaware Bay aquatic sample metagenome
  source 1..365: mol_type = other DNA
gttgtagcctccactcattttcggggtgctgtcagggagtgcccgcgctaccctgcttggatgctgggctggaaggcaaaaggcgttcaaaaaaatgggcggtggttgacagttttccggaaatgagtgcggattttttccgcagctacaaccagactaagttctttgggaactacgttattgtcgtcatcatacccacgggtgcgtgccagcctgtggctctatggtcgtgcattaaacagggactttggagggtgcccagtgtgtacggcgtcaaaagcggcgataacattgtcgaggcatactttacgtgacggcaacgcttcttcggaagttgcgcccgatcgctagctttaaggctaatt

SEQ ID NO: 2551 - DNA, 20 bp, synthetic construct
  misc_feature 1..20: note = Synthetic
  source 1..20: mol_type = other DNA
cggttccgcaggacccaggg

SEQ ID NO: 2552 - DNA, 20 bp, synthetic construct
  misc_feature 1..20: note = Synthetic
  source 1..20: mol_type = other DNA
agtggtgcctggaaaataaa

SEQ ID NO: 2553 - DNA, 20 bp, synthetic construct
  misc_feature 1..20: note = Synthetic
  source 1..20: mol_type = other DNA
cccccttccctatgggaata

SEQ ID NO: 2554 - DNA, 20 bp, synthetic construct
  misc_feature 1..20: note = Synthetic
  source 1..20: mol_type = other DNA
accgggaagtgaatggacgt

SEQ ID NO: 2555 - DNA, 20 bp, synthetic construct
  misc_feature 1..20: note = Synthetic
  source 1..20: mol_type = other DNA
ctccaaggacaaatctttat

SEQ ID NO: 2556 - DNA, 20 bp, synthetic construct
  misc_feature 1..20: note = Synthetic
  source 1..20: mol_type = other DNA
ccaagcaagaagtgaagccc

SEQ ID NO: 2557 - DNA, 20 bp, synthetic construct
  misc_feature 1..20: note = Synthetic
  source 1..20: mol_type = other DNA
tcccaaagatgcccacctgc

SEQ ID NO: 2558 - DNA, 20 bp, synthetic construct
  misc_feature 1..20: note = Synthetic
  source 1..20: mol_type = other DNA
atcaaaaagagtgaacgaga

SEQ ID NO: 2559 - DNA, 20 bp, synthetic construct
  misc_feature 1..20: note = Synthetic
  source 1..20: mol_type = other DNA
tggtggtctggataaaagaa

SEQ ID NO: 2560 - DNA, 20 bp, synthetic construct
  misc_feature 1..20: note = Synthetic
  source 1..20: mol_type = other DNA
cgcagagagtcgccgtctcc

SEQ ID NO: 2561 - DNA, 20 bp, synthetic construct
  misc_feature 1..20: note = Synthetic
  source 1..20: mol_type = other DNA
tttaaagaaaaagcagcttt

SEQ ID NO: 2562 - DNA, 20 bp, synthetic construct
  misc_feature 1..20: note = Synthetic
  source 1..20: mol_type = other DNA
tctgtccctccctcagtagt

SEQ ID NO: 2563 - DNA, 20 bp, synthetic construct
  misc_feature 1..20: note = Synthetic
  source 1..20: mol_type = other DNA
cccccttccctatgggaata

SEQ ID NO: 2564 - DNA, 20 bp, synthetic construct
  misc_feature 1..20: note = Synthetic
  source 1..20: mol_type = other DNA
actacagtggtgcctggaaa

SEQ ID NO: 2565 - DNA, 20 bp, synthetic construct
  misc_feature 1..20: note = Synthetic
  source 1..20: mol_type = other DNA
atgcatataccagtttgtgg

SEQ ID NO: 2566 - DNA, 20 bp, synthetic construct
  misc_feature 1..20: note = Synthetic
  source 1..20: mol_type = other DNA
acgaatttctgcaaacagaa

SEQ ID NO: 2567 - DNA, 20 bp, synthetic construct
  misc_feature 1..20: note = Synthetic
  source 1..20: mol_type = other DNA
tttattttagctgaagggaa

SEQ ID NO: 2568 - DNA, 20 bp, synthetic construct
  misc_feature 1..20: note = Synthetic
  source 1..20: mol_type = other DNA
tttatttcccttcagctaaa

SEQ ID NO: 2569 - DNA, 20 bp, synthetic construct
  misc_feature 1..20: note = Synthetic
  source 1..20: mol_type = other DNA
gagagcaaaagatacatctc

SEQ ID NO: 2570 - DNA, 20 bp, synthetic construct
  misc_feature 1..20: note = Synthetic
  source 1..20: mol_type = other DNA
atttgtaccggtttttgtat

SEQ ID NO: 2571 - DNA, 20 bp, synthetic construct
  misc_feature 1..20: note = Synthetic
  source 1..20: mol_type = other DNA
tgtgcccattggtggtctgg

SEQ ID NO: 2572 - DNA, 20 bp, synthetic construct
  misc_feature 1..20: note = Synthetic
  source 1..20: mol_type = other DNA
tattcctgacactgccagga

SEQ ID NO: 2573 - DNA, 20 bp, synthetic construct
  misc_feature 1..20: note = Synthetic
  source 1..20: mol_type = other DNA
gggacagaaaacctagaaaa

SEQ ID NO: 2574 - DNA, 20 bp, synthetic construct
  misc_feature 1..20: note = Synthetic
  source 1..20: mol_type = other DNA
tttaagagcatcgaacaata

SEQ ID NO: 2575 - protein, 433 aa, Moorena sp.
MLTYVLNKDGQPLMPTGRSGKMRRLLRDKKAKVIRRCPFTIQLLYEPETAVVQDITLGVDAGSKYIGLSATTEDRVLYESEVELRNDIVELISTRREARHARRNRKTRYRAPRFDNRTSSKKEDWLAPSIRQKIHSHLKVIADVHEILPVSKVIIEVASFDTQLLKAAEEGRPLPQGTDYQFGEQLGFYNTREYVLFRDNHTCQCCKGKSKDKVLNVHHIESKKVGGNAPNNLITLCETCHTGYHKGVVKFPSSIRRGMKFNDASFMGIMRWPVYSRLKEIYPSVELTYGYKTKNMRIENQLPKEHYIDARCISGNPKAKSDGIVYYQKKVRCHNRQIHKFKVNKDGLRKLNQAPYLVKGFRLWDKVLYNSEECFVQGRRSSGFFQLKKLDGTMISASASCKKLSLVETGKHFITERKRAIPPTVEECGFSCL

SEQ ID NO: 2576 - protein, 371 aa, unidentified
  REGION 1..371: note = metagenome
  REGION 2..35: note = misc_feature - Xaa can be any naturally occurring amino acid
  REGION 334..367: note = misc_feature - Xaa can be any naturally occurring amino acid
MXXXXXXXXXXXXXXXXXXXXXXXXXXXXXXXXXXTRRQYRRSRRNRKTRYRQARFNNRKKPDGWLPPSMQTRINHTFNWIDEFTSLLPNPRLIIEVGKFDVQKMQSPSIEGTEYQKGNTYGYYDVRYYVFARDNYTCQVCKGKNKILRTHHIIYKSEGGSDKANNLITVCTGCHTSENHKKGGIFYKWMLEGKKLPSYKETPFMNIIRKKIYKKYPDAQIVYGSYTTPRRKELGLEKTHYNDALAITGMEQVFTDEIGIFKIKQFRKKKRSLHEAIARKGRKEPNCIQIRNSKNTKYQDGFYLNDKVKVFGRTGFISGFTNGGGAYIKDILGXXXXXXXXXXXXXXXXXXXXXXXXXXXXXXXXXXVIVA

SEQ ID NO: 2577 - protein, 431 aa, Klebsiella sp.; identical to SEQ ID NO: 2435

SEQ ID NO: 2578 - protein, 402 aa, unidentified
  REGION 1..402: note = metagenome
  REGION 36..69: note = misc_feature - Xaa can be any naturally occurring amino acid
  REGION 368..401: note = misc_feature - Xaa can be any naturally occurring amino acid
LFHCSCQGSPVFYRNKKPIHTMYYCLSTSWGIGCNXXXXXXXXXXXXXXXXXXXXXXXXXXXXXXXXXXFTIQLLFECENETQDVTLGVDAGSRFVGLSATTSDKVLFEAEVELRNDITKLLADRRSLRNNRRSRKTRYREARFLNRKKPDGWLPPSIRSKINTHIKVVEKVHKILPISQVVVEVAQFDIQKIKNPEISGAEYQQGDQMGFWNAREYVLYRDGHKCQHCKGKSKDKILNVHHIESRKTGGDAPNNLITLCKTCHDDFHSGKIELKIKRGQSFRDASHMNIMRWFLWDKLKELYPNSKLTYGYITKNTRIKNGLEKSHRTDARCISGNSLAEPLDHWYFYKQVRCQNRQLHKVNPKRGXXXXXXXXXXXXXXXXXXXXXXXXXXXXXXXXXXS

SEQ ID NO: 2579 - protein, 380 aa, unidentified
  REGION 1..380: note = metagenome
  REGION 3..36: note = misc_feature - Xaa can be any naturally occurring amino acid
  REGION 339..372: note = misc_feature - Xaa can be any naturally occurring amino acid
LAXXXXXXXXXXXXXXXXXXXXXXXXXXXXXXXXXXASLNYLKGFDFMIYVISVDGKPLMPTSNAKARILLKQKKAKVKNLKPFTIQLTYKTETEYTQNITLGIDSGYNNVGFSALTDKKELLVGELKLLQGMKERLLEKARYRKIRRSRLRYRKARWNNRTKSKPKGWLAPSLQHKLNSHIKFIDSLYKLLPITKTIVEIANFDIQKMKDEAISGVEYQQGDMMGFWNLREYILHRDNHKCQNPNCKNKDKEQILEIHHIKYKHFGGSNRPSNLITLCNKCHTSPNHKKGKFLYDWCQEGRKVRGFKDATFMSMIRWYLVNKLKEKYSNVSFTYGYIXXXXXXXXXXXXXXXXXXXXXXXXXXXXXXXXXXVENYNSYY

SEQ ID NO: 2580 - protein, 560 aa, unidentified
  REGION 1..560: note = metagenome
  REGION 440..473: note = misc_feature - Xaa can be any naturally occurring amino acid
MVFVLDKHKKPLMPCTEKRARLLLQRGRAVIHKMEPFTIRLRDRTLEKSNVQLLRLKLDPGSKTTGVAIIDESKPDCGRVIFLGEIRHKAGIKKSLDNRRAIRHSRRNRKTRYRKARFDNRKRPEGWLPPSLQARVDQTLNTVTKLRKFLPIAAISTEHVKFDTQFMQNAEISGIEYQQGELFGYEVREYLLEKWGRKCAYCGKTDVPLEIEHIIPKSRGGSNRVSNLTLSCKLCNQKKGTMTAAEFGFPEVQAQAEKPLRDAAMINATRWALFNKLKKIGLPVECGTGARTKKQRIEHGLPKTHYYDACCVGISTPKRLMIIPQYISVWTVIGRGTRRMCNTDKHGFPKGHRTAKKMYFGFQTGDIVKAAVPKGKYMGTWIGRVAVRASGYFDLKDGQGKRICQGVSYKHCRLIQRANGWQYEKYLRKEKSRIPPTAKXXXXXXXXXXXXXXXXXXXXXXXXXXXXXXXXXXLVNLGCATGHPSFVMSNSFSNQTLAQIDLWTKNYEIGVYRLPKHLDEEVARLHLEQLGVKLTKLTKEQADYIGVPREGPYKPEHYRY

SEQ ID NO: 2581 - protein, 462 aa, unidentified
  REGION 1..462: note = metagenome
  REGION 416..449: note = misc_feature - Xaa can be any naturally occurring amino acid
MAAGDLRNVLASLKQGKAKVKYREPFTIKLTYETTTYTQPLTLGVDTGSQTFATAVTNGKGNILYTSEVVLREDKNHSIKKKMDQRRMYRRNRRNRKTRYRKARFNNRKNSKRKNRFSPTMTSKLHSHQKEIEFIKSILPIAKLILETGTFDPHLMKNPSLANPKVKPWGYQQGPNYGFENTKARVLVRDNHTCQICNKKPKNERLEVHHIVFRSQGGSDEENNLVTLCHSCHVELHKGLIHPNFEGSLKSALKYATQMNSIRIQLLKLYPDAIETFGYVTKANRLNLGLPKEHYVDAAVIATAGNQVNFACNLMIKRCIPKGDFQRTKGIRSEKIIPKGKIDGFKKYDKVRYFGNEYFVKGRMTTGYIQLMNIYGEKISFNHMPKGFKTPKTKNCQRIAARKTWITTIETLIKNXXXXXXXXXXXXXXXXXXXXXXXXXXXXXXXXXXLCLIWVHTKQVQT

SEQ ID NO: 2582 - protein, 349 aa, unidentified
  REGION 1..349: note = metagenome
  REGION 219..222: note = misc_feature - Xaa can be any naturally occurring amino acid
  REGION 315..348: note = misc_feature - Xaa can be any naturally occurring amino acid
MVFVLDTNRKPLSPCHEAVARKLLKQGKAAIFKRYPFTIILNKSVDNTDNKQEYRLKIDYGSKHTGLAILQNNNVIWLAQIDHRTDIKKKLDERRSYRRRRRNKNLRYRQPKFLNRRRKEGWISPSLESRINNIKTWVNRLQKLIPLTHISYENVKFDTQLMQNPEISGIEYQQGTLQGYEVREYLLEKFNRKCCYCGETNIPLETEHIIPKSRGGTNXXXXIDNLCLACHECNQKKGNMTAEEFGHPEVQRQVKETLKDTSVVNSTRWKVYDVLLRTGLPVECGTGALTKMNRVKLGLPKEHYLDACCVGQSTXXXXXXXXXXXXXXXXXXXXXXXXXXXXXXXXXXA

SEQ ID NO: 2583 - protein, 430 aa, unidentified
  REGION 1..430: note = Human gut metagenome
LETRNKEIPKLMKKRKDSRRARRTNGRRCRRQRRAKANGTLSKKCVKQTTAQNGSVSKRAKKIGVIKRHLPGCEKEALCIGIKNKEAKFNNRTRPEGWLTPTANQLLQTHINLVKKIQKFLPISDVVLEVNKFAFMRLDNPNIQKWQYQQGPLYQKASLEEAVSEMQEHHCLFCKNTIDHYHHVVPQHKNGSNTIDNIVGLCTKHHDLVHKETAWQEKLAKKKTGLNKKYGALSVLNQIILALTKGLSFLFPKHFFVTTGKNTYDYRTAHSVSKDHWLDAYCIACSVLPNDVCDSSINSHVPYELKQFRRHDRRALHKENMSRVYTLNGKKVATNRHKAIEQTTDSLEEFRQRQPNDVYKLKVKEHHPEYRNPKRNFPGCVFLVGKRTHVMQGSSGSHNGKADGYYDTNGNSYSSGKCKFVAKNEGIVFA

SEQ ID NO: 2584 - protein, 470 aa, unidentified
  REGION 1..470: note = Human gut metagenome
MSVFVVGLNGCRLMPVSERKARLLLKGGKASVYRKVPFTIKLNYKTGSTVQPGYLGIDTGSQHIGVSVVRQDGTVLHKEEIGLRDSMSKRKLLESRASLRRGRRYRKTRYRHPKWKPKTKRIYSEKADRKGRHWKKQKNMFTSKRQAGWLPPSLQSKTDHHIQWIRKLLHLLPEGYRLSIELGRFDPARMKDPGIHGELYQKGPQYDYENVRAYVLARDGYTCRVCKKKGGKLHVHHILYRSRGASDDPKYMAAVCSNCHTTENHLPGGILYQWMQEQKKFTRGLRDATFMNILKKRLRRAFPDAVFTYGNITKADREKLGLPKSHGNDATAIALVKTGVTSVRDEEPVIHIQQVRRKKRSLHEETPRKGRKEPNRTASRNDKNTRSVTVSKGSREKKVSMTACLFDRVELDGKKGWITGFTGTSCYVKDKEDNYICTSPKYKQVSISRLRILHHCGNWAIGAEKPLGKG

SEQ ID NO: 2585 - protein, 298 aa, unidentified
  REGION 1..298: note = metagenome
  REGION 242..275: note = misc_feature - Xaa can be any naturally occurring amino acid
MLVYVLNRHGKPLMPCKPSKARKLLKQGKAKITQREPFTIQLIYGSSGYKQPITLGIDAGSKFIGVSATTETQELFSAEVELRNDIVQLLSERRQYRRSRRYRKTRYRKPRFLNRVRSKNKGWLAPSIENKIQTHLKIIEKVHKILPITKIIIEVASFDIQKIKNPNIEGVEYQQGEQLGFWNVREYVLWRDNHTCQICKGKSKDNRLNVHHIESRQTGGNAPNNLITLCETCHNKYHKGEXXXXXXXXXXXXXXXXXXXXXXXXXXXXXXXXXXLSTPNKADNFITSSARNVPCFNL

SEQ ID NO: 2586 - protein, 311 aa, unidentified
  REGION 1..311: note = metagenome
PSIQHKYDSHIRFINFLKKLLPITDVVIEVANFDTHKLKNPEVEGIGYQQGEQEGFYNLREYILYRDNYKCQLCGRENLPLEVHHIGFWKQDRTDRPSNLITLCIKCHTPKNHQENGKLWGLKPNLKPLREATFMSTVRWKLVNVLNCKYTYGYITKFKRIALGLEKTHYNDAFSIAGGTNQVRTKPIMFEQIRRNNRSLEKFYDAKYIDIRTGKVATGQELFCGRRTRNKNYNTENLRKYRGQKISKGQRRIRTQRYFYQPKDIVIYNGRKYVVKGVQNKGSYIKLEKLNKPVKVNLVKPYEFRKGFCVV

SEQ ID NO: 2587 - protein, 421 aa, unidentified
  REGION 1..421: note = Fermentation metagenome
MKVYVISKHGKPLMPTTPARARKMLRDGKAKCIKREPFTIKLLFNTSSYTQPITLGVDTGSSHIGSAAVDDAGNVLYLSEVEIRNDIADKMKQRAKYRRNRRNRKTRYRQARWLNRKNSIKSDRFSSTMVSKINSHLKEITFVKSILPIAHVILETGTFDPHALKNPDVLKNKWSYQRGANYGFANTKAFVLDRDSHICQHCKGKSKDVKLEVHHIVFRSNGGSDEAENLITLCKTCHDKVHSGAIKLKGGKSKGQLKHATQMNSIRKQLSRLLLDAEETFGYITKEHRYLMSLPKEHYFDAVAIASMNNICNEGLISVNFQTCLLRKKCIAKGDYQQTKGIRSEQSIQTGKIMGFRKFDKVKYMGNEYFIKGRMSTGYAILMNITGNKAPLKPIPKFEKMERLNARKSWIIQQENIQNIA

SEQ ID NO: 2588 - protein, 414 aa, unidentified
  REGION 1..414: note = Human gut metagenome
MPCSPAKARLLLKEKKAIVKRRTPFTIQLTIATGETKQPVGLGVDAGYKHVGLSASTDKAELYASQVELRQDITDLLSARRALRRARRNRKTRYRAPRFNNRIRTKRKGWLAPSVENRINAHLSRIEAVLRLLPVTKITVETASFDMLLLKNPDIAGKEYQEGEQLGFWNVREYVLFRDGHVCQHCYGRSKDPVLNVHHLESRRTGGDSPGNLITLCETCHEALHRGEIALKTKRGHSFRAEAFMGMMRWEVLNRLKASHSELEVNNTYGYRTKHARIVNGIDKSHCADAFCIAGNLGAERLCEFFFQKQTRRNNRQIHKLSILKGGIRKRNQAPFEIKGFRLFDKVACKGEESFIFGRRSSGYFDVRKLDGTRISAGISYKKLRLLEKRRTYLTEIRKEEALPPLPEGRGLRA

SEQ ID NO: 2589 - protein, 424 aa, Caldicoprobacter sp.
MVYVISKTGKPLMPTERYGKVRRLLKHRLAKVVKREPFTIQLLYDTTTYTQPVTVGLDIGSKIAGVSAVTEKKEIFSAEIELRDDIKGLLLERRQYRRMRRYRKVRYRKPRFLNRARDDGWLAPSLQWKVDAHIRIVEMLSMIMPIGKVVIEVAPFDTQKILNPGIEGEDYQNGVQKGFWDVREYCLWRSGYKSELSGKRGTLEVHHIVPRSEGGTDTPSNLIVLTAEEHKAVHEGRIKIPKSKIEKIKLLKDAAHVATIGWYIVNRLRERYSVEVTYGSITKAKRLGCGMTKSHRNDAFVISDGTLQERVKEWYLGKFLRRQNRSLHRANFIKGGVRPVNTIKEAYGFRRYDRVEYEGIIGIIAGLRSSGYFAVRNLSGEKIHDSAKHSRLRLVERAKTLMLERMEERIPLHLEEDGVSCVRL

SEQ ID NO: 2590 - protein, 414 aa, unidentified
  REGION 1..414: note = Human gut metagenome
MIYVLNYDRQPLMPTDRCGRVRHLLKERKAKVVKCCPFTIQLLYQNTNYTQPISLGIDAGSKHIGMSATTETKEVYASEIELRNDIAKLLSDRRALRRGRRSRKTRYRKPRFQNRKRGEKWLVPSIQHKIQTHLDATEAVCKILPITKITVETASFDIQKIKDPEIKGTGYQQGDQLGFWNVREYVFFRDGHTCQCCKGRSKDKILNVHHIESRRTGGNAPNNLITLCETCHKGYHNGTVKLPKRIHRGMSFKDAAFMGIMRWAFYNELKTIYPDVHMTYGYITKNTRIKNGLPKEHYIDARCISGNPTAAPLGIVYYQKKVRRHNRQIHKLKILKGGIRKRNQADYLVKGFRLFDKVKYQKKEYFIFGRRSSGFFDIRTLDGAKINKGSLSYKKIQFLETPRGYLIEQRKEMA

SEQ ID NO: 2591 - protein, 409 aa, unidentified
  REGION 1..409: note = metagenome
  REGION 356..389: note = misc_feature - Xaa can be any naturally occurring amino acid
VDGNNNVLYLSQIEVRNDITDKMKQRAKYRRNRRNRKTRYRKPRWLNRKNSIKKDRFSPTMISKINSHLKEIKFVKSILPITNIILETATFDPHALKNPAVLYNKWLYQKGINYGFANTKAYVLNRDNYICQYCKGKSKDSKLEVHHIIFRCYGGSDEPENLITLCKTCHDKLHAGKINLKRNGKVKGQLKHATQMNSIRQQLLRLLPEAVETFGFITKEHRQLMELPKEHYYDAVAIACLKNIKNTGLIDVNFKTNNILLKKCIADGDFQQTKGIRSEQRIITGKIRGFRKFDKVKYQGKEYFIKGRMSTGYTILMDIAGNKIDLKPIPKFDKMERIQARKSWIISQETIQNIYXXXXXXXXXXXXXXXXXXXXXXXXXXXXXXXXXXPLPLCGHGRWHRRHGFRPCP

SEQ ID NO: 2592 - protein, 231 aa, Moorena sp.
CGVKDVPFQVEHIHPRAKGGSNSITNLTLSCEKCNTKKGTKDIKDFLKKDPSKLEKILKQAKRPLADAAAVNTTRLALLFVVKATGLPVETGSGGLTKFNRSQQNLEKTHWIDAACVGQSTPILNIKGVKPLLITANGHGTRQSCRTDKYGFPSRYVPRFKFVNGFQTGDIVKAVVTKGKKIGAYIGRVAVRTSGSFNISTTSGLIQGISYKYCKSIHKKDGYEYGKSKIC

SEQ ID NO: 2593 - protein, 451 aa, unidentified
  REGION 1..451: note = Human gut metagenome
MSVAVISKTGIVLMPTSEYRARKLLDSGKAIIYGYRPFTIQLTERETGDVQPVELCVDTGYIHIGVSVKSEKHEYLGLQVDTLTDEKAKHDDRRMYRRQRRNRKRYRKSRFDNRKRKSGWLAPSLEHKKEINLQIITAICGVYPIADITLEMGNFDTQVLKAKEEGKQIPQGTDYQHGERYGIATLREAVFTRDGYKCQCCDRGIKDGAILHAHHIQYRSQGGTNRMSNLITVCEKCHTPANHKPGGKLYGWKPKIASFKDATYMTAVRWQLYRKVKEMFPGIHVKITYGAETKERRRILDIKKSHVNDAFVMGQFHPKHRSLPVLYKKKRRNNRCLEKFYDAKYIDSRNGKTRSGQELFNGRISRNHKKDSENLHRYRKKKVSRGKRNIRVQRYKIQPHDIVLFDGKKYETTGCHNKGTRAILLPEKKSKSVEKLTIYKYAGGYYPSKFA

SEQ ID NO: 2594 - protein, 313 aa, unidentified
  REGION 1..313: note = metagenome
LPPSIRARIDAHYNIVKKICNIMPIKEIVVEVGQFDVQAIINPDIQGEEYQNGELKGFDSVKEYVKIRDNFQCHYANLRPDIPCSGKLTVDHIIPRSRGGTDNPTNLVCCCEMHNMAKGNMSYKEFTGHEPPSIRDFRPTVFMNVLMEHLVPRLQELAPTKYTFGYVTRRRRKEWGLEKSHINDAIAIAGIKPRWQDNVWYCIRQVRKKKRSLHEEIPRKGRNKPNREAKRNNKNVKEIVTKSGKWCLWDKVKITTTGEIGFISGFTGKWVYVQDIDGNYLQLSDKYKQINPSELVLICRNNNYITQQFISTL

SEQ ID NO: 2595 - protein, 279 aa, unidentified
  REGION 1..279: note = Human gut metagenome
VVVETAEFDLQLLKAIADGKPVPQGEDYQKGEMYGHYNVRQYVLWRDNYTCQCCGAHATKKKEVRLHVHHLESRKVGGDAPDNQVTLCESCHEKLHKGLIAEKDFKKRKRRSTWDATFMGIMRKTLMQRLCSELPIPVIETRGYITKATREKLLVLPKSHTNDALAIAQGKHGFNVGYLPGILQIDMIYTIRPVRHHNRQLHKAAILKGGIRKSNQAGKYVFGYRLFDKVQFNGQDCFIWGRRTTGIFTIKTINGKMIKDGISFKKLKPVEKSTSYLIA

SEQ ID NO: 2596 - protein, 386 aa, unidentified
  REGION 1..386: note = metagenome
  REGION 304..337: note = misc_feature - Xaa can be any naturally occurring amino acid
MRGEPLMPCSPRKARILLKENKAKVVKREPFTIQLKYATGEVKQDINLGIDAGSKQIGVSATTEKEVLFEAEVELRNDIVELLATRRQYRRSRRNRKTRYRQARFNNRKKPKGWLAPSIQHKIEAHIKTVAMVHKILPITQTIIEVAQFDIQKIKNPNIEGKEYQEGDQLGFWNVREYVLWRDNHQCKGKTNCKNKILSVHHIESRKTGGNAPNNLITLCEKCHTDLHAGKLKLNLKRGTSYRDATFMGIMRWAVYNKLKELYPNISLTYGYITKNTRIKNNLEKSHIIDARCISKNPLATAQXXXXXXXXXXXXXXXXXXXXXXXXXXXXXXXXXXEKCHPKIKKDTDTRGLYRLYIGLVIQGILFYLYGIIFLINNNLMEDFVS

SEQ ID NO: 2597 - protein, 440 aa, unidentified
  REGION 1..440: note = Human gut metagenome
MSTGLRAEQAEPAGIRKGETLKVFVLNMRGKPLMPCSPAKARHMLKAGKAVVARRTPFTIKLTIATGETKQDVTLGVDAGAKYVGISATTEKEEVFASEVELRQDITGLLADRLAFRRARRNRKTRYRESRFNNRVRSKNKGWLAPSVENRIQAHISRIEAVCRVLPITKIVIETASFDIQKIKNPEVEGTGYQQGDQLGFWNVREYVLFRDGHVCWHCRGRSKDLILNVHHLESRKTGGDAPNNLITLCETCHKAYHAGKIKLKARRGTSFRAEAFMGIMRWTLLDRVRRAHPELPVENTYGYLTKHTRIVLGLSKTHCADAFCIAGNLNALRRGDFLYQRQTRKHNRQIHKCSILKGGVRKLNQAPFLVKGFRLFDKVKCKGRIGIIFGRRSSGSFDVRTLDGARLSAGISSKKLMLLEKRTTFLTQLRKENGASSPS

SEQ ID NO: 2598 - protein, 462 aa, unidentified
  REGION 1..462: note = Ga0307928_10011429
MQKLETRNTYTPTDTSLVRSNCDSVIKHGQHSVQVLQSLKTFSNSSEENQHQHTDGHNVIVYVLNKNGKPLMPCKPAKARHLLEQNKAEVVSRKPFTIQLLWMCEHNTQPIKLGIDAGYKTVGVSAVSVKKELFSAGVTLRTDIPKKLQKKAMYRRNRRNKLWYRQPRFLNRSKPKGWLAPSIQHKLDSHLRIVEKIKKILPITKTIVEVAGFDIEKIKNPDIEGKEYQQGEQLGFWNIREYVLHRDNHTCQHCHGKKKDRILQVHHINGKSEGATDRPEELLAVCKTCHSKHHQGIDSIPKKKIKQFKLETFMTTVRWKIVNTLGCKHTYGYITKNNRIKQRLSKSHVNDAFIIAGGTTQSRCKSYITKQVRRNNRHLQISRKGFKPSIRRQHYSLQPMDIVKYNNMLYLVKGVHSKGERVVILGFVKNCSVIIKKVELLVYGKGIQFIYPLKQIDSSEVV

SEQ ID NO: 2599 - protein, 380 aa, unidentified
  REGION 1..380: note = metagenome
YGSSGYKQPINLGIDLGAKHIGVAITSKNNVLAKGEIELRDDVSSLLETRKVYRRSRRGRKTRYREPRFLNRTKSKKKGWLPPSIQNRIDNTFMWIDRFCNLLPNPNLIIEVGKFDVQKMINPDIGGVDYQKGQTYGYHDIRYFVFARDNYTCQVCKKKNKILQTHHIIYKSKGGSDRPSNLITVCTDCHTHKNHQKGQILHQWMTKKKKAPQYKEAPFMNTIRKKVFNRYPEAKIVYGTYTTPRRKELGLEKTHYNDALAISGIEERFRDDTGIFKIKQFRKKKRSLHEATPRKGRKEPNREAKRNKKNTKYQNGFYLNDKVRAFGKVGFISGFTNGGCYIKDIENSYITIPDKTYKQVSFKHLEFINHNNNWQFISRL

SEQ ID NO: 2600 - protein, 413 aa, Moorena sp.
MPCHPARARALLRKGRAKVARRFPFTIQLKDRETGVCQPLELKLDPGSRTTGLALSLEGKRGRRIVFAANIAHRGLAIREALTTRRAIRRSRRNRHTRYRAPRFDNRRRPQGWLPPSLLSRVENVFNWAKKLQRFSPIRAIAIETVRFDTQKLVNPEVSGVEYQQGELLGYELREYLLEKWQRACAYCGKKDLPLEVEHIVPSSRGGSNRVSNLTLACRPCNQKKASRSVETFVKDKSKLTRILSFAKAPLKDAAAVNATRFAIAERLAKLALPLSLWSGGRTKHNRMRQDYAKDHWIDAACVGESGTKVYIPPKLKPLKVQATGRGSRQQCLMDRYGFPRTGPKAQKRVHGFQTGDIVHAVVNQGKKKGKYSGRLAVRSTGNFNIKTGTETIQGIRYKDCRILQRFDGYMYA

SEQ ID NO: 2601 - protein, 426 aa, unidentified
  REGION 1..426: note = Human gut metagenome
VTTFVFVLDRKGRGLMPCHPARARELLKKGRARVHKVFPFTIRLTDRELENSSVQPMLIKIDPGSKETGIALVREEKNKEHHALYFINLQHRGQQIRNALYKRRCLRRSRRSRNLRYRSPRFLNRRRAEGWLAPSPQHRADSILSWVSRLRKITPVERISQELVKFDTQLTQNSKIEGIEYQQGELAGYELREYLLEKFGRKCIYCGADNVPLNIDHVIPKSKGGSNRVTNLVLACVQCNQKKGSRSIEEFLKDKPEVLRQIKNQLKQPLKDAASVNATRWKLFNKLKSTDFPFEVGSGALTKFNRKKFGIPKAHWLDALCVGNVPSVTNWRNLNVLNIKCCGRGAYQRTRTDKYGFPRGICMRQKKVYGFSTGDMVKAIIPKGKKKGVYVGKVAVRKTGSFNLQTSGQTIQGISYRYCRLITHSD

SEQ ID NO: 2602 - protein, 510 aa, Micromonospora sp.
VLPQPRTLESASADTAPRCHETGHGRRKAAGVRHGRGETGVSRRHPEPASAGTGAGREAHTHPVVFVVDRHHRPLQPCSPARARKLLASGRAVVHRHTPFVIRLKDRETADSQVDGVELGVDPGSKFTGIAVFRTDNDVRTGLFAIEVRHRGGRVRDKLAARSAFRRGRRSRNLRYRAPRFLNRRKPDGWLAPSLRHRVDNTMSWVQRLCRWAPVTGVHVERVAFDTQLMQNPNIGGVEYQHGTLHGYEVREYLLAKWGRKCAYCGVAGVPLNIDHIVARSRGGSDRVSNLTLACVPCNQAKDATPVDVFLADRPTVLARIRRQAKLPLRDAAAVSTTRRALWQALAATGLPVEVGTGGRTKWNRHQTGAPKTHTLDALHVGTITAVRSCPGHIMVATATGRGCYARTRCDRYGFPRLRMPRSKTVYGFQTGDLVRAVVPAGQNKGRHVGRVAVRTTGKFNIRTSHALVQGIHHRHFRLLQRADGWAYTREEERRFIPALNGQVSTPQRR

SEQ ID NO: 2603 - protein, 427 aa, Parasutterella sp.
LRVFVLNKRGKPLMPCSPAKARLLLKEKKAIVKRRTPFTIQLTIATGETKQPVSLGVDAGYKHVGLSASTEKAELYASEVELRQDITDLLSARRALRQSRRNCKTRYRAPRFDNRIRTKRKGWLAPSVENRINAHLSRIEAVLRLLPVTKITVETASFDMQLLKNPDISGKEYQEGEQLGFWNIREYVLCRDGHVCQHCYGRSKDPVLNVHHLESRRTGGDSPGNLVTLCETCHKALHRGEITLKAKRGQSFRAEAFMGIMRWEVQNRLKASHPELEVNNTYGYRTKHARIANDIAKSHCADAFCIAGNLGAERLGEFFFQKQTRRNNRQSHKLSILKGGIRKRNQAPFEVNGFRLFDKVACKGEEGFIFGRRSSGFFDVRKLDGTRISAGISYKKLHLLEKRRTYLTEIRKEEVLPPLPEGRGLRA

SEQ ID NO: 2604 - protein, 431 aa, unidentified
  REGION 1..431: note = Human gut metagenome
MPDKVYVISRLGHPLMPCSPAKARHLLDDGKAKVVKRTPFTIKLLYGSTEYTQPVILGVDAGSKTIGLSASTTKEELFAAEVMPRNDVVENLSTRREFRRARRNRTTRYRKPRFNNRVHSKNNGWLAPSVEVKIQEHITSIKRVCAILPISKIVVETAEFDLQLLKAVQDGKPVPEGEDYQKGEMYGSYDVRQYVLWRDNYTCTCCGVKGTDKKSVKLHVHHFESRKHGGNAPDNYGTLCEDCHKKLHLGIITDISLKTRKRPSTRGAAFMGIMRKTLMQRLITGLSIPVAETKGYITKAAREEILKLPKTHTNDALAIAQGRHGFGIREQAYVKPTNRIYTVRPVRHHNRQLHKATMLKGGIRKLNQASKYIFGFRLYDKVLYQGGECFVWGRRRSGSFLLRTIDGTKVKDGVGYRNLTLLERSTNYLIA

SEQ ID NO: 2605 - protein, 413 aa, unidentified
  REGION 1..413: note = Human gut metagenome
MTSYAFVLDANGKQLAPTKEQKAWFFIRKKRASLVSKYPIVIQLMKEIPEKEICQDEIRCGIDDGGLHVGIALVQKCKTKNKVVFKGTMEQRNDVKHLMEVRRGYRRYHRYHKRYRQARFDNRKSSKREGRIAPSILQKRQATIRVIHWLNKWINITNYWLEDVSVDIRALTDGYQSYRWQYQKSNRLDENIRKAAILRDGGKCMECGKSNCRLEVHHIKPKRRNGSNTLDNLITLCESCHQKTEGQEELYMDRYFSLLKSSDNKNLNYAQHVMIGKMWLRKQLSGLGVLYLTSGGDTANKRIDWNIEKSHANDAVCITDLRPDTCDVKEWTMKPMRRQSKAKTDHVLGIHHRDLVEYTFKNGETHRGYVTALYPEQKAINFQSPTKHCKKVNARKCKLLWKYSKIYWFENAS

SEQ ID NO: 2606 - protein, 411 aa, unidentified
  REGION 1..411: note = Human gut metagenome
MENKIEYCFVIDKNNKPLAPTKVNKGWYLIRKGRAKLKSKYPMVIQLEKEVKSNEDDESHMVCGIDDGSTHVGLAIVQKCLTKNKVVFKGTIEQRQDVKRLMDVRRGYRRYHRCHKRYRQARFNNRSSSKRTCRLAPSIKQKKDAILRVLYQLNSWIDIQEYYLEDVCIDIRAMTDDYKPYRWQYQKSNRLDENLRKATILRDGCRCQECGKSNCILEVHHIRARRYGGADTIGNLITLCKKCHDKTESREKDFEEGYFNMIKSKPKRFDYAMHVMQGKTYLREKISELGILHLTNGGETANKRIEWNIVKSHSNDAICITDGIPDTCDIKEWIIKPMRRKSKAKTDNVLGIKHRDLVSYTYKSGETHTGYVTALYPEQLALNFQSKTKHCKKVNARKCRLLWKFNKIYWL

SEQ ID NO: 2607 - protein, 455 aa, unidentified
  REGION 1..455: note = Human gut metagenome
VLQTTNPFQHWRRITTDRKVEQTEPVRYPSMENTLKVFVLNMRGQPLMPCSPPKARKLLRAGKAVPVRRTPFVIQLAVPTGEAKQPITLGVDAGYKHVGLSATTAKEELLASEVELRQDVTGLLSNRLALRRARRNRKTRYRAPRFDNRVRSKHKGWLAPSVENRIQAHISRIEAVCRVLPITKIVIETASFDIQKIKNPEVEGTDYQQGEQLGFWNVREYVLFRDGHVCQACKGRSKDLILNVHHIESRKTGGDAPGNLITLCEACHKAYHAGKLKQFSPRRGASFRAETFMGIMRWTVLNRLRERHPELPVTNTYGYLTKHKRIVAGLPKTHCADAFCIAGVLDAKRRGEYLFQKQTRRHNRQIHKLTILKGGVRKRHQAPYLVHGFRLFDKVLCKGEVGFIFGRRSSGAFDVRRLNGTKISAGISYKKLSLLEKRKMFLTELRKEGRDSSRV

SEQ ID NO: 2608 - protein, 426 aa, Geobacter sp.
MNGVLVVSNTRKPLMPTSQARARMLLTIGKAAVLRRFPFTIILKDRADGNVQPVRVKVDPGSRETGISLVNEANGVLIFAMVLVHRGRQVKSSLDSRRAIRRSRRNRNTRHRAPRFDNRARAKGWLPPSLQHRVETVSTWTKRFGRFAPIVSVSMELVRFDLQQMENPEICGVEYQQGTLAGYEVREYLLGKWDRRCSYCGAENVPLQVEHIVARTNGGTNRINNLCLACEPCNVRKGTQLIDVFLKKKPEVLAKVLALAKHPLMDAAAVNATRWALFTRLKDSGLPIEAGSGGKTKFNRSLQGYPKAHWIDAACVGQTGEAVILNPNLIPLVARATGHGCRQVTRTDRFGFPRQAAKAGGSAFGFRTGDMVRAVVPKGKHVGVHVGKVAIRATGSFDVLKKIGRAGGISYKHCQIIHRRDGYVYF

SEQ ID NO: 2609 - protein, 413 aa, unidentified; identical to SEQ ID NO: 2605
  REGION 1..413: note = Human gut metagenome

SEQ ID NO: 2610 - protein, 421 aa, unidentified
  REGION 1..421: note = Human gut metagenome
MVYVLNRIGQPLMPCKEAKARKLLKNHKARVDKREPFTIQLLFDCENRIQDITLGIDAGSKHLGLSATTEQKELYAADVELRSDIVELLSTRRQYRRTRRGRLRYRAPRFCNRVRSRNKGWLAPSVEQKIKTHLRVVNDVCRILPVSKIIVETAAFDVQKIENPDISGEGYQQGSQLDFWNVREYVLWRDNHECQCCHGKSMDKILNVHHIESRKTGGDSPKNLITLCKNCHDQYHMGKINPNLKCREPLRDAAFMGIMRWSFYNRLKNEYLNVSMTYGYITKNTRIQHDLPKEHYTDARCISGNPQAEPLGYYFCQKKVRCHNRQIHKANIQKGGIRKRNQAAYLVKGFRLFDKVRYDNQAGFVFGRRANGYFDLRKLNGEVIHRSASYKKLELLDTRKTLLTERRQAVPLKAKAMSIPA

SEQ ID NO: 2611 - protein, 306 aa, unidentified
  REGION 1..306: note = Human gut metagenome
LAPSVEVKIQEHITSIKRVCRILPVSKVVIETAEFDLQLLKAIEEGKPVPQGEDYQQGEMYGHYNVRQYVLWRDGYTCQCCGAHATKKKEVRLHVHHLESRKVDGDAPDNQVTLCESCHEKLHKGLIAEKDFKKRKRKSTRDATFMGIMRKTLMQRLCSELPIPVIETRGYITKATREKLLVLPKSHTNDALAIAQGKQGFNVGYLPGIVQINKIYTIRPVRHHNRQLHKATILKGGIRKSNQTEKYVFGYCLFDKVQFNGQDCFIWGRRTTGIFTIKTINGKMIKDGISFKKLKLLEKSTSYLIA

SEQ ID NO: 2612 - protein, 325 aa, unidentified
  REGION 1..325: note = metagenome
RKTRYRAPRFDNRIRTKRKGWLAPSVENRINAHLSRIETVIRLLPVTKISVETTSFDMQLLKNSDIAGKEYQESEQLGFWNVREYVLFRDGHVCQHCHGRSKDPVLNVHHLESRRTGGDSPGNLITLCETCHKELHRGEITLKAKRGQSFRAETFMGIMRWEVLDRLKASHPKLEVQNTYGYRTKHARIVNGIAKSHCADAFCIAGNLGAERLGEFLFQKQTRRNNRQIHKLSILKGGIRKRNQVPFEVKGFRLFDKVACKGEEGFIFGRRSSGYFDVRKLDGTRISAGISYKKLRLLEKRQTYLTEIRKEEALPPLPEGRGLRA

SEQ ID NO: 2613 - protein, 408 aa, unidentified
  REGION 1..408: note = Human metagenome
MVYVQDIDGKPMMPTTRHGKVRRLLKDSKAVVVNTCPFAIKLMYKTSDYKQEIVLGVDAGTKHVGLSATTKSKELYASEVILRSDVVELLSTRRELRRTRRNRLRYRKPRFDNRVKNKYHGWVAPSVRYRIDVHIRIIDSICSILPISRIIVEVAQFDTQKIKNPDIYGNEYQEGDQLGFWNVREYVLARDGHKCQHCKGKSKDPILNVHHIESRKTGGDSPSNLITLCETCHKEYHKGNIDLKVKRGKSLRDAAVMGIMKWKLYDELKSRCDNVSMTFGYITKYNRIKYGIEKSHISDAFVISKNFNALMLEYHYKVKLVRRHNRQIHKQKVLKGGVKKPNQSPFEVFGFRLFDRVMFEGNCYFIFGRRKSGSFNIRDIDGGNQRDVTYKKLKLLRCKRFMIQKETN

SEQ ID NO: 2614 - protein, 424 aa, Moorena sp.
MRVFVLDKNKKPLDPCQPARARILLKQGKARVLKRYPFTIIMPELEVKNCVTHEHQLKIDPGAKTTGLAIVQDNKVVWGAELTHRGFQIRDALISRRRLRRSRRNRKTRYRQPRFLNRKRSVGWLAPSLMSRVHNILTWTKKLSRLCPIVGISQELVRFDTQKMENPEISGVEYQQGTLYGYELREYLLEKWNRQCAYCGAANTPLEIEHIKPLARGGSNRVCNLAIACHKCNQTKGVQEIEQFLSGKPSVLKRVLAQAKKPLANAAAVNSTRWKLYNHLKSTGLPIETGSGGLTKYNRCRQNLPKTHWLDAANVGKVDNLYIESYQPLLITAKGHGTRQMCRTNKFGFPTRYVPRYKEVKGFQTGDIVKAIVTKGKKIGTYTGRVATRQTGSFNISTKPGLVQGISHKYCSVIHRKDGYYYSL

SEQ ID NO: 2615 - protein, 447 aa, Marinobacter sp.
MSVFVLDRRKQPLMPCSEKRSRLLLGRGRALVVRAYPFTIRLKDRTGGIVQPVRIKIDPGSKTTGIAVVRESGQKQHVLALMELAHRGRQISKSLEQRRAFRRRRRSQLRYRAPRFLNRTKPRGWLAPSLQHRVDTTKSLVNRLRSLVPVESISQELVRFDTQKMENPEVSGVEYQQGTLLGYEVREYLLEKWGRECAYCTGKDTPLQIEHIDPKANGGSNRISNLTLACRPCNQEKGRQPLADFFASSKRLKNHQARLDRILKQCKKPLRDASAVNSTRWALYQTLRKTDLKVEVGTGGRTKFNRRRLNIPKTHALDAACVGEVEIVEGWNVPTLEIKATGRGSYQRTRLTRYGFPRGYLIRQKKVQGFQTGDMVRAVVPTGTKAGTWLGRVAVRKTGSFNIQTSSGAIQGISHRHCVLTQRADGYGYHIQPNQPKEEGDREHESR

SEQ ID NO: 2616 - protein, 502 aa, unidentified
  REGION 1..502: note = Human gut metagenome
MSIIYVQDRHGKPLAPTTRGGHVRRLLDSKQARVVCGNPFTIRLMYGVDPCTQGFILGIDPGRTNIGVTVAAADGTCVFSAKAETNNKDVPKRMKERKAHRQASRQGERKRRQRRARKNGTCFGERKRILPGCKEPITNHYITNTEARFMNRARTKGWLTPTANQLLQSTISLVRKVCKFLPVTDVVLELNEFAFMAMDDPGIQRWEYQKGPLYGYGSVEAAVYTQQDGHCIFCEQAIAHCHHVIPASKGGSDTLENRAGLCGGHHDLVHKEQSWTDKLAELKAGMNKRYAALSVVNQIIPRLADELGKMFPGHAFATNGWSTKQFRDAHGIPKDHNTDADCIACSILENPTIKLPEKVYELRKFRRHDRAQISRMEDRNYYLPGADPKTGKPKKVLAAKNRHKRTEQKTDSLEEFRAAHPNDVGRLMVARGGPKHKDPNRVLPGAIFQVETSSGNVEQLVLQGSHGRDKNGQPLYMEFVGQGNFRPNRCKYVARGRGWQFV

SEQ ID NO: 2617 - protein, 415 aa, Bacillus sp.; identical to SEQ ID NO: 2431

SEQ ID NO: 2618 - protein, 450 aa, Scytonema sp.
MSNYVFLIDQNKTPLNPVHPAQARKLLDSGKAAVFRRYPFTLILKRIIENPNVYPLTLKIDPGSKFTGIVLVTNQGNVIWGMELQHRGQQIKDALEHRRAVRRGRRNRNTRYRKARFLNRKLNHGWLAPSLRHRVLTTETWVKRLQKFAPIGSIVQELVKFDTQVIQNPEISGTEYQQGTLHGYECREYLLEKWNRQCAYCGVKDVPLEIEHIQPKSKGGSDRISNLCLACHKCNQRKGNKDIKDFLKGKPEVLNRILKQAKAPLKDAASVNSTRWVLFNILKSFGLPVRTGTGGQTKFNRIQFDLPKAHWIDAACVGQCSAVDGFPVAGNCRSRSVSEGLTRKGVVETIKLATTKILRVKATGFGGRQRCQTDKFGYPQKHRPLRPILGFCTGDIVRADVLKGKYAGTFTARVCPMSHGYGEFVIDKKRRSIKLDYLTPVHRKDGYDYA

SEQ ID NO: 2619 - protein, 453 aa, Halomonas sp.
MSVFVLDKQKHPLMPCSEKRARLMLERGRAVVHKRYPFTIRLRDRIGGETQRLALKLDPGSKATGVAVVRSSAEGQHVLSLFELLHRGFQIREALTQRRAFRRRRRNQLRYRAPRFNNRTRREGWLPPSLQHRVDTQLAWIHRLRLLGPITELAQELVRFDMQQMQNPEISGVEYQQGTLMGYEVREYLLEKWGRECAYCGTTDTPLETEHVVPRSRGGSHRVSNLAIACHDCNQAKGNDSLETFFSRDKGLKTRLKANKLSAETRYQRVIREQKRPLRDASAVNATRWALHGALANTGLPVEIASGSQTKFNRRQLGVPKTHALDAACVGQVNALHGWQVPTLSIKAMGRGSYQRTRLTKHGFPRGYLMREKRAKGFQTGDMVKAIVPTGKKAGTHVGRVAIRKSGSFNIQNEHGAVQGISHKYCSILQRGDGYRYHRKSSIHQQGEGKRAA

SEQ ID NO: 2620 - protein, 432 aa, Moorena sp.
MRVFVLDKNLKPLDPCRPARARLLLKQGRAKVYRKYPFTIIILDLEEENCVTHKHQLKIDPGAKTTGFAILSPQGTLREQNNVVIWGAELTHRGFKIRDALTSRRQLRRGRRNRKTRYRKSRFLNRSRPDGWLPPSLMHRVLTTITWVKKLIRLCPISGLSQELVRFDMQKIENPEIKGYEYQQGELQGYEVREYLLEKWGRKCGYCGASDTPLEVEHITPKSKGGSDRVSNLTIACHDCNQTKGNQEIEQFLSGKPEVLKRVLSQVKKPLADAAAVNSTRCSLYEELKLTELPVETGSGGLTKYNRCRFNLPKTHWLDAACVGVVDSLYVEVKKPLLIAAKGHGTRQSCRTNKYGFPTRHCSRTKIHKGFQTGDIVKAIVTKGKKIGTYVGRVATRKTGSFNISTVNGLIQGISHKYCSTVHRKDGYSYSF

SEQ ID NO: 2621 - protein, 368 aa, Moorena sp.
MHVFVLDKDKIPLAPCHSAKARRLLKFRRASVFRRYPFTLILHEIEAKDCVVPETQLNASAPLASTSLSVESERSRGLKIDPGSKTTGLAILSENRVIWAAELAHRGQQIKNDLEKRRALRRSRRHRKTRYRKPRFLNRTRQKGWLAPNLLHRVETILTWVNRLRKLCHVAAISQELVRFDTQLLQNPEVQGVEYQQGELLGYEVREYLLQKWGHKCAYCGTENQPLEVEHIVPKSRGGSDRVSNLTLACHSCNQAKENRDIREFLSGKPSILNHILKQAKVPLKDAAAVNSTRWKLYQQLKETGLPVEVGTGGLTKFNRTRSGLPKTHWRIGGLCREIDSRSIRCRGRETFTRCSQRSRSSATMSFR

SEQ ID NO: 2622 - protein, 406 aa, Scytonema sp.
MVKPRYARKFPFTIILKESRPDVPVQPLRIKIDPGSKTTGIAVINDSTGEVVFTADLKHREFSVRVALTSRRQLRRSRRARKSRYRQPRFNNRKRPDGWLPPSLMSRVYNIQTWVRRLMRLAPITAISQELVKFDTQLMQNPALCGKEYQQGTLAGYETREYLLEKFGRKCVYCDKQDVPLQIEHIHPRAKGGTNRISNLTLSCEKCNIKKGTKDIKDFLKKDPEHLKKIEAQAKKPLADTAAVNSTRFKLLEVLKSTGLLVETGSGGLTKFNRTKLELPKTHYFDAACVGRSTPDKLIVKGVKPLIIKATGHGSRQMSVTDKFGFPKSHKTNTKFHFGFTTGDIVRANVPKGKNAGTYTGRVTTRKIGQFDINTGTKTLQIINHKYCTVLQRHDGYLYLLSSIVH

SEQ ID NO: 2623 - protein, 419 aa, Geobacillus sp.
LFVYIINKHGKPLMPCSPRKARLLLKQKKAKVVRRTPFTIQLLYGSSGYKQPVSLGVDMGTRHVGISATTKKDVLFEAEAQLRTDIVELLAIRRQFRRSRRNRKTRYREARFLNRRKPEGWLPPSIQHKINSHIKLIDLVHNILPVTSVTIEVAAFDTQKLKNLNIRGVEYQQGEQMGFWNVREYVLYRDNHTCQYCKGKKKDPVLQVHHIESRKTGGDSPDNLITLCKTCHHEIHEKGLEHIFQRKRPPMRDASQMTAMRWAMFSRIREKYSHANITYGYITKCIRIANGLSKSHMVDARCISGNPLAKPSGTVYLLKFVRKNNRQLHKATILKGGKRKSNKAPRFVKGFQLFDKVVYERKECFIFGRRSSGYFDLRLLDGTKVHASASWKKLKRVEHASTLLIERRKGDSSPTFALA

SEQ ID NO: 2624 - protein, 423 aa, Moorena sp.
MRVFVLNKNRQPLDPCKPARARILLSAGKAKVYRRYPFTIILTEEIKNPVTHEHQLKIDPGAKTTGLAIIQGQRVIWGAELTHRGFQIRDNLTSRRQLRRSRRSRKTRYRKPRFSNRTRPKGWLAPSLTSRVQNILTWVKKLIRFCPVTGISQELVRFDTQKLQNPEISGIEYQQGTLYGYELREYLLEKWNRKCAYCGATGTQLEIEHIKPKSRGGSNRVSNLTIACHSCNQAKSNQDIELFLSKKPSLLKRILRQAKRPLADAASVNITRWKLYYDLKSIGLPVEVGSGGLTKFNRCRQSLPKAHWLDAANVGKVETLIIEVTLPLLITAKGHGTRQLCRTNKYGFPIRHCSRIKFHKGFKTGDIVHAVVTKGKKVGTYVGRVATRKSGSFNISTKLGLVQGISHKYCQFIHRKDGYAYGI

SEQ ID NO: 2625 - protein, 477 aa, Moorena sp.
MSNFVFVLDTNRQPLTPCHPARARELLAKGKAAVYRRYPFTIVLNRAVGDVPPESQLNASTPLASTSLASTSLSVESSTPLRLKIDPGSQTTGLAVVNGNQLVWGAELQHRGDRIQAKLETRRVCRRNRRNRQTRYRKPRFLNRTRPKGWLPPSLNASAPLSVESERSRGLNHRVKTTLTWVNRLRKLCPIASISQELVRFDTQKLQNPEISGAEYQQGELFGYEVREYLLEKWGRKCAYCSTENVPLEVEHIHPKSKGGNDRISNLTLACRPCNQSKGNRNVREFLSGKPSVLDCLLRQAKAPLKDAAAVNATRWKLYQRLKETGLPVEVGTGGQTKFNRTRLELPKAHWLDAACVGETPSLHLVTETPMAILSKGRPTRFRTLIDRYGFPRAVRKTKAQVNGLQAGDIVRATVPNGKYRGQWTGAIAGVREKRPPALRPFGGKQLDLTAQTQIHVIHKQDGYEYGINPCGHSSRR

SEQ ID NO: 2626 - protein, 427 aa, Scytonema sp.
MCKVFVLDTEKRPLNPVHPAQARQLLRNGKAAIFRNFPFTIILKEARLDAPIQSLRLKIDPGAKYTGMALVNDSTGEVVFAAELKHRGFAIRDALTSRRQLRRSRRNRKTRYRQPRFDNRKRPDGWLAPSLQSRVDNIKTWVKRLFKVAPIEAISQELVRFDMQLMRHPDIQGKEYQQGTLAGYETREFLLEKWNRQCAYCGIKDVPLQIEHIHPRAKGGTNSITNLTLSCEKCNKKKGTKDIKEFLKKDQSRLERILKQSKRPASDAAAVNTTRFALLDVLKTTGLPVETGSGGLTKFNRNQQGLPKTHWLDAVCVGSSTPILNIKCVKPLMITANGHGTRQMCGTDKFGFPSRHRTNKQIHFGFQTGDIIKAVVTSGKKVGEYVGRVLCRATGSFDIATKTGRISGISYKYCSATHKKDGYSYGF

(The sequence listing continues in the following parts.)

1. A non-naturally occurring, engineered composition comprising a) an IscB polypeptide comprising a split Ruv-C nuclease domain comprising RuvC-I, RuvC-II, and RuvC-III subdomains, an HNH domain or both and b) an ωRNA molecule comprising a scaffold and a reprogrammable spacer sequence, the ωRNA molecule capable of forming a complex with the IscB polypeptide and directing the IscB polypeptide to a target polynucleotide.

2. The composition of claim 1, wherein the IscB polypeptide comprises a PLMP domain and optionally a conserved C-terminal Y domain.

3. The composition of claim 1, wherein the HNH domain is located between RuvC-II and RuvC-III subdomains.

4. The composition of claim 1, further comprising a bridge helix domain, optionally wherein the bridge helix domain is located between the RuvC-I and RuvC-II domains.

5. (canceled)

6. The composition of claim 1, wherein the IscB polypeptide comprises about 170 to about 600 amino acids.

7. The composition of claim 1, wherein the IscB polypeptide is no more than 500 or no more than 600 amino acids in length.

8. The composition of claim 1, wherein the reprogrammable spacer sequence comprises a spacer of 10 nucleotides to 150 nucleotides in length, preferably 12 to 50 nt, more preferably 15 and 45 nt in length.

9. The composition of claim 1, wherein the composition recognizes a target adjacent motif (TAM) sequence 3′ of the target sequence.

10. The composition of claim 1, wherein the engineered IscB polypeptide is a nickase comprising a catalytically inactive RuvC domain, optionally selected from Table 1C, or a catalytically inactive HNH domain, optionally selected from Table 1D, and optionally comprising at least two wRNA molecules targeting opposite stands of a double-stranded target polynucleotide such that the IscB complexes formed generate a nick on opposite stands either side of the target sequence.

11. (canceled)

12. The composition of claim 1, further comprising a homologous recombination donor template comprising a donor sequence for insertion into a target polynucleotide.

13. The composition of claim 1, wherein the engineered IscB polypeptide is a catalytically inactive IscB (dIscB) comprising a catalytically inactive RuvC and catalytically inactive HNH domains, optionally selected from Table 1E.

14. A polynucleotide encoding the IscB polypeptide and/or the ωRNA of claim 1.

15. A vector system comprising one or more vectors encoding the IscB polypeptide and the ωRNA molecule of claim 1.

16. An engineered cell, or progeny thereof, comprising the composition of claim 1.

17. A method of contacting a target polynucleotide sequence in a cell, comprising introducing to the cell the composition of claim 1;
optionally, wherein the IscB polypeptide and/or nucleic acid components are provided via one or more polynucleotides encoding the polypeptides and/or nucleic acid component(s), and wherein the one or more polynucleotides are operably configured to express the IscB polypeptide and/or the ωRNA molecule;
optionally, wherein the contacting comprises cleaving a DNA polynucleotide,
optionally, wherein the cleaving results in 5′ overhangs; and
optionally, wherein contacting results in modification of a gene product or modification of an amount or expression of a gene product.

18.-21. (canceled)

22. An engineered, non-naturally occurring composition comprising:
a. an IscB polypeptide,
b. a functional domain selected from the group consisting of:
(i) a nucleotide deaminase associated with or otherwise capable of forming a complex with the IscB polypeptide;
(ii) a reverse transcriptase associated with or otherwise capable of forming a complex with the IscB polypeptide;
(iii) a non-LTR retrotransposon protein associated with or otherwise capable of forming a complex with the IscB polypeptide; or
(iv) an integrase protein associated with or otherwise capable of forming a complex with the IscB polypeptide, and optionally a reverse transcriptase, and
c. a ωRNA molecule molecule capable of forming a complex with the IscB polypeptide and directing site-specific binding of the complex to a target sequence of a target polynucleotide,
wherein the functional domain is the functional domain of paragraph (i) or (ii) and the the IscB polypeptide is catalytically inactive, or
wherein the functional domain is the functional domain of paragraph (ii) or (iii) and the ωRNA molecule further comprises a donor template encoding a donor sequence for insertion into the target polynucleotide, or
wherein the functional domain is the functional domain of paragraph (iii) or (iv) and the donor template and is located between two binding elements capable of forming a complex with the non-LTR retrotransposon protein or the integrase protein.

23. The composition of claim 22, wherein the functional domain is the functional domain of paragraph (i) and the IscB polypeptide is selected from Table 1E.

24. The composition of claim 22, wherein the functional domain is the functional domain of paragraph (i) and the nucleotide deaminase is an adenosine deaminase or a cytidine deaminase.

25. One or more polynucleotides encoding one or more components of the composition of claim 22.

26. One or more vectors encoding the one or more polynucleotides of claim 25.

27. A cell or progeny thereof genetically engineered to express one or more components of the composition of claim 25.

28. A method of editing nucleic acids in target polynucleotides comprising delivering the composition of claim 22, wherein the functional domain is the functional domain of paragraph (i), one or more polynucleotides encoding one or more components of the composition, or one or more vectors encoding the one or more polynucleotides to a cell or population of cells comprising the target polynucleotides;
optionally, wherein the target polynucleotides are target sequences within genomic DNA; and
optionally, wherein the target polynucleotide is edited at one or more bases to introduce a G→A or C→T mutation.

29.-30. (canceled)

31. An isolated cell or progeny thereof comprising one or more base edits made using the method of claim 28.

32.-34. (canceled)

35. A method of modifying target polynucleotides comprising;
delivering the composition of claim 22, wherein the functional domain is the functional domain of paragraph (ii), one or more polynucleotides encoding one or more components of the composition, or one or more vectors encoding the one or more polynucleotides to a cell, or population of cells, comprising the target polynucleotides, wherein the complex directs the reverse transcriptase to the target sequence and the reverse transcriptase facilitates insertion of a donor sequence encoded by the donor template from the ωRNA molecule into the target polynucleotide,
optionally, wherein insertion of the donor sequence:
a. introduces one or more base edits;
b. corrects or introduces a premature stop codon;
c. disrupts a splice site;
d. inserts or restores a splice site;
e. inserts a gene or gene fragment at one or both alleles of the target polynucleotide; or
f. a combination thereof.

36. (canceled)

37. An isolated cell or progeny thereof comprising the modifications made using the method of claim 35.

38. (canceled)

39. The composition of claim 22, wherein the functional domain is the functional domain of paragraph (iii) and the IscB protein is fused to a N-terminus of the non-LTR retrotransposon protein.

40. The composition of claim 22, wherein the functional domain is the functional domain of paragraph (iii) and the IscB polypeptide is engineered to have nickase activity;
optionally, wherein the ωRNA molecules direct the engineered, non-naturally occurring composition to a target sequence 5′ of a targeted insertion site or to a target sequence 3′ of the targeted insertion site, and wherein the IscB protein generates a double-strand break at the targeted insertion site;
optionally wherein the donor polynucleotide further comprises a polymerase processing element to facilitate 3′ end processing of the donor polynucleotide sequence; and
optionally wherein the donor polynucleotide further comprises a homology region to the target sequence on the 5′ end of the donor construct, the 3′ end of the donor construct, or both, optionally wherein the homology region is from 8 to 25 base pairs.

41.-47. (canceled)

48. A method of modifying target polynucleotides comprising;
delivering the composition of claim 22, wherein the functional domain is the functional domain of paragraph (iii), one or more polynucleotides encoding one or more components of the composition, or one or more vectors comprising the one or more polynucleotides to a cell or population of cells comprising the target polynucleotides, wherein the complex directs the non-LTR retrotransposon protein to the target sequence and the non-LTR retrotransposon protein facilitates insertion of the donor polynucleotide sequence from the donor construct into the target polynucleotide,
wherein insertion of the donor sequence:
a. introduces one or more base edits;
b. corrects or introduces a premature stop codon;
c. disrupts a splice site;
d. inserts or restores a splice site;
e. inserts a gene or gene fragment at one or both alleles of the target polynucleotide; or
f. a combination thereof.

49. (canceled)

50. An isolated cell or progeny thereof comprising the modifications made using the method of claim 48.

51. (canceled)

52. The composition of claim 22, wherein the functional domain is the functional domain of paragraph (iv) and wherein the IscB protein is fused to the integrase protein and optionally the reverse transcriptase.

53. The composition of claim 22, wherein the functional domain is the functional domain of paragraph (iv) and wherein the IscB polypeptide is engineered to have nickase activity;
optionally, wherein the ωRNA molecule directs the engineered, non-naturally occurring composition to a target sequence, and wherein the IscB polypeptide generates a nick at a targeted insertion site;
optionally, wherein the donor polynucleotide further comprises a homology region to the target sequence on a 5′ end of the donor construct, a 3′ end of the donor construct, or both.

54.-57. (canceled)

58. A method of modifying target polynucleotides comprising;
delivering the composition of claim 22, wherein the functional domain is the functional domain of paragraph (iv), one or more polynucleotides encoding one or more components of the composition, or one or more vectors comprising the one or more polynucleotides to a cell or population of cells comprising the target polynucleotides, wherein the complex directs the integrase protein to the target sequence and the integrase protein facilitates insertion of the donor polynucleotide sequence from the donor construct into the target polynucleotide,
optionally, wherein insertion of the donor sequence:
a. introduces one or more base edits;
b. corrects or introduces a premature stop codon;
c. disrupts a splice site;
d. inserts or restores a splice site;
e. inserts a gene or gene fragment at one or both alleles of the target polynucleotide; or
f. a combination thereof.

59. (canceled)

60. An isolated cell or progeny thereof comprising the modifications made using the method of claim 58.
